United States Patent Application Publication US 2011/0183924 A1 - sequence listing, part 212

SEQ ID NO: 524128 - DNA, 332 bp, Homo sapiens
gcaggagcttacaggtatcccacccgaatacaggtacgtatcactgagtggtaaaaaactccagtcgacacaaaatagactacgaaaggggctttaacatatctgaacacacaatagctaagacccaaatatgggattagataccccagctatgcttagacctaaagcactcaatcagttaaatcaagcaaaactgctcgcgaagaacactacgagtccacagctttaagaactcaagaggacctgcgcggctgcttcactatcccgtctagaggtagcctgcttcatgtaaatcgcataacaccccgactcagacctcacacacctgtctt

SEQ ID NO: 524129 - DNA, 154 bp, Homo sapiens
tccctgcataacatagatttcttaaacctaattgaaaataaattcatttttttaaaaaacctcctacaggggttcctccttaattcaaaattttatcatggatactggattttctcgtacatacatagggctaaggtgggtttcttaccacatt

SEQ ID NO: 524130 - DNA, 503 bp, Homo sapiens
  misc_feature (17)..(17): n is a, c, g, or t
ctctgcgcggggagcanttggtgcgtgacgtgcgcatacccagatctacgaaggtaccaacggcattcaggccctggatctgatggggcgcaagatcgtcggcagcggcggtgcgttctataccatgttcgccgatgagatccgccagttcatcgccgcatcgggccctgagttggccgagttcaccaagcccctgggtgtggcagtaggtaacctggatgagctgacggcctgggtgctggaccgcgccaagagcaatcctaatgaaatcggcgcagcctcggtggaatacctgcatgccttcggctacatggcctatgcctatatgtgggcgcgcatggccaaggcggcgttgggcaaggaaggcgaagaggatttctacgccagcaaactgggaactgcgcgtttctacttcgcccgtctgttgccgcgtatccactcgttgagtgcgtcggtaaaagccggtagcgaatcactgttcctgatggatgaagccctgtttt

SEQ ID NO: 524131 - DNA, 102 bp, Homo sapiens
gacggttccgaatctcgccagtagtgcaggaggatatgccgcatgtttcaggtttctgagtagcaggcaatgcatccgtcaatcataggccatcgcccggat

SEQ ID NO: 524132 - DNA, 191 bp, Homo sapiens
ggggcttcagattttatgattacatcttgtcccctagaacataccccttcctcccaataactgcttttaaaacagatgcccaaagaagggcaaagcgaggaatgcctctttgttggggggagggcagggcggaaataactagtttcaaaccaactatctatctatgctttgcaaagactaaggcgtattat

SEQ ID NO: 524133 - DNA, 442 bp, Homo sapiens
  misc_feature (79)..(79): n is a, c, g, or t
  misc_feature (169)..(169): n is a, c, g, or t
  misc_feature (239)..(239): n is a, c, g, or t
  misc_feature (333)..(333): n is a, c, g, or t
tacggcacgaggggtagcgcaagtgggtctcaaccactatatatactctctgtgcccgtgcgcagctgttgaggacagnctgtcacagactgtgctctgtacactatgggcacacgactcctcccagatctgtgtcttgtgctcctgggattgggatttgaggtccagnggacccaacaggcccagcaagatgagatgcctagcccgacctttctcacccaggtgaaggaatctctctncaggtactgggagtcagcaaagacaggcgcccagaacctgtgccagaagacatacctggccgctgtagatgagaaactcaaggacttgtacagntctgtgctgaagggagaggagtaacaggcagaccccccattagtggacaaggggagagagccctacttccctgagaccccaggttcagactgagcttccccttcccggg

SEQ ID NO: 524134 - DNA, 370 bp, Homo sapiens
agtatgtcctcacgtaagatactgccaaactgtcttccaaagtggctgtaccatttcgcattcccatcagcaatgaattacgagttcttgtagctccatatacttgtcgagcatattgttgtggtcagatattttgtgagtttggtcattctaactcggtgtgtagtagtatctcattgttgtgttaatctgcagcttcctaatgacctatgatgtggaggagtatctttttatatgcttacttgccatctgtatgtgttctttggtgaagtgtcccattcaggtcttttgctcatcaatacattaggttgtctgtaatgttgttcttataatggtagagtttaaaaagttaccttgaatttttttggga

SEQ ID NO: 524135 - DNA, 983 bp, Homo sapiens
tacgccggtgcagcggggtgggcccgtgagtgccctggtggccctgggatggggaacctgcggtggcttccgctggaggtttcggcagtggcattctggtggccgtgggtcgctggcctgtggacgggggcctggggcctgatggcctgcggatgcatcgctggatgtgcaatggcctgaggataaggagtggatgcccgtcaccaacgttggtgcctgcttgtgtcaatggacattgaacgatcaagtccctggatggagatctatctcttctccctgcccattaacggaatcacgagatcatttgatttcttcctggtgaggcctctctcaaggatgacggttttgaacgattatgccatgtgcacgaatgcatgaccctgtgcctgtgccagctgcaccaagtgttcacaggcaatttgttagctattcggggactacaaatggcacactgtcaggatctgaggtagttaacgttgctccagaggagagtggccatccgacaatccagtagggagcccatcatccttggccaaagcttcatcccagtcagtcccactgttgcgcatgagcgctacatggaagaggacacaaggattcggcaaagccctcacacattgtccctttgcaaagcgtagaccagggcctgattgcaggaaatctgttgcgtggtactgacctcattcccttgcaccacagtgggcaccttggccaattcagtctccggaaccttgtgcctaaagaagcatgctccatgaatgggctggctatcgaatgacttgctacaccttcagacaggagcattgaatgcccaccctgggcaaaatcagccaggccacattagatagcattcttaagacttaaggatacctgagccccgacctcttgacaatgagagttgattcaccaagtttccctaataggagtaaatgacacactcgcagaacaaacagagtttcgggcaaggctcagggccactgtga

SEQ ID NO: 524136 - DNA, 265 bp, Homo sapiens
agcaactttgagggccttttttggagccaggggcaactgcatgggctcaaaaatggcctgcagcttttttaatggccatccctggggcaagtgtttatccacccgggccagggcaacagccccccccctagtacaattgatgctcccttagacaacctgggagacagcctgggtcagccccatcaactcagttgtcccccccaggggaattttgaatgtcttttgtttttgttttgttttgaaaaaaaaaaaacaggcccctgta

SEQ ID NO: 524137 - DNA, 103 bp, Homo sapiens
gatgagctgctccgcttaatcagtagggagcagaatgacaagacctattgtcaaccttgcttcaaataagctcttcccactgtaatgccaactgatcggggct

SEQ ID NO: 524138 - DNA, 201 bp, Homo sapiens
gcctcgctattagacacaccgtgcaggctatgggtgtcctcagaccacatgtacttctcaccaactggctgcaacttgggaggttcccaccatgcccttgaagttcgataactcactaaaacaattcacagaatgcagaacagcatgatactttctttctctttatattttttttttttttttttttttttttatgggggg

SEQ ID NO: 524139 - DNA, 103 bp, Homo sapiens
cacaaaaacaaaaacaaaaaagacacggctcaactgtattacatatatggccatccgttgagcccgaacgacgagcgcagcgagcttaggagcgaggaagcgg

SEQ ID NO: 524140 - DNA, 100 bp, Homo sapiens
ctattcatcggcaccattagctctagaggtccatgtcatacttgattatttatatcttaattcaatacgggtgtcattgggaggtgccgattaatagcga

SEQ ID NO: 524141 - DNA, 369 bp, Homo sapiens
agggggttttttaaacctttaggtgggaattttaatgaggccactgggtaattggaagaatggggtgaaatggccatgatttaaatcccttttagggcctgttaattggatggaaaggtttccaggtggttaaaacttccccaggtcagtttccttttaattcctgtttaattggggttaataggcttacggaagagcaccgtggttaaaaggctacggggagcttcctgtccggggttagaaggtacctagttaaaggttcatttttgagacccaattttaatatttccccattattgggaaggaaattcatatgtccttgaaccttttaggccaaacccaaccaggtaaggagggacctgttgcaaa

SEQ ID NO: 524142 - DNA, 1030 bp, Homo sapiens
tttccggttgtaaggcggcgacgtactcgcctgtgccccggggtaggtgcgccaccgggggaggaggaggaggagaaggttgagaggaagagacgccccctcttcccgagtacctctcaaggcccttatctcatggggccatgtcacgtgacaggacaggagagccaagttcctcctacttgggcttgccctgaatgaggcctgcgaccctatgtatgtgccctgagccctacctgtaccaggggcccctagaaccgaccctggtgggcctaaaagctgacagtctcaggggccatcgctaaggtttccagtttgcctagacaacagtgcccagggtcagatgcaacaagtccttccagcgcatcgtgcctcaattgctgcccctaggcatccagccccagtccctacgctggcagtccagtcccagtgtgacatttcctggtgctctccaggccccgtgccttagctgggggaacacgctttaagcgcacggtgctctgtgctccttgtccctcgcgggctaatggagccctacaaagtctaccccttggtgcgccagtgccttggcccctggccaggggtcttcagtgcgccctgccggggagcccacggcaggaggtgccctccggggtcgctggcgtgccaaagcttggcgatgaaccgggtattcctgcagcggcttcctgttgtctccttctggcttgctgttcccccggggtcctttgccgggagcacgggtctgttggtccattgactcgtgccgtctatggttgagccggcacctttccttgtcgggtgtttgttggccctgctttgactgtgacggcttggcctgctgcagtctgtccggtcaagtgtccgcgcggcgtttttggggctggctggttgtttccgtttggttccttcattcgccatcccttggatacttttcgtaaccggtcgcaatcggttaccttcgaggcccaccttgctctttttcgttccggggcgcgttttgtttcgccatggcatccgcgcttattttcgcggg

SEQ ID NO: 524143 - DNA, 684 bp, Homo sapiens
cattgggaatgatctgctgccaggtgcttttgagcccttaggattcatctcttcttgttcaccgcttagggtggcctggactggcctgtgggatttgcccaactcgtctacttgacctgcgttactgacacggacacgttcttaccttgtgagctcacttcccgctatgtcctcatccataggacctcgtatttgccctcataaagaggcttcattcactgatttcccctatttctcaggctacaacccttagaccccataccttaccgcccgatatccctattcactgatcatatattcatccggcggtaaatctgaactattgcttcgcccaccaaccactttttgcggcctatcccggaatgccccgacggtactcggactaccccgatgctataccacccaccatggaccatcctatcgatctgtaggcgtctattcattgtctctaacagccagtagatattgaataattttcatgatttgagaagcccctcgcttcggaaggcgaaaagtcctaatagtagaagaaccctccataaacctggagtgactatatggatgcccccccccctaccacacattcgcagaacccgtatacataaatttagaccaaaaaggaaggaatcgaacccccccaagctcggtttcaagcccaccccatggcctccctgactttttcca

SEQ ID NO: 524144 - DNA, 111 bp, Homo sapiens
atcaatacagacgggcagtgctgagtcgaacataacatcagtccctagcaatacaagaaacaccagtgactgcgttttacaatacagcagactcccttgaatatggtattt

SEQ ID NO: 524145 - DNA, 1049 bp, Homo sapiens
gtagcccctctttagaggagtcagccggccggggcacagccgggcagggaccacccacggcgagggaagccggacacgactgcccgaggggcccaacgctgatgagtcgcgctctcgcaaccgcagtcatcaaagggcgaccgagcccgtgctgtcctcacagccgcaactattgggactccgcctcaccgcctcatcgtacggtgaacgcccacgtgcaacactcgccccccatgcccggcctttgctccctggaacgcctggggccccaagcctcaggaccggccacaagcttgttctccagaggccttgacccgtcccttccttcccgttctcaccatcccatgcaaccctagcaccttctggggacacagctttctactctcgtggacaacctgaggcaatgtggagaataaccaggccatggagtttgaagtatgtatgccagtctgcctagtgaccacaggcttcagcgtccgcacccctgtctggctatgggcacacacgcacgtgggactcgggcaaagtgggaaccatcctatctctgtcgggagccccaacaaaagctgggaaatgctttgaggaaccaggcctttcccgcttcttatgcctggtcagcagggtagtgctctgccccatgccccacagccctcagtgtgtccacagccgtagtgcatatgcccctcgggggactgaacacacagtcctgtccagaggctgatacgaagcgatttgctccagatgaatgccaggtgggctccgcgttcactcccactctcccgaggggtgctggcctccccagggtttgccttcttacggatttagacgaggttcgaggctcacctatcagggcagctctcaggattgtcattcttcgctcttttgcctgtgggtttaacttttgtattttggtaatcacaagtttgatacaagatgctctttatcgaactctgttcggagatgcccattctacttttgaatttagctattactaagtgtcgtatcttggaagctcagcagtgcacaagcttacttcgtgtccgttggaa

SEQ ID NO: 524146 - DNA, 118 bp, Homo sapiens
gtgttataacactcacaacaaaactaactaatactaacatctcagacctcaggaaatagaaacctgtctgaactatccttgccctattactatccatcctcatcctagcaataatccc

SEQ ID NO: 524147 - DNA, 648 bp, Homo sapiens
  misc_feature (122)..(122): n is a, c, g, or t
agagaattgctactaaaagagagcacctgctcatatcgctacagatgagttctcctgggaagccaggaaaatctcagcaaatacaacaacataacgcattattagattgggggaatccatgnaatcacaggaagtaatagcctccctatttacaagtcgcccaatcaagtagaacatgtaatggaaaaagtctcatttgcaacagcaacaaaaggggataaaatacttggcaattaaaaggaacatgtaggatccacaaactttaaaatgctcctgaggaacacaaacaaacacttcagctggataactatgcccctattcttagaaagtatatcattcagatgtcagtccttaaataatgtataaatttaatgcactccgaataaaagtgccagtagggtggtggtggacacggaggttttaaaagctagacatgctgagtctgaagttcttgtggaatagttgaaacgaagtgtgactaaggacaataaggctgtgctggccttaccagacactaaagtatattctaatgtgacaacatgtaaagtattgtagttctggaatatgaatgtgccaacaaaccagagaaaaccatagacccaagtacttaatttagtatgcaacttaggtagcactgccgtatcagtg

SEQ ID NO: 524148 - DNA, 164 bp, Homo sapiens
ttcgtgtctagaggatcccgtgtgtcgagatagcagcagtggcatgagcctggggtggctcagctctgttggaggcggcagtccaccatcaagtacaccaccacctcctcctccagcaggaagagctataagcactaaagtgcgtctgctaagctctcgtgtcc

SEQ ID NO: 524149 - DNA, 780 bp, Homo sapiens
gctcatggcaagagttagctggagctgagtagcagctgcctgattgagatgactctcagtccccatggcaatcgcgtgctcctatgttacctagagacagagcacttgattccttgctgtcgcaagtatccaataggcatggatttagcccaattcctacactaggtcgaatgtgtacaaagtgtaaatgcatgtaggaaaaaccaaagctacaccgatcgttcggttaggacaggatctgtagcaactaataagttatgagttctgcttgatgtacatctcaacctctagcgtgtgaatgatcactaatatataattccatatatatatctaaccttctggtctgccttctctcaatatgcttacaaaggtcctcaaagtaaacctacgatgtctggctacctcccacgtgagtttcgccggatgcaactttattccatgaagtaggacctttcataaggtaactccagtggcggttgaaactgggttcatgcataaggacagcatagaagtcatgtccactttggctacgggtctccgacagtactggtcgcagcaccagctaacatttttcaagcctggcatctatcatacccaattagaaattaggtcgagaagcggctgtgttgcacgcagccaacgtggcccgttgatgcttagaggaaatgtgcttccttaccagtcacgttggcgggagtccactctgtacctttgggaatctcccaccatattggatggatagtacaagtggtagcgtgcactgcccactatggcacgctt

SEQ ID NO: 524150 - DNA, 219 bp, Homo sapiens
gcgctctcgtgcccaggcgctgccgctccttactcaccgccgaaccgtttagaacggggcagacaagctttagggggttcgtgggggggaccgacgcccaccggagccccgagcgggcaggcggtcgcgctctaaggagcagccagcacccctttctcatcagacacccccacatccaggaggacaatgacatcccgttgtacctgaagggcggcatcg

SEQ ID NO: 524151 - DNA, 576 bp, Homo sapiens
gcccattaggtgaaaaagcctgccttgtctcagataaaccttgggtctgtggaccttttaagttaatgctgaaatgagtaagactttggaagactgttgggaaggccgattggttttgaaatgggaggacatgaaattcggagggcgcaggggtgtgatatggtttgggtgtgtcctcacccaaatctcaactcgaattatatctcccagaattcacatgtattgtgggagagacccagggggaggtaattgaatcatggcagccagtcttttccgtgctattctcgtgatagtgaataagtctcacaagctctgatgggtttatcaggagtttctgcttttgctgcttcctcattttctcttgccaccgccatgtaataagtgccttttgcctcccgccataattctgaggcctccccagccatgtggaactgtaagtccaattaaacctttttttcttcccagcctcaggtatgaatcagcagcatgaaaatggatttgaatacagaagcctaatcaaatttgctgtccctcatgggtctatagatggttaataaaacattggggtaattaacc

SEQ ID NO: 524152 - DNA, 415 bp, Homo sapiens
  misc_feature (45)..(45): n is a, c, g, or t
tttcactatttcagattgatcatcttcccttaaatcaggtctctntggggcttcagaagagcttattttaagagtgtgtgtgtgtgtgtgtgtgtgtgtgtgtgtgtgtgtgtgtgtttgagacagagtctcgctctgtcacccaggctggcgtgcagtggcatgatctcagctcactgcaacctctgccttccaggcacaagcagttctcctgcctcagcctcctgagtagctgggattacagcacccaccaacacacctggctaattttctatttttagtaaagacagggttttgccatgttggcgaggctagtctcgaactcctggacctcaagtggatttcgcctgccttggcctcccaaagtgctgggatttagaggtgcggagcccctgtgcccggtcgagttgttttt

SEQ ID NO: 524153 - DNA, 1244 bp, Homo sapiens
gcggtgcaccccgtgggtcgcggaggagcgctcctcgcttctctccttcccccctgccgcactccgcctggaccctcccagacggacctggaggacatgatacatcggacacatcatccataatacgcccacaggaacaacgtagaacaagaaacaaataaccaaacagatcgaccaaaatacaaaaacagaaacaagtacagaaaaaaacaaaaaccaagaagaaaaaaagagagaacaaaaaacgaacagacagacacagcacacagcagagagacacgaaacaacaaaagagacaaacgaaaaagaaaacaaaacaaacacaacaaccaaggaacaacaagcaaaaccaaaaaaaaaaaaacagagacaacaacaaaaccacaagcaccaagaagcacagaaacacaaaaacacaagaacaaagaaaaacaaagaaaagacaccaaaacaaaagagaacaagagaggaaaaagaaggaagcagaacaaaaggaaaaagaaacaaaaaagaagcgcacgaagagggaagggaaaaagaaaagaggacacagacagcaagggagaggacggacgcacaaccagaaggaacaccgaggaagagcgacgagaagagagaacaaacaaaacgaaaagagaagcgaaaaaggaggagaagagaaagaaacggacgagaaaaccacgagacaaaaacaggagacacaaagaagaaccaaaccggacaagagaagaacaagcgaaaagagcaagaaaagcgaggacaaagaagagaagacaaacaaggaagagcagaagcgaagacacagaacagagagaagaagaaggcaaagacgggaacgagagagaaacgcagagaagcaaaagaaatacgtactgatactaatagaacgatatggagaagagggagacgaaaaggaagaggcaaaaaatagaaagaagaaagataacgaagataaaagagaaaaggaaaaggaggacgaaaggagtgtaaaaatgacgagggaaagagaaagagaggaaaaatggaaagaacagagaagaacagaaacacaacacgaaagcacaaacagcaaaaaggaaacaaccagacggcaaaaagcagcagggaacgaggagaggaagagacagccaagcgacacgaaaagaacgagacggaaaggaaaagaaaaggaggaaaagcaaaaaaaagaaaagaaagaaacaaaaacaaacagaagagacaaagaaaagaagaaaagaaaaaca

SEQ ID NO: 524154 - DNA, 245 bp, Homo sapiens
cagcaactgtacagtaatgaagaataccatgactgttggtacagattgggattaccgcccctgcttcctgctaaggtgtcagcagctttacccaccaatgatttggaccattaatacaaatggtcaccgccgtgacatggggcaaaatgcctcagaattgtctatggcgatggccaggatctcttggagattcttacacggcctaggacgtcccccagcgggtcccctgcatcacatattgacga

SEQ ID NO: 524155 - DNA, 199 bp, Homo sapiens
tacgagcggcgtacacctacatgatatgaagctactccctcccacaattctccatatttcttctaagagacagaactttcttttaagttcattcattcattaattatttatgtgtcaggtactgaactagattagatgttgggaataaaacaaggaacgaatgagactcacatggtctctcccctcctggagcttcaag

SEQ ID NO: 524156 - DNA, 1161 bp, Homo sapiens
ggagaatgtggagcggtggcaggggccagtacgagggcctgcggggcaggacctgggccaggcagtgcttgacgcatggccactcagtgtccatgcctggagaagacgctgccccagctgctggccaagtctgatgcatcctgtgagaacctgtggtggtgcacaactgccagcctggccctgtaccgccagcattggccgcgtgcgagagctcattgcccaggcccgtgggggctgccagtacaggtcaagggtgcccatgaagttcaactgggcgctcaggggtgcagcgtgcagcacccccaacgtggaatcttgccgaccttgcttgcctacactgccctcaagttctaccatgcaaggggccctagagcctgagcctggcgcagggctaccagagggatcgcatttagtgatgtaccatggggcgaggcgtcatgtgccaactggtgggactacatgggcgtgtgtcgtcttgccgttgacccacgaaggtgtgcaccgttggggtgctatcgacacttggcgccttgacgtgctgagtgccctttgccacgttcccgtaaccattccgattgacgcgacactctggggacggcacgttcgaccagcttcgtacagcaccttggacctagggacatcctccaggtttctggccaaccattgtccggctcaacagatgggacgaacgaccagcattgaatccaaggacaccccaaagggtgttgaccaacgggaggggcccccttgggggcagatcggaggcttggcatccaaacctttgacggtgaccaggaaccggaccatctcatcgacacgtttcttaaccggctctcgggggcagcgataaccacccagacgattcaccctttccaaccgccccccacagatcccgcccttgcctatccgactttatccccccgggctccttaccctcgtgatgatccattgtgcaattcggacgcaactgtagcacccacggcccttgaataattgcacagggacgggatagggatccagctaccttccgtaacccacaacttccagcgaagactagcggcaacctattccaagcgcattggaaaccaaccgggacattgatgagacaaggcgcaattgatgtcaccccggcaatccccacaagctccataacccaagggg

SEQ ID NO: 524157 - DNA, 477 bp, Homo sapiens
aatctcggctcactgcagcccctgcctcccgggtcaaaaaattcctctgcctcagcctcctgagtagctggaactacaggcacacgctgccatgcccggctaataattggtatattaagtacagagaggtttcaccgtgttgcccaggctggtctcgaacccctgaagctcaggtaatccacccaaattgctgggattaaaggtatgagccaccgcgcccagccccttggtaccttccattaacactgatgaggcacaagccataggatagaatggaatccactgagagctgtgagccaattgagggataatgggttaataaattgtggcttgaacctgtggacggtaaggtgtgacatttgattcctattagccttgtagaaacacctcagagatccacagaaagcaaactttgaccataaaaatataagactcacagggcaacgaattctcttagcagctaccttagagttgaga

SEQ ID NO: 524158 - DNA, 146 bp, Homo sapiens
tctagaggatctcaatcgccacgacaaggagctagatattcaactacataagggcaggtgggtgcaatgtcaaggctacaaaaacgaaacaaaaacaggacaaaaaaatggtggcagcaattttttttaaaaaccaatttggtcca

SEQ ID NO: 524159 - DNA, 639 bp, Homo sapiens
tgcggtggctcatgcctgtcatcccatcaatttcggaggctgaggtgggcagatcacctgaggtcaggagtttgagaccagctcggcaagatggtgaaaccctgtctctactaaaaatacaaaaatcagctgggcatagtggtgcatgcctgtaatcccagctactcgggaggctgaggcaggagaactgcttgaacccagcaggcggaggctgcagtgagtaaagatcacaagatcgtgccactgccctccagcctgggcaacagagcaagactccgtctcagctggtgggggcggggattaaccgggcgtggtggtgggcacctgtaatcccagctactcgggaggctgaggcaggagaatggcattgaaccctgggacggcaagagatctgcagtgagccgagatcacacaattgcactccagcctgggggacagaatgagtctccatctcgaaaaataaaacacaatgaacgaggcagacgtcgtggctacacgcctgtaatcccagcactttgggaggccacggcaggcagaacacttgaaggagttcaagaccagcgtggcccaacgtggtgaaaaccctgtactctaatcaaaaatacaaacaaattgtttcagcctctgtttctcataata

SEQ ID NO: 524160 - DNA, 131 bp, Homo sapiens
gatccacctgcctcggcctcccaaggtgctgggattgcaggtgtgagccactgtgctcggccttatttatattttatatattgttgatatggttgaatttatgtatgccattaaattatttgtttctattt

SEQ ID NO: 524161 - DNA, 281 bp, Homo sapiens
tccaatgcaacctttgcttgacaggcacagcgggtgtgccttagctcagaaggttcctgaggtgactgtttgcctctcctcctgctgctgcactcatccctggtgccctggtggggaaggcaggattcaaggctacagaaaggccagggccaggtgagaggaccctgctaacagcccacttccggtggagcactggtccactggaagtgcagagcattccaggctgtaaacactgcctctggcatgggtgactgcattcctttaaggacacacgtcgacgc

SEQ ID NO: 524162 - DNA, 149 bp, Homo sapiens
agatgaatagtacggcgcagtatgcaggaatacggctaggcagtgtcataggagccaagagtaggaaagcacaagacaacatacagcaaaccctaggcgcacctaaaccgcgggctagcataggatagcgcgggacggactaggagtaa

SEQ ID NO: 524163 - DNA, 436 bp, Homo sapiens
  misc_feature (8)..(8): n is a, c, g, or t
gcacaggntccccacctgaaccttcacttgagacctcgtccttggccatcctctacatctggattcatgatacagagaaacttgagtaatgatgacaatagcagtccagtgtgcatggatgctgacatggatgctgtctgccattcttaccactggatgggaagaaatgatagatgcaatccagccattgtgttctcgactctcagttccatcttctcaactgacattgtcttccaaagtccgtgccacaccacagcctggaacatctcccaaagtggtatcttgatgcaatggtagagctcatgtcacagtattgtatgtctcaggtttgaataactcaccagtgaagtcatcttgacctggacagaaattgaatcctcccgagaatcccaggagctgggtaggtgatccttccccagatgagccttcccttgaa

SEQ ID NO: 524164 - DNA, 342 bp, Homo sapiens
atgaagagggccaagctcctccatctgcaaggctaaaccaggggcacaagggtttaaaggtgctgcgagtggtgtttgcatttcttgttaactcacaccagaataaggcacccacttacttcactatgcagtgtatgcacaaaatacttggcagggtttaagatatgttgccagcggtgctagtatttcttgtttacttccaacaaacttgagtaccgaagacttttattagtatgcagtatatgcaaagtgattggcagagaaggaggtttcattggaagttccttgactggttaacacaaggggaccaagtagcgtcccagacacatttttcgtcgacgc

SEQ ID NO: 524165 - DNA, 429 bp, Homo sapiens
ggccgaggctggtggtcacgcctgtaatcccaggtctcagggaggctaagaggcgggagggactagctgtgaggcccaggagtgcgagaacctgccgtgggcaaatgatacgcgagagcccggttcgtccctgagactacaagagcacacgaaggactgcgtgagggaaaacgactgtggagaccacacctggggagacgcttgaaacagagcctgatgaaacaaaccacagatgtgaggagaggtcccagcgaggacacccccagcgacgcggtaacggcgaaccagtgtatcgcaaagagaaagcgcgtggacctcagaagagcgagcacccgggggcccccagaagacacaaagagccgcggtggaacatcaaccacgcacacaactgcaacaccccaccgcggacagtgaccaccgacaacgggt

SEQ ID NO: 524166 - DNA, 314 bp, Homo sapiens
agcgggctgagctggtcggctggctacgacgcgatctcggggggccaggatgcccccgacatcgccttcggtggaagttgtggggtggactgctcagtgtctacctcgacgtggatgatagtaggtcctcgatgctggtgggcggtgggcgctgcgatggccgggagtctgctgcgtggcttagctggttgcgcatgggcctacggggatgtcccgacgctggtggctttgccgtggacggtccatggctgggacttgtgtgggcgcccaagaagattgtgggaatggtcacccagggctgtggcggggaaggc

SEQ ID NO: 524167 - DNA, 1175 bp, Homo sapiens
agcggagcgggccggaggaagatggagcccaacgcaccgagggccgggcttgggcacctctctcgtggatgctgcatgcacattgaattgagcgcgcgtttgcgccaagtggaccccgcaccattagctgctgagtggacaacacctcaagcgtgcttgggagactctattcgctgtttcttccggatccctgaacggacctggggcctttgacgcatcacagttcacagaccgcagtgatgacacccaagcccgtgatcgtcctcaatcaaacgttatggaggtgactctccggtctagtggaccacatcctcacttcagttctgcctcctccttccgtgcaggaatgcatggccggcacgcaaaccatcagaacgctggagcacccatcaaggtgtcctcttacttgcacggacgcgagcggcagattgatgctgaggtagacatggcacaaggtttccccgaactagtttgtgatagaactcgcgtacgtatccggacgcgaatggcctagagagaaacggattgacagttcgctgaggcaactttctgaagctaatctggaccgtacggagaagcacatacaatcggggcctttgctcccaagtttgaactcaacttacagcagaccctaattgaaaccggtacctatcaacagagaccgctattgagagcaacaagtgatatataacaggtactccactccgtatgtgtcaatgcaaccatcatggcagtgataggcctgtactggtaacatgggactcttcctgaaatcctcagatacggtagtatgggcgctacacaggtgagattccatgctatcaagaattcatcacacatttcactatccagtatagtccagcatagagtgttgcatatcagtgtacgtaaatagagtgatgaggtctccagcaaactccatcccattgaactatgatgcaccccatttgtatgagtcatagacatagaggaattcaactccacagttgaaactgtgcgtgagtcacgtctaatcacgacccacctagaatatcatatccgctaataagttatccccactatgtaaaccctacaagccgtcgttacactcatataccctagaactaactatcacaaacaagattgtataggatagtatgcggtcaacatgaaaagtatactcacatacatattcc

SEQ ID NO: 524168 - DNA, 174 bp, Homo sapiens
tgagacgacggcatatgttcgaggtggctcctgtatcacgatgctttggattgttgccaacaaaattgtgatcatctaaactgagtccagctgcctaattctgaatatctatatatatatatcttttcaccataaaaaaacaccacaaaacaaaatcaacaaaccaaacaaaaa

SEQ ID NO: 524169 - DNA, 216 bp, Homo sapiens
tttcacagcgtgtttgtgttttattatttcagcatgttacaatgtgtaggcactcagtaaggatcatatcttcctaccatcctaacctgacagccatcgtatctctctgtgatgcctccagcttttacctgagagcccttttaggatggataactcacacagggggatccaagccaggtacgcctctagccccaggtgaaacccaagcaccccctg

SEQ ID NO: 524170 - DNA, 1581 bp, Homo sapiens
  misc_feature (527)..(527): n is a, c, g, or t
tgcgggttgcgggggtcgtccgcgctctccgcgggtgcgtgccgtcgtgttctagggtggttgctcgatcgttcgtgcgcttggtgtgcctctcgctgtgtggcgcgcctcgctggtgctctgtcttttcgtgtcgcttctctgctatcgactgtgcgattcgctgctgttgcgtgcgcggtgtcgtcgggtggggtggtgccgctggttcgagtgctcgcgtcgcgagtctgtgggtctgtgagtgggcggcctcggcgcgacgtcccgccggctagcgtgacggctggcggtgagtcgcggcgtgcttcttcagtcttggcttgtgctggtctgttggtgtggctggctggtgcgtggctgttggcttgtgatgtgctgttggtcatgcagaggagcgaacaagatggagaaggagggcatgatgtggtgattatagagacaagaggacaaaagtaaacgtgcagagtagccgtgtttgctgtggtgtcatgctgtggtgattgtgtctccaaacgtagtggcgngctgtggttgacggcccgcgctggtgccccgactatggtttgcgtcgagccgtgtaggctgagcccttcaccgcaggggggggcgtttgcaaaacaattacaacggggggggtagccgctacacaatattgcgccccctcgtttggagcccctcctgatggtcccgcgagagcgtgggtgtacggctgttgtgtggtccacttgggggcggaggtgacgcacagtgtgttgtttttttctcctggggaccgcggggttgtgaggtctggttgccacgcgccgccggtagtaacacgcttgtgcttattcattgtggggaggctcgctcctttccccggccgtggcttgctttttatctgcggcgccggctcggtgagttaccccgccgtccctgtttggtggggcacgaaacgtgttctatacgcttgttggcaatacgtggtgggagctgacaggggcaaaggtgttattttccatgagggcgagttgagcctaaatggggtgagctagtggttttccggggccctattcatcgcgtgcgcgggggggaatttctcacaagcagcttgtgtcttctaacaaggaacaacttctagtgtgtgcccgagacaaaatccgcggtccaccaaggtgcgaaatttcttcttacacgagaataacccagctgatcacgcgagcctggctgttgcgcgaggagcagaggttgcgccgaaagcagatctgatatgttttgtgatgtaaaaaggggcctgttccacacagttggttagctctcagttggctgtgccacgacgcagggctcgtgacaaaatattatgttggcccaacgcccacaactatgttgtcaagaaaaacaaagagtcttttaagagagaataaaaagtaacgttcttaatatatagtgatagattaattgaggagtttcgccgccccacttcaaggagataatatatggagaaatatggtctggtcacaccaggtgcatcacaagtggcttatgtgaaattaaaacagcgcacatatagctgtcgcatacatagtacagagaaatatt

SEQ ID NO: 524171 - DNA, 322 bp, Homo sapiens
tgtacctgaagtgtcgcgaaaatgctactatgactcttcctggaatacacccacctaccttgaaccagacaatggattggatatgtctacttctggatgcaaattttactgttgttcgcatgatgccacagacaccgaggttactgatcaatcttcccaagctcgtaaaaatgtgaaaaatctgtttattctgagctcaacaagattgaagaaagttttcgggagctacagaaatttaatcaagataaaaataatagaggattattttcatttgaagtgctggaacatttctgatcttatcaaacctttttaatagacattt

SEQ ID NO: 524172 - DNA, 2491 bp, Homo sapiens
ttcactcgacatttggaatatgtattataagggaaagcatagggtgttatgaaagcatgaaatagtgggatctaaccttgttgaaacaggcagagtgggactgggggttgccagggacaactttcttgagaaggtaagtttgagatgggtgttgatagagggtgagttttaagtaggccgagtcagcaccttggtcccccttcctttatattcatgtaccagcttgatctcctggggaaatgtgagaagtgttctggagaagcatggaggtttagagccaccgtgaacctcagagcacattatgtagcccaccctgtctgccctcactcttctcagtattgccaatgagggcagtggcgcccacgagctaatgtgacttcctcgtacccctcagctgatgagcaacagagctgggactacaggacatagccatctttgtccctattatgtgccagacatacgtctagcaccctgcgtacttgatattgaatctgcactagcaactctatgcagtacgtattattattacttcttgtttacagatgaggaaacagaggccccgggagggtaggcacccctgtaaaggtcatacggttcgggaaagagtcaggatttggattcagcctgactgcacagcccccacactcctaatcacagcattgtccttccccctgccagaaacttggtttgcagtatttctactgaaacgtgacattttacctgccctcatggaggtatgatctttttggagagaaaagatagcaacaattcaacacagacaccacaccaaaggttcttgagatggaacagaatgcaggccccagggactcaaagtcatttttcagcatgggaagacttggcaccgagtctgtatcacaggatgagcagggctgtgcagagaaaacccagaggactggagggtgggctttgggaggagcaagtcaatttatctcttgggcttcattttcctcattgggagcattgaggaagagtaagggtgggagggaggggtgggttggcaaatgttttcccaagtccctggggttggtgggtggagtttaagccaattgctgatggctttgccaccaggtggcaaagtttagactttgtctagaagaagtggggagccatgaggggttttgagcagtgggacatgaaagtattgctttgggaagttggaatccaggaggcttttatcttccagtcttgcttctctggagactgatgtcccaagagaacatgcctggccgcttagctccgtggagtttatgctctgggagaccctgatggggagatcctcatttcgactggtcacattaatactacttttcgagtgtgaaaggttgagtcaaggtttggacttctggcaggttctcgcctttggctggtgttccgcctttgagatggtcccactactttcactcagcgtccctaccccacacacatctccccctctacacagacactaagggctcctcatggggtttcattattggtttttagcggatgttcctctaactcggtgcatttcctcaagccaacgtctattccactatcatggggaaattaatatagaaatttcctcctttgtatcatcaatttcagaggatgtatgttcccggctgatggccctcccctctatttgcataacagcaggtaaacaatactgccacctagtgggagctcaaggtgtgaccttcggagctcctcctcctgaccccgggacattatttctattactgttaatatttaaactaatgggcagttctgagctcagtgctcttcccagtgagtggatccacgtggattttcacgtctccttctcattctcttaaaacttggagttacaagtgtcagagaagctgttttgtgtacgcagaacgattggaacaggtgcagggagttttacctactttactttgacttttgctcacagcagtccaggtaggtaactggattcccgttttatacgtgaggaaacccaggctcagtaagattaagtaacttggaactttactgagcacctaacgtgcccaactacgtcctggactacctaggtagtatggggattgtggcctgttttcctctaagaatgcgctgtccagacacagtggcaaggcgtagttagctcctggccaacttgtagaggagaggagagacccttgcacactgcagtagtgcagcaagactgcttggatggaagaagtgggtctggagctaggattcgaaaggtggcatgggaagagaatgtttggcggatgaaggcacagaggcggcgctagtgctagggatgtccgggggcgaggaaagacttgctgatcttgggctgtgccaggtgttgtgggttgaggggtctgggatacagagcctgcgagagctaggttgagagctccagggagtcactgcgactacttccttgctccatttgtgaactgagaagtaagactcgtttgatggacgaaatttaaataatgcagaaatatattaaagt

SEQ ID NO: 524173 - DNA, 419 bp, Homo sapiens
ggggcgtacgctctatgcagtgtgagttagactctcctgctgtgtgatcattgtgaccgagtgggagacagcatcaccggagatagtacattaccggtacttgaacctctatgataagtggagcaccggtgatgctcacatcactgtcggtggacattgagataacatggctgtttagggtatgtatgccggattgctgcctttcaatagatcccaatctggcggctgatgctatcatagcgatcagtgaagcattgaggggcaagtgactatcttgctgatggatcacgtgcgtagatgcgttataaggctaatgactgtacgcaagggatgacttgcatacattatcatactcctgatgacaggcgagaaccctgtgtaggtactgtttatctccatcatttactggactttagggg

SEQ ID NO: 524174 - DNA, 355 bp, Homo sapiens
  misc_feature (22)..(22): n is a, c, g, or t
  misc_feature (39)..(39): n is a, c, g, or t
  misc_feature (74)..(74): n is a, c, g, or t
  misc_feature (144)..(145): n is a, c, g, or t
  misc_feature (204)..(204): n is a, c, g, or t
  misc_feature (326)..(326): n is a, c, g, or t
tgggcgactcgccagagttgcngcgcacggggtctgttnagtcctcctctgcattttcaaatccagctgttganggcagaagcctttttggcgaaggtcaggaagaggtcctccaccttgcggaagtgactctgagcctccagnnagcttcttcttgcgggcggctgagttggccagaagctggctccacctcttcatgagggncggcgtgccgggcctcgatggccttggtactgaaccgtgttctggcggctgagaagctgactctttgcagggcagtgactgttggctatgccttcctagctggaaggcctgcaagcccagcntcacaagtttcctcgtttggcgatgtcgc

SEQ ID NO: 524175 - DNA, 244 bp, Homo sapiens
  misc_feature (174)..(174): n is a, c, g, or t
  misc_feature (207)..(207): n is a, c, g, or t
  misc_feature (219)..(219): n is a, c, g, or t
atctagaggatcccgacggcatggctcactgcaactccacctcccaggttcaagcaattctggtgcctcagcccccgagtaccgggactacaggtgcgtgccaccacacccggccaatttttattattttagtagagatggggtttcaccacagttacccacagctggtctctnatcaatttacgtgtagaatacaaagagtcaganggcacaggatgngcagtcgggtacgcgagcgtcgaat

SEQ ID NO: 524176 - DNA, 81 bp, Homo sapiens
gcgaagtcgtgtgtattggcagctgagacggtccaagactattctgtgctagagggtggtgtgactgcctgatcctgatag

SEQ ID NO: 524177 - DNA, 229 bp, Homo sapiens
gctgcgatcctgttcctggccaatgcatcctgcccaaatgtgatctaccactggcttcatggcctgagtggctacgaactgcagaactgcctgacgagtgccgaggcctgcgctgcgcgccgtgcacgaacagtgtgttctggctgaacccctgcgcgaatacgccactgtcggcctgccacctgacgcccgcttctacgtgcctgtacgccgacaccccggccatcgt

SEQ ID NO: 524178 - DNA, 551 bp, Homo sapiens
  misc_feature (104)..(104): n is a, c, g, or t
  misc_feature (137)..(137): n is a, c, g, or t
  misc_feature (154)..(154): n is a, c, g, or t
  misc_feature (236)..(236): n is a, c, g, or t
  misc_feature (244)..(245): n is a, c, g, or t
  misc_feature (289)..(289): n is a, c, g, or t
  misc_feature (302)..(302): n is a, c, g, or t
  misc_feature (322)..(323): n is a, c, g, or t
ctctgagctcgggtcctttcagtgcataactgtatttagaaaataagacctagcttctaagtgtgctaattactaaggagtggcaatgtttccaggtcctctcnagtggacatacgctagagaatatgtacacacanaacacggcatgcacacnatccagcatttacagtactatatcatatttcggaggtctatcgaatacgattttagaaaaccagtgaggttcacacgcaggntacctccnnaattccattctacacaccaacaaactttgtcttcctgtttcacnataggtaactccncttttccgggcagtgagaanntcctgtgtccctttatcatcaacatatgtactcacaggcataccttactttatggcacttggctttactgcacttcacatatatggtgtgttcttataaatagaaggttttagcaaccccgagacaagcaactctatcagtgccatctttcttttttctgaaaaatctttatggcttctgctgattacacaacaaatgtaaaaattcaaatattacacttctttaaaa

SEQ ID NO: 524179 - DNA, 385 bp, Homo sapiens
  misc_feature (329)..(329): n is a, c, g, or t
tcttatctagaggatcccagcgctgcgcatacagtactttggaagaaatagaaggccttgtaccacaaccgggttgatttttttttaaaacacggattcgggcacaagggctgaatccacttcggggtcatctttttcctcctctgggtgggttaacaagagtagtgaatacttcatttatggacagaaagaaagacacaaactctgaaagggagacttcacttttcactacaaggaaatcaaggtcacggagtcctcatggtggggtgtatctgcggcccctgtgcaaaagtaggggatccaaacttaactttaggagcaagaccggnataaaagatccatctacggatccaggtaccaggtttaaagagggtatggcccaggg

SEQ ID NO: 524180 - DNA, 126 bp, Homo sapiens
  misc_feature (11)..(11): n is a, c, g, or t
  misc_feature (42)..(42): n is a, c, g, or t
  misc_feature (104)..(104): n is a, c, g, or t
ggccctgtaantccagctacatgaggaggcagacaggaggantacttgagtccagaaagaggttgcagtgagccgtgatcgtaccactgcaccccagcccaggntgacagagcgagatcctagctc

SEQ ID NO: 524181 - DNA, 124 bp, Homo sapiens
agttcgggtcccccacgtggcagagctcatgctgtgattatccaaggagagaatagctcaagcagaaaaccgaagtcatgcaattctgagcacttggccttgggatgccacttgggtggcgtcc

SEQ ID NO: 524182 - DNA, 130 bp, Homo sapiens
tgcagcatcttcttcaagtgttcatcagggcatttgttccagcgttcattttggttgccagtcttcccaattttacaacacacatgttgcaggtcaatctttccccaccttccccaacactcacattctt

SEQ ID NO: 524183 - DNA, 1121 bp, Homo sapiens
ttacattgatagcattcgcatgggggctgggggcggcggtaccatgatgtgatagcagttgaatcataggtctgtttgtccttattgtacgtatccgagatccatgattatgagcttatggggttcggtcactcccaatctaacaaatatggcccggggggcgagcgggagctgctgctgaagatgatgttccaaagatcgcggagattcgtagattgctcagttcaggctcgtaatctagtcatctagcgaagcacgaagttgacagctcgatactcgatattacactgctcagtgacccgggtggcatgaacaggactcatacagtgggcttcctttcttttttctttctttctttctttctttatataaaatgggaaaaggggccggcggggctcccccccagggggagtagagagggggcacaaaggggggtggaggaaaccacacagaggagcacacggtgcacaaccccttgtgcacaatcgcgggggactaaacagaaggggaaaaactgcgtggtgagccaccaacgagcaccacacaccagaaaataaaccggggggaccacacaagaggacgccgagtgaaaaacacacaaaacacccagggcggagacaaagaaacgagagtataacacagaggaaaaaacaaacagggggcggggtctatctccacagcaagtgtgtgaggagccaaaagagcaatggggagcagacagaaactcacccaccggtggcaccccaactgagaggagcagtaaagcagcaaccagacaggtggggaccccacagcaacaaaagaagggcagggaggaaacacagcaggacacggagggagaacaaagcccccacacagtggccacccgcaggcacaaggcggggagcacaatcacgatctgagtacagccagcagggggagaaacaaacgcaggaacgagaagggaagacaaactcacagagcggaagtagccacacgaatgacgacccgacgaaggcgagagagagacgagttgaccagatgtgggttgagggacaagaaaagcccccggagacgaacacgacatacagcctcccacaaacaggtggagcccacaagaagggaagcgtcaggagaaaaac

SEQ ID NO: 524184 - DNA, 1724 bp, Homo sapiens
  misc_feature (520)..(520): n is a, c, g, or t
  misc_feature (740)..(740): n is a, c, g, or t
  misc_feature (750)..(750): n is a, c, g, or t
  misc_feature (783)..(783): n is a, c, g, or t
gagaggcgtgaggtggagtgatagagggcgctaccgtaggcaccatccgtagagctgaagccggagcataagggttgatagggccaaggacacgcgcagatgtgagaaatggtgggtctacaagactgaacggagagagagaagaaggagtcctgcaaggtcacccagcctaaccggtgggcacgaatcacaaacgtggcagactccagtgtgaatcagcgcacagaatatccatcgaggaagcagcggctcactcagggagcacaacaaagcctctgaatcgaataattggactcactacagtacgagaaggttatccgcgggcgtagattctcatcatcgaaagtacgtgtcaattgaatagacgatgaggcaaaggacacaacatatgagcacgtttcgattgtctccattttggtcggcattagtataagagatgcccgatacgagaagctatccagggagtcttataaagcatggtctttgtgtacacgtacaggtcctgggtagcttgaacccnttttggaatcgcttgtggccaggaggaataccaaacagaccccgatagaaatattcagagccacatggaattcgggaagcatgcatacgaagatgcgcggctacgtggtttggttgaccattgagaaatggcgcatgcaaggtttgcgtgaaaatgtgccaatgttgtgcattgctctggcccagatcttactaccaatagtgcggcaattcccactgcntgagatagcntgggcattgtgcccacagtcgtggacgcgtacntactttgctgcccatggatcattcatacttacttcgtatacaatcctgtttttcccacgaaattgaagagcaaaaaattcatttgacaacagggttgcggggtgtgcgcggcgagatatcaccagtgaggtattcaacgcaaaggtagaggcgttgccacggacattgttttcatcgtgggatactcggggggaaggtaaagtcaggagatggcagcagagtggagcgaccggcaaaaaagggtgaataggaaggggcaattttacttatcctgaaacagaagaagtccctccgaagggggcccttggggggaaatttccacaccgagaaaggaaccgtctccacacttttgagagccgaaaccccggttgcgggaccattggttcttgggaggaactcttcgtcttggcgggcccaacagtgcgacaaacaccttacacccccacgagtgggggggggagccagcgaagcagcacattagatcgtggggacgcaactagagttgaccaagcagcgcaaagagaggacgcagatctaccgcaacagttctacaacgaagcgggagcagccacatcatataaacagccacggttcaacaacgggcgggtcacacctgggggcgggggagcaaaccccaaaacatcgcactggtaagtgtgccagtccacctccaccacaaaaggaatgtatggcggaactcgtcgcggacacaaaggtggtcttccgacaaggtgttttactagcgcagggccgcaaactataatatatacaaataagtgtatggtgggtaggtaatacatagtagatactgatcagtagaagagaacgacgtgccatccactatcaaccagcggggatgagaacgcttcgtaagacagcggtaggtaccaccacagactcgctcgacggtcaaggaatttggctatcgctaccagtataac

SEQ ID NO: 524185 - DNA, 240 bp, Homo sapiens
tagaggatccctgtgattgatcagcaacgcacccctgtattcagccaacatgtcttaagcactgatcatattctagcagtttagtagtgctgggaatacaaggataaataaaatatagcttccctttgaaagatcgttttttatttacaaaggcaggctgctggtaaacaaattaccgtgtaacaacgtgagaagtattgcaaggggtgtagtgcgtgctgatcatcacaggtaccggcc

SEQ ID NO: 524186 - DNA, 234 bp, Homo sapiens
ggagaaactgctgcctcatatccggtggaatgcgggctttgtgttcaccaaggaggaccccactgagatcagggacatgttgctgtccaataaggagccaactgctagcccgcgctgttgccattgccctatgtgaagtcactagtaccagcccataacactgatctcggtccccacaagacctcctttatccacactctaggtatcaccactaaaatctccatggacaccatt

SEQ ID NO: 524187 - DNA, 342 bp, Homo sapiens
  misc_feature (114)..(114): n is a, c, g, or t
gcccccattggttcccccgggtccccccaaaatgggccgcccaaagtaagcagccctcttttttgttttttggggttccccccctcccttttgaccccccgtttttgggtggcntggggttttcccccccccgggggggggggtttttttggaaggattcccttcccgttgccttgggggccccccccccccgtcttttcgggtttccccccattttttttccaaactttttgtggggggggggggtttacccctgggggggggttttcccccctgtacgggttttttggggtttggccccctttggggggggattcttttttttcccccccccccttccca

SEQ ID NO: 524188 - DNA, 181 bp, Homo sapiens
gatttttaaaacccattggtttcccaaagccccttgtaaggttttgcttttaaaaaagcttcttggaacccattttattggatttggacctaaattttggtcttatctaaaagggccttttctggctggaaaaaaaaagctttgggatggaatttaataataaattaggaatcttaatgga

SEQ ID NO: 524189 - DNA, 280 bp, Homo sapiens
tagaggatccctgtgattgatcagcaacgcacccctgtattcagccaacatgtcttaagcactgatcatattctagcagtttagtagtgctgggaatacaaggataaataaaatatagcttccctttgaaagatcgttttttatttacaaaggcaggctgctggtaaacaaattaccgtgtaacaacgtgagaatgtattgcaaggcggtgtagagtgcagttgcgtgatctatccaagatcagacgaatgccggggataccgagactcgaagttcgtaa

SEQ ID NO: 524190 - DNA, 898 bp, Homo sapiens
tggggaaggagcgactctggaggcgaggagggtgtggggaaccccccagagatggcgcttcttgagaggcctgaaaccacctggaacggagtgtggggcacattgatcccctgagtccgggctggaaatctcggagttaccgcattctgcggccgagctagtgcgcagcacaagagtgcctgggacagtcacggagctcctggagcgctgcccgctggcacctctcctggacgtacccttgacaacaagacggcaggccgagcaggcctattcatcttgcaagccgagccctgcccgtgaccaggacaacggcctccgcgctcggcgaatcacccctcaactgttgcgcgcttgtgcgccccacgtgcctaacatgacaccagacgacacagctggaaccattgcagggcgcacgacccccctaccgggctccaagggcctggccccaacatccgcccaacgcgagacccaggccagtgggaatacgggaattgcgtcgcccgaaacctcacaaaccgcagggccaacatcaccgggccaaccctctggaacgaattgctggcgacgacacatcgcgcagcgctcggaagccacttcggcaccctgtggacaatttgagtgcaacccaacttgtgcccaacgttgtccactggagcaactaactgttctaccaaccgggcgccacgcctggcagctctcggggcccctttcccccttagggcccccattggcatcacccctggcccccgctaaccgcgtctaattcaccctcgcattaaaccttacaaccgcggatcaggggggtaaatcaggcacggcgaccggctcggccgcaaaggcctttcggaccttatcgcatcgactcaaacggctttctggatttgaccatatcacatct

SEQ ID NO: 524191 - DNA, 168 bp, Homo sapiens
ataacttgacgaacctcactaaccctcaccctagccgcgagtatgagtccctatttataggaaggtaaatcaaggatgatcccaaaacgaactaacagaccagtgcatcatgcacaacagactcaggggtttaccacgaagcgcgcttaacgcgggtcatggtagaag

SEQ ID NO: 524192 - DNA, 242 bp, Homo sapiens
acgtatgaatgtggtctgggtgttgtggtaaatcctggattatggagtcagaagccatgagtctgccactcaatagtgatgcaaattagcaccagcctgtagtcccagctactgaagaggctgaggcaggagaattgcttcaacctgggaggcggatgtagtggtgagctgatattgcaccactgcactgcactccagcctgcctggagcaacatgagcaggacgtctgtctcacatagaag

SEQ ID NO: 524193 - DNA, 534 bp, Homo sapiens
  misc_feature (309)..(309): n is a, c, g, or t
agactgaattcatttctagttgatgaatgttgtcttgttctcccctagagcaattacttccttaaaatcttcatttcaaaacatattttacttcatcaaaatagccctcaatggcagccgtaattgaatggttttgttttttaaatttctaattctctaaatcttcattggtcaatgttttaggacatggtaaggatctttgttcaaatgtgtatgcgtgtcaatgtgtgaatgcctacgcatgatttaattcttccagttgataattggaagataatgagtcaatcagacatatttaccaattaactnttctgtaagaattcataaactagacatgtgagtcctgaggaaaagaaaaaagaatacaacccctgccctaaaagacccgaacgtgtcagattaaaataaatttggccaagggggaaggggcacacccctgaagtcccagctactcagaaggttagggtggggaattcgctgaagtctaggaattcgagaccagcgaggggaacaatagcaagttgctgtctctaa

SEQ ID NO: 524194 - DNA, 833 bp, Homo sapiens
gcaaagatccaagctgcctggagggtgctttcactggcggcagaaattcctccggtgtgaagagatcagccatctgcatccagtcgtggtggcgtggaacactgggccggaggaaggcagccaatgaggaacgtgggcggtacatgatcatccggcggctcatccgaggcttcatcctgcgccaagccccactcgctgccccgatgaacgccttcttcctggaccatgtgcgcagcactcttttatgcgtaagacctgaggcggagctgcccagaatgtcctggacacctcgtggaccaagccacccacctgccctgcgtgaggcctcagagcttctgcgggagttgtgcataaagaacatggtgtggaaatactgccggagtatcaggcctgagtggaagcagaaggctgaaggagaacgggcgtggctagatgagatcttcaagggcaagaaggataattaccctcagagtgtacccaggctcttacatcagaaatcggattggtaacagatgagatcagaaccaccgagtgctagcaggcctatgggctctgagcccattcagtatgcggatgcctgttgtgaaatacgaccgcaagggctacaaggcctacgatcacggcaggtgctgctcacgcccaaggccagtcagtaatcgtgaagcgacgccaaacgccaagcagaggactcgactaagcaaaaacgtgaaacggaaatctctgtacagcaagactgagcgaacagacatataaggtgataaatggtaaaaggtacggaacaataggaaaaggggcaatgtgaagatgaacaagtgacaaagtgattgaaaacg

SEQ ID NO: 524195 - DNA, 485 bp, Homo sapiens
caagcccggcagcccgagaggaacatgaacagccccaaggcagaagcctctggcaagagtggaccccgagcccgcccccaggtagccagaagcggcctcagcggaaccgcaaactccagtagccgcccgtgctgcccgtgggctgggcgagggcaagcagaactggggaccaaggctccggggcaactgtgcgcacaggcctcacacctgaacgctgtcctcccgcagacgagaccggcggcaactgcaaaattggaatcgtctttggagggagaaaaatatgcgagtatgagatctagggcgatattttacactgacacatcgcgtacacctcttgtttccaaagtttttgagagctggaagctctgatctcggtgtcaaatatcgaccgctgtgagaccgtgttttaaacccgaaggtttgggagtttcagtgtgagcaggacaagtgaagaggttgaggctggtcaggacatctgagggctg

SEQ ID NO: 524196 - DNA, 924 bp, Homo sapiens
  misc_feature (1)..(1): n is a, c, g, or t
  misc_feature (11)..(11): n is a, c, g, or t
  misc_feature (31)..(31): n is a, c, g, or t
  misc_feature (42)..(42): n is a, c, g, or t
  misc_feature (71)..(71): n is a, c, g, or t
  misc_feature (81)..(81): n is a, c, g, or t
  misc_feature (108)..(108): n is a, c, g, or t
  misc_feature (200)..(200): n is a, c, g, or t
  misc_feature (224)..(224): n is a, c, g, or t
  misc_feature (226)..(226): n is a, c, g, or t
  misc_feature (256)..(256): n is a, c, g, or t
  misc_feature (268)..(268): n is a, c, g, or t
  misc_feature (357)..(357): n is a, c, g, or t
  misc_feature (392)..(392): n is a, c, g, or t
  misc_feature (399)..(399): n is a, c, g, or t
  misc_feature (417)..(417): n is a, c, g, or t
  misc_feature (475)..(475): n is a, c, g, or t
  misc_feature (489)..(489): n is a, c, g, or t
  misc_feature (493)..(494): n is a, c, g, or t
  misc_feature (498)..(498): n is a, c, g, or t
  misc_feature (501)..(501): n is a, c, g, or t
  misc_feature (507)..(508): n is a, c, g, or t
  misc_feature (530)..(530): n is a, c, g, or t
  misc_feature (538)..(538): n is a, c, g, or t
  misc_feature (551)..(552): n is a, c, g, or t
  misc_feature (555)..(555): n is a, c, g, or t
  misc_feature (560)..(560): n is a, c, g, or t
  misc_feature (568)..(568): n is a, c, g, or t
  misc_feature (570)..(570): n is a, c, g, or t
  misc_feature (572)..(572): n is a, c, g, or t
  misc_feature (579)..(579): n is a, c, g, or t
  misc_feature (583)..(583): n is a, c, g, or t
  misc_feature (586)..(586): n is a, c, g, or t
  misc_feature (601)..(601): n is a, c, g, or t
  misc_feature (603)..(603): n is a, c, g, or t
  misc_feature (608)..(608): n is a, c, g, or t
  misc_feature (613)..(614): n is a, c, g, or t
  misc_feature (624)..(624): n is a, c, g, or t
  misc_feature (627)..(627): n is a, c, g, or t
  misc_feature (636)..(636): n is a, c, g, or t
  misc_feature (639)..(639): n is a, c, g, or t
  misc_feature (648)..(648): n is a, c, g, or t
  misc_feature (652)..(652): n is a, c, g, or t
  misc_feature (657)..(657): n is a, c, g, or t
ntccggcggcngagctccaccgctgaggccnacgaggccagntttttatttgtttaatttggtaaatgtanaatgtgaggngggggggggaaccctggactacttcantcacaacccaatagttaacatgattctgaagaacagtcttatctgcgatatctacccacttctaaacaaacacatctatagaaatccatgtncatatatattagttttcaacaagngngggggggcaacaactctaaaatttcaattntatattctgaanacacttcaaaattatccacttgatgcgggatataaccatagggagataaaaattcatgcaatgatactcaggggttttttttaaagggnaatccaatatttgagcattcaatgctacataaagnggattgnatatcgaaaataaaacangcgccaattttatcattaattaataacacatttattatcttgaaaccaaactgggccnaggtactttttggntttnngagncanctctgnntaaactcatttctctcaagctncctggganataaaaccaagannttncattnattctttngngntaacaanaaanggnggcgggctcaagggngngatgncttgnnaattcagagncanaagggcttnttntgggcggangggnataancgctacttgtccgccactaaaatctaactatcttacttgctgggcggatcaacttctaaagggtggggggcatcttcatccaaactagggggggggggggccctaaggggggctattacttggcctgggcgtggtggccggggcgttggggagcggggagttaaatgggtgttgatggggggaaggggggcgcgagaagggggggagggtttggcgaaaacctgggtcccccggagttccagggggggagaggtggggggtcgcggc

SEQ ID NO: 524197 - DNA, 163 bp, Homo sapiens
ctcagaggcactggtggtgaagtttgtagggaggggcactctcttgccctcgcagatcaggtctctgaccaactcctacttgggatccataagctggtgggtagggagcacctgtgtctgggtcccaagctccctgctccttcttatgtgactcgtggaaatg

SEQ ID NO: 524198 - DNA, 143 bp, Homo sapiens
gatgtattgtgtgtgtggctgggatgagggggctagctgggggatgaggctgccgaggtggctgaacgtatgggatggaattagagcttcagaccttggacgtcatcctgggccagcacagtgctgcgaggagccacttgtgt

SEQ ID NO: 524199 - DNA, 746 bp, Homo sapiens
tgggttgagcacaggtactttattggatggtcacatgaaaaggtgcggccccctaggcccctcccctcttcaaggggtctacttggcaactgtgaggaggtggaaatctcagtgtggggggtggactgatgtgtggcatgggacctccccagcagtgatgggtctctctctcccctcttgtgctcttgctggtggctgtgtggctccaggggctcttactcctttgtgagcgccagtgtgggccatgagtgtccaccaccctgttgcttgtacgccaaattcgtagtcataccaggaaatgatgcttgacaaatgtggtgtcgtgaaatgggacaatgccagccccagcgtcaaatggtggagagatgtggtgttgtcgctgtacgaaagtcatgaggagaccacctggtgctcagtgtaccccagtgatgcccttgagggggccctccgacgcctgtttcaccaccttctggagtgtcctcatattgggacgggtttcctaaacggcagtgtcaggtcccccacgtgcaccacgtttggcaggtgggcgacccaggaggtgcacatagccagtgagcatctcccgaacagcctacaggaatgaccttgcccaatgcctagagagcgccattaaaggcagggataatgtttgaaagcccggggcattcagccaaaggtcccgaagagccaccacaagtcttctggtgcagtaggattacttgtgaaaacactcagaacaaggttta

SEQ ID NO: 524200 - DNA, 132 bp, Homo sapiens
tgaacatcggtccatcgtgtctcattcgtgtcctgaacattcgtgttccgtccgtcagttgggcacgagtcttagcagttctagattctatgtcttcttgcatgccgtccgtcagttggacacgaatgttca

SEQ ID NO: 524201 - DNA, 363 bp, Homo sapiens
  misc_feature (16)..(16): n is a, c, g, or t
ttaaaaaaaaaaaaanatttgaagcccctcctaaagataatatagcctaagcccttttcttttctaaaacccatccgcctccttttaaaaggatgaactaaacccggggtatgtaatacccgtgtttcccaaccggccatttatgctttaaatttaaaaataaggtcctttttccccccccggggccaatgtttacttgtaattttcttccccccgttcgggttaaaataccttttcccattattaaattgtaaaccccctggggtttggccccctttaaaaattcctctttgtattcccctaatttttggacccgttttggccctatggtagggccttaataaaggtttgaatgagtgtgta

SEQ ID NO: 524202 - DNA, 374 bp, Homo sapiens
gtgttcttccaaatgttttacacagaatttgtgttacttttgtagtcaaaaaaagtattctttaattttctaattttcaaaaaggatggtttttttcttccctgttaggtattaatatagtagggaagtaacactcaaaacaagtcaggaggccaggtgcagtggttcatgcctgaaatcctagaactttgggaggctaaggcaagaagattgcttgtacctaggagcaggaggcggaggttgcggtaaggccacatcatgccagtgcactccagcctgggcaaaagaatgagatactgtctgaaaaaaaaaattaaatttaatttaaaaataaaattaaataaataaatttgggattaaccagttaactgtca

SEQ ID NO: 524203 - DNA, 208 bp, Homo sapiens
  misc_feature (30)..(30): n is a, c, g, or t
  misc_feature (98)..(98): n is a, c, g, or t
  misc_feature (105)..(106): n is a, c, g, or t
  misc_feature (175)..(175): n is a, c, g, or t
  misc_feature (197)..(198): n is a, c, g, or t
cggctctgaagtatgcggaggcctcctccnggccccggcattcgcggagaacgagcctcgcagaagtttggctgcagctgcccgggcggcgtcgtatnggctgcnncgcggccgcgcgggggctgagcgggcgccacttcctccgggccggcttttgtgtctggcatctcctccncatgctgcgtctgccacctacnncggcggccgc

SEQ ID NO: 524204 - DNA, 542 bp, Homo sapiens
  misc_feature (125)..(125): n is a, c, g, or t
  misc_feature (542)..(542): n is a, c, g, or t
tttacagagaggggttaaatgcataaatctttttggaagttttgtttaggctcatcctacataaatatttatattttggctccgtactttaaaacataagtttctactttccttaatggtttttntaaggagggataaaagacccttcttccttatttgaaaattctggccatcaactcgaactgggattatgaacaccaactccatcaaagctatacttttgattctttttggggggcagggaaaatgcaggaaacaaaagaaactggggggctgttggaagggaattgataccatacttctttcaaagaggcacacttacctgtccttgacagaattaaaggaaactaatgtataaaaaaaatatccaagaacataacgcacaaaaagtgttggccatacggaaaagcaaaaatctaccttttggggactattgcttgcatgagaaggcccccagcttgatactaatgtttttaaatccaaccggattcggtcaacctggtgtatccctacatgtaagactgcccgcaccccgggggttn

SEQ ID NO: 524205 - DNA, 481 bp, Homo sapiens
attgcaaagctcttatcggctcatatgagagagcaggttcctgcccttgaaaatgccggtaagctatagcatatgttttttaagacttaagcatttcatgctttaaaataccttcacaagtgaacattacacacagaagttcatttggttttcctttgttttatggtgcatatagcaataaagacccgcgctacacaagcctggaagccgctgtgtgccatcggggccttggtcccgtgccttggctgtcgttccccgttctcattctcctctccccttcctcactgaaggctgtgagttgctttcaatgtgacaacactatgatgtcattcggacaggatttgccaggacagactgcattctgagtcctgggtgccgtatgtgtatgcggcagtgttgtcaggcagatcttgatcgaagacatctatgttgccataattaccatcaagtacacacatgtcggcaaaaggctaacaactga

SEQ ID NO: 524206 - DNA, 310 bp, Homo sapiens
  misc_feature (30)..(30): n is a, c, g, or t
  misc_feature (68)..(68): n is a, c, g, or t
  misc_feature (97)..(97): n is a, c, g, or t
  misc_feature (100)..(100): n is a, c, g, or t
  misc_feature (108)..(108): n is a, c, g, or t
  misc_feature (120)..(120): n is a, c, g, or t
  misc_feature (251)..(252): n is a, c, g, or t
  misc_feature (274)..(274): n is a, c, g, or t
aattaaaaacagggaagttaaatctatagnttatattaacaaactgcaagatctagatcttgcctggntcttgactcggttaaaccaactgtttaanganccttacgngaccatcaggangtttgagtattgactggtacttggcatcaaaaaatgttttagcagtcttacacaatggtattgtggttatgttcaaaaaagtaccctatctttggggttatatttgaatgtctctgatcacacaaacatgnnaatactatgcctgttaatgggnctcaaactgctccctgtgggttggggccggggctag

SEQ ID NO: 524207 - DNA, 433 bp, Homo sapiens
aggtgatctagaggatcccatctacttaagtcttaaaaaatttcacacgtttttcatagtagtgggctagtttacattcacaccaaaagtgtaaaatcattcctttttcaccacatccctggcaacatgtcctatttttttattttttgattatgatcattattgcaggagtgaggtggtatcacatcggggttttgatttgcacttctctgataattaggtatattgagcatgtttccatatgcctgtaggccatttgtatatcttcttttgagaatagtctgtttatgttcttagcccactttttcatggatttttttttttttttttggggggatccgaatgagttttcggaaaattcgggatataagttttgggtcagatgtatagatataagtcttgggtcagatgtatagatggtgaagatttcctc

SEQ ID NO: 524208 - DNA, 283 bp, Homo sapiens
ttggacatcttgactcactacaagctccgcctcccaggttcacgccattctcctgcctcagcctcccgagtagctgggactacaggtgcccaccaccatgcccggctaatttttttgtgtatttctagtagagatggggtttcaccatgttggccaggatggtctcgatctcctgacctcatgatccacccacctcggcctcccaaagtgctgggattaccggcgtgagccactgcgcctggcccctcaatccacagtttcatgcccatgcgtggattgccag

SEQ ID NO: 524209 - DNA, 471 bp, Homo sapiens
cagccaagcctcctaggaggtaagaatgggaggtgggaggtggcaaggaagaaagagcactgggtgggaaggacctgggctacttttcatctcggaggctcaatttcctcacctgtttgaagaggaaccaatttggcctacctcagcaatgcttgggagaattgcatgggaaattaatgtgaaaatttggaagaaagcagtgcacactaggagacgcaatggcgtatctaacctcagatatcccttcccttaatatgactaccacccagaaccacctagcctaggtccccagcagtagaggatggatggctttttttctgactcctacaaatgcaacatgctctgcctccctcaaatccttaagcagcgacgaactaatcctgaaactgcttttctacagcccatggtgcttagtataaagctgtgcatacagtaaagagaggttaaattaaactccctagtagactgaaa

SEQ ID NO: 524210 - DNA, 856 bp, Homo sapiens
tacccctctttagttttatgcgctcaaaaaccaatttaaaccccccccccatgtaaagggggggcagggaaaaaagacaaaaacgcacaaagccagcgcgggaaaccaccaggtcctgtgccccccgccattatttcgccctgtgagtgggattttgggttttctcattcttgctccctgtgttggcttggcggtggagtgtggggggtggagcctctcctgtcggggggcactgggccactgtgagcccccttgggaagaagtatcagaggggagggtggagagggccactggtgctccgggccagtggcatctgcgggggaacaggggctgtggccccccaagaacagccacgtgggagggcagagagggggagggataggggcaaggggctcatcactatcgagcggtgctcaaaggaaggggtgcctcgagaagagccaaacagagagagggggacctccagggacatgggaccgaggaggcttggccagaaaggaggaacaggaggaataacccaagggtggtggtcacaacagagacaggtgtctcaccactcagaggcatgggggcgcaagagggtgaggccaggcactttccggcaacacttggggaaaggaaagcactaccgcgctatccacatcgggggaaaaactcctgtgccccgcccgctgagagaccgttggcgatgaggcactccaggagaggcccaaaaaagaccaggggggaaaccacctggggggggcaaaggggggggataagcgacggacaatacagcgaagctcacaggacgggtcatgaccgcaagacaaggaaaggtgacagacctggacaagaaaccgcggtgggccccgac

SEQ ID NO: 524211 - DNA, 974 bp, Homo sapiens
  misc_feature (126)..(126): n is a, c, g, or t
  misc_feature (138)..(138): n is a, c, g, or t
  misc_feature (255)..(255): n is a, c, g, or t
  misc_feature (312)..(312): n is a, c, g, or t
  misc_feature (314)..(314): n is a, c, g, or t
  misc_feature (317)..(317): n is a, c, g, or t
  misc_feature (361)..(361): n is a, c, g, or t
  misc_feature (365)..(365): n is a, c, g, or t
  misc_feature (374)..(374): n is a, c, g, or t
  misc_feature (393)..(393): n is a, c, g, or t
  misc_feature (395)..(395): n is a, c, g, or t
  misc_feature (400)..(400): n is a, c, g, or t
  misc_feature (410)..(410): n is a, c, g, or t
  misc_feature (431)..(431): n is a, c, g, or t
  misc_feature (453)..(454): n is a, c, g, or t
  misc_feature (504)..(506): n is a, c, g, or t
  misc_feature (508)..(509): n is a, c, g, or t
  misc_feature (519)..(519): n is a, c, g, or t
  misc_feature (531)..(531): n is a, c, g, or t
  misc_feature (548)..(548): n is a, c, g, or t
  misc_feature (595)..(595): n is a, c, g, or t
  misc_feature (657)..(657): n is a, c, g, or t
  misc_feature (661)..(661): n is a, c, g, or t
  misc_feature (664)..(664): n is a, c, g, or t
  misc_feature (672)..(672): n is a, c, g, or t
  misc_feature (685)..(685): n is a, c, g, or t
  misc_feature (818)..(818): n is a, c, g, or t
  misc_feature (835)..(835): n is a, c, g, or t
  misc_feature (855)..(855): n is a, c, g, or t
  misc_feature (869)..(869): n is a, c, g, or t
  misc_feature (873)..(873): n is a, c, g, or t
  misc_feature (884)..(884): n is a, c, g, or t
  misc_feature (904)..(904): n is a, c, g, or t
  misc_feature (974)..(974): n is a, c, g, or t
tcggcttacatatttccaaggaggaaaaaaaagattctaagaaataattaaaagtagaactaaaatagcagcgattttttgagaaaccacacatttcatgcatcaaatattttttgaatgaaaggnataacatttgantctcttctgtgtcctagataccatcctagacatgttctctatctcataacactcatccctcacaaccatcctgtatcttagaaaccattctgcctaattaatagatgagaaaacgtngaagctcagaatgtgtccagtgacctgcctgcagattatacgaccaatctaggacanangcngaattcaaattcagctgccaattatgttgcagataccatctganaaanttctatttntttctaatcataatatttnanaaatnaataaatgtnaatgccatttaatcaaaactnaaaacattgaatgagaaaatgnnttagtctgacctacagcatgaaaagaaaaagtaaaataaactctttgggnnngnncagtgcagancccgtgacaggncaatggctgtttatcanttcaaagatttctcaaattttggttatgggtttttctatcctaaggnaaacattcttttcattaaacctgtaattttattttttccttgtatgaattcccttgcttatnagtntcnttaatagnaacgttcagtgtnttaatgacagtaagtacctattagcagttgttgtaagagtgtggtcaagggcaaatataccacctatatctttataagttagtcttccagtagccattgaatgtatgatagaaataatctattattttcctgnagctgagtttctatttncttttggggggcagggagcncaaagatgcagatnaagnatacatatctnactgccaaaaagggtgcaantcctggcatttcattattctgaggaaagagtcataataaccattatgaattagattacatctttttctan

SEQ ID NO: 524212 - DNA, 628 bp, Homo sapiens
gagagagagagagagagagagagagagagagagagagagatacagatagtcatagcattcttgttatctcctcacccctcctatttccttacttctttcgtctcttcctcactctttcttctttctcttctctctattcttttctcctaccactcctcttaccttcttcttctcttttgccccttcttttctatttctccctcttccttctccctcccttctctcacctccttttccctcttctttttaccatcttcttctttcccctcctcttctctttttttctctctttttcctcttccccttctttctcgtttctctcttctctcttttctctcctttttctcttcctttctttcttcccttctctctttctctcttttcttcttcccttcttcttgcttccttctcctttctcctttttcctctcttttctcttcttctctttctctcttttcttcttcttctctctttctctcttcttctcttcctcctttcctcttctttttccgttcttctctcttatccctctctttcttctctttttattccttctctccccttctttactttattcctttttcttcctccctttcttttctttctttttccccctcttcttcatttc

SEQ ID NO: 524213 - DNA, 645 bp, Homo sapiens
agcgagcaccacaacctcgtatcagatttctagatagacaggatcagattaaccagaagatgatgcaggccaccgttgccttgtcggccgtgctgactgtcgccgtaaggggcaggccggcggcgaggaggaggagcgccaccgtggccgccggcggcagaaggatgccgggcggtgccgttcgtgcatcggccgccgcggcgccggaggcggactacagctccagcgtctcggtgttccccatggaggcctgcgacctggtcggcggcgaggcctgcgacgcgcagatgtacccggagacgaagctcggcgccggcgccggtggcccggctgccgccgtcgcgagggcgccggaggtggagagggagtacctatcctacgacgagccaaaaacggtgttcccggacgaggcgtgcgacgatctcggcggcgagttctgcgaggcgccctaccaaaccagcaagtaactaactcaagcagcttactacgaactactattaggtgtaaaaaacggctcttattctcaggcagaggtcgatcggatgtatatcatgtgaataagcaaaaaacatggctgctacgctgctggcctgtaactgtattattggcaccattaacgaaatggcagtcatcaaaaatacaata

SEQ ID NO: 524214 - DNA, 402 bp, Homo sapiens
ctataacaatattacaagttggtctcccacacaccctacttctcagtgggctccaagaaggcagagaacatcttagccatcttggtttctctagcacctggtacaatgctccaaaaagaataaaagcactggttcacgtctgtcatcccagcactctgggaggccaagatgggtgaatcacttgagctcaggagttcaagaccagcctggacaacatggtgaaaccccatctctaccaaaaacacaaaaattagccaagcataatggcatgtggctgtaatcctagctacttgggaggctgcagcaggagaattgcttgaacctgggaggtggaggttgcaatgagccgagatcacgccactgcactccagcctgggcaacagagtgagactctgtctcaag

SEQ ID NO: 524215 - DNA, 86 bp, Homo sapiens
ggagggctgggcacaggcagtgctatggcctttttttttttttttttttccaataaaagaacttgcccagcgtgaaaaaaaaaaaa

SEQ ID NO: 524216 - DNA, 608 bp, Homo sapiens
tagttatactggttcatgtggagggaagtaatgtacgaggaggaaggtctggatgtgtgtaataaaagacaaaatttttttccaaatattttcagtctatagttggttgaatccacagatgcagaaccaaaagacatggagggccaatgatactttcaattctttcaaatacaattaaagcttgttttgtgggccagaataccatccatcttggtgaatattccagatgaacttgaaaacatacacacagggccaggcacagtggctcacgcatgtaatcccagcattttgggaggccgaggtgggcagatcacctgaggtcaggaattcaagaccagcctagccaacatggtgaaaccctcatctctactaaaaatacaaaagttagctgagtgtggtggcatgcgcctgtaatcccagctacttggggggctgaggcagggagaatgtcttgatcccaagaggcggaggctgcagtgagccaagattgctccactgcactccagcctgggtgacagagcaagactccatctcgaaagacagataaaacaattaaaaatacgtatagaccggttaaaagtaaaagcatgtaaatgaatactgtgcaa

SEQ ID NO: 524217 - DNA, 1133 bp, Homo sapiens
ctagcatgtaccatgcgtcgactatgctaggaatactagtgatatcgctcacagcgctcatatcctgccctactatgcctaggaaggaatagtactatcgtctgtgtcattcagtaggctactctcataaccctcgaacgacccactcccatcttagaccaatattgtgccgtattgccatactagtctttcgaccggctgcgaagcagcggtgggcctagccctactagtctcaatctccaagacatatggcctagactacgtacataacctagacctactccaatgctaaaactaatcgtcccaagcaataatattactaccagctgacatgactttccaagaagcacataatcggaatcaacacaaccacccacagactaattattagcatcatccccctactatatctgaaccaacatcaacaacaacctatttagctgttccgcgcaacacgttttcctccggaggcccctaacaaagcgcggctcctaatagtaactagcgctgagtcctacgccctcaaatcatggcgaggcaagcgccacttatccagtgaaccactatcaccgcaacacacacactctaactcctctatactcaatctccctacaaatcaccacatgatccctctgcacatctcacacagcaacaaattattcgctatcactaagtgactcctcgacaaccacaccttctaccaaaacacgcgatagagaaacaacaccaacagaggatatcaaacaacaacaacaagaaacgacaggcagaaacacacgcagatcaaacagaccgaacgtggaccacccacacacacaaacacaagagacaaaagagcaccacgaaacacacaggagcacacacgacgtgcacaacacagacagactgcggcacaaaagctcacaccgacccgcgacccacccagacgagacgcagacgaaacacaggcagcgtaaaaacgccaaaaacacgcgaagagggaacccgcgcgatacaacccacagcgagacgcaggcaacacgaggagaaagccaacggcagcacgcacacagggcggcgagccgcgccaccgccaccgggccgaaacgccgccccggcaccgcgaaagaaacaacacgaaggacgccatcgca

SEQ ID NO: 524218 - DNA, 109 bp, Homo sapiens
tgattcatggctgtagtcgacgtgtattcaccactgcggtgcatgcctccctgtacaagttcctgtcgacacgatgagcaccgtgcatgacctccaaatatctgattaa

SEQ ID NO: 524219 - DNA, 239 bp, Homo sapiens
atctagaggatccggtgatgttatcgccacactcactttaagtcagagaactgaggcgagagaagtaaatgagttgccgaagtctcagagagcaagaaatagagatggacttggggcactagatctctggttattgctgtcctgtagttcatggagctggcagatggatacatctgtgacctgcgatgatggagagactgctggacccttcagaggatctcatctcaaggtggggataa

SEQ ID NO: 524220 - DNA, 559 bp, Homo sapiens
gggtggctttggagttgcagttgatgtgtgatagttgaaggtgagatgggtctcctgaatacagcacactgatgggtcttaactctttatccaatttgccagcctgtgtcttttaattggggcatttagcccatttacatttaaggttaatattgttagtgtgaatttgatcctgtcattatgatgctagctggttattttgtctgctagttgatgcagtttcttcatagtgttgatggcctttacaatttggtatgttttttcagtggctggtatccgtttttcctttccatctttagcacttccttcaggagctcttgtaaggcaggcctggtggtgacaaaatctctctgtacttgttttcctgtaaaggattttatttttccttcacttatgaagtttagtctggttggttttgaaattctgggttttttttttctttaagaatgttgaatattggcccccactctcttctggcttgcaggttttctgcagagagatctgctgttcgtctgatgggcttccctttgtgggaacctgacctttctctcttgctgaa

SEQ ID NO: 524221 - DNA, 174 bp, Homo sapiens
gctgtcatggtgtcatatttgtggtcataccccacctccagcccctgcaccacgggtctgtttactgacttgattgtaacaccttatgctaggatgtcatgtaggcggaggcgttcagtacaaagactcctgtgctgagtgtgccagggttgagcaccatctaagttggtgcgt

SEQ ID NO: 524222 - DNA, 821 bp, Homo sapiens
  misc_feature (280)..(280): n is a, c, g, or t
agcgggctttagcttcggccccggcggcagggcgggaagactggtgtggtctggccatggatgggctccaggccagtgcagggccgttgaggcgcgggcggtcgaggcgccgggcaaagcccacagccacacagcgggtcggtcctggccctgccccttggaggtccagtgaagatacgaaaaagccagctgccgaaggtgtttgtaatccccgcatgtgcagccgcctgaggaacgcaagacagcccgtagccgagcaacctcgggagggacatcggangcgcgtgagacgtccggaaacggccggaacggacccttggggtggaaccagcagccttaaccccggttgaggggctggcacggcggtgtgaccgagcccgtttcccgggagacggcacaagacccggggccgaagacgcccattacctgggccacacccctgtggtgtgcctcgtgacacataaggtcttggctttggtgaaggtgcctttcggaaccacctcgcacggatgacgagcatccaccctattggcaaagagccgacggggttacagagacggctggcccttgtagtaggcccacggatttttcccggcggacacgagcacggcaagccaccattggggtggagaggggtatgacacagccaggagcccaggggttaccaggagagtgggtgggaaagaacacattcagagccctgagctagttcgcaccacgcgcgccacaacactttacaaggggccaggcacacaagtacgactcccgggggggcccctgggcaaacaggcagtacagagagcctgaaaggttgggattaa

SEQ ID NO: 524223 - DNA, 1528 bp, Homo sapiens
tgaaactaggtctcacaattttgccccagggtgggtctaaaactcctgaaactcaagcgaccctcccacctcagcccccccaaagtgtgctgaactatctacaggcaagggcccaccatacacagtttaagaatattatttttgggtattttccacagctcgtgtcaggaaaagtctttaaaaagaaaaagatatggggtgttacaagagttaagaacacgagcttataagacacagaaaccccttgtgttaaacacgaggaacacaactctacgtggctttaaccccgtggagtgttcctctataagcatattttctgctctcttattttacacaaactgtgttttagagactactcgtgcaatagtttctacattcgagcctttctccaaatttataccaatatttggtgcaccttattattctccccaccatgtgttccccaaatatttaaagcagagtatcctatgagggatttccccctatacaaagcgggtgggcacctctcaattctagtgtgggtgtctcccagtttaacactatttatttcacggggaccaaacacctagttggggtctttaacacagagtatcaccgtggtgtgggaaccacttgtgggggacacaacatattcacaccttaagaaacagtgccttcaacacaatgggtttccaagcaacaaaatctgtccccccaaaaagtcctctcataacgggggatcccaataccaaagaaccaattgtcgagaacagttgttacacccacggcagtatcaccccagaagggcggttgcttgcacaccctattaacccatgaaagcccaaatagttgcgaaaacccaatccctctgtgccccgggagggaatcacacacttagtggaaaacaggtgggcaacactataaattgggaaatctccagggagttgggaaccccaatctagagttatacagaacggccaacaggaacagcacaccgccgctatacaccgcatagttacagccagacgacaggggtggtcctaatccagttggaaaagcgtctctagaaacaatatagctgcggacgcacctcccacacgtggacggtggccctagttaaccagataacttcgtaggagaaaccatcacggcatctattccccgaggacatctgtgacaaaggggtgactaaccatcaagggcaatcaagcgacgtgtgcctccacaacaacacctcactggggagggctcaccccttgcgcataagcagaccatcgaacgggcggccgtactgcaaacaaatcacaagcaaggcgagtgccttactatggcaggacaacctatcagacacagaaacaggtggtggataacacacaactcagggaagaaaaccaatgctttagcgctcataagaatgtgctgtgacgcaagcagatgagacagccacaggacaagaaggagagagatcaccacacataacaaacgacaagcaagtacacaagaataataacatagatatcatgcgacttcatcgtgtcatctgttttgt

SEQ ID NO: 524224 - DNA, 357 bp, Homo sapiens
  misc_feature (57)..(57): n is a, c, g, or t
cccgaacccgttggaggggcagtgctgcacggcgcagtaggcttaggacagcagggntgccatgagactcttaatgctgcatgatctagacaggacgtacgacgtagccgtcatgctaatgactgagaccgtgatgactttgcaagactagctagagctaagacagatgggagcagactagctgcctaagaacagcatctcgagcgcatctcgctatgacgcaatacttcgccaagagctcttggtagaagccactaacctaacgggtgagctgataggtagctgatcgagatggaaccttacatgatctcaagatgtgcatacagatcggtttgaatgcacctgtgaatggcagat

SEQ ID NO: 524225 - DNA, 129 bp, Homo sapiens
  misc_feature (66)..(66): n is a, c, g, or t
taagaagtaaatccttagttctcttgcctaagttgcgcctctctcactgaaagatatgtataatantgcgtataatggcgtttagagtctgatagacatgttttatattatatacctagctagctttag

SEQ ID NO: 524226 - DNA, 1235 bp, Homo sapiens
taaactgcagatgaatgagcaaaaaggatgacacgccagcagagtgacttacgagagttaatttagcagtcttcgtgatagactcttcagaattatttatgtccctgtcactatttaatatcctttgtgccgtgaggctcctcggatggttgttgtaaatagttctgccttgtatttaattaactacccactagaaccggaacgtggtgctataggacagctatcctagcatatagatagtaatgtgtaggttcgcacatagtacatcatgtactagaccacgtagcgctgaccgaacagtctctaggagaggaatagggcttatccaaggtgacatatgaagcaccgccatatatactttactatactcttagccttctactatgcctacaccagaaagcaccaactcgactactctaggcgggcacttacacacaatagacccctcattagcgcacaatctggcaacggacacgcagctcacaataggccgtcgtaaattcagatcctcaaataagggagacaccaagtacatcccagcttcaagggtcaactgagtgacgaccaactttgccacagcgcatagcacgcctgacactcctatcaagataactatcaccttccaaggataggtcccctctgggacttgcgcgcaccgacatcgtctgggctatttacacacccaactttatcaccacggccatcaaaacacgtctgtcatcagaccacaccttgcccacctactgcactagcggatggcccttcatgacgagcatcatcaaaaacaccctaggggcacccacctgggaaccaccagcactcacacacaacccccatgctcaaagaccaaataaacggcgcagcagggcaaacaccagtcacagagcaaggagacacccacaaccaacatacgcaacacacgccaaacgacccacactagacaactgatacgacatcaaacgcaacccaaaacggacatcccaccaacacagagagcgaaacccacagaagcatacggcaggactagcagacactacggggacatcctatcacaatcaaccacagccacaaacggaacaaacacacacctaaagagcccgaacctcaccacacaaaaccaacaaacacggccaagcaaccgcgcatctgaacaacgagaaaacacaccatataacacacccgagcaaccataccacggaacagccacacacaccacgcgcaacgaacaaacaagg

SEQ ID NO: 524227 - DNA, 150 bp, Homo sapiens
aaggggaggacgacagaaggttatgcatgcttttcttccttccatggcaaccatctccattgctcactccggattaccttcatccttatgtacgataagagtgctagtaagagatcgaaagtgcagagattcgcttgtgtggtgaaacaa

SEQ ID NO: 524228 - DNA, 417 bp, Homo sapiens
gcctggtggttcagctctagcttgtgtataccttaaactgtaactagcaggtgtatatcagtagctgcacttattatttaatcttgctcagtcccagtaactatctcaaaggtaattagctggaatatgcatatagaaatacggttaaaaaaaaatctgtgtattgtttcatctaaaaagaaaagcacctatcggcaacactacaacacctgttaaactttgtagttacttttgcattcctgtactttacaaactgtcctcacagcacaaacgtttacgacttaggtaatgaaactatgttagtacactaaataccgataacgctggtactaacaaacaaatgtatctatacactaatgaatgtgcctggaaaatgttcatatatatgtatatgaatgtctcatcatgctgacgtgt

SEQ ID NO: 524229 - DNA, 331 bp, Homo sapiens
agcaaggtcccacccttgttggctccaacagtgtttgatatccaacaataggaaaccagacccctagagtgattttagtgtaccctggagtttgagaacctcatctttccggcaggtggaagggatgtggcaaacagtgcacaggggtcccaagacttgtcccttcactcacctttcactggccaaagcaagtcacctggccttgctcccccattgccttttgccatgattggatgcttcctgaggcctccgcagaagcagaaaccactatgcttcctgtatagcctgcagaactacgagccaattaaaactcttttctttataaatgaaa

SEQ ID NO: 524230 - DNA, 216 bp, Homo sapiens
gaaacgtgaagaaggtgaagatggcggtagccagggccggggtctagggagtacagtcgctgcaaagtgcattcctggaacgtgatgccgcttggcgcacggacagccgaccacatgaccaaggacatattccttggtcctgatgctgaggaccacagaagaacgataccgccgccgccaagaagtataatatgcgtttgaagactacgaacctta

SEQ ID NO: 524231 - DNA, 287 bp, Homo sapiens
aggactactcccatctgcttcttcccgtccccgggaagtggcccgatatggatgtatctgtatccccacccaaatctcaggtagaattggatctgtgtccccacccaagtctcaggtagacttgtaatccccagtgttggaggaggggcccagtgggaggtgattggatcatgggggtggatttctcccttactgttctcatgatagtgagtgagttctcatgagatctggttttttgagtgtgtggcccctccccctctccttttgctctcttcctctttctccgg

SEQ ID NO: 524232 - DNA, 364 bp, Homo sapiens
tccttagacttgataagcactaaatttaatacaccaccactactcacgaacatagaacttcagagtagaaaagctggtatgacacgcaggacaggacagaaactgcataactacttattggtctgtaatgaaacagtgcactgtctctatgtcataacatttatgatgatcagaaggcgagtgtgataagtccccgtagatgtccacatcctagtccttgtaaactattaataccttatatggtccatagggacttttgaaggtgtgaccaagttacaggctctcgatgaatgtggagactctatcctgggattatctaggctgcgcctagttaatatcactggggttccttagtccttgaacg

SEQ ID NO: 524233 - DNA, 318 bp, Homo sapiens
agggtacgaatgagcagctcactatttgataacaagataaaacaatcacctgttttaattggggatgcctgtattttatgcacgatttaaaaatgtatgtatatattttttgagacggagtttcgctcttgttgcgcaggctggagtgaaatggcgcaatctcggctcaccgcagcctctgcctcccagtttcaacggattctcctgcctcagcctcctgggtagctgggaccacagatgtgtgccagcacacccggttaattatttttttgtagagatggtgtctcactttgttgcccaggctggtctcaaattcct

SEQ ID NO: 524234 - DNA, 632 bp, Homo sapiens
  misc_feature (211)..(211): n is a, c, g, or t
gatggcgctggaccgccatggccagacgggcgctcaccgtggcgtgcgagcaccgcagcccgacctgcctgcgagccctgctggacagcgcagctccgggcacgttggacctggaggcccgcaattatgacgggctcaccgccctgcacgtggcagtgaacaccgagtgccaagaaaccgtgcagctcttgctagagcgcggtgccgacantcgacgcccagtggacattaagacgcgtgcggctcccgcttcattccacgcccggtggaaaaacaaacggcctttagcaattggttgcagttgttgttgccagccacggcgccaagcgtgaacgcgcaaagtgtactccggcagtctccgccctgcactcagcgtccggccgcgggctcctcccgctggtgcgcacgctggtccgcagcggcgctgacagcagcctcaagaactgccacaacgacacgccgctcatggtggcgcgcagccgcagggtcatcgacatcctgagggggaaggccacccggcctgcttccacctcccagccagacccctcccctgaccggagcgccaacacctcccccgagagcaggcagctgctcaagtccaatggtcttctctccgatcaccatcctcctca

SEQ ID NO: 524235 - DNA, 135 bp, Homo sapiens
cacaccatctttagtcccacctccttgggaggctgatggcagtgactgcttgagcccaggaattcaatggctgcatgggagctatgatcacacctgtcgacagccactgcactccaacctgggtaaggctctgat

SEQ ID NO: 524236 - DNA, 268 bp, Homo sapiens
cagtcgcttcactgtgactctctcccacccaaggtatcatgcaaaggtgacatgctcatacttggggcaaggcccatcatcactgtatactcactggatttatccttagggtgtgcatcgtcctgagtttacacacccccttcatggctgaagtctgtgtggcttctgagccaagcttggagacaggagcctatggcagaggctgggagcctggaatcagcatccagcttgccctgctatcacaccccagtgctgagagtcctccacg

SEQ ID NO: 524237 - DNA, 695 bp, Homo sapiens
ctccagatacatactctagagtacttttccatctttaaaacttgaatgtgtagctcagaatcttgttaaaatgcaaattctgattcagtaagtctggaatatgacccaagagcctgtattattaacaagtttctaggtgacactgatgttgctggcctacagatcttgatttgagaaagaaggcagtgaagaagggaaacctagttttagtcccaggttttccactgacgtgctctgtgacataggccaagctgcctcctgagtgcgggttggaggatagaggccttctgtaaggcctcttgtgactctaaatctagactctgtggagggccatggatgcctacggtggagcacaactgctgtttgcccttctctcacatttcacctccaaccgtgtgagagccagcgggcagatttcatatactcacacaagcactgatagcctctctctgtccttctttccacccttgttactctcgcacatgtgcatggacgacacgtaggagagtgttacagcattgtaacagcagattattgaaaacacctgcatctgtcataggagactggattaattgtggcacgtttatgcagcagttaactgtcagtggattaaagctacatgtatttacatgaataagtctcccaaacacagtaagttatagaagaatatttatagttggatatcatttgaatac

SEQ ID NO: 524238 - DNA, 901 bp, Homo sapiens
gctcactgcagccttgaacttcctaggctccagtgatcctctcacctcagttccctaatagctaggattacaggtgtgtggcctcacacccacccacccttcaacctggctgatccaaaaagttgtggaagaacacagggtctcaccatgtgtgtccagccgtgtctcaaacctcctggtcctccacgtgatcctcccacctcagcctttctcaaagtgcatggaatttccacagtgtgtagacgccacttctggcctgcgctcaccactaagtgtgaattacattcagaatcacctcctctcccccaaaatttggtcagaagatagtatatggaggacagccaacaagccaacagcagaccaccctttacaagatactcggttacctttatcccctcttgtgttaccgtgtggtcatttcacccgacaaaacatcctaacgcacgaccgtgcctacaacacacttgtacatgtgcccccatttgcctcacgcgcttctcactgcactgggaaggtgtacacaccacagtaggacatcattggtcaggccaccattgctaattcacacaagtgccccgacgaacccagacggcgtgccaacacactcctttcactacagtgcagtatttggtgagggagaaaagactggtagtacaattgtgattatctgggtagacatgaggccaaagttatcctttgataagaaaattggtggagaagaaatctgatactgtggtgagtcattatctggagaaggtatacgaacacgatatcgagtaggaatacagtggttggaaataacccgtgtaagcagcctaacagagaggtgttaaacatagagttggaggtggaggtacggattgcaaggggttgctaaagtggtggattcggggatactgag

SEQ ID NO: 524239 - DNA, 555 bp, Homo sapiens
  misc_feature (89)..(89): n is a, c, g, or t
  misc_feature (104)..(104): n is a, c, g, or t
  misc_feature (110)..(110): n is a, c, g, or t
  misc_feature (117)..(117): n is a, c, g, or t
  misc_feature (362)..(362): n is a, c, g, or t
  misc_feature (376)..(376): n is a, c, g, or t
  misc_feature (510)..(510): n is a, c, g, or t
acagccagtggtggtgattactggcgaatcttgaacccgggtgagtaccgcgtgacagcccacgcggagggctacaccccgagcgccangacctgcaatgtgantatganatcgggnccactcagtgcaacttcatcctggctcgctccaactggaagcgcatccgggagatcatggccatgaacgggaaccggcctatccacacatagacccatcgcgccctatgaccccccaacagcgacgcctgcagcaagcgacgcctacaacaaccggcttgcggcttcgggcacagatccggcttgcggcgccttcaacgccaccaacaacctaggcccccaacacttgggccttccaacgcttgncccctgcccctggncaaccacccttgaggcacttaccatagaagcccttggggccttcataccggccaaccaaccgctggcttgggaaggaagtccggaagacttgagacctacacagaaggtggtgacagaagttttgggaaccgangtgggaagccccgaggtttgggaaccaaggtgggccccgggtttg

SEQ ID NO: 524240 - DNA, 1024 bp, Homo sapiens
tgcaacaggttaacgtgtatggcgtgtgcgtgccaggtagtgagggtaaggtgggcatggctgctgtgcagctagcccccgggcagactttcgacggggcagaagttgtaccatgacacgtatcgcgctttgtgcatcccatggactacgctagccccacacatttcatccgcatccaggactgccatggaggtcaacagacacgttccaaacttgatgaagcacacggatggatgcgatgaagggcttcaaatgtggcggatcgaggataagacccctcatgctcagtacttggaacaaccgtggcccagatcccttaccggccacatgcacggcacgcacaatgttaccaacgggctgcgctgtagtcgaacgggaaccttgggaagagcatctgagtccaccatggaccacaaccaattggagatacgggacatcacaacgccccatgacaaacaccaccaccccaaaaacaaaactcagcgtagatcccattagcaactcaccatgggagcgacacctggagagtgaaatcgccgaagcctgggcccaaatacccccctcaaaaccatcacaggtggggcttgggacaaagtgaacacggatggagacccctggtacgcacaggcagggcaacgacatacacaactccagagaaggtggtagcacagcaaagacaaacaaacagaaaaacgaaaaaaacaaaaaacaaaactacaagcccgggcgcataacggcccccaccaagacacactatcacgataagaacacattggtaagcgaagagacgcggaagccacaagcgcgagaagaagccacacagtgggaaccacaatcaggcgaaacacaaggaaaaacaaaggcgacgacacaaaagacaagcgaaggacactccacaccaccccacaacaaaacgtcccgtggcatcctccacctgacacaacaacaacaacaacagcagaagacagtacgacaaaaaagaaaaaacaacaccaccaggaagacacgacgacggaacctatac

SEQ ID NO: 524241 - DNA, 81 bp, Homo sapiens
acttgatcatctctactgcaagcatctataatttaaagtctcgagtacactctcagagtcgattcatgagtcatctgtttt

SEQ ID NO: 524242 - DNA, 144 bp, Homo sapiens
gcatggccccagcccctacccccaagggggctacccacaggtcccctacccacaagagggctacccacaggccctacccaaggggtacaggcttcgaattccactagagcatttagagattacactgataagagagtcccccaa

SEQ ID NO: 524243 - DNA, 508 bp, Homo sapiens
cactcatctgatctatgtgatcatttttacaactgatactgcagtgaacatccttgtgcacatcttctttgacattatatgcccatatgtatggatacatttctagaagtaggctatatgtttcatgcattagaaatagattagtatctgttaaacagcccctccaaaagttgtatcaatttatacttcattgaataggggacttgattcggtatatcatggacaggagcctagggatggatagtagggaatagcatttccctgacacatatggtccatatagctttcagtgcatatctgcacactgcgtggtgagactaataaatgtgagaaatccggaacacctagataatgtcctgtttcctaatcggtctgtgccccctgtgtaatctactcattatacgtagtacgtgtcacaaaacctggaaagttctctccgtatcctttctcttgggcacgaatagccagggtataatggaggcaatgacagaaagagctgacataggct

SEQ ID NO: 524244 - DNA, 195 bp, Homo sapiens
tggcacgaggatgcaaacttcctgcctcctccttcccccttccatttcaagaatatgtttgtgtgtagggtgggggtggctttttttttactaccaatattgatgatgccatcaaagaagctgatctggtattcattgctgtgaatactccatcaaaaacctatggaatggggaaaggacgggcgacagatctga

SEQ ID NO: 524245 - DNA, 118 bp, Homo sapiens
tgcagcggactcggcaccgagcggcggctgtcacccgctttgaaacactccccctctccccacggtctccctctccctctctttccacggtctccctctgatgccgagtccgctgatt

SEQ ID NO: 524246 - DNA, 256 bp, Homo sapiens
tatatacatcaataccttaggatggtcataacactttgtcacacagtatggtaacacggatgcatagaaccacagccatgaaaatgagcttccagctcttctgctgttgcaccatagtccacattgccaacataaatggaacgggcatcagcctccatcttgctcctcaatggacatgatcaccgggccagcattgcctggaggtggactcttattcatctgcttctctacctcgtactgtacctcctttagcttc

SEQ ID NO: 524247 - DNA, 123 bp, Homo sapiens
gtttgacttagaggatcccagcaccacgaccctactactatcttgcaccctgaaacaatgctaacatgactaacctccttgtgactcctgcctcactcatttacaccaaccacccaactatct

SEQ ID NO: 524248 - DNA, 350 bp, Homo sapiens
  misc_feature (39)..(39): n is a, c, g, or t
  misc_feature (97)..(97): n is a, c, g, or t
  misc_feature (244)..(244): n is a, c, g, or t
  misc_feature (274)..(274): n is a, c, g, or t
  misc_feature (340)..(340): n is a, c, g, or t
aacataccgtccttcgagactgtgttcaatgccagtggntgcaggctaaggtggccaagtatggggactggttttcttatgacgggagcccccgggnccagatcttccggcggaaccagtcactggtacaagacatggactccatggtcaggctgatgaggtacaatgacttcctccatgaccctctgtcactgtgcaaagcctgcaacccccagcccaatgggggaggaatgctattttccgnccgctccgaccttcaacccgggccaatggnttccttacccctttccaggggcctgcgttagggttcccatggggggtattcgatgttgaagggtgnaccaggcatt

SEQ ID NO: 524249 - DNA, 160 bp, Homo sapiens
ccaaaacgcaaggtaatttaatgcgggatgataaaaagcagtaccgggcaactggaaaaaagagttattggcccaatgaggacgagcacatcacctaaaagagtagaggggccttattcaaacactataaaaccaagaggtatgggtttatagaaaacta

SEQ ID NO: 524250 - DNA, 293 bp, Homo sapiens
gtgtcactgttagtacggcgtgggtatggtgggtcatgcgtataattccaggacattggaaggctgaagcaggctgattgcttgagcccaggaattcgagcccagcctgggaaacatgaggaaacctgtcgctacaaaaaaatagaaaaattagccaggcatgtggcacatgcctgtactcccagttactcgggaggctgaggatgagaggatcacctgagcctggagatcagggcttgagtgagctgagatttgtatcaccccgcagcgtgggtgatggaatagacactcaa

SEQ ID NO: 524251 - DNA, 756 bp, Homo sapiens
ggacaggccaggtttgccggggggaaggcttagccgcagtgacttaccgagcccaggcttcctcctccacggtgcaggtcttcggacgcaagaagacagccgagagctgtggcgcactgaagacgctgcaatggtctcatcaaggtgaacggagcggcccctggagatgattgagccgcgcacgctacagtacaagctgctggagccagttctgcttctcggacaaggacgcgatttgctggtgtagacatccagatgtccgtgtaaagggtgagaggtcacagtggcccagatttatgctatccgtcagatccatctccaaagccctggatggcctattaccagaaatatgtggatgaggcttccaagaacggagatcaaagacatcctcatccagtatgaccggacaccatgctggatagctgaaccctcgtacgctgcgaagtccaaaaaagttatggaggcacctggatgcaccgacgcttcgctaccagaacatcctaccgataagacacatcgtgactcagaactcacttggtatacaatacaccaagaacacacgcacggggcatacagacagaggatccccaacagacgacaaccaaaacaaccacgaaaaaacaacaagagaaacccacacggaacgagcgacacacgcagaacaaaacgcacgcgctaccacaacaaatggccacacaaaggccaccagaaaaaagcaaccccggagccaccccaccacccacacgagccacaacg

SEQ ID NO: 524252 - DNA, 402 bp, Homo sapiens
gtaatcactctaactggaaggtggaggttgcagtcagctgagatcacgccactgcactccagcctggacgacagagtaaggctccgtctcaaaaaaaaaaaaaaaagaaaaaaaaaagggttttaattccttgtttttttttaactagccaacaccttcctaacatcagtgcttggaaagttttaatccaagtatagcagtttcccctggaatttattaaaatcccccgaggcatttggtctgggttgtggtgcctcttattgggttggtgttatttccacgttcccctcccctcccattttctccattaacacaagagaggcattaacttgggaatgcccggtgaaaagtctcttagaaacctaattggggtgatatttggccctgcttccccttttagtt

SEQ ID NO: 524253 - DNA, 951 bp, Homo sapiens
ttggaagcgcctcagtccaagtggatgtgcatcagaaactccgggtgccagattttcacttgcatccttctgtgcctttatcacattccagccaacctgccgtatcagccctctgggaagtctagcatgcttcctggtggtctagggggcttggccttcctcggctcgactagcgctctcaacattgtcccagggcgcatcctcagcccagtcacgaatctcgaagcctggctctccctcctgcgccagcgctcgcccccggctgctccatgacggaccgcacacggcctctcatgacggacacgagagtaccggatcgcacagccctcgtggacgccatcaacgggctcatcaccagaccgcctcttcccaggaccctagcaacttctgggactggcccattagcagtagtgcacgctgttggggccgtcccacttgtgtcaggtccgccgccctctgccccgtagagcttttagccgttaggcaagcacatgatgaggctgaccggcggtcttcatatggctccgtctcaatcgtatgtgacaacatggcaattgcgttcatcactactggatcactattgtgggagacgacaggtggcctaggtaggatgacagcggcttaaccccctggagtgacagtccttcttgggtggactaggcatgttgttgctgtcgcactatttgccacttcacacgcgtggcactagtttctcacggtgttacgctagacatttgctgcctccaggcaggaccggtcaggggtgagcagctattgggagagacacgtggcctttcttgctcctggagcactctccctcccggccctgggaagtgggcgcagccctgtgtatcccccagcttaggcagatgggctgataccggcgctcccttccatcccacgctcagcggccccggccagatactctaggcagacattcacacctcattt

SEQ ID NO: 524254 - DNA, 179 bp, Homo sapiens
  misc_feature (1)..(1): n is a, c, g, or t
ntatacatgtgcctagagcaaagaagttattatctcgaactgacactgagccacaacccaaacaacccagactctccctaagcttacaaacgtagactacattctccagtaatattcatccactgtagcatagttctgttacagagggatcctactagaagtcagaccatgcatggcat

SEQ ID NO: 524255 - DNA, 506 bp, Homo sapiens
aataatgtcacatcactaatcatcagggaaatacaaataaaaactacaatgagatgtgactttactccagttagaatagctactatcaaaaaaccaaaagacaacaagtgttggcaaggatgtggaaaaaagggaaccattacacattgctgatagaaatgaaaattaatgtacaaaaattagccaggcatggtggcactggcctatagtcccagctagtcaggaggctgagacaggagaatcgcttgaacccaggaggcagaggctgcagtgagccgagatcacgctactgcactccaacataggtgacagagtgagactctgtcccagacaaaataaataaataaataaaagagaggaaaattagtacagcccttaagaaaaacaatatggaaatcttcaaaaaattaaaaatataattaccatataattagcaatcttactactgggtatatacctaaaggaaataaaatcagtatgttgaatactgcatattcagtaaattt

SEQ ID NO: 524256 - DNA, 313 bp, Homo sapiens
  misc_feature (19)..(19): n is a, c, g, or t
  misc_feature (26)..(26): n is a, c, g, or t
aatgaattagcactttcanattgaancaagcctgttatcctatgtataaaatagcaaaatgtttgctgtttataaaaagatgtaatggggtggggggggggggtaatttcaagtccctaatttaaaaatgaactagcaattttgtacctaaaaaaaaaaaggtgcactcccctctgatagtgacttgaattcggtatgtaaaaaggggttagtggtatttcattgctgctaaaaatgacaactccctctgtgtcctgtttttcttaaagctgtcagtgtacaagtgggtatttgaataccagaccttactgta

SEQ ID NO: 524257 - DNA, 265 bp, Homo sapiens
gttttgcacggcgtgtttggttagcatgaaacagaggcttagcattgctgctatctctatcaaagccttcaccaggcagattcttcagagcttggttgttagatccggctgcaaaagtctgcacagacctcagcgcattgacgatatcctttgtttttccaaagtagacttcgttcagcggacttctgatggtattttccatgacctctaccaggcgtccgatgttggctatctgtgggcagcagtcactcacaggttcatcctt

SEQ ID NO: 524258 - DNA, 1089 bp, Homo sapiens
ggtcaaggcccacgaccccggaaacctagcgaggtaccgtgggcgtctaggtagtacagacgacaacttctccgtgttcctcggcgatggcggcgtccgggagcggtatgtgcccagaaatacacctgggatactggcctaacaaacatgcagcgaagctcagagttatcgcatgacaaatcatagcaaatacgacgaagtagatactagcagcaaggaaatcctggcggcgaagccctggacttaaggatcacacattactttaagtactgcaaaatatcttcagctattgtgctctgctgaagatggtgatgcatgccagatcgggaaggcaacgggagacatagatggatgggttctggatgcgtacgcaaaggtggaatgggtggatagacccatggatccattcatgggacagattaagctagtggacctgtgcgagggcaactgcaagacccgcagtaaaatggctcgaagcgtagctgacaatcatggaattacaatgcggcgtggcaatagcaagtacgtagagacatggctacacaagctagtgtgtggcacagcccttcgacaaagatagcaagtgccggtgtcgggtgaatcgataagcgcaccccgtggtctagtcggctagcttgggcattgtgcctgggatttggatcgttagtacctccagaattgcgtcaagatcacgcgagattcccgagggagaacccacttattgtaacgacgacccggttgacttggactccccaaacaagggaaagcaaattatccgccagggtaaactgttgcacatccttgggaggaccattctaccaagattagctccaaaaagggctagagaaacccgtcccgggatgaaagggaccatttccctgcattacccaggcaactcaatacccagcttacagacaaccagctagcaaggactcacggggggggtacacgggcaataccaggaaatatggctaaaaaacgtcccaccaaataacacaacatcgctactttgggatcgacaagatgcttgagccggtggggcaccacacccgggggaagaacagagcgaggcaacaaagcagggggacc

SEQ ID NO: 524259 - DNA, 923 bp, Homo sapiens
cagtttgtcctcccctgcgcttgtccaggatgtcatacgagaatggtcacaacaagaacgccctgaatgcgaggtcactgtcaatgcccccacttggtctcctccgaaagtcgaaaggtgtttttgggatttgggtggccaccctccttgtatatatgcgtgtgtgtcaaccaaggggtttcttgaggaagggggctctttctgcctccgacttggagccctggtacaccgtcttaggccccatcatccaaaagggggcctaccttgccatctcatccccccgcaaggagctgttatggtgggtgtctgggaattttggagaagacgcccttgtaatagctgggaaggagcaacagatctggggacccaccccggtaatggcacattcctgacacctggcgtgttttcgatgttgcttatttcagaagccagaattaggtaagccaaaactccccggtgtgactgaggcacaccagaaggcacgcccatacacccccacctcccgccatgttgaccagtgacacaatgttgtaaccagttttactactgtgtgatattttgtttggacatctgaagatagagcttgtttttggttttttaataagaaatattctcaccaaatttaaacccgcggtcctatttgaatcctggggttaactgagtgagcggctgatgatagagcatgagaaataggacccaaaatagtatgtgccgtaggtagcttaaggaagtttccagaatattttgttgcgtgatccaaatactgtttttttgtggccttcacttgttatcccccctgtacttacctaattacattggagatgctgaggcaggagaattgcttgtaacctgggaggtggaggtttccgtgaaccgaggatcccctgcactacaacctgggcgaccaaatggggctttttcca

SEQ ID NO: 524260 - DNA, 472 bp, Homo sapiens
  misc_feature (1)..(1): n is a, c, g, or t
ntcacctgagaagttgtggctcagggcacataaagatgagacagagttttgacatccagccccacctctctggaacagaaagtttactggggaggaaacacagccccgcatgtgaacaggtgtcacggtggacacgggggtgagctgtctctccacctcctcacattatgctaacagggacgcagacacattcaggtgcctttgcagaaagagatgccagaggctcttgaagtcacaaaggggaggcgtgaagaaatcctgcatctcggtccctgacaagacagctgtctcaggcttttcaagctgtgagagacacatcagagccctgggcactgacgctggacgcagcctgagagtagctcccttcttttccacctgagctcttcctcctacacatcacagtagcgaccacagctccgatgaccacaacttctaaggttaagcttaaccttagaagttgtgggaaaattta

SEQ ID NO: 524261 - DNA, 252 bp, Homo sapiens
cttttggctggtaaacccaaccaggaacatttatttaaaaaacataagcaagtttttccccaagaaggttaagcaccgcgggcgtggttcatgacatttcgatttcaggctagaaggcacggaaactctccttccagccctttgcgggaaaagtgctcctacccagaaccagcgggcattgccccagttgcagtgtgggccccctataaaagccccacaaacacttttattcccaccacaaagggctttgaa

SEQ ID NO: 524262 - DNA, 740 bp, Homo sapiens
tcatcaacaagcagacagggcagcacgccgtcattgacagttcaatgccttcccaggtctacgagggcgtgagcggagttcttcacagacctcctgaaccacatcgccactgtcctgcagggccagagcacagccagtggcacgccacaggggacgatggcccgtgctgaggcaacagcaagcttctggccgagccggcgggacgaccggggtggcgcgagcggacatgcagcgccagccccggttgctgcgggaggatgatgggccaggacgcgcccgtggaaggctgagggccgaccgcgggggggcaagcggccaaagcttgcgcaccagagactcggggttgcaatcgcgggggtggtcgcccaagctgccagggagtcagttgtgtggcctccgctgggcaccaaaagggctcccgtccacagatacgcccaagggagcgggggaccccatgagggggcagcgcaggggggacagaagcaacaaccccggtgggcccaagggaggctcccacaaggggcgactggcttactaacataagaaagtccgcaaggtggaccgtggatccgtcccgggagagcaaattttacagggcgggaattgcggggagggtcatggaatcgaaacatgagggggaagagggggcgcgcatgagaagcacgaggaacccaggtgtggcccacccggacgagaagaagggggggccggccggacgggccctaaacgggtggcggcct

SEQ ID NO: 524263 - DNA, 298 bp, Homo sapiens
ttagccttctaggtagtggggattacaggaacgcgcgggccacacttagttaatttttggatttttagtaaagacggggtttaaccacattggccaggatggtgtgggggtacaagatttcttgacctgcgggatcaacccgcctcggcctccagaagtgctggaattacaggtgtgagccaccacgcccggcccagggtgctcttaattcagaacacaaatgaattcagagggatggtgctgcataggcatgagccgcttttacgatactcgggtctgaactgtccctgggaagttg

SEQ ID NO: 524264 - DNA, 361 bp, Homo sapiens
ttgaccagaacaggtgtcggtgatatagacagaggtctcggagttggggcacatctggtgacttccgcaagctgatggtgcccggcaaaggtggtggcccagtttctttcttgccctgctgtcctcccaaggcaagtcacatacctcattttatacttggagtgaattaactaaatcccctgtgcctgcatcagaaattcagctgcatttttgaaagtgggtttgcactgtcactgcagagttgtcaattttgtataataggatttcttatcctgcaaaacctcatggacaagtggactttgggagccagagaagggatgggcggctctcaagtcctggcctggatttatgtgccagagcc

SEQ ID NO: 524265 - DNA, 861 bp, Homo sapiens
ggctggaggtgaaagtctggcctggcagccttccccaggtgagcagcaacgataggtgtagagaatgcacgcatgctgcaggccacagtgctgctgggtctcagtccatcctagttcccgtgtcctctggaagttgtcaggagcaagtgttgagcttgtacgtgtggtctaatggtgagatcgctggcgtatcaccccttcagccatgcaggtaggacaacagggagctgccagagagcatgccgggctctctctcttggcagcgcattatcaagccgggcagctatcaggctcggaaccgcggagccctgttagcgccttgcagagtagccaccccatgggtggccctctaacatggttctgatgcgggcgctcgtgttcaatggccgcgccagggcatttcaccctcttgcagcatggtccagtcacagaaacgtgcagccttcttgctcaacgggagcggtggttcgcgcaacgcgctcggacccgtatcacggaggactccccgcgcagtcggtgtggggccccatggggacccgcggcggcgtccgtgcgatggcgccttatcctgggccctgggcgcctcatcgcctagggcgaccggggaccttcgttgcggcacccctattcggttcctggccattctttgacgtcttcaacgataatcaacatgggccgtctcacaatctaacacttgggcttgcaacccccacaacactggttcctccacttatgcgaagacacgttgctacgcaaggttaactggagacgaacgcgtacacttttcgcccccgcacatgcgcgctatcataccacctgctggcacccgccttatccaagtgtccgtccaacttttgcccc

SEQ ID NO: 524266 - DNA, 133 bp, Homo sapiens
ctaacgcacctgtgcgtagtgaagcgttggcatagatcgggcagcaggttgtcaccagcgtccaggtctacgccatggcaggcacaagggcagcccccttctcgatacagctaccactgaactgcctgacatg

SEQ ID NO: 524267 - DNA, 167 bp, Homo sapiens
tgacatgatacactcgatctcggtacctcgataagggccaaagggtaaataaaattgaaagctttggaaagccgggcaaattgcagtcagcaggtcagttccgggcggttcattgaccagcttggcccttatcgagggggatccttcataaagtcgaccgtgcaggc

SEQ ID NO: 524268 - DNA, 194 bp, Homo sapiens
aggtgacctagaggttcccctgctgtacatagtattgatcagaacaggctttggtcgatggaccttgtcactccagttaggagacaggccatgcctttcaagtgcatacagctcactgattgcatcctcaaatttccgcacgtgcccaccattaagtatgtccgacaagcctggcagaaggccgacgtcaatac

SEQ ID NO: 524269 - DNA, 362 bp, Homo sapiens
  misc_feature (4)..(4): n is a, c, g, or t
  misc_feature (29)..(29): n is a, c, g, or t
  misc_feature (54)..(54): n is a, c, g, or t
  misc_feature (57)..(57): n is a, c, g, or t
  misc_feature (145)..(145): n is a, c, g, or t
  misc_feature (174)..(174): n is a, c, g, or t
  misc_feature (182)..(182): n is a, c, g, or t
  misc_feature (185)..(185): n is a, c, g, or t
  misc_feature (205)..(205): n is a, c, g, or t
  misc_feature (240)..(240): n is a, c, g, or t
  misc_feature (243)..(243): n is a, c, g, or t
  misc_feature (248)..(248): n is a, c, g, or t
  misc_feature (254)..(254): n is a, c, g, or t
  misc_feature (262)..(262): n is a, c, g, or t
  misc_feature (275)..(275): n is a, c, g, or t
  misc_feature (299)..(299): n is a, c, g, or t
  misc_feature (308)..(308): n is a, c, g, or t
  misc_feature (338)..(338): n is a, c, g, or t
  misc_feature (348)..(348): n is a, c, g, or t
tttngaggtcttctcaataagaagtaatncctgggggcggtaatcctaataggncgncccgcacttgtcacagtacagctaatttttcctagttaacatattttgtacaatattaaaaaaatgcacagaaaccattgggggggantcagaggtgcatccacgggtcttcttganctgtgacntgnttttatgtggctgcccaacntggaacgggcagtgtgataggctgggtgggctaancancctantctatntgggtganaggccacgctggnctcagatgcccagtgaagccactnacatgagtnaggggagggctgtggggaactccattcagntttatctccntcaattaagtggcc

SEQ ID NO: 524270 - DNA, 789 bp, Homo sapiens
aacggctaggtgcgaggcctgggtggcgctggtcgatgagaacagaggcacaggtgcctggccctgctgcccccagtaatctggactggagggggccagtggtggcacctggaccctggtctgtcctgggtgctgctgaccttgtgtgtcactgctggggaccccggaggtgtgggttcaagttcggatggaggccagcgatgctctcgtccttcagcatccgtcgtgggttcctgggggtctggctccactctccctggtgactgtgtagctgggggggtcccgagcgggtgctggggggaccacgctggctgtgttgcacccagtaacgtggctatccggcaatgtggcccctgctctgccaggtcccgctgggaaacccagaggaggatctctctcatcctggaagggctctggggccagcaggccctgcgccaacaccagcttctgctgctagtttgcgtccttccctgagggctcctgggaggcctgtgggagcgctcgtcgcccagatcgagatccagggctctctggtcgccgtcgatactctgcgcccattctgctgggcagagcttgggcgggatctggggggtctcgggagtcctcctcttttgggcttgtgtctacctccgttcatcgtgctggggcgggcttaagcacgggcctggcgcctagggtcaaggcgtccgcacaagcccaggccgagacccggcatgggcccaagccggctccaaggtggcttagggtcctatgcatttaaacagtgccgccgcatttggccagccaccc

SEQ ID NO: 524271 - DNA, 219 bp, Homo sapiens
  misc_feature (157)..(157): n is a, c, g, or t
cagttgggacgtcagacttgtgatggcttcgcagacaggtgaacacaagtttttatgatttgtcttcagaatccttttctcctttcaccttcggggcgaccgtgtgcttgctcagatcctccacgtgcaggtggtttgttgtcacagtgcaggtaancagtggcacaagtgctaattgagacaggcagacatggcttgctccaggggtgggcccttggc

SEQ ID NO: 524272 - DNA, 103 bp, Homo sapiens
  misc_feature (71)..(71): n is a, c, g, or t
  misc_feature (86)..(86): n is a, c, g, or t
cccagtgcctgccactctctgggactctcctcctcccctcctcttcccttagcctctcccacccgggccanagctgctggagaatnaatttgggatgctgata

SEQ ID NO: 524273 - DNA, 299 bp, Homo sapiens
  misc_feature (46)..(46): n is a, c, g, or t
tgtcaactgtcaaccactgggaatgatctcactgatgaaaaggccncccaggtttttcacctttccgatcatcacgaataggggaaataaaagaagaaacaactagtcacctaaggtcctgcgagtacaagggtcgacccccaaaggcaggggcagagccagcatctgagagggaggtctcttgaccaatgggcagaatcttcactccaggcacatagcccctagaatttaaatagagaagaatgccattttatcactctgcctctgggtgaaataaagatcagtcttgatgttctaaa

SEQ ID NO: 524274 - DNA, 311 bp, Homo sapiens
ggtgtactggggatagatgagttagtacatgtctttctgttttttgagacacggtctgctcggtctcctaggctggagtgcaggatttccatcatagttcactgcagcctggaactcctggtctcaagggatccaggcacatgccaccacacctggctaatttttaaattttttgtagagtcagggtctcattgtgttgctcaggttggtctcaaactcctggcctcgagtgatcctccttcctcaacctcccaaaatcctgggattacaagtgtcagtcacctggcccagctagtacaacctgccggtgg

SEQ ID NO: 524275 - DNA, 166 bp, Homo sapiens
ccaggggctggggacttgttaaacacagattgttgggtctcactcctagagtttcttcttcagtattctggggagcagcctgtgaatttgctgtgtttcctctggtcttcagagtctcctccctgcgtgcgggttccaggcgcagctctgttcaatccccggtcga

SEQ ID NO: 524276 - DNA, 143 bp, Homo sapiens
  misc_feature (66)..(66): n is a, c, g, or t
  misc_feature (141)..(141): n is a, c, g, or t
tgagacagagtctcgctctgttgcccaggctcgagtgcaggactgtgtgtccagtcctgtcttatnccatgaataagcacccagcccccattttcttgatcatggcctcagttccgaaaaccaacaaaatagaaccgcggncc

SEQ ID NO: 524277 - DNA, 403 bp, Homo sapiens
ggcgttctagaggatcccttctacataggtgtaaaatccaagcccacaagacgccctaggttgagaatctgcaccctgtactatatccccagctcgatgtgcgattgtaataaaacagcacttcaacgccccaggttctttcatcaggctatgaactactccgagatacgcacaagaaggcaggcaacgaggtggggcgttaagaggtcaagggtctccatctgcaatcaccatctacggggcatcagtcagcgattgtgtgatcaacgttaaaatgttctacagcttagggctcttcttgaagcaaggttccaggcacaaaactagtatgagcggagtctcagtttcgaagatgcagcatcagaaaccctttaccccatgggaggaggggtgcctgcgggca

SEQ ID NO: 524278 - DNA, 102 bp, Homo sapiens
ctgttgtagtgaggatcacttgacgcccaggagtacaactgactagcctgggcacatggcaaaacctcatctcgacaaaaaataatgagccactgtacccta

SEQ ID NO: 524279 - DNA, 996 bp, Homo sapiens
  misc_feature (3)..(3): n is a, c, g, or t
  misc_feature (301)..(301): n is a, c, g, or t
  misc_feature (303)..(303): n is a, c, g, or t
  misc_feature (380)..(380): n is a, c, g, or t
  misc_feature (407)..(407): n is a, c, g, or t
  misc_feature (413)..(413): n is a, c, g, or t
  misc_feature (419)..(419): n is a, c, g, or t
  misc_feature (427)..(428): n is a, c, g, or t
  misc_feature (434)..(434): n is a, c, g, or t
  misc_feature (437)..(437): n is a, c, g, or t
  misc_feature (459)..(459): n is a, c, g, or t
  misc_feature (475)..(475): n is a, c, g, or t
  misc_feature (494)..(494): n is a, c, g, or t
  misc_feature (663)..(663): n is a, c, g, or t
atnctaggtctagacagaaagaaatggatagagacttgacacaaatttatgaaagaaaattgggagtaggaatgtgaccgaaaaccaagttgtgctaatgtctgttagatttttcagtaaaactaaagtaactgtatctgttcaactaaaaactctatattagtttctttgggaaacctctcatcgtcaaaactttatgttcactttgctgttgtagatagccagtcaaccagcagtattagtgctgttttcaaagatttaagctctataaaattgggaaattatctaagatcaccacccncnagcattgacacatagcttcacccgaggtgagatatggcagctgtttgtatctgcactgtgtctgtctacaaaaagtnaaaaatacagtgtttacctgaaatttnaacttngtaacngcaagaannccagcncanccgggcgaggattagtattatntttaactctccgtaanattttcagtaccaccaaantgttttggattttttctctttcctcttcacataccagggttattaaaagtgtgctttctttttacattatattacagttacaaggtaaaattcctcaactgctatttatttattccagcccagtactataaagaacgtttcaccataatgaccctccagagctgggaancctaccacaagatctaaagttctggctgtccattaacctccaactatggtctttatttcttgtggtaatatgatgtgcctttccttgcctaaatcccttcctggtgtgtatcaacattatttaatgtcttctaattcagtcatttttttataagtatgtctataaacattgaactttaaaaaacttatttatttattccactactgtagcaattgacagattaaaaaaatgtaacttcataatttcttaccataacctcaatgtcttttttaaaaaataaaattaaaaatgaaaagagcctcacaaaagcgccgaacacaaacaacaaacaac

SEQ ID NO: 524280 - DNA, 682 bp, Homo sapiens
  misc_feature (349)..(349): n is a, c, g, or t
gttctagatcgcgagcggcgcctttttttgtgttttgtccagggtatcattggttttacggccctgtgtagaagtgggaatttatgtggaagaataaatttcttgattttctaaaaagaaaataaaataataataaaaaaaatactcagaaaaaataaaacagaaagcaggcggggtgtgagagatcccccccggggccgctatcacataccagggctcattattttgtgtgcaacgtgtgtcacattatattacagttacaaggtaaaattcctcaactgctatttatttattccagcccagtactataaagaacgtttcaccataatgaccctccagagctgggaancctaccacaagatctaaagttctggctgtccattaacctccaactatggtctttatttcttgtggtaatatgatgtgcctttccttgcctaaatcccttcctggtgtgtatcaacattatttaatgtcttctaattcagtcatttttttataagtatgtctataaacattgaactttaaaaaacttatttatttattccactactgtagcaattgacagattaaaaaaatgtaacttcataatttcttaccataacctcaatgtcttttttaaaaaataaaattaaaaatgaaaagagcctcacaaaagcgccgaacacaaacaacaaacaac

SEQ ID NO: 524281 - DNA, 154 bp, Homo sapiens
cgaattcgtcctggtcgctgtatggaggagggacagctgctgacattatcacagtgtgacatctctcttcaaggcttgtgggtctggcaggctgagtgtgagctggggccttctccatccagtggcacctggtgggtgcccctgttcacaggta

SEQ ID NO: 524282 - DNA, 370 bp, Homo sapiens
gggatgtgcactgtgactcatgacactgaagagacacttgtgaaactatactgatatgataatgccagaggagattcttacttgtatgcccccgaacttcttgtcgttgcattgccagttgccacagctcgaggaacttcgggatgatgggaaagcttcgactgacgaacctagacttgcgtgtgcctgtctccatgaagatggaggagcattgagacgcatgagcagtagctcgcctgagacagagattatgcacagctgcgactgttgaacgtgcaagttagtgacagattgtaccatagtccacacgggatgctgccatggagaactgcttgtgtgctcatgactgggaggaccttgccacgtagtt

SEQ ID NO: 524283 - DNA, 428 bp, Homo sapiens
gacgctccaagagagagtcccccacctttcccttgcccaaacaagtgagtgaaagccccccccacccccttttttggttcccggctccccaagggctttgtagacccctcttctggggagggccctcccaagcttatagacttcctttagctggagggaaatcccccgggggaccccttttgggcgtttttgaacttgggaagaggggcccccccccccccccccggggggttttttttaaccccaaattccccccccccccgatgggggggggccgggcaggggggacaccccccccttttttttttcctttaccttcccccgggggaaaaaacgggggggcttttcccctttttaaaaaaacctaaaaaaaaggtctttaacctagggaaaccctccttttctggtaataaaattttttttttgga

SEQ ID NO: 524284 - DNA, 217 bp, Homo sapiens
  misc_feature (102)..(103): n is a, c, g, or t
gggagctgtcatcatcatcttctgccatctccttggcaactccaagtcctgctgttctcgctcacgccgttcctctgcagactccaagtccttgttgtacgnntttgggaggaaacctcatggccttgtacagacatgttgttggatatactaggcagaaggagatgcgctgtgtggaaggctagctaggggctctcgcggtggaatatgatgtcaa

SEQ ID NO: 524285 - DNA, 478 bp, Homo sapiens
ggtgaacatgctctgacagctcaaatccttcatcctcatgtacgtcttccctgctcctgctctctgcagggatggctcctctgacataaactcccatagacaacctagctgtgatgagttagagatctgtgcaactgtccaagaccatgcctgcttgctaaccattctagaccttgtgcctggcacatagtgggtcctcagtaaatggtagatattgccaccactgatcatcccacatttacctatgctgatatttggcagatgtccccaagaatctgtgtgtaggccgggcgtggtggctcacacctgtaatcccagcactttggaaggccaaggagggtggatcacctgaggtcgggagtttgagaccagcctgaccaacatggagaaacctcatctctactaaaaacacaaaattagccaggtgtggtggcgcatgcccgtagtcccagctactcaggaggccgaagcaggagaa

SEQ ID NO: 524286 - DNA, 105 bp, Homo sapiens
ttgtgcttgagaaataatcaaacaaaaattatacaggaccttatcgggttagcagtaagtaccagagcgtgatgcacgatcttagaagacaggacgttatcttgg

SEQ ID NO: 524287 - DNA, 119 bp, Homo sapiens
ggggacttggagctgcacttgtctggtaggaccttgcctcacccgcagataccgtgggaagagatgctctctctcacggcctcagagccactcctagccacagttccagcatctctgtg

SEQ ID NO: 524288 - DNA, 534 bp, Homo sapiens
  misc_feature (1)..(1): n is a, c, g, or t
  misc_feature (10)..(10): n is a, c, g, or t
  misc_feature (53)..(53): n is a, c, g, or t
  misc_feature (77)..(77): n is a, c, g, or t
  misc_feature (101)..(101): n is a, c, g, or t
  misc_feature (256)..(256): n is a, c, g, or t
  misc_feature (448)..(448): n is a, c, g, or t
nccaattggnggatttagtacattcacagtgtccccccaggactttggtgacncccttccacatcagggtggagganccagttgcttctgacttaagcgtnactctcttttcctgacctcttgagcagtcactaattgggggtggtaccacccaagggctgtttggaaatgcacaggatggttttggttgtcataagtgactgggaggagctgctgcatcttaggcccttgaacccaggagggcaaactgtccctncacgactgtggcagctctgcagggtcaagaaccatctggtgatggcagaggtgcctggtagaaacaatgtggggaattttatctataatgtctgccctttgcagcagacatccacccctacccccaccaccgcagggttcaacagtgccctggccgagaacttgcagtcttcagaaacaaagcagccgcaancctctggtcaggctcacgtttcccagtcccgttagaacttctcctctgctggcttttgctggcgtttctcctccatgactttttca

SEQ ID NO: 524289 - DNA, 769 bp, Homo sapiens
ctcgcctaccagtcccacctattcacccaccaccccaaaatactccccaacatctcctacttattccccaacctctccagtctacaccccaacctctcccaagtactcacctactagccccacttactcgcccacttcccccaagtactcgcccaccagccccactactcgccactcccccaaaggtcaacggtatctcccattcccctggttatcgccaccaggcccaggctacagtgctcaacaagccccggctatcagcccggatgacagtgacgaggagaactgagggcacgtggggtgcggcagcgggctagggcccaggcagattgcccggctgccgtgcagtgcctgtgcctccctcacggggcgtcacccccagccagctccgtgtacataaatgccttgtggcaaagctcccggtgaacttcctggatcccgtttctgatgcagactcttgtgcttgttactccactatgtgctgttagaactcactggcccagtggtgttctcacgtcctaccccaaacagccacctgactgtcccacaattgaagatcctgccttgcctgtgtgcttgatgcagggcgggtaaaagggtaatgaacttaggggtaggaaccatgctgtgagtaggtaacaagtgatgctcgggaagacccacagccttaaagcacgacctcctaggtcggctaatacacttgtcgttggacggtgacagtaaacgtttacctacttttgaaccaacagtacacacgaacacagagggg

SEQ ID NO: 524290 - DNA, 197 bp, Homo sapiens
ctcagacttactggagagctggcaggctagtgactcatgactgtaatccagcactttgggagtctgagtcaggaggatcgcttgaggcaggagttacagaccagcctggtgacagagtgagatcctgttttcaaaaaaaagaatgagggcaagggtggtgtgctggacatgaactggaaggcagaaggtagctgccc

SEQ ID NO: 524291 - DNA, 1034 bp, Homo sapiens
agcgggcggttgccaccgagcggcgtgtccgacctcgcctgtcaccgggggttgtatgaaaacaccgggcgtgctgggtggtgagggatccggcgcgatgcaggttgctgagccgggtgcttgcggagctcttgcggcggtcctccgctcatgcggccccattctcattgattgccgatatatgtcggaagttatcgcaaatgatagttaactcaatgattgatgcatagttaaacataggtgactacctagtaagaaagatgctcttgagcactgtaatgcgtaggattcgtagagattgctctgggtcaacctcggtaggaatgatcgaaatagctggaagtcgctctacaagtaatctaggtacacttggctggaatcatggtttacgatcatacagatattcctgtgcattcttggactgcagaaggtcgatagacagaaaatcggagacacgaagagaatagacatgccatagaggtatcctaacaagggagaattggcataaattgtctgacttgtacaaacagtggtagatgaaatcagcgaaagtagatctttgaaaagctgagaagcttagattaatcgttgaacagcacttgctttgtaggaggcgtgtggtgtcacgacatgggattgagacgagtctggagaagaacgtgaagtttcccttaagtttcaccgaaaaagtgatggggttcattcaaaactcatatgtttgcatgtatagtatcatagaaatgggcatgggaaaatgaactctgagcatcaaaatgaggacctaacttgggtacaggacttcatacgtatatctatgcaagagggatggggatcgatacagaataagaaagttttggatgtaagaggcataaatatttaattgggggctctggaatatggagcactggaaatatgggttcaagcacgaagttatgtatgactcgtcggctggggatcgtacacttggccattcagagttataacgagtatattattggcaacatctgtgtaatcaggaaatctaagggaaagag

SEQ ID NO: 524292 - DNA, 399 bp, Homo sapiens
ttcgagccaggcaggcagagtcagtcacaggcaggttcttggtaatcacacgggaacactattctgaatggtaatctgccggctgccaggacacatcaaaatcgggcttttagatcaatgcccagggcggcctctgagatgatgagagaggaagcgcgccacttcccagagtgaaggctccacgacgcatccgaggcccctcaacacgggcccaccccgaccatccagacaccacgcaagtgcagcacacgggagctcggggctgtctgtggtgggaggacaagagtggcaaggtgcagggtcagcgtgttaaaatatgaccaaagatgccaactccaggccaaaccgcactgcgcacgggaggtaggatacggtgtcttgatggctgagaggccggcc

SEQ ID NO: 524293 - DNA, 1882 bp, Homo sapiens
  misc_feature (1406)..(1406): n is a, c, g, or t
ctctatgcgttctttagagtttctattggctgggttgaggtaatactgcttgttattgttgtccttcttatgggccgtctttagagtgtcaaatttggtggttcatctaaaagcttatctgtgtgttatacaaaccataaggtcttttaatggttattcgagctatcttagataatgtccagatttttgcagcggcttcgcagctttaatcacaaaattcgctttatggtatcctaaaatgaattgggtgacacaccccggaatgctagttagaacatggaaagtgaccggtgcttctaacgcgagaatgaactacacttccagtgtgctcgttcaacgtttaccaagtccgatggcattcgtggcttcctatagagggagaaactgcctcgttatgctgggatcttcgcgagactgataatctgcttgtgctactcttatgaaaaggttaaagaagtatgctgataagaagctccagtagcctgttctgcataatgggactgagaaacattccacaagtgtcgttagttgttcgggacttataggcgagcttgctgctctttctaaggcatgtgcctcctcgcattgcttatccacacgaagtcctataaggacgaggctccgggaagtagggcaccaagtacaagtcttttgtccagacggcgcgcctcgtgttccgggaagaaggctaccttgccttttatagaggactgtttgcccagcttatccggcagatcccaaatactgccattgtgttgtctacttatgagttaatgtgtacctgttagaagaccgtactcagtaacaggccggaaaattgtgctctagaagaataaaactgaaaaactctagagaattttttttccccattgatgtttagaaagtttgagactgaaacaggaaaggccataaaatatctggttcatatcacctgttggacatttccttttggattcatgctttctggaaggtttaaattcattaacgttaatagttaattataactttttttttaacttaagaggattcagggttaagcaccaactaaattaaatcatgctatttaatttaagtatacatttggcttgtgtcctcttttatgctcactatactatgaaggacttaagtaattcagataaacctgccctagaactgcagagaaaaatgataaagtgagaatacaacttgttttataatctgactttaagatcttgcactgctagacagggaagaagtgtcgcattttggctgggcactgtggctcacgcccgtaatcccagcactttgggaggccgaggcagatggatcacgtgaagtcaggagttccagaccagcctggccaacatggcgaaaccctgtctctactaaaaatacaaaaattagccggacgtgtgcctgtgatcccngctacttgggaggctgaggcaggagaatcacttgaaacccaggggcagaggttgcagcgagctgagatcacgtcacttcactccagcctggtcgacagagtgagactccatctcaaaaaaaaaaaaatttgtgtcccatttctggtggtggtgtgtggccaggacaaacttcccagcaatttttcttctcggtacatttccaattacttgcagatggatcatctaaagcgttcagactgtgagatgaatatatataactttctgagactcaatattttcaaggctaataaaaaacttcctgaagtatcctttctccctaacttggaaccaaaggcaagaattttaaagaactggtttatcaaggggcggctctggataatagtcggaagtacaccagttgcctgtaaattgtgtgacgacacgtccccggtgggtggatccaatggtgaacacagcactccacggggctacaccgg

SEQ ID NO: 524294 - DNA, 654 bp, Homo sapiens
  misc_feature (1)..(1): n is a, c, g, or t
  misc_feature (103)..(103): n is a, c, g, or t
  misc_feature (211)..(211): n is a, c, g, or t
  misc_feature (219)..(219): n is a, c, g, or t
  misc_feature (266)..(266): n is a, c, g, or t
  misc_feature (299)..(299): n is a, c, g, or t
  misc_feature (416)..(416): n is a, c, g, or t
  misc_feature (587)..(587): n is a, c, g, or t
ngggggggtggggggggggtttgggtcctgctttgccctgcctcccaccctatctctccccaaattataaacagccatccttgggaagcagcagagttaagangtctccccactgccctagtggcatacacaccaacaggggagcttgttcagttggcccagaatccaggggctgcttttcatggggggaaactggtaccaaaatttgggnggggggtnggggggtgtgggggggcaagcgcaaagggaaccttcctccgtttctnctcatcgggtcctggcgctgggtcctctgggcnggggggggtgctggctagttcttcttcttcagagtcctcgctcctcctcctcttctttttgctcttgttctctcccgaagggctctcttcactagacacaaactctttgctcttggngctctcgcttagctgccttgggggcgacttggttggtgagcccctagggggcgtggatttcttttccatcttttcctttactttcttcttcttctttgacttgtccctcttagaagactcgcctcggcccccttcttattctttcatggctttttcatagtccctcctggnatcctcagccttgcgatcccactcctctttcttctctttggacattcccttccagatctcgcctgcc

SEQ ID NO: 524295 - DNA, 485 bp, Homo sapiens
ggtcagacgcatcttctttggcgtcggcaagccgagccaaatcgcctcagagcaccatggggaaggtgaagggtcggagtcagcggatgtgggcgtatggggcgcctggtcaccagggctgcgtttataactctggtaaaggtggaatatagtgggcgcatcgaatgatccacccgtatacagtctgtagcactcaagcatacgagtggatattacgatgttgccaatactgattactcaaccaccatggtgaaatctcgcgatggtcatcggcgtgcgaatggtcgtagacgaacggggcaagctttgtccagttcggatggataattcccatgcatctcgatgcatatactcaggggaggcagagattctctcatacccaaaaacatcacggtggagggcagatgggctggtgcgcattgagtagcgtgcggtggcgagtccagcgtggaacgctcttcatccaatacactgggagcaacgga

SEQ ID NO: 524296 - DNA, 223 bp, Homo sapiens
ttatactctatgtgcgagacattgggaggggcttctgaattatccgggagtatcgtcatttgcagtgtgcataagtatggccaaccgttgctttcgtagcccctgctagtgtgacttttaaaatataagtttattgtaaaagtgacatgaaaattacaacagatattccagaccaaaataatacaacaatcccagcatctgattgagtcagtgtttgctgttt

SEQ ID NO: 524297 - DNA, 623 bp, Homo sapiens
tagtaaagatggggtttcgccttgttacccaggttggtctggttctcctgacctcgtgatccgcccgcctgtgcctcccaaagtgttgggattacaggcgtgacccactggtgcccagcctccagcatgatttttttaggccgattctttgtgtttgaaagaattcaactaaggatccactctgccgtgccgtgaccggttttctctcctttcttctctctcatcgggctcccgagttccccagtgactgcagctctccagaaagagcaagagcttgggtactccttactcacagcgccaaaaccgtgcaggggccaaggaaagatacaaaattctttggtgtgcagccctctttgggactccagcctctgtgtcctcctcgcgtgaattccccaccgccacccctttcaagtcatcggcgtgtgatcacaccgtggtgggtatcctgaaggctaaaagcttccacaatgagcccaggaaacaagttctgatgtggttgggaccagacctcgtgctccaagatccagggctggcagtatcccttctgtcctggtggcttcaatcttcatggcttacctctggacttgtagttatccaacaaaccccagtgctctgcgtgaact

SEQ ID NO: 524298 - DNA, 598 bp, Homo sapiens
  misc_feature (538)..(538): n is a, c, g, or t
gcagaagcaggaagcaggaagatcagtgtgacaggcaccaggcatcgtggacagggagtgactgagggagtcacacagggcctggagacctctgtgaagggccaggaggaggcgggagaaggcagtgaaggttttagatgggagtgacatgatcagatgactcctttaagccatgaccctggctaccttggggagaagccaggccgggacgagggggtcaggtcatgaggctactggagtggtcagggcacaggtgctggtggcttaggctaacagagtgggcctagtgggattagaacttggccagacctcccagagcagtagggctttatttagcccattaatttttccctaagagaaacactgccagaggagattctaagacagaccattctctgaatgtatttattcttcttggggctactgggcccaagaagtaaaaactgagaggcaatttggagacacccgatgcaaaagagcccaccacttgtggagcacagtagaatctgatcgtccccccacaggccttagagcttcnctgcagagttggagcgcaggcaccagctctatcccaaactccttgcccttttcgccgcag

SEQ ID NO: 524299 - DNA, 1621 bp, Homo sapiens
gtccaattccctaatgtgacgggcgcccgcggaaggcgacatgggctccgctccctgggccccggtcctgctgctggcgctcgggctgcgcggcctccaggcgggggcccgcagggccccggaccccggcttccaggagcgcttcttccagcagcgtctggaccacttcaacttcgagcgcttcggcaacaagaccttccctcagcgcttcctggtgtcggacaggttctgggtccggggcgaggggcccatcttcttctacactgggaacgagggcgacgtgtgggccttcgccaacaactcgggcttcgtcgcggagctggcggccgagcggggggctctactggtcttcgcggagcaccgctactacgggaagtcgctgccgttcggtgcgcagtccacgcagcgcgggcacacggagctgctgacggtggagcaggccctggccgacttcgcagagctgctccgcgcgctacgacgcgacctcggggcccaggatgcccccgccatcgccttcggtggaagttatggggggatgctcagtgcctacctgaggatgaagtatccccacctggtggcgggggcgctggcggccagcgcgcccgttctagctgtggcaggcctcggcgactccaaccagttcttccgggacgtcacggcggactttgagggccagagtcccaaatgcacccagggtgtgcgggaagcgttccgacagatcaaggacttgttcctacagggagcctacgacacggtccgctgggagttcggcacctgccagccgctgtcagacgagaaggacctgacccagctcttcatgttcgcccggaatgccttcaccgtgctggccatgatggactacccctaccccactgacttcctgggtcccctccctgccaaccccgtcaaggtgggctgtgatcggctgctgagtgaggcccagaggatcacggggctgcgagcactggcagggctggtctacaacgcctcgggctccgagcactgctacgacatctaccggctctaccacagctgtgctgaccccactggctgcggcaccggccccgacgccagggcctgggactaccaggcctgcaccgagatcaacctgaccttcgccagcaacaatgtgaccgatatgttccccgacctgcccttcactgacgagctccgccagcggtactgcctggacacctggggcgtgtggccccggcccgactggctgctgaccagcttctgggggggtgatctcagagccgccagcaacatcatcttctccaacgggaacctggacccctgggcagggggcgggattcggaggaacctgagtgcctcagtcatcgccgtcaccatccaggggggagcgcaccacctcgacctcagagcctcccacccagaagatcctgcttccgtggttgaggcgcggaagctggaggccaccatcatcggcgagtgggtaaaggcagccaggcgtgagcagcagccagctctgcgtggggggcccagactcagcctctgagcacaggactggaggggtctcaaggctcctcatggagtgggggcttcactcaagcagctggcggcagagggaaggggctgaataaacgcctggaggcctggc

SEQ ID NO: 524300 - DNA, 668 bp, Homo sapiens
  misc_feature (483)..(483): n is a, c, g, or t
  misc_feature (486)..(486): n is a, c, g, or t
gtgtatgtatgtgtatacatacatgtatgtatttctttcctgctttatccataaactgtttaagtcagtttacaataatacaaaaggtacaaaatagcaaaaattaaaaacaagaaaaaagaaaaagtagaaaccatgtaaggaggactgaggctgaaccagtttggccatgatggagagtgtgacatgggaagcccgagcagtgccacagcccagtgtccacaagccccagtctttgtaattacatcagggaggtacaaatatttttgatattgacaacagcagaaaatttcttttcagagccttcgagagtacggactatgtaatgaatcggaatcttgacaccattttgtcaataacactaatcatgatgacatatttcattctctgggtgtaggagatgctaccacaccaaggcagggtacagtaaggcgctttttgcttgttgggatgctgatattgtgcttgagctttgaggccacngtncttggccttgctgcttcagaagccatgctcacgcttctcttgccttgtgttggggttggattgcacttgaagttgttctattccaaactcctggtggtggcctctttgctcttggtgggaattggccatgagaagggctcgtgggagacccaaggttcaagggaagtgggccggcttccttc

SEQ ID NO: 524301 - DNA, 1628 bp, Homo sapiens
  misc_feature (22)..(22): n is a, c, g, or t
  misc_feature (25)..(25): n is a, c, g, or t
  misc_feature (30)..(30): n is a, c, g, or t
aatggccaggctgtactggccnganttttnggatcgcggaaggcgacatgggctccgctccctgggccccggtcctgctgctggcgctcgggctgcgcggcctccaggcgggggcccgcagggccccggaccccggcttccaggagcgcttcttccagcagcgtctggaccacttcaacttcgagcgcttcggcaacaagaccttccctcagcgcttcctggtgtcggacaggttctgggtccggggcgaggggcccatcttcttctacactgggaacgagggcgacgtgtgggccttcgccaacaactcgggcttcgtcgcggagctggcggccgagcggggggctctactggtcttcgcggagcaccgctactacgggaagtcgctgccgttcggtgcgcagtccacgcagcgcgggcacacggagctgctgacggtggagcaggccctggccgacttcgcagagctgctccgcgcgctacgacgcgacctcggggcccaggatgcccccgccatcgccttcggtggaagttatggggggatgctcagtgcctacctgaggatgaagtatccccacctggtggcgggggcgctggcggccagcgcgcccgttctagctgtggcaggcctcggcgactccaaccagttcttccgggacgtcacggcggactttgagggccagagtcccaaatgcacccagggtgtgcgggaagcgttccgacagatcaaggacttgttcctacagggagcctacgacacggtccgctgggagttcggcacctgccagccgctgtcagacgagaaggacctgacccagctcttcatgttcgcccggaatgccttcaccgtgctggccatgatggactacccctaccccactgacttcctgggtcccctccctgccaaccccgtcaaggtgggctgtgatcggctgctgagtgaggcccagaggatcacggggctgcgagcactggcagggctggtctacaacgcctcgggctccgagcactgctacgacatctaccggctctaccacagctgtgctgaccccactggctgcggcaccggccccgacgccagggcctgggactaccaggcctgcaccgagatcaacctgaccttcgccagcaacaatgtgaccgatatgttccccgacctgcccttcactgacgagctccgccagcggtactgcctggacacctggggcgtgtggccccggcccgactggctgctgaccagcttctgggggggtgatctcagagccgccagcaacatcatcttctccaacgggaacctggacccctgggcagggggcgggattcggaggaacctgagtgcctcagtcatcgccgtcaccatccaggggggagcgcaccacctcgacctcagagcctcccacccagaagatcctgcttccgtggttgaggcgcggaagctggaggccaccatcatcggcgagtgggtaaaggcagccaggcgtgagcagcagccagctctgcgtggggggcccagactcagcctctgagcacaggactggaggggtctcaaggctcctcatggagtgggggcttcactcaagcagctggcggcagagggaaggggctgaataaacgcctggaggcctggc

SEQ ID NO: 524302 - DNA, 2014 bp, Homo sapiens
gtccaattccctaatgtgacgggcgcccgcggaaggcgacatgggctccgctccctgggccccggtcctgctgctggcgctcgggctgcgcggcctccaggcgggggcccgcagggccccggaccccggcttccaggagcgcttcttccagcagcgtctggaccacttcaacttcgagcgcttcggcaacaagaccttccctcagcgcttcctggtgtcggacaggttctgggtccggggcgaggggcccatcttcttctacactgggaacgagggcgacgtgtgggccttcgccaacaactcgggcttcgtcgcggagctggcggccgagcggggggctctactggtcttcgcggagcaccgctactacgggaagtcgctgccgttcggtgcgcagtccacgcagcgcgggcacacggagctgctgacggtggagcaggccctggccgacttcgcagagctgctccgcgcgctacgacgcgacctcggggcccaggatgcccccgccatcgccttcggtggaagttatggggggatgctcagtgcctacctgaggatgaagtatccccacctggtggcgggggcgctggcggccagcgcgcccgttctagctgtggcaggcctcggcgactccaaccagttcttccgggacgtcacggcggactttgagggccagagtcccaaatgcacccagggtgtgcgggaagcgttccgacagatcaaggacttgttcctacagggagcctacgacacggtccgctgggagttcggcacctgccagccgctgtcagacgagaaggacctgacccagctcttcatgttcgcccggaatgccttcaccgtgctggccatgatggactacccctaccccactgacttcctgggtcccctccctgccaaccccgtcaaggtgggctgtgatcggctgctgagtgaggcccagaggatcacggggctgcgagcactggcagggctggtctacaacgcctcgggctccgagcactgctacgacatctaccggctctaccacagctgtgctgaccccactggctgcggcaccggccccgacgccagggcctgggactaccaggcctgcaccgagatcaacctgaccttcgccagcaacaatgtgaccgatatgttccccgacctgcccttcactgacgagctccgccagcggtactgcctggacacctggggcgtgtggccccggcccgactggctgctgaccagcttctgggggggtgatctcagagccgccagcaacatcatcttctccaacgggaacctggacccctgggcagggggcgggattcggaggaacctgagtgcctcagtcatcgccgtcaccatccaggggggagcgcaccacctcgacctcagagcctcccacccagaagatcctgcttccgtggttgaggcgcggaagctggaggccaccatcatcggcgagtgggtaaaggcagccaggcgtgagcagcagccagctctgcgtggggggcccagactcagcctctgagcacaggactggaggggtctcaaggctcctcatggagtgggggcttcactcaagcagctggcggcagagggaaggggctgaataaacgcctggaggcctggcaaaaaaaaaaaaaaaaaaaaaagaagaaaaacaaacacaaccacaagaaaaaaaggggggggcgacgaaagaaaaatccccgggggggggcccaaattagagcgacacccagatcgtctgtcaaaaaggggggcccacaaagagagaaggacaaaataaaaaaacgcaaagcacgcggcgcccgacgctataacaacagattagagagcgcgtgacacacacacgcgccagcacggggggcgacaatgtgagaggagagggacaacccacacaaccacgcggggggggggacaaaccacaataggggacaaaaccaacaccccaaacacgacaagttacaacgcgccccggacgggggcaaccaaaaaaacaccgaagagggacaccagggga

SEQ ID NO: 524303 - DNA, 239 bp, Homo sapiens
  misc_feature (7)..(7): n is a, c, g, or t
  misc_feature (10)..(10): n is a, c, g, or t
  misc_feature (23)..(23): n is a, c, g, or t
  misc_feature (164)..(164): n is a, c, g, or t
  misc_feature (229)..(230): n is a, c, g, or t
ttagttntgngaagccagttcgntgttggagtagtttggaaaatacaatctcactggtggttgcctgtgttctggtgctttcgttgatattaattgtactatactgaccacaacttttgttgatgattttaataactatgaggtatgcatattacactattttnacaagtaagtgactaatggtaaactgtttgtttgtggcctccttgtgaagagagatctttcctcnnttcagttcc

SEQ ID NO: 524304 - DNA, 2400 bp, Homo sapiens
gtccaattccctaatgtgacgggcgcccgcggaaggcgacatgggctccgctccctgggccccggtcctgctgctggcgctcgggctgcgcggcctccaggcgggggcccgcagggccccggaccccggcttccaggagcgcttcttccagcagcgtctggaccacttcaacttcgagcgcttcggcaacaagaccttccctcagcgcttcctggtgtcggacaggttctgggtccggggcgaggggcccatcttcttctacactgggaacgagggcgacgtgtgggccttcgccaacaactcgggcttcgtcgcggagctggcggccgagcggggggctctactggtcttcgcggagcaccgctactacgggaagtcgctgccgttcggtgcgcagtccacgcagcgcgggcacacggagctgctgacggtggagcaggccctggccgacttcgcagagctgctccgcgcgctacgacgcgacctcggggcccaggatgcccccgccatcgccttcggtggaagttatggggggatgctcagtgcctacctgaggatgaagtatccccacctggtggcgggggcgctggcggccagcgcgcccgttctagctgtggcaggcctcggcgactccaaccagttcttccgggacgtcacggcggactttgagggccagagtcccaaatgcacccagggtgtgcgggaagcgttccgacagatcaaggacttgttcctacagggagcctacgacacggtccgctgggagttcggcacctgccagccgctgtcagacgagaaggacctgacccagctcttcatgttcgcccggaatgccttcaccgtgctggccatgatggactacccctaccccactgacttcctgggtcccctccctgccaaccccgtcaaggtgggctgtgatcggctgctgagtgaggcccagaggatcacggggctgcgagcactggcagggctggtctacaacgcctcgggctccgagcactgctacgacatctaccggctctaccacagctgtgctgaccccactggctgcggcaccggccccgacgccagggcctgggactaccaggcctgcaccgagatcaacctgaccttcgccagcaacaatgtgaccgatatgttccccgacctgcccttcactgacgagctccgccagcggtactgcctggacacctggggcgtgtggccccggcccgactggctgctgaccagcttctgggggggtgatctcagagccgccagcaacatcatcttctccaacgggaacctggacccctgggcagggggcgggattcggaggaacctgagtgcctcagtcatcgccgtcaccatccaggggggagcgcaccacctcgacctcagagcctcccacccagaagatcctgcttccgtggttgaggcgcggaagctggaggccaccatcatcggcgagtgggtaaaggcagccaggcgtgagcagcagccagctctgcgtggggggcccagactcagcctctgagcacaggactggaggggtctcaaggctcctcatggagtgggggcttcactcaagcagctggcggcagagggaaggggctgaataaacgcctggaggcctggcaaaaaaaaaaaaaaaaaaaaaaaaaaaaaaaaaaaaaaaaaaaaaaaaaaaacaacaaaacaaaaaaaacaaaggggggggggccgcaacaaaaaaaccccacacgggggggagcgccaccccagtcacgcccaccccgcacgctttttgtgtggacaccaggaagggcggccccaaacaaaggggagtgcactaatatataacagaccgaaggccagcgcgggcggcgatataacaaaacacgccggccgagggcagaggaggaaacaaacgtaccataataggcgggctcatctagtcgcaggggagggaacccacacactacacggaggaggccgagcgaacaaaaggggggacaccacacaccaacccaaggcaaaatacataaatggctcaagggacgggagcaacaactcaaaaacgacgccgcacgcggagggtaccgaggtgcggccagcccaaccacgcagaaaaaatacgccgcgggcgaaaaaaagaacttcgggccaccaacggcgcgcacgtagatacccgtaaacacaaccattataccaccgcgggccgcgggagtgcagataaaaacagaagaactggaccgcaagcagaccacagacaaccccacacgcgacgaaacccgccacagacggaccaacaaaaagcaagcccccacagcagagccgaccacgccaagaagaccacggcgagaaggcgacgcagagacgccacgaaatagacagcataacgcaagacaacacgcgagcacggagtcacgcagcaac

SEQ ID NO: 524305 - DNA, 290 bp, Homo sapiens
ggaccctccgctggccaatgcacggagaagataccagatatgttgagacttaacacccagcatgtacgttgctatcaggctgtgctatacctgtacgcctctggctgtacactggcatcgtgatggactccggtgacggggtcaccacactgtgcccatctacgaggggtatgccctcccccattgcatcctgcgtctggacctggctggcggggacctgacttgactacctcatgaagatcctcaccgagcgctgtgttacagcttcactgccaattgggccagcgggg

SEQ ID NO: 524306 - DNA, 281 bp, Homo sapiens
ctcctgggctgaatcctcctcctcattctgcatcctgtcgtaggtcatcttggcattgtctgcacagctgctccaagccaggctgatgaagtgaggagtcccctatggtgagctggagtgttgtagcctgaagatggcacagctctgtgattcatctcctgcggttgtggcggccatggtgatggagactgcagctcaacaggagtggtcggcgggtaccctttttaggccaagtagatagtgagccttggacgggttgggtaggagcgaggaggaatacg

SEQ ID NO: 524307 - DNA, 1754 bp, Homo sapiens
gtccaattccctaatgtgacgggcgcccgcggaaggcgacatgggctccgctccctgggccccggtcctgctgctggcgctcgggctgcgcggcctccaggcgggggcccgcagggccccggaccccggcttccaggagcgcttcttccagcagcgtctggaccacttcaacttcgagcgcttcggcaacaagaccttccctcagcgcttcctggtgtcggacaggttctgggtccggggcgaggggcccatcttcttctacactgggaacgagggcgacgtgtgggccttcgccaacaactcgggcttcgtcgcggagctggcggccgagcggggggctctactggtcttcgcggagcaccgctactacgggaagtcgctgccgttcggtgcgcagtccacgcagcgcgggcacacggagctgctgacggtggagcaggccctggccgacttcgcagagctgctccgcgcgctacgacgcgacctcggggcccaggatgcccccgccatcgccttcggtggaagttatggggggatgctcagtgcctacctgaggatgaagtatccccacctggtggcgggggcgctggcggccagcgcgcccgttctagctgtggcaggcctcggcgactccaaccagttcttccgggacgtcacggcggactttgagggccagagtcccaaatgcacccagggtgtgcgggaagcgttccgacagatcaaggacttgttcctacagggagcctacgacacggtccgctgggagttcggcacctgccagccgctgtcagacgagaaggacctgacccagctcttcatgttcgcccggaatgccttcaccgtgctggccatgatggactacccctaccccactgacttcctgggtcccctccctgccaaccccgtcaaggtgggctgtgatcggctgctgagtgaggcccagaggatcacggggctgcgagcactggcagggctggtctacaacgcctcgggctccgagcactgctacgacatctaccggctctaccacagctgtgctgaccccactggctgcggcaccggccccgacgccagggcctgggactaccaggcctgcaccgagatcaacctgaccttcgccagcaacaatgtgaccgatatgttccccgacctgcccttcactgacgagctccgccagcggtactgcctggacacctggggcgtgtggccccggcccgactggctgctgaccagcttctgggggggtgatctcagagccgccagcaacatcatcttctccaacgggaacctggacccctgggcagggggcgggattcggaggaacctgagtgcctcagtcatcgccgtcaccatccaggggggagcgcaccacctcgacctcagagcctcccacccagaagatcctgcttccgtggttgaggcgcggaagctggaggccaccatcatcggcgagtgggtaaaggcagccaggcgtgagcagcagccagctctgcgtggggggcccagactcagcctctgagcacaggactggaggggtctcaaggctcctcatggagtgggggcttcactcaagcagctggcggcagagggaaggggctgaataaacgcctggaggcctggcaaaaaaaaaaaaaaaaaaaaaactctggggggggctcggcccccaattcgcctttagagaggtgttttaccaatcaatggcccgtgttttacaaaccttcagactgggaaaacccttgggtttcccccacttt

SEQ ID NO: 524308 - DNA, 163 bp, Homo sapiens
ccccagttattgctgagccaggactgtcgggcactgtgttggtggagtacaggattgagcgaagtaggatgcagctcccactaatggccacccagattaccaaggacaaagagatgccacgcttgcggcgtgttggcctgagcagctcttgactgggccgagc

SEQ ID NO: 524309 - DNA, 1553 bp, Homo sapiens
gtccaattccctaatgtgacgggcgcccgcggaaggcgacatgggctccgctccctgggccccggtcctgctgctggcgctcgggctgcgcggcctccaggcgggggcccgcagggccccggaccccggcttccaggagcgcttcttccagcagcgtctggaccacttcaacttcgagcgcttcggcaacaagaccttccctcagcgcttcctggtgtcggacaggttctgggtccggggcgaggggcccatcttcttctacactgggaacgagggcgacgtgtgggccttcgccaacaactcgggcttcgtcgcggagctggcggccgagcggggggctctactggtcttcgcggagcaccgctactacgggaagtcgctgccgttcggtgcgcagtccacgcagcgcgggcacacggagctgctgacggtggagcaggccctggccgacttcgcagagctgctccgcgcgctacgacgcgacctcggggcccaggatgcccccgccatcgccttcggtggaagttatggggggatgctcagtgcctacctgaggatgaagtatccccacctggtggcgggggcgctggcggccagcgcgcccgttctagctgtggcaggcctcggcgactccaaccagttcttccgggacgtcacggcggactttgagggccagagtcccaaatgcacccagggtgtgcgggaagcgttccgacagatcaaggacttgttcctacagggagcctacgacacggtccgctgggagttcggcacctgccagccgctgtcagacgagaaggacctgacccagctcttcatgttcgcccggaatgccttcaccgtgctggccatgatggactacccctaccccactgacttcctgggtcccctccctgccaaccccgtcaaggtgggctgtgatcggctgctgagtgaggcccagaggatcacggggctgcgagcactggcagggctggtctacaacgcctcgggctccgagcactgctacgacatctaccggctctaccacagctgtgctgaccccactggctgcggcaccggccccgacgccagggcctgggactaccaggcctgcaccgagatcaacctgaccttcgccagcaacaatgtgaccgatatgttccccgacctgcccttcactgacgagctccgccagcgatctcagagccgccagcaacatcatcttctccaacgggaacctggacccctgggcagggggcgggattcggaggaacctgagtgcctcagtcatcgccgtcaccatccaggggggagcgcaccacctcgacctcagagcctcccacccagaagatcctgcttccgtggttgaggcgcggaagctggaggccaccatcatcggcgagtgggtaaaggcagccaggcgtgagcagcagccagctctgcgtggggggcccagactcagcctctgagcacaggactggaggggtctcaaggctcctcatggagtgggggcttcactcaagcagctggcggcagagggaaggggctgaataaacgcctggaggcctggc

SEQ ID NO: 524310 - DNA, 328 bp, Homo sapiens
ggttgtccctagtgctagaacagtgtatgggaggagagagtttccacagctgtgatgctaaagcctgagaagatgttactgttcattaactggcaacatctgttttaagttgatgtcactgctcaggcctgaagggacattattgctgtcatcaccctcttcccttctttcctaaaagccatggagttccactgaaatgatctgcaggactgagcatggccaggtctctcctagagtctttctgtaggtctccagctcctggactgggccctgaaacaatttcagtgtgtgttgtaatgtgggtcacactctcctttcttcagtcaca

SEQ ID NO: 524311 - DNA, 1333 bp, Homo sapiens
gtccaattccctaatgtgacgggcgcccgcggaaggcgacatgggctccgctccctgggccccggtcctgctgctggcgctcgggctgcgcggcctccaggcgggggcccgcagggccccggaccccggcttccaggagcgcttcttccagcagcgtctggaccacttcaacttcgagcgcttcggcaacaagaccttccctcagcgcttcctggtgtcggacaggttctgggtccggggcgaggggcccatcttcttctacactgggaacgagggcgacgtgtgggccttcgccaacaactcgggcttcgtcgcggagctggcggccgagcggggggctctactggtcttcgcggagcaccgctactacgggaagtcgctgccgttcggtgcgcagtccacgcagcgcgggcacacggagctgctgacggtggagcaggccctggccgacttcgcagagctgctccgcgcgctacgacgcgacctcggggcccaggatgcccccgccatcgccttcggtggaagttatggggggatgctcagtgcctacctgaggatgaagtatccccacctggtggcgggggcgctggcggccagcgcgcccgttctagctgtggcaggcctcggcgactccaaccagttcttccgggacgtcacggcggactttgagggccagagtcccaaatgcacccagggtgtgcgggaagcgttccgacagatcaaggacttgttcctacagggagcctacgacacggtccgctgggagttcggcacctgccagccgctgtcagacgagaaggacctgacccagctcttcatgttcgcccggaatgccttcaccgtgctggccatgatggactacccctaccccactgacttcctgggtcccctccctgccaaccccgtcaaggtgggctgtgatcggctgctgagtgaggcccagaggatcacggggctgcgagcactggcagggctggtctacaacgcctcgggctccgagcactgctacgacatctaccggctctaccacagctgtgctgaccccactggctgcggcaccggccccgacgccagggcctgggactaccaggcctgcaccgagatcaacctgaccttcgccagcaacaatgtgaccgatatgttccccgacctgcccttcactgacgagctccgccagcccaggcgtgagcagcagccagctctgcgtggggggcccagactcagcctctgagcacaggactggaggggtctcaaggctcctcatggagtgggggcttcactcaagcagctggcggcagagggaaggggctgaataaacgcctggaggcctggc

SEQ ID NO: 524312 - DNA, 287 bp, Homo sapiens
ttaacctagctggtgctatgagcacaagtcaggagagggggcaggagtgactctgaggcaacagagagggtgggaaggggatctccctagtgtccctggtgatacaccccccaaccaaaatgatatctccacatactcaatgactatgaagacataacaggctctgtccttttggaccccaccccatccctggccagagcttcaaaggccagtcccaaaaaggttctaccctcacttgctcatgctactagccttcctcttctcctccttcttcacatttttctctg

SEQ ID NO: 524313 - DNA, 2525 bp, Homo sapiens
  misc_feature (1010)..(1010): n is a, c, g, or t
  misc_feature (1059)..(1059): n is a, c, g, or t
  misc_feature (1083)..(1083): n is a, c, g, or t
  misc_feature (1252)..(1252): n is a, c, g, or t
  misc_feature (1282)..(1282): n is a, c, g, or t
gtccaattccctaatgtgacgggcgcccgcggaaggcgacatgggctccgctccctgggccccggtcctgctgctggcgctcgggctgcgcggcctccaggcgggggcccgcagggccccggaccccggcttccaggagcgcttcttccagcagcgtctggaccacttcaacttcgagcgcttcggcaacaagaccttccctcagcgcttcctggtgtcggacaggttctgggtccggggcgaggggcccatcttcttctacactgggaacgagggcgacgtgtgggccttcgccaacaactcgggcttcgtcgcggagctggcggccgagcggggggctctactggtcttcgcggagcaccgctactacgggaagtcgctgccgttcggtgcgcagtccacgcagcgcgggcacacggagctgctgacggtggagcaggccctggccgacttcgcagagctgctccgcgcgctacgacgcgacctcggggcccaggatgcccccgccatcgccttcggtggaagttatggggggatgctcagtgcctacctgaggatgaagtatccccacctggtggcgggggcgctggcggccagcgcgcccgttctagctgtggcaggcctcggcgactccaaccagttcttccgggacgtcacggcggactttgagggccagagtcccaaatgcacccagggtgtgcgggaagcgttccgacagatcaaggacttgttcctacagggagcctacgacacggtccgctgggagttcggcacctgccagccgctgtcagacgagaaggacctgacccagctcttcatgttcgcccggaatgccttcaccgtgctggccatgatggactacccctaccccactgacttcctgggtcccctccctgccaaccccgtcaaggtgggctgtgatcggctgctgagtgaggcccagaggatcacggggctgcgagcactggcaggtgcccttcccccggccccagatgggcaagtgtggagancccaggcttggcttgggtcctggggccgggtggggcgaggatccgcagnccggccaggggctttgcctcctgncccagggctgtggtggggtggacagcacgaccttcccagaaaccctgggggaggcaggggccgtccctggggaccctctcagcactggctgtagccaggcccagcttggtgggtgctgcccaaggggcccctggggtccccagcatggagggcaacagagggcagcagnccccaccctgccccgtggagagcggggggncctcaacagtcaggcccggggctggcagcacagacaccgccgacctccaagcaggtagcctggagggccttcctcactgggacctacagatccagagcccagatcccctgcaggaccattccgaggggggacaggttggtggccggagcccgcggtgtgtctgtgtgtggccgctgggccccagcgcctctcctccccagggctggtctacaacgcctcgggctccgagcactgctacgacatctaccggctctaccacagctgtgctgaccccactggctgcggcaccggccccgacgccagggcctgggactaccaggcctgcaccgagatcaacctgaccttcgccagcaacaatgtgaccgatatgttccccgacctgcccttcactgacgagctccgccagcggtactgcctggacacctggggcgtgtggccccggcccgactggctgctgaccagcttctgggggggtgatctcagagccgccagcaacatcatcttctccaacgggaacctggacccctgggcagggggcgggattcggaggaacctgagtgcctcagtcatcgccgtcaccatccaggggggagcgcaccacctcgacctcagagcctcccacccagaagatcctgcttccgtggttgaggcgcggaagctggaggccaccatcatcggcgagtgggtaaaggcagccaggcgtgagcagcagccagctctgcgtggggggcccagactcagcctctgagcacaggactggaggggtctcaaggctcctcatggagtgggggcttcactcaagcagctggcggcagagggaaggggctgaataaacgcctggaggcctggcaaaaaaaaaaaaaaaaaaaaaagaagaaaaacaaacacaaccacaagaaaaaaaggggggggcgacgaaagaaaaatccccgggggggggcccaaattagagcgacacccagatcgtctgtcaaaaaggggggcccacaaagagagaaggacaaaataaaaaaacgcaaagcacgcggcgcccgacgctataacaacagattagagagcgcgtgacacacacacgcgccagcacggggggcgacaatgtgagaggagagggacaacccacacaaccacgcggggggggggacaaaccacaataggggacaaaaccaacaccccaaacacgacaagttacaacgcgccccggacgggggcaaccaaaaaaacaccgaagagggacaccagggga

SEQ ID NO: 524314 - DNA, 1966 bp, Homo sapiens
gtccaattccctaatgtgacgggcgcccgcggaaggcgacatgggctccgctccctgggccccggtcctgctgctggcgctcgggctgcgcggcctccaggcgggggcccgcagggccccggaccccggcttccaggagcgcttcttccagcagcgtctggaccacttcaacttcgagcgcttcggcaacaagaccttccctcagcgcttcctggtgtcggacaggttctgggtccggggcgaggggcccatcttcttctacactgggaacgagggcgacgtgtgggccttcgccaacaactcgggcttcgtcgcggagctggcggccgagcggggggctctactggtcttcgcggagcaccgctactacgggaagtcgctgccgttcggtgcgcagtccacgcagcgcgggcacacggagctgctgacggtggagcaggccctggccgacttcgcagagctgctccgcgcgctacgacgcgacctcggggcccaggatgcccccgccatcgccttcggtggaagttatggggggatgctcagtgcctacctgaggatgaagtatccccacctggtggcgggggcgctggcggccagcgcgcccgttctagctgtggcaggcctcggcgactccaaccagttcttccgggacgtcacggcggactttgagggccagagtcccaaatgcacccagggtgtgcgggaagcgttccgacagatcaaggacttgttcctacagggagcctacgacacggtccgctgggagttcggcacctgccagccgctgtcagacgagaaggacctgacccagctcttcatgttcgcccggaatgccttcaccgtgctggccatgatggactacccctaccccactgacttcctgggtcccctccctgccaaccccgtcaaggtgggctgtgatcggctgctgagtgaggcccagaggatcacggggctgcgagcactggcaggtgcccttcccccggccccagatggcactggctgcggcaccggccccgacgccagggcctgggactaccaggcctgcaccgagatcaacctgaccttcgccagcaacaatgtgaccgatatgttccccgacctgcccttcactgacgagctccgccagcggtactgcctggacacctggggcgtgtggccccggcccgactggctgctgaccagcttctgggggggtgatctcagagccgccagcaacatcatcttctccaacgggaacctggacccctgggcagggggcgggattcggaggaacctgagtgcctcagtcatcgccgtcaccatccaggggggagcgcaccacctcgacctcagagcctcccacccagaagatcctgcttccgtggttgaggcgcggaagctggaggccaccatcatcggcgagtgggtaaaggcagccaggcgtgagcagcagccagctctgcgtggggggcccagactcagcctctgagcacaggactggaggggtctcaaggctcctcatggagtgggggcttcactcaagcagctggcggcagagggaaggggctgaataaacgcctggaggcctggcaaaaaaaaaaaaaaaaaaaaaagaagaaaaacaaacacaaccacaagaaaaaaaggggggggcgacgaaagaaaaatccccgggggggggcccaaattagagcgacacccagatcgtctgtcaaaaaggggggcccacaaagagagaaggacaaaataaaaaaacgcaaagcacgcggcgcccgacgctataacaacagattagagagcgcgtgacacacacacgcgccagcacggggggcgacaatgtgagaggagagggacaacccacacaaccacgcggggggggggacaaaccacaataggggacaaaaccaacaccccaaacacgacaagttacaacgcgccccggacgggggcaaccaaaaaaacaccgaagagggacaccagggga

SEQ ID NO: 524315 - DNA, 1940 bp, Homo sapiens
gtccaattccctaatgtgacgggcgcccgcggaaggcgacatgggctccgctccctgggccccggtcctgctgctggcgctcgggctgcgcggcctccaggcgggggcccgcagggccccggaccccggcttccaggagcgcttcttccagcagcgtctggaccacttcaacttcgagcgcttcggcaacaagaccttccctcagcgcttcctggtgtcggacaggttctgggtccggggcgaggggcccatcttcttctacactgggaacgagggcgacgtgtgggccttcgccaacaactcgggcttcgtcgcggagctggcggccgagcggggggctctactggtcttcgcggagcaccgctactacgggaagtcgctgccgttcggtgcgcagtccacgcagcgcgggcacacggagctgctgacggtggagcaggccctggccgacttcgcagagctgctccgcgcgctacgacgcgacctcggggcccaggatgcccccgccatcgccttcggtggaagttatggggggatgctcagtgcctacctgaggatgaagtatccccacctggtggcgggggcgctggcggccagcgcgcccgttctagctgtggcaggcctcggcgactccaaccagttcttccgggacgtcacggcggactttgagggccagagtcccaaatgcacccagggtgtgcgggaagcgttccgacagatcaaggacttgttcctacagggagcctacgacacggtccgctgggagttcggcacctgccagccgctgtcagacgagaaggacctgacccagctcttcatgttcgcccggaatgccttcaccgtgctggccatgatggactacccctaccccactgacttcctgggtcccctccctgccaaccccgtcaaggtgggctgtgatcggctgctgagtgaggcccagaggatcacggggctgcgagcactggcacactggctgcggcaccggccccgacgccagggcctgggactaccaggcctgcaccgagatcaacctgaccttcgccagcaacaatgtgaccgatatgttccccgacctgcccttcactgacgagctccgccagcggtactgcctggacacctggggcgtgtggccccggcccgactggctgctgaccagcttctgggggggtgatctcagagccgccagcaacatcatcttctccaacgggaacctggacccctgggcagggggcgggattcggaggaacctgagtgcctcagtcatcgccgtcaccatccaggggggagcgcaccacctcgacctcagagcctcccacccagaagatcctgcttccgtggttgaggcgcggaagctggaggccaccatcatcggcgagtgggtaaaggcagccaggcgtgagcagcagccagctctgcgtggggggcccagactcagcctctgagcacaggactggaggggtctcaaggctcctcatggagtgggggcttcactcaagcagctggcggcagagggaaggggctgaataaacgcctggaggcctggcaaaaaaaaaaaaaaaaaaaaaagaagaaaaacaaacacaaccacaagaaaaaaaggggggggcgacgaaagaaaaatccccgggggggggcccaaattagagcgacacccagatcgtctgtcaaaaaggggggcccacaaagagagaaggacaaaataaaaaaacgcaaagcacgcggcgcccgacgctataacaacagattagagagcgcgtgacacacacacgcgccagcacggggggcgacaatgtgagaggagagggacaacccacacaaccacgcggggggggggacaaaccacaataggggacaaaaccaacaccccaaacacgacaagttacaacgcgccccggacgggggcaaccaaaaaaacaccgaagagggacaccagggga

SEQ ID NO: 524316 - DNA, 112 bp, Homo sapiens
aatgtgcacagaatggggagagactggtagagttagctagaggggcaaagggaaaatggataacacaagtcagatttagttaacggggtgcaactctttgatcatacttgct

SEQ ID NO: 524317 - DNA, 290 bp, Homo sapiens
  misc_feature (3)..(3): n is a, c, g, or t
tanttttgacagttggatggtgtctgctccttagggcaggatcggaggcgatcagccagacacccaagtgcagatactaatgaagcccctgctgttttggctcacctaatcattgatcccaactcatcagaggcagtttgtgttgagaacatgacaaagcctcattacaaaatgaatgggggtgggggcacggaactgcgtgaagaaacccgcaggttgtgttgacagtcttataacggatatcaggctagggcttaaggaccggctggaaaacccacgatgagtgtgga

SEQ ID NO: 524318 - DNA, 478 bp, Homo sapiens
catcactacggaatgtcctatcgccatctgtcctcttcttcatggagctcatagcagcatgcagcagaatgcagcgcaatgagcagacacctgtgcaggcgttgctgctaccatctagaagcgcgttgtagaagttgtagccgaagtaggggcccctgttgctgatggactcgtagtatgtggtgtagaggatctgggtgggaaaagaggaccagtcgggtgtagaagaagacaaagggagaagatgaaggaagagagcgtcgcacacttgctgatactgcatgtagttgaccatcttacaaggcctccagcaggtagtcagaggaatcatgtaacagcagcaccagagagccaatgcgcagcaggttggcactgtaggagaaggtcatcaggatgactgccacgaagtggtgtatcacctgctccttgaaatccttgcgcttgacatcatagggcagtctgattagcagtgatgaga

SEQ ID NO: 524319 - DNA, 210 bp, Homo sapiens
tgctcaaggcggcccttgaccgttggtgatggtgatcttgttggccttgccggtgctcttgtcccgtggccgtgacgttcaggatgccgttggtttcgatgtcgaaggtcacctcgatctggggcacgcccctggggcccggagggttgccgctcaagttcgaagcgccccaacagattgttgtctttccgtcatggcccctctagcctc

SEQ ID NO: 524320 - DNA, 127 bp, Homo sapiens
cctggctctaggaatactgggggaagtatgtaggagttgacagattagtccgccgtagtcgcctaagttcagagccaggcctggctctgaacttaggggatcagaacggtgtgtggcaggtcctgct

SEQ ID NO: 524321 - DNA, 185 bp, Homo sapiens
atttttagctagacgacgggtttggccattttggccaggctgatcttgtagctcctgacctctggtgatctgcctgcctcggcctcccaaagtgctgggattacaggcgtgagccactgcgccctgcatgtactgtaattttgcttatttttagaccttccaaagttgccattccgtcttaactg

SEQ ID NO: 524322 - DNA, 536 bp, Homo sapiens
  misc_feature (421)..(421): n is a, c, g, or t
  misc_feature (424)..(424): n is a, c, g, or t
ggccacacagccgcggcaccatggcacctgctggacgcccgagggccaaaattgtgagtttcgtgccctcgatcctagcggagctgctggacgctgggctgcgagcgaatccgttcacacccggcgtgcatacgtagacaagccctggggcctcggcaaaacacttggacgggatgtgcctgagcctgaatttttccctagaacgggttgtgtagacgatatggagcccttactcggtgcctggcgctgcacatagagcatggctaaagttatctgctcatgttcacaagtatactcatttcacaggtgaggcaactgaggctcggcgagtcaagcgactagctcatggtaacagctacagacccacgtggagcgaggatcagaagtctagctatcggacgcatgtagcgcacacattttnttnccttaaccgacccttgtccagagctctttgggctaaaccgaacggggactcttttgactgtacccttccccttatggttaataggctggtcacaccccctcttggtgcggtg

SEQ ID NO: 524323 - DNA, 327 bp, Homo sapiens
  misc_feature (51)..(51): n is a, c, g, or t
  misc_feature (57)..(57): n is a, c, g, or t
  misc_feature (170)..(171): n is a, c, g, or t
  misc_feature (223)..(223): n is a, c, g, or t
  misc_feature (228)..(228): n is a, c, g, or t
  misc_feature (285)..(285): n is a, c, g, or t
  misc_feature (287)..(287): n is a, c, g, or t
cttatcacaacgcagcccaaaactctgtttacatgggtggggtagatggancagggnactacagagtgggatggtcaggacctgggccattgcaaccaaaggggggacctcctgggtgggccggtcactccctctactcactgagccaggattagggagggttattgccnnaaccattgcaatgggcggtggagggacaggctcagcctcctcattgtctaantgagncctaaatgtgtgaagtgcgatttctgcttttgtgtaccccacctccccattaccaananctgcctatgtgtatttgtgtcaataaaaagccaaaccctg

SEQ ID NO: 524324 - DNA, 727 bp, Homo sapiens
ggggttaccggctctgctcgatgtatgtggagatgtcgattccctcgggaagttctgccacattaacttcaaaccggccccgggacgtcatggaggatttgggcatcattctcgtcagacacaaaagtgatggctaggccttgggtgccaaagcgacccgcccgggccacccggtgcaggtaggtgtccgagtcctcaggcatgtcgtagtaaagacgatgtgactcgctcgatgtccatcccccggccaaacagatgggtgggccaccaggatccgccgtgggaaatccttgaactggctgatagcgtgacaggcgctcctccggggccatgccccggtggatggcagatggccggaaagttctggctccacgaggagctggggccaggccatgcagcgctgccactgacttgacgaaagataatcacctggttaaactccagccacttccaagagatcaaagagctggggggtcctcctcactgtctggagttggcgtagaactgttgaggccgtgcacggtagagctgtggtctcgtcgtccaaaactcctccatgggatcctcgcatgaaattcctgcacacaaggcgggattgcctgcccaaggggcgccgacattaggccggtctcggggggcaggggaaactcctgaaccgcggagtcacgtccgatttggcactctccccaaggtccttctagggaccaatcgaaccaaaggcgggcca

SEQ ID NO: 524325 - DNA, 103 bp, Homo sapiens
ccgtacaagtgtgcacgtatactcagtactgcctgtggctctctgtatgacatcacaaggctgcaaggtgctgtttttctagaactaggagttggtgaggttt

SEQ ID NO: 524326 - DNA, 402 bp, Homo sapiens
  misc_feature (265)..(265): n is a, c, g, or t
gccctacctcccctagctctgaaacgagccagatgacacccacctcttcctaggactcccgaagaccatggtgatggtgcagggagagaaggccacctgccagcatgtgcccttcagggtacagacaccctggctactagtaatagcggcccaacaagatcagattccctccccaaactgaagaggagaaaaggaaattatttctgctcagggttggggcaacagagaggagtttttcttcttgtttcaaggccctgtagagaanactagcctacctgcaccagtcaggttaggcgtcagagaaatggcattgaaggggttttgagggatgaagaggagttcaccaagcaggaaagagatgaaagggtatcccaggtggaggaaatagggtgtgcaaaggcc

SEQ ID NO: 524327 - DNA, 362 bp, Homo sapiens
  misc_feature (160)..(160): n is a, c, g, or t
  misc_feature (233)..(233): n is a, c, g, or t
tgaggatccaacacgatctcgcaagattgacaatgaaattcagaatatacttctggtctaacgggaggataaacaagaaaactctagaatgtgccccgagtatctcttaaagggcagaaacactagttatgcgcacactgtggaaaacaaactcgcagancgataacctaaatggttgaataagcatcaaactggtatctggaactccctagtgtgctcatcacagctcaaancacacactttacatcttgtctaacctttactttccacttgtctcagtctaatcatcagtaagagataaggacagcctctcaagagtaccctgaagaaggttaataaaagcattctgagattgcggtgtt

SEQ ID NO: 524328 - DNA, 512 bp, Homo sapiens
tgtctggaaaaagtacaggagagagaatggaaccattcgcaaatgtgaaaaacacatatattagctgaaacatatgcatgatctcaatgcagttacataggaaatgagttttgaaatgatctgattctcatattatctctggtggattatgcaaggtgtcagttactgcttcttctactcctttcccaattttgagggtaatagactaaataccaccctaataaccaaaaggaccaagtagcccatttaagaaacatgaattaaatttctgaggttatctacatctatggggtaagttcaactcttgaatgagtggttgtgaatagcctaacttccttgggagacctggaaaaaaactcggtggtgaccccaattcaagcccaaggtgtccacctttggatatcaaacaccaatcgggcgtttgccaaagccccccccttctcttgcgtcctcctgggggcagtgagccccgctcgaaccggggagcttgaggtgctcttccggcggaaacg

SEQ ID NO: 524329 - DNA, 198 bp, Homo sapiens
  misc_feature (38)..(38): n is a, c, g, or t
  misc_feature (174)..(174): n is a, c, g, or t
gctcgggtggctgagcgcgcggggaaatggccacgggnacagaccaggtggagggactcggcctcgtcgtcgttagcctgatcatcttcacctactacaccgactgggtgattctcttggcatgtcattctccccgtccgctactcaccttccccgagccctggcaccggcacngcaactactatataggctctaggc

SEQ ID NO: 524330 - DNA, 210 bp, Homo sapiens
gctcctgattgtatatccgcaccacaggctaggttgctatccgtgcagtctacagcgttcatcaggttgacggacacagcttacttgttcttccacgggttgggcgttgtcgctgcagatggcgggtttgtgactgctccgctgctcagagtatcagagagaagattgcccgtgtgtggcaccgtttgagttcgcttcacagtgcactct

SEQ ID NO: 524331 - DNA, 434 bp, Homo sapiens
attaaagattttgaggagatgttttaggatggtatctttcagagcgtccagtaatcttggaatctaaggaattgctttaggttggattacctagacctttgctactgactagtgatcctgaactatggcacatgaatatgggggctaagaaattgctccatcggattaataaacaattaacagatctaaatgctcatccatcaaaggattataacggagcatctgctcaaagaaaaaccatgataataatcaggctctaaaataaacattcgaagataccaagtatggccccaaccaattttaaaccaactcgccagtcgcttcgggccagtctactgtagactctggcactttgacccatgcagggcgtttatctcccttacttggccaatttggtagggtagtcctattaccggtgggtcccccatttcgcc

SEQ ID NO: 524332 - DNA, 171 bp, Homo sapiens
ggtgatcctccctctgataggaatgataccgggcttggctggtggttacacggtatccatgaggcatggatgggctagcataggtcaagtgcttagcctaaaccgggcacagaggaggggcagatatgggctgcggtcatcattccattcaaagggtactcattccattca

SEQ ID NO: 524333 - DNA, 964 bp, Homo sapiens
gggctttgggtgcgctgcagcggtcctgcggctgcgcagctgtttctggtaactgctttgcctcccggctcccgcaggaggatgcttggtggtggagtgtggcgaactggcctgtccctggtgtggggatgccgaggctggtgcagtgccctccggggagcgcctgggtgtgggtgggcctgcaccggtagtgcgccctgcccctgttgggccccgcagaactcgcgcctgtggcctccctgctgctgctgatgcccgaagaggctgcggtcttggccgcagatcggcgcccgtgactctggtcagcgccccgcgtccagactctcggaccacagcctggcctgacatccttcaatgcgccagcaaagaggagagcttccaggagcagagcgccttggaagctgagtgcccgggagaccgtcgtcaggagctcctggagaagattacggagggccaggctgctaagaagcagaaactagaacatggcttcagggtgccagctcaatgccaggatggctggctcgagccaaggctgcaaagaggatgagaacagtgattggccaggcttcgggagagcaggaggaagctggccctcgtcttcccaagcagggaacctcaactggggtaggccccttgccaagatctgtctcctttgtccaagctgggccactggcaaggccttcgacgtcaggcaaggcccctggaatggcgtgtccagtctaaagaatggccccaagccggcgcctgccacgaggtgagaaagaattaaaagactgtggaggaggtctacccagaggggtgcagttggagggatccggacaacctggaccctaggttcagccaatttccaatttggcctgagaacccatcagactgtgtcggcttgacaataaaacgtcttgtcagcggagggaaccagggacaaaacactgattgccacttcactgaaccacaggagaattga

SEQ ID NO: 524334 - DNA, 163 bp, Homo sapiens
tcccggtgcagtgtgctatgatgctatggtactttgtaaagagacttagcataccaagatactcatggtccattcatttgttggctaagacagtggctgccacacacttattctaaaattaaaaaaaatagcagtaagcattttaaggagcatcaagataatt

SEQ ID NO: 524335 - DNA, 376 bp, Homo sapiens
ggcgaggctcatcaccatcgagatcaaccccgacttgtgccggccattcacccagcggattggttggatttcgcttggcgttaaggacacaggtcaccctttgttggtttggaggcgttccagggacattcattccccccagcttgaaggaaggaaggtattgattgttggacacacttggacattggtcttctctcggacccacttggaagggaccgggtaccttgccgggacacgctttctctttgggagggaatgttggccttccttgcggaaagggggacagttctacttggctgacaacggtgatctgcccaggtgcgcaagacttcctagcacacgtgcgccgggagcagctgcttttgagtgcacacac

SEQ ID NO: 524336 - DNA, 1663 bp, Homo sapiens
cgagtgctgtggtgtgtggggcgcggcgggtgggtgtctgtggtttgtaggtgcttgctgcttctgtttgctctggtgcggcgtcgttcgtccgggcgcgtcttggtgtgggtgcggaccatgatttattgtttgcggtagcgctaagttggtgggcgctgctctcgtggtttgtggtggggttggagtggctctcgtttttctactcaaggggttgctgtgtgttgctgcgcagagcaggggtcagtgcatgtccgtcggtcgggtgcatcgatgtatttttggcgtcgcccgccgttccgcttgcctctcttttggtgtgtggttggactatagctacgttgttgctgtaatatttaaggagatgggctgcgcttgtgttggtgctgcctgcaagattatttactggctgcgcgccgcgttctttcttttttttgtgttgtggggccccgcccttctttctcctcctcgtgttggggggctgtgtgccgacaaccagacgagtgggtgtgggtgtgtgttgttatgccgacgaacgatcttctctctgtactgaggagggttagtagtgtgtttgtgtggtctcccccccgcctggtggtgagtggagtgggtggatatggtttgtgttgaggataagtatctcgccttgcgccgagggaggtgtgggtggagcccgccgtgtggtgtttgggccccgccgatggggcacagggtgtgttcccccccggttgggggagaagtttctgtggtgggggtggagtgggcgttggggtgcgacgacactacgtgtgtggcgggggggttgtgtgtctcccgctccattggtggatgtgtggttgtggtggagtagtagggcggccgccccggctgttgatgtgtctggcgcagcattagtggttggggtgattggtggcggggggggtgtgtgtgtgtgcatcttggtggtcccgcggctgcgtgtgggggggctgatgatggtgtggtttattatatggtggtggtgttttctcgcgcgggtgtgctgtctgcatcagagtagagagtcgcacacgcacgctcgcactcgcgctgtggcgtcactgtgatctctctccgctcgtgctgtgttgtgtccgcgctctctcgcacgcgggggcgcacacaccgcgcgagagaggctcacacagcacacacacactctctctccgcgcgcggcgggagagagagagagacacacccgccgctcgcgccgagagagagcaccccgcgcgagagagagaagagaagacaacacacaccgcgcgagggcgcagcgccacgcgccgggggcgcgccgagagtagtatttgtgagagaccgcgcgcgcgcgagaggggagccgcgcggggtgggggcgccgcgagagagagaggcgcgggggaggcaagagagaggcacgatgagagaacaccccctgtgagagggcacaccacccaaacaaatagttttttcgctttgtggggttttttctccccctgttttgttgccgcttgtggggactcccccccccgcgagattttgtgggggccgccgcgcgggggggcggggagagagccccccccgcgcgatttcgccggggcccccttttttttcggatttccaaataaaaaggggggggggcctttttttttgtgggcccaca

SEQ ID NO: 524337 - DNA, 124 bp, Homo sapiens
aataataatcccccccccccccggagcgcaagagccaagccgccagcgctgtgatgtgggccacgctgccgctgctctgcgccggggccaggcacatggatctagctggctgcggggccgccga

SEQ ID NO: 524338 - DNA, 110 bp, Homo sapiens
gaagcgcacgatggccgccctaggacacggagctgccgtcgcccgtagtgagatgacaggccaggctccgcccttgatgggacgcatctcctacgctgctgttggtaggt

SEQ ID NO: 524339 - DNA, 840 bp, Homo sapiens
gctaaacgatgcggttccccggtcctcctccccagccatggggagtacaggtccgaggggttctgattaatgtctgtggctgtgaggtacatggccgggtctcactcttctttacgccattgtgcccggcagttatacgcatttggatgaggctgaagacctgattacagatgattcctatagaccatgtgtcattatccctgaggtcgtcctttgtagatcccagagtacctctattcgacgcggttctgctgtgtcatgtttctttgttgcaggcagagtgcgttacacctgggtctcaatatgcccctctgtggatatcatattggaggtatatgagtagaccagtgatgagtggcccaggatctatgacctaaacatcaatgaatgcagatattctagcatatggtcagaaggaaggatggtgcaaattagtttttatcttctagcatttttttataactatatggatgatctatgtttgggtgagctcttagaacaaaaagaaagaattggtccagttaagtgcttgaaaaggcaccaaaatgaaggggattctatccaagcaaagatcctgtcccaaggagtaggcctgtggaaatcttgatcaagttacttttaaaaaaatgactcctttatttttttaaagtgtttccaacaatttgtggtgtgggggaaagaatggtgtcatattgtcattactcagatcacagatttaaacggggtattacggtatacagtcattttaatggttacctctggggggtgacgggttgaattggcattttaaggaaagcataatctcggagagggtaatagggtgccagactggagagttgt

SEQ ID NO: 524340 - DNA, 406 bp, Homo sapiens
  misc_feature (52)..(52): n is a, c, g, or t
  misc_feature (65)..(65): n is a, c, g, or t
  misc_feature (68)..(68): n is a, c, g, or t
  misc_feature (71)..(71): n is a, c, g, or t
  misc_feature (80)..(80): n is a, c, g, or t
  misc_feature (89)..(89): n is a, c, g, or t
  misc_feature (98)..(98): n is a, c, g, or t
  misc_feature (102)..(103): n is a, c, g, or t
  misc_feature (117)..(117): n is a, c, g, or t
  misc_feature (122)..(122): n is a, c, g, or t
  misc_feature (132)..(133): n is a, c, g, or t
  misc_feature (138)..(139): n is a, c, g, or t
  misc_feature (145)..(145): n is a, c, g, or t
  misc_feature (152)..(152): n is a, c, g, or t
  misc_feature (158)..(159): n is a, c, g, or t
  misc_feature (161)..(161): n is a, c, g, or t
  misc_feature (170)..(170): n is a, c, g, or t
  misc_feature (172)..(172): n is a, c, g, or t
  misc_feature (176)..(176): n is a, c, g, or t
  misc_feature (179)..(179): n is a, c, g, or t
  misc_feature (188)..(188): n is a, c, g, or t
  misc_feature (191)..(191): n is a, c, g, or t
  misc_feature (203)..(203): n is a, c, g, or t
  misc_feature (217)..(217): n is a, c, g, or t
  misc_feature (220)..(221): n is a, c, g, or t
  misc_feature (239)..(239): n is a, c, g, or t
  misc_feature (243)..(243): n is a, c, g, or t
  misc_feature (259)..(259): n is a, c, g, or t
  misc_feature (264)..(264): n is a, c, g, or t
  misc_feature (266)..(266): n is a, c, g, or t
  misc_feature (285)..(285): n is a, c, g, or t
  misc_feature (287)..(287): n is a, c, g, or t
  misc_feature (324)..(324): n is a, c, g, or t
  misc_feature (329)..(329): n is a, c, g, or t
  misc_feature (338)..(338): n is a, c, g, or t
  misc_feature (391)..(391): n is a, c, g, or t
aggtggggcctccagactcatggtgggaaaaaggccaaaaagggctattgcncacagaacgtccnttnaantggtcttcntcccctggngactttggncctnntggtttcttttttngtttntttttcatannttttnntagttnttcttangtattnntngttttttantntttnttnttttttttnttnattttgctagtntggcaggggatggnagnnatgttatccaggtaggcnaccncgccggcagatttganttgtntntttgatttgttggtagttnangtcccagcagcccctgttgcttttttgttctcccgcnggggnaaagcgtanggttggggtaggtgtacattttgttcctctgtttcgttcacttggtatttgtnggagaagaggatctt

SEQ ID NO: 524341 - DNA, 479 bp, Homo sapiens
ggggtagagggataggaggagaatgggggataggtacataggtgcttactatactgttgtggtttctgaattgggaatttctcaaaattagaaaagtatctactgaggagcttttcgttttaactggtggggactgggttctgggtggtttggccccttttcttttgagcttcaagaaatccatggtgcaaaggtggggcatacctatgacgacacaggaggataaagtgatcacggagatggcagctcagatccgtgaggtggagcagagccgacaggaggtggttcggtctgtcttagaggtgggtttccctcggaggatccagaccacctcgggcaagtgccagacccagaagagggtcttcagcacctagaagctggaaagggatgaccagccaagtagcttccagcttacagcagccctcaatttgggacctgccaccagctccagagctggactggatggagccggaccatct

SEQ ID NO: 524342 - DNA, 257 bp, Homo sapiens
ctgctcctccctccttactgctcatccctccttatgctcatccctcacttctgctccatcctccttcatccctccttatgcacaaacatacacattatgctcatccctcattatccctccttatgctcatcctccattctgtcatgcctccttatgctcctccctccttatccctccatatgcgcatccctccttatgctcatcactcctcctgctcctccctccgttcatgctccaccctccattatgcaccatcc

SEQ ID NO: 524343 - DNA, 276 bp, Homo sapiens
ggcagtggcaggcgcctgtagtcccagctactcgggaggctgaggcaggagaatggcgtgaacccaggaggcggagcttgcagtgagccgagatcgcgccactgcactccagcctgggcgacagagcgagactccgtctcaaaaaaaaaaaaaaaagaaagaaaaagaaagacatgcagcatcaccagatcaccagtgcttctgactaccacagatgatgaataactaaccatggattagtgaagtaaaaatgatttcaaagactttgctctgaat

SEQ ID NO: 524344 - DNA, 1055 bp, Homo sapiens
  misc_feature (189)..(189): n is a, c, g, or t
gctgcgagaggggtccatactggcgcttgttctggtattcccgtcgtagcttacagggaagctttcacaaaagtccggagcccttgatgtcctgcaagtgaaggaggaggatgtccattgaagtatccttgcgagaagagagaacccaacttgagagtcggcaccgaagtcattgacgttccaagaatnggagccagtacatctgatgaacaatggaaaagtcgagcggcatcatcattatcaatcaacatctcgaaggcaggactctgggagaagcttctcgctggcagctcgtgcaattggttgccattgagaagcctgtctgatgtcagggtaatatcctccaggaatacttggccagagggcttgtgctgaagttctgctgctgcacactgtgagccacatccaattagtctaggccgcttcagatccactggaagcttcagcgtaatccatgatccacggcaggcttccgggtagccatcggcttcttgtgggtatactgagcccagggctgagccaaccatgcctcatcacggaggcatctgtatgttaatctacctaccagttgcgctgtgtagatcacagattgctcctcgtgtgctatgtggacagttgccatcccatgcaacgaacaggagggagctcactcagatgggtgcaatgtggttggatgctggctctgggaagttctgagcatgcgtggcaacatttccctgtgaacaccgcaatgggcaggtcattgcctgatctgtagcttcctacagatgatcctgatgagattggcaacaagaatgagcaggctggtgctggagaacggtgagtgaccaatggagggaatttcagggttgaatggactggttcgctgcttcgtgactttcactggtaacttcagccctgatggtggagaaccggtcctgactggtgctacaggggggcctctgttgcctattcgggcatttcctattgctgactcgcggcgtttcggctggcccagggaaccacctgggtggacgtccccatggttcagggcactgcatggtggaggggcacca

SEQ ID NO: 524345 - DNA, 110 bp, Homo sapiens
cagtagtcatactttatgcatccccgcagctacacacacacaacacacagcacacgcatgatacacagcacacacacgagcacagcacacacacgagcatacagcacaca

SEQ ID NO: 524346 - DNA, 488 bp, Homo sapiens
tggggccagtgaactgacaactaacaaaaaaattccccatgtccttaaaaatggctatttaaaaaaccactagccctttggttttttctctgttttggattaatggcacctgcttaaaaggaaagggtcaaataggctttgtttccctctgggcagggtcaatcatgagctaagctggcaggtgatttaatattagtataactagtcaccttcatttacgatcctgccagttttggctctctatatacttaaaaactcttccactttagattatgataagtatgcttttccatacttttaaaaagatgttggaaaccttcgggaggctttaaatagggatcttcccattcccctttggcagcaaagaggcagattcagttcaacacaccgttgtaagagaaaaaagaaattctcgagaattcaaattattattcaacccacaacttttagttaatccacttcccgctcacaagcaacttttataatat

SEQ ID NO: 524347 - DNA, 272 bp, Homo sapiens
  misc_feature (3)..(3): n is a, c, g, or t
  misc_feature (74)..(75): n is a, c, g, or t
  misc_feature (121)..(121): n is a, c, g, or t
  misc_feature (138)..(138): n is a, c, g, or t
  misc_feature (142)..(142): n is a, c, g, or t
  misc_feature (213)..(213): n is a, c, g, or t
aantggttttgggagaggaaacaggggggattcattgttttcaacaaagaagactggtcattttctttaacttnncaaactggtcttcctgttggcacatactgtgatgtcatttttgganataaaattaatggcaantgcncaggcattaaaatttacgtttttgatgatggcaaagctcatttttttattagtaactttgctgaagatccntttattgcaattcatgctgaatttaaattgtaaaatttaaaattaaatgcaaatcccca

SEQ ID NO: 524348 - DNA, 219 bp, Homo sapiens
cgttatggcttgagcacataaagactgtatgcgctgatcctactttgctattccttatgccaagtgtttgacgcatacatcttgagattgctattacatcaaggatgattatcttatgagagctaacaaactttgcaagacggcgggggccgggtcacggagctgaccaccaagccgctcttcaacctcttctacccggaactgacgggcttcgtgcag

SEQ ID NO: 524349 - DNA, 726 bp, Homo sapiens
agtggtactgtcggtgagtgcagagagaaagaccccaatgctagagattcgctatctgtgcacaagaatgtcactggtgagcgtgtgatgtgcaatgatgctgggacagcagtgatgccccgtgtgatgatgtgtgtggatgtgtgctgcaatgagtgcctgtccctgaatccatgacgctgcatgctgccgtgtgcatgtggtcatgtggacatgggtgtttgggtgccatgcttgctcgggtggctctgcttctgccccagaaatcctctccgcagcccttggttgtgccacacccatgccagcatcaccatgcatgcatgcatgcatggcagatcaaatctggtcatgcaccggcatgttgtggtagaagttgtgatggcatgtacgtgcgcactgatggacttgtgtggtcacttgtgatattctgtacgaggacattgaactggaatgttctggggggcccctaacaaggatccggcacgaaagtgccggcttgcgccagtgccagctgcgggcccgggaatcagtacaagtacttcccttcctctgctctcaccagtgactgcccatcagatgtcccatgccaaggcccctgcctggcacacttgccagccaacagcagagccactatgccatcacagaagttagggcgcatccgtgaagatgagggggcagtggctggtcatcaacagtcaacggagcctcctgagagctacaaggcac

SEQ ID NO: 524350 - DNA, 1134 bp, Homo sapiens
gagctgctggaggggaatcgaggcgcgggtccggggattcggctcgtggccgctggctctgctctgcgcgggagtggagctgtggcccgggcctgctgggggcccgagcccgtcctggagtgctgcccgctcctgcggtctccgcgccgctcgtgagactccgtctgtgctgctctgagggttctgccggtggccagtggagccggggtccgtgcgccattgcgggcatcgcgtgctgctgtgtcggtgctgctggcccggatgggccctgtggcgggtgggcagtcgtccctgtggcttcgagccctgaggcctgctcagcgtcgacctgggctggaggagccgtgctggtcccaggcccgacccaagcctggaggacgtcttgagctagcctgccgctgctggctaaccgagcaagcggctggacggcgcactggcaccagatctcaggtgcaaggcccgtgagcggattctgcgacgaaagcccggtgcgccgggggacaggccgaccgggggcagagatgtggggagccgcggcgctccgttgcgccactacgcaaccgctgcgaacagtgcccggctccatcgctcagtcctaacaatagtgcccgttctagggatcctcgacttagctattctaggctagcggcacgtcattgtgttccatccagtggatacgcatgtcatcgcttgcctgcgacgggtgccctgtacctcgtctcagaaactcgcccgccgttgtacccggaccgccttgcgggcgcgttgcgccgcttggcccgcgcgtggcggcctggggtggcacccccgggcttgcccacgccggtgttgcgttggctcccgtcgcccgggcgccgccccggtgtgggctccagccccgggtggcaccgccaaagccattggtgccacttgggccaaggtgtgggtgtggaccgggcgtacgcgtccgcaagggcaaggcgtgtagcaccacagtagtgggaatacaacctatttggcaacacgttgcgtaggtgggtttgcgctccaagtccgtggcgctttgaagagctaggaatcacgtgcacggaacatgacactatctaggaccattggtatatcctcttcccactgggattgcctatggaccaatcc

SEQ ID NO: 524351 - DNA, 240 bp, Homo sapiens
aagatggagtcttactccagcctgggcgacagagcaagactctgtctcaaaaaaaaaaacaaaaaaccacactattaagttactaggaataactctagcaaaatgtatgggaggccgggtgccgtggctcatgcctgtaatcctagcactttgggaggccgaggtaggtggatcacctgaggtcaagagttccagaccagcctgaccaacatggtgagaccccgtctctactaaaaatac

SEQ ID NO: 524352 - DNA, 911 bp, Homo sapiens
cgcagtggcacacgcctgtaatcccagcactttgggaggctgaggcaggtggattgcttgagctcaggagttcaagacctgcaacatggtgaaactctatgtctacaaaaaatacagaatttagccggcatggtagtgtgtgtctgtagtcccagttacttaggaggctgaggcgagaggatggctttagcccagaaggtggaggctgaagtgagctgagatcacatcactacactccagcctgggcgactaagccagaactatctttcaaaaaaaaaaaaaaaaaggtgggccagggggtgggggctcaccccttgtattcccagcattttgggagaggcgccaagggtggggcggagataatgagagggtcaggagaagatctaaaacttcctgggttaacttgggagagaaaccccggttctctatctaaaattaccaaaaaattaggttggggctgtgagtaggcgggtggcctggtagtcccaggttactcgggagaggttagagcgcaaaatggcgcgtagaaccctgggagaggcggagaccttgtagtggaggcccaaattcggtgccattggcattccacgcctgggggggacacagcgaagcctctgtttcaaaaactaagaaaacagcggggggaacaggggtgcagcatttcctcgtagtttatacaaagttaagttgtttttcaaaagaggaaaatggggaaccgatttatcagaaaaatttttttaaatgggttagagacttttttacacaaaaagggggggggaaatttagcggcttgagggggaaagtttctcttgataaagcgtggtatttttaataagttaaggagggtcgagagtatcccatttttggccgagtgtttaaaaaggtttaaaaccactgttgggaattattag

SEQ ID NO: 524353 - DNA, 288 bp, Homo sapiens
tctagttccatcaatttgcctgcaaaatttcatgatcacctttttttttaacaacttgtgtcatatatcattttataaatatactacatttttatgcattcctcagttgtggggcatctaggtttttaaggtattcagcctctggttgctggccttcaaggtagtgtcagacatggctctctctcactgcatggctcttaaactgaaccaatggggggggggatataagggacttttgggatagcatttgaaatgtatatgaagtaaatacataatagaacattggag

SEQ ID NO: 524354 - DNA, 108 bp, Homo sapiens
atattgttgatcttgaggatcccagtgtactccacaaacagcagagagagagagagagagagagagagagagagagagagagagagaatgtgtgttgcacagtgatga

SEQ ID NO: 524355 - DNA, 479 bp, Homo sapiens
cggggtccagagactggaatgtgaaacctctcgctgcggctaggtctacgaacaagcccattgtcctgtgcctcctaatatcattcgtactgaagaccccatctggggacttggagcactttggtcccgagaccagactcctcagacttctctctcagttgtgatgcttcattcgctgagggtgtctgtttgccctctcatctctcagtacttctacagaattttctctagagtcagtcattatgaattgtacttccctccatcttaagctatcaacttatctgcccctccttcaaggcccaggtagttaatgcacagcctcctccatgaagccttccctaaattccatgcccaaacccccaacttcaacaagtatttcaaggcttctgcaatgattggcactgaaacatagttgtagtacttagcctacctagaccagtaagcgttcatttttagctcgctcattttttaccatgtta

SEQ ID NO: 524356 - DNA, 505 bp, Homo sapiens
ttcgagggttcgcacagcaagtacgcgtacaggttgtaccccaagagcaataggctattatcatagcagcctaggtgtgtagtagactataccatctagggtgtgtaagtacacgtgggatgttgcataacaacaaaatggcctaacaatgcattcctcagaacagagccccatcattcacgggtgcatgagtgtatgttgaatagaaaacataagatttccaggcaatgctgtacatctacataacgttgaagactatgaactaggacgatgtactggctgcaaactacagttaggtgattttctccagtaggacctcatgtgcttgaatttggatcagactgtgccaaggtaagggtttggataggtatacggaacaaaagaaaaggaaggctatggaaatggagtataagactgacaagaatacagctgaattgatctaagctagttagggaacgtagtgatgggacaacaataacaaaagaaaatggaggcagtacggtca

SEQ ID NO: 524357 - DNA, 510 bp, Homo sapiens
ggaggaggtgatctggcattgtgatggctttggcaaggtgtacagggggcagctggcgaggtgagctggtggcttgtgaaggcagctcgccaggaccccccgggatgaggtgacatcacgtgtgacatgcctgagagctgttctgccagtgaggcccgtgcgtcttacgacacatggcttgggctacagcccgccaaacatccatttggccctacaagggactagttgttggccctggggaagggggacagaccacacaactaaccccttgggttggccacaataggcggattccggcaatttaggaggcacggctacaatttggcgccatgggcacctctgcggaataaggcagggaggcccaccacccccaatttccaggaaaggcgcgacgtgggcaaaggactatatcactaggccgaccccagagaggaggaccctgggtggaacctaggccctgggattaggggccccatggttccaccaatccgccaaaaacttggattcgga

SEQ ID NO: 524358 - DNA, 403 bp, Homo sapiens
gggattacaggtgtgagccactgcgaccagccctgttggcgtctttgatcctgggctgaggagctgagaagtttctatggcctgagggtcacacacacctgcccacacacctggccttcacccttcctgctagggggtatgtcctctgccaggagctgttgctcgtatggggggaccaggggcctttgccttgatcagatggagtcctggctggccacaaaacagaacacacccacctacaaagcacgtggcccagagatgtcctcgtctcccggccgctggctgaccagctaagtcctggcactgcagggcctgcccaggccgaattggggctgagccagactccctgcagtggggcccggtggcactgggacctctcacagcctcttttctgtcttgcagg

SEQ ID NO: 524359 - DNA, 128 bp, Homo sapiens
tgagaggaaaccattaaaatggtgttctactctccttgcttgtagattcacaagttgggggtgggtaagagggatagttaaaatgtttacaaaactttaggctccctcggaactttgccagtgtggag

SEQ ID NO: 524360 - DNA, 204 bp, Homo sapiens
ttttatcaccattatatgtctagaaaactaatgggtcaggttcttagcaaaaaaaaaaagaatgtagggtatgttctcacaagtactatcttatttggcataagaacccggacccatccgtatactaaccatataatggtgtatacaaaaggaatgaagcccaatacaaaaaggggtaacaagatttttgggggatcctcatag

SEQ ID NO: 524361 - DNA, 374 bp, Homo sapiens
  misc_feature (22)..(22): n is a, c, g, or t
  misc_feature (368)..(368): n is a, c, g, or t
ttggttgtaaaattgaaattanattgagtacattcagaatacacattttgtgtgaggcttataattacatacatataatttaaaatgaaatgaaatagactggttcccctctatacaaagtcctttgtctctgttatcaagtcactgtattagtggtgattatgaacacagtcaatgataatagaccttctgcattttttttgatttcatagcttcgtatagacagaaaccagactaccttggttaagagtcaggctggatgcagtggctcgctcctataatcccaggactttgggaggctgaggtgggaggattgcttgagcccaggagtttgagaccagccttggcaccatagcgagaccctgttncttaaa

SEQ ID NO: 524362 - DNA, 158 bp, Homo sapiens
  misc_feature (102)..(102): n is a, c, g, or t
aggatcgtctgggtgatgatgtgaatatgtgtgtgtgtgtgtatgcgtgtggcctcgctctgtcttcttcctatacgattccaaggtatcatagattcgtancttccatgaaacagtccccctgtacccccgtctccctctccggtgcacacgcggga

SEQ ID NO: 524363 - DNA, 161 bp, Homo sapiens
  misc_feature (94)..(95): n is a, c, g, or t
gcttgatgaagaggtagagggccagggtttctgctcttgtccttgcttggatcctgtaacaggctgggtcacaacccaaactttcccagctttnnttgaaagagctcttactcaagcccctgacccctttcctattaaggggagaatggctttttccccct

SEQ ID NO: 524364 - DNA, 278 bp, Homo sapiens
  misc_feature (12)..(12): n is a, c, g, or t
  misc_feature (17)..(17): n is a, c, g, or t
  misc_feature (45)..(45): n is a, c, g, or t
  misc_feature (49)..(49): n is a, c, g, or t
  misc_feature (54)..(54): n is a, c, g, or t
  misc_feature (58)..(58): n is a, c, g, or t
  misc_feature (63)..(63): n is a, c, g, or t
  misc_feature (79)..(79): n is a, c, g, or t
  misc_feature (94)..(94): n is a, c, g, or t
  misc_feature (106)..(106): n is a, c, g, or t
  misc_feature (127)..(127): n is a, c, g, or t
  misc_feature (132)..(132): n is a, c, g, or t
  misc_feature (136)..(136): n is a, c, g, or t
  misc_feature (157)..(157): n is a, c, g, or t
  misc_feature (173)..(173): n is a, c, g, or t
  misc_feature (183)..(184): n is a, c, g, or t
  misc_feature (204)..(204): n is a, c, g, or t
  misc_feature (221)..(221): n is a, c, g, or t
  misc_feature (228)..(228): n is a, c, g, or t
  misc_feature (274)..(274): n is a, c, g, or t
ttcatgaatcanggggnaatttgtcttgggtgtcctaaccccatntggnaaaanaaangggcncctaagttctggcccntccttcctttggggntccctgtacctnaggaaaccaggccctgggtgnctttncagntctgctcacccccggtgagcnaacagtgtcagccatncaagcagganngaatggtgactgggtgcccntggtgagctgtgtattncctaggnggtagaaaactgtgggaaactgtggctaataaaaactaagtgtgancgtc

SEQ ID NO: 524365 - DNA, 171 bp, Homo sapiens
  misc_feature (2)..(2): n is a, c, g, or t
  misc_feature (26)..(26): n is a, c, g, or t
cncagttgtgtgctgggtgcctagtntctactgtagatatgaactcagtaatatttgtttaatgaatggctgaggcaggagaatagcttgaacccgggaggtggaggttgcagtgagtcgagatcgtgccactggactccagcctgggtgacagagcgagactccatttca

SEQ ID NO: 524366 - DNA, 495 bp, Homo sapiens
tgtgtctgtgtgtgtgtgtgtgagctggaggtgtcaaggggggaggctcctctgcccttagaaaggggagggaagagtaggaaggaccgtcttgtggtttaagtgccagcttctctgcagtacaacagaacaccaagtagacttctgaggtttttgcctctagtccctggctcctagacagcacttctgcacctttccagggcctgggggaacttgctgccctgaaatgaaggacacaaacctggctgctttgccacctgctgattgcagaagcccagggctttcagtgaatgtatgtggtagccaggaagtggttatatcaggccttgggcaagatctggtggtggtcacaggggtgcttgtgccactctacccacagttccaggtggctcagaaaagagagcaagggaagagaacaagaatctctgcctgaaaattcagagaagtcttctggatattgtccaaaaccatcaagatggtacctctatgagtctg

SEQ ID NO: 524367 - DNA, 138 bp, Homo sapiens
aaactgggagactttgggtcggcttcacatgttgcggataatgacataacaccttatcttgtcagtagattttatcgtgctcctgaaatcattataggtaaaagctatgactatggtatagatatgtggtccatcggt

SEQ ID NO: 524368 - DNA, 126 bp, Homo sapiens
gtctgcaccaagcattacatgtgtaataattgtgctcgatttgtgatgattgatcactagtggataggagcaaggatcatatcaggctggatatacagggtgttgagaataactcagtctctataa

SEQ ID NO: 524369 - DNA, 124 bp, Homo sapiens
  misc_feature (80)..(80): n is a, c, g, or t
cagtctgcgaggacgtttagcagtatctgcgtaacccacagagggccaggccctgcccagctgcagtctcccagcctccnacttcagagtgaaattcaaggcagcacggacatgtgcccatcag

SEQ ID NO: 524370 - DNA, 183 bp, Homo sapiens
atccacttgcctcgggctcccaaagtgctgggattacagacgtgagccaccgcgctcagcccagtagctggctctttattcacactctgtgaagccaaacataagacctccgaccagccctccttcctcaggcttatcacacgccctgattccaaacaaactgcgacccgagctgtgtgagga

SEQ ID NO: 524371 - DNA, 606 bp, Homo sapiens
tctcgttgcccaggtgcgagcttcccagaaggagcagctgctggcatactaagcgctcactcccccacagagcttcccttccacggggccatcatctccgagccatcagagagctggaacgtctctccggtctgggcacacacctcgtgattgcagctctccacagcaccggggcgagcaagaggcttgagcgtggtcacactcagtataaggaggtacacctcccgagagatgacgcccgctcttcgcgcccggctccccaggacaaaggaaaactcgctgacctgggcaagcgccgcagagacgatccacttgatgtactggctgctcctcggcagaatgagagacaggaccagcgccgccaggagaaacttcatcaccaccactgacaaggtgaggaacaccagcaccgtgagctcgtacgcccacaaacgtggggaaccacgtggagccctgttgggaacaaggacagacacgttacgaccgcaggacagcctcccccagcgcacactatttctcacaacttcagtgtgtcacttgcttcaatacagggattaaaatcctaaatcctcccaagtgcacgtgttgaagccacaggaaatgctt

SEQ ID NO: 524372 - DNA, 164 bp, Homo sapiens
ttgttcatgatgggctacattatgtgatctagtttaacgtgtaatgatacaatgttattctacctctatatgtgcttctatctagattttcaactcatctctctgtctttggggtatttcttattctcccttgtccatgagttgaagtatgcacatatatatag

SEQ ID NO: 524373 - DNA, 750 bp, Homo sapiens
gagaagatggcgggctccacaggagtgaaagttcctcgtaattggcgcttgtgggaagaacgttgaagagggacaaccaaagcggagtacggcgaccgggacagttagcttggggccttgaaggatgatgaagatatgacacttacaaggtggacaaggcagtgaattacttggtgccaccaaggacaaattatgaacagcagaatatatagcctgaaatgtcgaatgtgtgactcgtaaatacccagaagctcctcggtcagttaagagtttgtatcaaagattaatatgagacggaatgagtaattccagtgggatggtggattgcccggagcatacccagggttagcagtagatggcaaccaaattcattatacgcattaaatgttgtatcttcaagaggtctaatgacgtctactgatgtccaaagacttataggtgaagcttccacagccatcggaaggacacatgatacatacaattaatgttaacgtggatctcagaacgttgtcttaccatcaatgaacctgtctactcagtgttattgtcttggattaaatatcagaacatgcaacattacgcatcatgttcaagagtcccagctggtaaacatgacctggactttgttagaatgttttcatagtatgtacaccattatgtggcaggtaacgggaggaaattgcggcagttgttactccggaaggcccgggttaaacttaacctggggcccgaaatagaattcggttccag

SEQ ID NO: 524374 - DNA, 418 bp, Homo sapiens
  misc_feature (214)..(214): n is a, c, g, or t
  misc_feature (310)..(310): n is a, c, g, or t
cttctgtccacagccacccccacattttcttttgtattggtctgccaacttcagaagaacttccagataagaattctgagtgaaggtccagaatacaatgagtactggggcaaacaggaccggcaagagactagccggatgcacacagcacgacactactagaggacccacgctagatacacagacaagagcgtcgaaaccgcgactacagcanaagagagcaagctagaaagagaaaaaaaacaaagaacacaggacacgccagacatgacataaggacaaagaccagacgagacatagtagcacagancaagaagcacaagcacgaacagaatgccacacaacggacagaaaggagaagcgacctacacccgatacgaaacggacagactcatcaaaaacaacaaaaaacaacaca

SEQ ID NO: 524375 - DNA, 184 bp, Homo sapiens
cgtaccagcggtccagagaccccagagatgtgcgatgttaagcatctacctgctctgggacacagtcaattaaatgtgactcgcaccagcctgcatggacagattgtgtgaacagattatcttctcagaagcagctgcagctgtgtgcttccgttatcagccctccgaggtggatctgaattgc

SEQ ID NO: 524376 - DNA, 341 bp, Homo sapiens
catacagaggccctcatctttactaaaaatacaaaaagtagccaggtgtggtggttcacgcctgtaatcccagctactcgaaggctgaggcacgagaattgcttgaacccaggaagtggaggttgcagtgagccaagatcgcacggctgcagtccagcctgcgcaacagaacaagatgccatctcaaaaaaaaaaaaaaggaaaggaaaagaaaaccaaccggcctgggcaaaatggcaaaaccttgtttttactaaaaacacacacaaaaaaaaaatttacctggccatggggccagccccttgtagccccaccctcttgtgattttttgggagcccctt

SEQ ID NO: 524377 - DNA, 315 bp, Homo sapiens
ttccacaggctcagagattgctcattgtggttgtgcacagcatcccacccggcacagaagtgttgatggctcaggtgggagcccgccgtcgcaggccgtagtgtaaagagcgtggtcatcccagtcccgcacacaccagttgcacaagctggaggatcttcctcttagagacaacagcatagtgcaggttgaggcggccatactcccactgcacagggcaatagacgtccagtgcattgcaaagccagaagtaggaagagcgtcgggcctggaattccttggtgcagagtgagtgagtgatgcctgtggttaaga

SEQ ID NO: 524378 - DNA, 715 bp, Homo sapiens
gggatcgttaaaaaaaaataaaaaaattttaaaaaaaaaaaaaaaaaaaaaaaaaaaaaaaaaaaaaaaaaaaaaaaaaaaaaaaaaaaaaaaaaaaaaaaaaaaaaaaaaaaaaaaaaaaaaaaaaaaaaaaaaaaaaaaaaaaaaaaaaaaaaacctttgggcccccctggcccaattctttttaaaactgggacagttttttcttggggcccaaaattgggcccatttggccaattcccccttttggggggcgattaaaaaataaatggcccggtttttaaaaccctcaaattggaaaaaccctggggttccccaaattaaaacccttgggaaaaatcccctttttccccactggggtaaaagccaaaaggcccccccccattgccttttcaaaaaatgccgccacctaaatgggaaatggaaaatttaaccgttaaatttttgtaaaaattcgcctaaaaattttgtaaaaaccgtcctttttttaaccaaagggcccaatatcggaaaacccctttaaattcaaaaaaaactcccccaaaagggttaaggtgttttccaccttggaaaaaaggtccctttttaaaaaacggggttctcaacccaaaagggcaaaaacaccctttttagggagaaggcccctttatggacactcttcccctagttttttggggctaggggcccctaagacctatgtggccttggggccccc

SEQ ID NO: 524379 - DNA, 249 bp, Homo sapiens
gcctgatctgggagcgaacggtcggacctcggctgtgtgtgacacgccgatgatccggactagttcctgaaaagtctcttccagtggttcagtgtgcatgcttatttctattgggttcatctggttagtcagttcttctggtctgagacattttctcatcttagcgagatctctctgctttttcttatatgggctaattagtcttctttgaatatccagtctgtagcgtatggactctcggcgtgtgca

SEQ ID NO: 524380 - DNA, 438 bp, Homo sapiens
gcaatctgttagggtttgtgtctgtcgtgtggaagctttgttcattcgtcttttgcaataaatcttgctacttctcagtctttgggtccacactgcttttatgagctgtagcagtcaccacgaaggtctgcagctgcacgcctgaggctagcgagaccacgaacccaccgggaggagcgaacgactccagacgcgctgacttaagagctgtaacagcttaccgctaaggtctacagcttcactcctgagccagagagaccaggaacccacctagaaggaacaaactccggacatgccgcctttaagagctgtaacactcaccgccagggtccgcagctgcattcttgaagtcagtgagaccaagaacccacccattccagacacactgtcatcagtgggatatctttttcagagataacattgcagtcttgggttgct

SEQ ID NO: 524381 - DNA, 620 bp, Homo sapiens
aacaagtgtcttggatggtccggatggagggagcacagatacaggcaaacatatcaaggagaatgactattatactccaactggggagttccgtgtggaccgtgaaggttctccagtgcatgctcaactgcctcatgtactaagatgtgttgaactatcgcttggacaggtttacacagaagccaagcgtcctccaggctttgaggcgtgtccgagaatgctgagatgggaataaagactttgagcttgatgtcctggaggaagcatataccacagaacatgggctggtcaggatatacaaggtaaaggacctggataatcgaggcttgtcagggacataaatgtcacgtggcagctctgatatgcttcgtactgagcacatcacatttaggacgttgaagattttttggggtggttaataatgcagttggtaggaacaaaacgggatggtcatcagaaatggtctgggaagttgtgtctggggcagtatgggctgggccaaatgagatgagttcgataaattctaaacgggttaccaggtgaaagtgtcagggctggacttgggcgcaactcgacgggggcactggtggtgcagaccacaaatcggacaaaacacacga

SEQ ID NO: 524382 - DNA, 168 bp, Homo sapiens
tgactggctagtattgtcacatgtgtcctcgagctctactgcgatggtgtgcaggtgagattcgggctgagactctgcccttggagttgcgctctgtctcttgaggctgccgctttcaccacaccggctgtcggctagtcgggggggtacgagctcgaatcgtatcat

SEQ ID NO: 524383 - DNA, 824 bp, Homo sapiens
gaggcaatcagacgggtaatggttgtctgtgagtgttgtgctcagctgtctgcaagtatggcgtctaatactgatagcaagatgatcattgaaatccgataacttataagcttgtgactatggatccttattacctgagttaatacatggaattatcaagtgatactcgcactggctggaaggatgctccatattgatgcattcactaaaatatctcgcctgcagagactgagctactggtcatacggctgtcacaatcgtgtattacctatcaaccaatagtacttttaaaagacgacgtactagtagaaatcttagtcgcacttatgctaattatcattctttccttagactagtcaaaaagactctaagcagtcattgaaatgagcctagctatcttatctatagtactcgtcacactgacttttttccactattcgatttcccataactgacaaattagagtttttaaatcacttaaatcatcttccaaaactctatccctaacttttataaagtaagcaataattatcttcagcacttacatctttaggagtcgactggactcgtcgtaatgagagtatttcacctagtgcaataacctggattccatgctcttttcagagcttgaagcatccaatgatttttccctccactgctgtgtaatgtaatgtcacttccaaagaagaaaaactgttctgtggtaacaaaatataattgctcttaattcttggggaggttactaatagcagtaggatagaattttatgaggttacctacaatactttaatgtacgttacactgtaagcccttgttgctttacc

SEQ ID NO: 524384 - DNA, 713 bp, Homo sapiens
ggaagagctgcagtgccttgcgaggcggcggcgggcgtgagtgctggtgcctggaggggtggggacggcgaggaggtggagtgcctgtgctgctcctgctccgttccagctcggtttcattgtccctgccaggcgaaggatgacttcctgctggcactacacatgtgtcttgaccccagtgactcaccccaagggctacaccgagtacaaagtaatctgcgcagttcatctcctctttaactgtgagagcaccgaggagtgcatctggttcccctgcccgaggacccctcaccgaggactgagcttgccctcttcgatcccttctccaaggcaagaagtgcgcaagcccccagtaccaaaccatgtggcctgagctggcaacgactggaggtggagtctgcaaaggctgcgaccaggaacccatgggcagccagtgacgtgcgccacgaagtgagggaagcagtgactgctgcacacgtatggtctacaacaccttcactaccttaaccccacgccaaccgtatcgtaagtaaaccacgctcgcgatgctgtgtcaattgacgaaaaggccaggcgggctataccgagatgcttgaatgctaccacgggactcctcgcaacagtgagccgttgaacccattatatgcatcaattggtacgatccaatgttcgacaccggtagtgccgtgtccaggccacgagacacctgtgac

SEQ ID NO: 524385 - DNA, 197 bp, Homo sapiens
gtctagaggatcccatggaagtctggctgtctcttgttttaaacatcttgtttcaaactataaattcccaaagttcgttcagcctgcgtccaggagtgaacaaggacagctggaagttagaagcaagatggagtcaattaagttagatctccttcattgtctcagtcataatttggcaaaggcaatttcaggattac

SEQ ID NO: 524386 - DNA, 285 bp, Homo sapiens
cagctatgaccttcacccatctcaagaactcctacattttcacgatcacaccttaataatcgtattctttatcagctctttaattgttatatatcatttcactcttactaacaacaaaatctgacacacactagtcacaatgttatgcccaagaatagtatatacacacttgaacagatccttacccgactatctattctatattcgttattagccctgatcattagctgtattcctgggggagtatccgtctagaagtctgaccatgcaggtcctgcggagctt

SEQ ID NO: 524387 - DNA, 263 bp, Homo sapiens
ttctagaaagttacattctctgtttttagaaaattttatattttgttttacacttttacttcttagtaagggattttctacatttaatttagatttaatcatattatttcactctatattcttgtgttttatttgaaagagcctaataactgaaaacataccttctttctatagtcacatattataattcaagttatctgtaactaactaatagagaacagaagaaaatgtcagtcttacatatatttttttccaaaaaaaaa

SEQ ID NO: 524388 - DNA, 275 bp, Homo sapiens
gctcccaaggaaaaagtgtagcctttgttgggttttggcctctaaaaatgaaattgtcccctgatcaggaggggggcagtatacccctttttttagttgcccaggcctaaacagggcagggtcaatcaagtcaggggggttagtaacagccaaaacataaaccccctgtaagcctttttctccctccaactgagtcagcaactggttaacaacccggtttggaactcctgtattttcatgacccccccgaggagcaatggattcaaattccccca

SEQ ID NO: 524389 - DNA, 811 bp, Homo sapiens
gacgccggtgcagcgggggggccgggggcctggtggccctgggatggggaaccgcggtgggttccgcggaggtttcggcaggtggcatccgtgggccgtgggtcgcgtgcgtggacgtgggccggggccgaggccggggaagctcgcggaggcaaggccgagggataagggagtggatgcccgtcaaccaatgttgggccggctttggtccaaggacaattgaagatcaagtcccgtggagagagaatcaaatctcttctcccatgcccaattaagggaatcaaggagatcattgattcacttccatggggagcctctctacaagggaatgagagtttcgaaagattatcgccatgttgcagaagcacatgaccctgtgccgggccaagcgacaccaggttcaaggcattatgttggctatcgggggactaacaatgtggccactgtacgggaacagggagttagtaaggttgctccaaagggaagggttggacaaacaggcacaattacggtgggggccaatcactccatggagcaaaaggatcctcccaatcggtccccgttgcgcaagaggccaaactgtggggggaaccaaagatcggggaaaagcaccaaaacttgtcacctctgcaaaggtgttgccaagggcggactggggcacacatagagcatgagaacgcacacaatcccttgcacccagggcgcactgggcaattgtactcggaaccttgtgcgataaaaagatggcaaatgaagcggggaaacagcagaagggaaccaaagcacggggtgatgcaacctgggaatacga

SEQ ID NO: 524390 - DNA, 768 bp, Homo sapiens
agagctttctatcttaaggtcccaacaagtgcttttggtgtcggtgctagagtttcatgtttgctgagcaagtgctctaccgccgagctgcatctccaaacccacacaggaagccttgtaaaaaactgaaatgaaagaaaataccagagcacattcaacaatagaaaccaacattctcactaccaagcctcagcacagctggaaggaattcgaaggagaagtgttgtctcctggcccttcccctgacactcctgcggttgcagacaggttgactatagaaaatcacagcaggttggagcattccatttcctactttgcaaacagggagtggcccaacacctacttctgcatctccgcccagactcgggggtgggggagggtgtaaaggaccttaagagcgagcgtattccttttcccttatgcaaaaagactgttgaccactctacgtacaaaatgtcccctgtctgtctgccttttcctcagcaattgctgagccagtcatggaaagcggcaaggcaaaacacccattaccaagatgtagctaccaaaggactgagattgggatcagaaattcaatacctttaccccagcccttgtggacaacttcctcctgtgggacttgaggactctaagaggtcaccagaaagttatatatgagctcctccattgcatggactgtctaacccttctcatcctgccgagcgccctctgtctcagtgagttctgctctttgtttccctcatctttttccctgtctgaatccaacca

SEQ ID NO: 524391 - DNA, 676 bp, Homo sapiens
agcggcagggtcactagtcgtgtctttgaagctgcctccgaccggcaccatgagcggccgaagtcggggtcgaaagtcctcccgcgccaaaaaccggggcaaagggccgcgccaagggcccgagttccgccctgctccggacgacgccccgcgcgacccggacccttcacagtaccagagtctcggggaagacgacccatggcggcacacgcgtgcaggcatggctgcggggtggggtggcctggaagccgctgcgtccgcgcagctcctccggctcggggaggaggccgcctgccggcatccccactggaactgtgggctcgcgctgctggcccgagctgcgtggggaccactgggtcaggccgcggtacaggcccggcccggggtaaggccgaatctctctcggagacgcctgggcgcagacactgtcttcgtgggaacaggcgggaacccgtgggaacggccgaataaatgccccccgcgttggaaagccggcgtggccctgccgggaatgatggccccagaatccctgtagcaccgcgagggaagggggcctcaggttccatacgacttggtgggacgcgcagcaaggaccaggcggccggcaggggcagaattaccttcggcagtcaagcatggcggaaggccccagaacggtaagtacgacggggcgact

SEQ ID NO: 524392 - DNA, 112 bp, Homo sapiens
aggcgacatagaaactcaacgatgatccagaacatggagacctctttactccctagaattctgccagtatgagacaagtcacttatatcattactactaactctcataacac

SEQ ID NO: 524393 - DNA, 227 bp, Homo sapiens
acgaatcgagctcggttaccacagttcgtgtcatgaacgatgtcggtcttgaacattcgtgtcaagtgcccctaactgaaatactatccgtatggtcccacctataagttacccccagtactccttacactattcctcatcacccaactagtaatattaagcacgaactagcacctacctccctcaccgaagcccattaagataacatattattacaaagccctgct

SEQ ID NO: 524394 - DNA, 329 bp, Homo sapiens
cacgaggtagtttgtccttctagtccccttataaattaataaatggagggctggtcatggtggctcacgcctgtaatcccagcactttgggaggccgaggcgggtggatcacaaggtcaggagttcaagaccagcctgaccaatatggtgaaaccccatctctactaaaaatacaaaaattagccaggtgtagtggcacgctcctgtagtcccagctactcgggaggctgaggcaggagaatcgcttgaacccaggaggtggatgttgcagtgagccgagatcccgccactgcactgcagcctaggcgacagagcaagactccgtctca

SEQ ID NO: 524395 - DNA, 322 bp, Homo sapiens
cacgtgcagatatgtcaaggaaggaaggtcggagtcctgagtgcagatgtattgggagggtgaggggcagagtagttccgcccggcgtgcttatccaggcctcgaatgggacctctggttggggtctttcttgctcgctcgtagtacacacagacatgaccatagacacccgcctgaaaggcaagatgtttcaggaaaggaagctgcgtagactgtcaggtgcggtactgggttcacagttgtagagaaactgcagtgggatttcatccacgccaagggcgagggtctaactgttatgcgtgctggcaaatgcagcaaggac

SEQ ID NO: 524396 - DNA, 604 bp, Homo sapiens
  misc_feature (75)..(75): n is a, c, g, or t
tctggggaaaacttgaaatccagcaaaaatatccgtgggccggcaagatctccccttttgtggtggtcacagccnccaggccccaggagaaagaagaaactaaggtgcctggcctacgcttctacccagggaaaattgatgtgcactggactcgggccggcgaggtgcaggagcctgagttacggggagatgttcttcacaatggaaatggcacttaccagtcctgggtggtggtggcagtgcccccgcaggacacagccccctactcttgccacgtgcagcacagcagcctggcccagcccctcgtggtgccctgggaggccagctaggaagcaagggttggaggcaatgtgggatctcagacccagtagctgcccttcctgcctgatgtgggagttgaaccacagaaatcacagtcaatggatccacaaggcctgaggaccagtgtggggggacagacaggaggtggatttggagaccaaagactgggatgcctgttttgagtagacttggacccaaaaaatcatctccccttgagccccccccccccccattgtttaatttgtagaagctaataaataatcatccctccttgcctagcata

SEQ ID NO: 524397 - DNA, 643 bp, Homo sapiens
tggacctgacggagactgggcctgttcccaatccatgaggtatatctacacccgcgagtcccgggccggtcgcggagagccccgcttcatcactgtgggctacgtggacgacacgcagttcgtgcagttcgacagcgacgccgcgaagtcgagatgtgagccgcggtcgccgtgggtggagcaagaggtgccggagtattggtaccgggagacacagaagtacaaacgccatgcagaaactgaccgagtgagcctgcgaaacctgcgcgggtactacaagcagagcgaggccgtgtctcacaccctccagaggatgtattggtgcgacgtggggcccgacgggcgcctcctccgcgggtataaccagttcggctacgagggcaatgattacttcgccctgaattaggaacttggctcctggaccgccgcggaacaaggcggttcagatcaccgagcgcaagtgggaggcgggccgtgaggcgtagcagcggagagcctacctggaaggcacttgcgagaagtggtccgcagatacgtgagaacggtataagacctgctgaaatgctaagaggatctctaaatcacctgagattcaagctgaagccctctttaactcgtatgaacacccggagaagcaacaaac

SEQ ID NO: 524398 - DNA, 158 bp, Homo sapiens
atcaggcccactctccacaaacagacatgaggagaggggcccaggcccggcccccagcgcttgtgcagcgggaaagctgcgtccagagaaggctgagaggttgctcacaggccggctgaggagagaccctcggagcattcaacgcagccaggcggccg

SEQ ID NO: 524399 - DNA, 402 bp, Homo sapiens
cacaacaatttttttttttttttttaaaaaaaaaaatttttcccccccccacaaaatttgtgttgggtgagccccccccctgtgggtgcggggggcccccaaaatttttgggggaaaaaaattttttgataatataaaaaggcggccccctttttttcccccctctcttttttggggggggtgggagggaaagccctcttttttttttttaataaaaaaaaaaacaccccccctttttctttaatttttaaaccaccccctttttttccccccccccccaaaaagggtttttttttagggggccatttttaaaccgcgggcccccaccgggggttttggggaccttttttaattttccccctttggatcagggcccttttggaagaaagagcccttttagca

SEQ ID NO: 524400 - DNA, 700 bp, Homo sapiens
gacacacacacagacgtgctcacggagagcctgtgcctgcctctacttgtctgctctgcgcagatggttcctggcttttgggtcacctcatcctgcagcccagtccagttagaacctttcttccacagagactggcaagctgtgagggtaagagttaaggtaaggctgcctggtcttgcagagcatgaaggacactgcccggagagggaagagggcaatatatagtgtaagggcctacttgtcgttgggctccccactgcctctccttggcagagctatcactgggcaccctgcggttgcaaactctgcgcgatggatttcaagcctacaaaagaaaacactgacgagggtgtccaagaaagacgacagaacgaaacacgtcgttgatggtcctggattccacgtgttggatcattggtggggatgagaagcaggaattaccaggtgtgatcaacacctgacacggtacctgcacggatttaaacgaatggcgttcccacgacggcaggtgatcccgagggctcagccaagaacgaaaatttcccagagacatactacgaggacaacagtttaccaagggcctaaaacgccatgaacgcattagacaggcacgaacagaagactcacacagtgagtagggatgtaatcactcacggggtcccaaggcagaaaacgccacaacaacgtgggtatggcacac

SEQ ID NO: 524401 - DNA, 751 bp, Homo sapiens
  misc_feature (345)..(345): n is a, c, g, or t
cgccgggggttggataaatggcctgtaacacggggtctcgtgactgattgaaagtacccatgagctatttcaggcccgtatgcgctatgcagaaggccgtgttaaaagtatgcctcgtaggcctagtccaagataggggacggctctgggatatgtcagtaagttaatactgagtataaagcgtttgaatcatagccccactacctttagtagtactgcggcaagtactattgtcacagcgtctggcggcatcgtcatggtctttaggcaagtcataagtggagtacgtctaagaggtaccatgcactataaaaagctaatgtgtgatcgtactcatattcatgncgatgacgcacgagcttactagtgcctgctcagtgagagtgagtattaggaggattagtcaacttagacatctgtgagtgtactgcactgccatgagtataggtttgcagcatatcagtgtctaagattgaacgtatgcgcctgcgttaagacttgccgacaggtagactcagccggtgatgatagacatggtggcaataactgtagtgatcaagctttcatgccatatgagtacgctaggagtctgtcaatgttaacataagtacaatagtaggaaccaaagcatacatgcgcacatagctcttcctgataggtgagcacaggatttggctcttgaccgacataattagcaatcggtagtcgttctgaaggtagcagttagaggagtaatgttataaagttctag

SEQ ID NO: 524402 - DNA, 950 bp, Homo sapiens
gtggccccggagcagtttgtgtgtgtgtgctcagtgagtgatgccctgagtgcaacagcggccacacagacgaggggcaaggtgctccaagatgctccttcctcctgagcccaacagcactgggtctctctgtgtgccagggccaccctaggcctctggtgtgtccaactgcccaacaacccccgtggccctccacctggtgctcatgtctgaggagggtcccagggacgtagctggtggcgccagttctatgccttggggtctatggcattgctagtcacaatgtgacaactgagttctgaccccatggtggccagtggaacccatggtacacctgtcctccttcagacttccacgcaagggcaccatcggacataaacaccctggcagccctgactccaggaagcaaacacatggaggaacagctggacactgaggactgcctggacaaggactacattccaccgaaccggtgacgcggacgtggaactccaggcgcccctgacccagccggagtgcacacacttcccgggctgtcctacgaagtacacaaggactctactcccatcacgaagcgggggagaccgtgccctccaggcagactttgggcacccagagcctacaaccggcaaccgggaaatcacacgggcaagaaccaaccaaggcggaacaccaagcaagtgcagcccaagaacccagttgggcgaaccaaagctccaaaagtcgcacagatgccaagccacaactgctcacaacaccgcaccacggggacacaggggggacacaaagcccaacagtggggcaacgcggtcgcgaggtccacggtgtaacaacacggaaagctggagcctacaagagaaaaccacagtagccaccaagaacaaggaaacccatagtgccaggaccgtggagcaaggcgataggggagcaacacaaaagccgggagcaac

SEQ ID NO: 524403 - DNA, 513 bp, Homo sapiens
gagagcagacacgtctacatgggcgaaaccctgtctctacaaaagaaaaataaaaaaaaaataagccataaatgggggcccacttctgtagtcccagctacttgaaaggctgaggcatgaaaatagcttgaccctggaaggcagaggttccagtgagccgagatggtgtcactgcatcccagtcggggtgacacagtgagacttggtctcaaaaaaaagaaaagaacaaacgaggcctggacgcggtggctcacgcttgtaatcccagcacttgggcaggcagaggcaggcggatcacgaggtcaggagatcgagaccatcctggttaacagggtgaaaccctgtctctactaaaattacaaaaaattagccaggcgtgctggcaggcgcctgtagtcccagctactggggaggttgaggcaggaaaagggtgtcaccctgggaggcggaggttgcagtgagccgaaattgcaccagtgcactcaaggcggcgatcccactactgatcagcac

SEQ ID NO: 524404 - DNA, 157 bp, Homo sapiens; identical to SEQ ID NO: 480870

SEQ ID NO: 524405 - DNA, 357 bp, Homo sapiens
tgaggatcctcggacagcacgcgctaacaacctgctccctcttaagccaggagatgatgtttggagcattcccacaacgttccctaacacagttgcagcccccagggggatattgagctatcatctctgcacctgcttcgtgagaagactacacaacatttctaagagtctgagattcgagtatttgtccgtttaccactttcattattcattcacctcaggacatgcagtaattatttcagtctcgaactgggaaacaccctgagctacattctgctgtcacctatgtgtcaagaagcagatgatcgatgaggcaggtcagttgtaagtgagtcacattgttagcgcgtgctgtcc

SEQ ID NO: 524406 - DNA, 187 bp, Homo sapiens
  misc_feature (123)..(123): n is a, c, g, or t
agcgggcggcagtgagtcggactctatggaggtggcagcgggtacgagtggcggtgagcagcgatcctctgagctgagtttgaggccgtccccgatccttcctcccccttccctccccctttngttccgtccccttcccctccttccctatccgatgacgatctgagaggcatggtggggagtacgg

SEQ ID NO: 524407 - DNA, 163 bp, Homo sapiens
tctagaggatcctatggagaccaggctgagcggcaggctgtgcactggaggtctggggtccatgctcaggagtctggtgggctgggacagtgaagcatcgatgacccctccgaagtcacgatcttgcctggagctcctggttcaccgttttattccgtggtcg

SEQ ID NO: 524408 - DNA, 236 bp, Homo sapiens
ttgcatcgggatgtggaggttgcagtgatccatgacctcaccacagtactccagcctaggggacaagaaccaaactccgtcaaaaaaaaaaaaaaaagatttttttggatggttcaataaaattaacttttttttaatttctttggggggttttggcctttttattcccgaatttttttttcattggagcacaaaagtgatttcccattgggggggtgtcatctctgatttttttc

SEQ ID NO: 524409 - DNA, 293 bp, Homo sapiens
aatccctgttatctgccaacacagaatgatcttggcttgggtaagttttcctgcttgtgtaatttttgataaataagacgttaatactgttttaatgaaaaacagttaaatattgaattatttagtaaaataaccatatatttaatcttaatgtttctactcacctaaatatctgaaattcacaggctataaaatggttgacagggaaataactttacatgatgactcacagttttcataaataatgcaggtaaactattaatataaaataattaggtgttggggataacata

SEQ ID NO: 524410 - DNA, 1399 bp, Homo sapiens
aatcccaggtttggcagcactcaccgcaagccgctgaaagagcctttgggccttaagtgaaaactggtggtaccctggcagtactccccatgggcctgcagtggtggtggacacagggagagactcctctgcctggggaaaggggaggaaagagtaggaaggactttgtcttctggttttggcaccagctcagctgcagtagaatagatcacaatatatgtttctaaggtttccgactccagacctggctaccagacagcatctctgaacccacctagggcccaggggaacacgccacccttaacagaaggatacaagcctggctggcctcaccacctgctgattgtagagccctagagcctcgagctaaactaaaaatagagctaccatatgatccagcaatctcactgctagaaatgtacccatatgaaaggaaatcagtatactgaagagatatctgcattcgcatgtttattgcagcactattcacaatagccaaaatttggaagcaacccaagtgtccatcagcagacaaatggataacgaaaatgtggtacatatacacatttttatgggtatttcagccatataaattatgagatcctgtatttgcacaacatgaatggaactgagggtattatgctgaatgaagtaaccaggcacagaacgacagcttcacagggtctcacttattgaggagctttaatacaatgaacttactgggaaggaacgccaatgaggttccacagcatggtaaggtacccttatgcttggaacgtggtgaactcatgtgttcaaacaatttgacgcctagcactacgcttcgtctgcacacacgggcctctcgctctaattctcttggcctcttcatacggctccgggctccttcccatggtcttcactcgcttaacatcttatgcccggaccccctgtatcttcgcgggccatttcataccctgctcgacttctacttctactagtcgtctacacgatcacacctcctctctctctccctctcgtctcctatctcttctcacatcctctatccgtgctccttacgctactctctttgcgctgctctctcccttacacacataccgtcctccgccacatccctccatatcctatctctcttgctcgcctctcctccttgttctaactcttcgtgttgctattgctctacctcgtttctctctgtcttcccgacgctctctcatcatgtcgctcgctgcactctcatgcactcttactcgatcctctcctctcctcttcctctctctctctcttagctctctctcatgtacgtacactctcgttgccttacagctctctgtacgactcttctcttgatgtccgttctcactcgtctaccgctccctgctgtgccgctctccctccg

SEQ ID NO: 524411 - DNA, 341 bp, Homo sapiens
cctctccatttccctgttaacaaaattcctactcgtaaggattccagtgaagtttaggtaatctaaatgaataactactttatataattcaagttaaggtatatttgactaacagacttaaatcctcaatgaattctaaaaggaactaattaaaaactgtcaggaaggggagggggaagaaaccatgagggggtgaggaggtaatgttttcccaaagccccaggactctgtgccacttcagattccttcacagacaggacactaagagtggagggggtcactgccaccttgaaccccacttccaaaaaagagagtcgatgctttatcgtctctggaattta

SEQ ID NO: 524412 - DNA, 477 bp, Homo sapiens
  misc_feature (37)..(37): n is a, c, g, or t
  misc_feature (68)..(68): n is a, c, g, or t
aaattaatcttaagtatgtgttctggaagagttttcncttagtatagtgccccagaatttggatttgncattctttggtcattgttcatacttaagtaggtggcttttgatgaaacgttttcatctgatggtcttttgaaagttaatgtgggacagctaatgtcaacccctcgtacatttaggaaaaccggttagagtggggaagagttccctttttttgtcagtggattgaacagttagatataggacctaccaaaaaacacttcttcaagccagttgtttgtgacattagagtattaagagtcaaaccatggtgatagacacagatttttgtggctgataaacaacatactcttcattcttattagtgctggtcctaacactagcagataaagtggaaattgctgtatgctgtaagacactctgtatatgtaagataaaatgaccatttgaagattaaaactcctgtgagactgg

SEQ ID NO: 524413 - DNA, 1076 bp, Homo sapiens
cacctcctgtgacttctcccaaggcagctctacactcacccgtctccgaagtggcccccgttaattcccccatcctctgcgctcccaccttcccaccctgatgcccgggtagtgggactccacctgcggccgccgaccactgctgcctccgcatgggcaccccggtgccccaaaactgggtgacgctggagggggactttgtgctcatgttggcatctcgcgcagccacctaggcgcctgacctggtggcaagaatccgcatgcagcgcattcgaccgacgtgcctggtgcaccatgtgcatagggatgcagtacgccggaaccatcgcggtgacatgcgactgcatgacgccatattacatttggcccatggaagcgtgggaaaaaccacttcaggccatggggcatgtccggcaacactggcctacagccagaagccgcccgatgcacactcccgccatagaagccggcgtcaacaaccatcgcgaggcagtagcatccacagaatgacacacgcgtgcagcaggtgcgacgcaatgcgccgactacaggccacacgaatgacaccatgagacatcgggaacacagaacccctgggccataccctgagctgcccggatgcggagaagcccctgaacaggaaaaacaagccaaggcaaacccagcacgggagagcagggcggacaacatataccagactggaagacagaagccctagagactaaggcgggtgtggaccatgcgcagcaacagcttgcagagagaagcgagaccaggcccccgcactcaggaacagacgccgaaatccaagggaacccagaacagcagatcgacgcacaggcaaggaggcagcacaatggcacaagagaacaagaggccgcgacgaggaggcagacactgaagaagaccacgcgacagacagagagccggacacgggcacggaacgccgtacgcagccacagccctaccaagcaggatacgtgagggcaacgaaaacagacacccaagcagacgaaacacggcaggaagcgaaagcccgacgagaacgacacaaagcaccagcgacacagacacac

SEQ ID NO: 524414 - DNA, 437 bp, Homo sapiens
agcaaaacactgtaagatgtaaactttgcctctatgccccgtctgtctgtctgtctctctctttcctctctctctctctgtctcctctctcgctgtgtacatgaaagagactggctggctgggtgtggggtcgcacgccctgtaatccccagcacttcgggaggccgaagcgggcagatcacgaggtcaggagtttgagaccagccctggccaacatggtgaaaccttgtctcttctaaaaacacaagaattagctgggcatggtgacgcgctcctgtaatcccagctacttgggagactgaggcaggagaattgcttgaacccaggaggtggagtttgcagtgagacaggattgtggcactggattccagcctgggcgacagagcaagactctgtctcaaaaaaggctgactaaatattgattatcaattctgtaa

SEQ ID NO: 524415 - DNA, 352 bp, Homo sapiens
agggcaggtgccggcagctaggtgatggcaagagatgttcacttgaagaacttgccctgattgaagggtttgcccacatgctggaagggccccttccaagaaaagtacttttgaaccaccgtctggggcttctcgctggcaggaaccaattttcgccctgggtatgaatcgtagtccacctgcccatttggactcaacggaaagggaagcttctggcctttgaagaacccaactcccaaaatggggctgcttttggtgggttcaaaaaggatgacactggggaagggattttttctcaacttggccaagcgctggaacatttcaatgatgaaaatgccgctcatgaaaggct

SEQ ID NO: 524416 - DNA, 655 bp, Homo sapiens
tttaagtgctttccttgagtgacagcttcactcaatttcttgcgttttcttcattcatgtctcttcgtccaggatgtgctctttgtcctccaggccattaggtatcccaggttgtgggattctagtcggctggatctctgctctgctggtgccgaagggcaacacagcagtatccgtgctcatagctgctggtcgcccatgctcttcactggcattgctgtgctaggaattgtcatgctgagcacggatccactccgttataccgccagcacaggtgccagctttcagaaggcccagctaagaatttcggctgctggatgtcttgctccaaaccctgcaggtcgcgaacacgcagctgccaatcgcagccagctggggctgctgaatatgccgtatccgggccccgtgacgcatgactaggatgccctggccctgctacttcgagggagctgatcttagctccaagtccctgaaggtctcctgggacttggagacatcatcacttaagctgatggctcctccgtagtgctcccatatcctatcgcatgactgctgaacctgaccaggcgtgtggggagatcacctgtgacgtagtccctcatacaggccacactgctgccacctctaaataccccagcgagcttccactcgttgc

SEQ ID NO: 524417 - DNA, 850 bp, Homo sapiens
  misc_feature (850)..(850): n is a, c, g, or t
tctagacacattgttaaaactgcatatttaggatctgatctcattcttcgtccttttatcttaagtcatgtctcttgcgtgagagccgatggtctctcgacgagcttggtggcacacatactgtgttagaatctccgtttgtagactttcagtggaacgagtggtcctaggagtcgacagtaatttcgcgacgaaatctgcaccgtccgattgtttacaatgccaaaacctctagagtacgctcccccattttgcaaagattgaaagatttagctcgtcctaaatgctgatttcatacctatctttccatgaagttgataaagagcaacggtggtcaggtaatttacagaattttcccatgttcctacgaatgaacttgtccttctatgctaggtacgcaccccttttatcccatttagtatccaataccatacgaatatagtaacacgaatccaggtatatagatgccggtatcggacatattaacgaggttaagaccgggaacccgagttgggtgcgaccgaaacgagaatcgcacgaagggtttgaaagaccttccataatagtatacgattttctggttcctactgcggaattatttttcgcatcttcaattatctgggggaatggtgtggcttttaacacacactaaagcaattgaatatggcaatcagatgtcaggcaaagtctactggagagaatgtcattttggcctggattatttggagttgctcttaggcttctgtgatagttactggtgatgatagggttataaaattaactggtagattattattaaactggttggatgttgaagagccaaaagataggataagctggcgtatataan

SEQ ID NO: 524418 - DNA, 402 bp, Homo sapiens
  misc_feature (87)..(87): n is a, c, g, or t
  misc_feature (155)..(155): n is a, c, g, or t
  misc_feature (157)..(157): n is a, c, g, or t
  misc_feature (164)..(166): n is a, c, g, or t
  misc_feature (260)..(260): n is a, c, g, or t
  misc_feature (322)..(322): n is a, c, g, or t
  misc_feature (376)..(376): n is a, c, g, or t
gcacgagtatccggtcaggttgtcttctgggctgtgtggacctaattgactgcttgtcccagaagcaatttaaggagcagtttccanacatcatcaagaatctgattctccatttgttttcatctgcaaaaatcctcaggaaatggttgtgaagntncctattnnnggaaatccaaaaatctggaaattggattccaagatccatcaaggagcaaagaaggggttaatgaagcagaataaagctgtctgacccaggaganaaggaactatacagcatagtgggagtttttgtggtacttaaaatttgctatcctacttggtnccttttgggaattgaaagttagttaggaaaccttaaaggctttgggcggttcanggctttgaaatattctccagaaactt

SEQ ID NO: 524419 - DNA, 138 bp, Homo sapiens
atgtactatttgaggatccatttcaggcaggtacgagggacggatatgaggaagacgaggaggattggctgtgcagcccgtgaggggcacccctctgtcctaccccagccctggcgtgagatcgtccctggctgagat

SEQ ID NO: 524420 - DNA, 1603 bp, Homo sapiens
  misc_feature (842)..(842): n is a, c, g, or t
tcttgtgttgtcttctctgactgcctggttgtttggtctcatcgttgattgttctgttcgtgcctgctttggttggttttttgttggcggacgacgcgctttgtctgcgacctattttgtggtgtgattccttccctcgccggtggttgatcgttctcttgttgtgcggtaattctctcctgcttgttgtccgttgatcgactcggtgtcttgtgctgacgagggtgggagcacatactatctctgctggtggtgaccaagttccttccgttttgttggggacatcaagcttttgtgtgaactaccggtcctgtcccggtagggtgtggcctcttgtgaccccccgcccctcccagatggggtgtgccccggttcctgttgtgttacattttgcccgcggcgctgtttcagccctcgggggggtatcctcttctccttccggccgggaggactttttttctcgggccacttctaccgcccctgctctgccggggggtgactatttaatcccctgtgtctgccgtttggttgtccgccacccgcttctttagagacgttggaacccgggttgtgttcgtgtcccgcccaagttagggtaaacattccgtgggcgtaccccccccgtggtggggaccatcagcgtgtgtgtgcgaaaacgacaggttctgtgttggtgatgggttgtccttggccccgtgttgggcgcaacgccgtgtcgagagtcttagatcccaagggtgggcccccctctcccagggatggccccgcgacccggcgcccccctccgcggtaccccctctgggaggcgccccggacgggcgtagccctctccagattctcgncgctcccgtgtgtgtaccacgaggaattgtgtcccgaaggggaaaaaggttggaaacccacacgccctttcgggcccctctctgggaaagccccttgcgccctctctgcggatttccacgcatcggaactctcccccctcgtgtgtggttgaattttctgagccgcagagattctttccctcgtaaaaaaagggccgcactctttaagctcttcgcggcttttctctgaaggggtatacccctcgtggggaccacaccccccttgggaaggcccaccactctgttctcgggggtttgttcgttccactcgccgtggtccccgcgagaggggccacagaattttcggctcccgcgccccaaggggttcttcgccctggcgcattcgggccttgggcccggcctctggggtctccgcccctggccccggaaggccctatgagaagcctggtgctgcgcccccgccccgcccgggcccccgggataggaagccacagtgcggccccccacccatgtgccctgaggccccggaacccgttctcgccacacccggcctgtcccccaggtccaggcccgttttagaagagccttttacacttgggccgcccccccgtcttcttggcgcgccgacacacacctggaaagccatagtacatactttatgtgctgtgttttttatttttggaaacctttgattttttccacgtaagtcccaccaaattacttttataagagccgtgaccttgtaataaagggtttaatga

SEQ ID NO: 524421 - DNA, 260 bp, Homo sapiens
  misc_feature (195)..(195): n is a, c, g, or t
gcatttgatgatgaggcaccctattactgcagacttcttcagaaatgaaataattccaggtaggtacaggttatgatcggaggatttttaaaatctagactagtttgtgtgtttttaagataattctgtataaggtcctcttaaatacatggaatcctctgttttaacttggcattaaaacatcacttaatagtntgtctaaagtatagcaatgactctacaaaatttgcaaagaaattaaggaaacacagagcaaaact

SEQ ID NO: 524422 - DNA, 912 bp, Homo sapiens
  misc_feature (43)..(43): n is a, c, g, or t
  misc_feature (72)..(75): n is a, c, g, or t
  misc_feature (77)..(77): n is a, c, g, or t
  misc_feature (81)..(81): n is a, c, g, or t
  misc_feature (112)..(112): n is a, c, g, or t
  misc_feature (118)..(119): n is a, c, g, or t
  misc_feature (122)..(122): n is a, c, g, or t
  misc_feature (132)..(132): n is a, c, g, or t
  misc_feature (148)..(149): n is a, c, g, or t
  misc_feature (156)..(156): n is a, c, g, or t
  misc_feature (201)..(201): n is a, c, g, or t
  misc_feature (239)..(239): n is a, c, g, or t
  misc_feature (277)..(277): n is a, c, g, or t
  misc_feature (294)..(294): n is a, c, g, or t
  misc_feature (298)..(298): n is a, c, g, or t
  misc_feature (304)..(304): n is a, c, g, or t
  misc_feature (311)..(311): n is a, c, g, or t
  misc_feature (327)..(327): n is a, c, g, or t
  misc_feature (333)..(333): n is a, c, g, or t
  misc_feature (538)..(538): n is a, c, g, or t
  misc_feature (659)..(659): n is a, c, g, or t
  misc_feature (736)..(736): n is a, c, g, or t
  misc_feature (738)..(738): n is a, c, g, or t
  misc_feature (740)..(740): n is a, c, g, or t
  misc_feature (743)..(744): n is a, c, g, or t
  misc_feature (779)..(780): n is a, c, g, or t
  misc_feature (789)..(789): n is a, c, g, or t
  misc_feature (792)..(792): n is a, c, g, or t
  misc_feature (794)..(794): n is a, c, g, or t
  misc_feature (832)..(832): n is a, c, g, or t
  misc_feature (838)..(838): n is a, c, g, or t
  misc_feature (849)..(849): n is a, c, g, or t
  misc_feature (886)..(886): n is a, c, g, or t
gtctcaaaatttaaagatcaatttcccgcagaaggtgtgcaangcatcataaaatggccctattttgaggannnnanaagnagggttgggcaggatggaatattaaattgtnccatgnnaancatgccagantgttatccaatctagnnaatttanatacattttgttggcataggaaaacgaaagcaatcatttgtgacnagcctataaagcttggcatatttacacatacttagganctttttttgtgcggtgggaattctctaattgtatcatntgggccttttgaaagtnacanacaganggccagnctgtggcaagtctgcngctgancatcacattccaccctaagaaaacacaaggtggattgcatcgaggggggataccttaccttagcacagaaggaaaaagtatgtcagtgcaaagtatggactaaactgctttcaggaaaaaagttgtaaaaattgatacaggttggaaaagggaattttccttcccggcttggagtcctcccaatttaaggcagaacccatccacnccaatttctgcagtttaaaacttctctctacttatttagttttctcctctgagttcaaccgctgctggattcgtttggcataactttgtgccatggagttaatgatagataggatgaagtnacacaccatgacaacgaccaacttttcaaacatccaggacaaccagttttctccctgtagaaataaatgcagaacantncnatnnaaaaggcttcattagttcagtagtaaaaagaggannatctataangcntnaagtgtgtacttacaaaacctaaagaattaaaaatganaagtangcaacccaacnactctgaaatctccattactctcctttttacacccanctatcaagatttcactttgttggatg

SEQ ID NO: 524423 - DNA, 394 bp, Homo sapiens
  misc_feature (28)..(28): n is a, c, g, or t
  misc_feature (30)..(30): n is a, c, g, or t
  misc_feature (65)..(65): n is a, c, g, or t
  misc_feature (68)..(68): n is a, c, g, or t
  misc_feature (81)..(81): n is a, c, g, or t
  misc_feature (88)..(88): n is a, c, g, or t
  misc_feature (95)..(95): n is a, c, g, or t
  misc_feature (162)..(162): n is a, c, g, or t
gcttgttggcagccaccagcacagctgnangccaggacatcaagcagattggctggctaactgancanctgcccagtgggnacaaccncatgggnccctgctaactgaaaaggaactgctcctctacttgtctctccccgagacccgcgagccctgagccgnccagcccgtactgccccactcatcgccaccagactggtgcactcaggcccctccaagggctcagtgcctacgatgcagagtctcttttgccctgcgcacgggcacgcgtcacggtgtggacactcacctgttcagcgtggagtcaccgcagaggctggctgcctgggacccgccagcttgttgaatgctgtcaacggggccgcgaaggttttgaagaagtttttaaaagcct

SEQ ID NO: 524424 - DNA, 1047 bp, Homo sapiens
  misc_feature (654)..(654): n is a, c, g, or t
cattcaggtcatgtgtgatgagccctcatgagatgagtggacgactcatgtgagaggtgccatgatggaagctgtgagctacacggttgagttctgcccaataaggacagcactgaatgtgaaggttcacaggctggggtagcatacctagacgttgcctgtaacgtcgttacagggtgggtgcgtaggctaaactgcgggtatgggtcgggtcgcccttgcctggtgagagcgttcgatagctcctcgaatatagtgtgtcggactccgtccccgagcatagcatcaagttactctaatggtacattgtggaatcgtccgatgacaatacagcatacgcggtgctcccacgtagaggtactctcacatcagagcacaaaagagtgtacggcgtactctagcattactttgctacgaagggtggccaagtattaggggcgtacgccagtcattaagttgatgggcacgtgggctgccgtttatatgagtgcgctatgatagggcaaggacagtgtaccgttgggtatcatagcgaaagggaacctgtgaaatactggtgcgtagtgagcgtaatctgggcgaaaggaacctatagattatgtgggaagtgactaatggctaggtacaaagcatactacagcagactaaagaggntctaaggttcactgacttaatgcattgccagctgcaatagctgtggccacacctgacactgctgtattgactgggaccgatattgaaacacctctgcgactcacggcggaatatgcatctaatgacaacactatcatagcaccgggacgctaacatcgacaaaaacaacagcacaaccacaaccgcgacagccacacaacacacccacccagacgaccaccacgaggaaaccacacgagagagacacaccacaccaaccaacaaaccagccgacccaaacatccaacaaacacaacacaacacacgaagcacacacaccaccaatgaaaactaaaacaacacgaacaccacgccgacaccacagcacacagaaccaaccccaaacacacacac

SEQ ID NO: 524425 - DNA, 161 bp, Homo sapiens
cggtacctttttttttcggagtagtacgttacaactatgggagattattccgaagcctggtaggataagaatataaacttcagtgctgaccgacaaaatcacgaatagtgtgttgtgtactagaactggggtctccaccctccttacatgataaacggcgt

SEQ ID NO: 524426 - DNA, 208 bp, Homo sapiens
gaatatgagttgtcatataatagtagtatcactgtacgaaattcttaattacgagaattaccaattgagaaatagaatgcagctcattatgcaaagagacggcgacattaacggcgtcttgaatagtctcctcggcgtaattactcttggccgagttgtagtggatcaatgaccaacaatttattgatcaatgaccaacaatttattg

SEQ ID NO: 524427 - DNA, 446 bp, Homo sapiens
accattggcatacttagtgttcacaatccatagtaaacagaagaaagagaacagaactaggaattaaagctgggtttgaaaattagatataacatatactacctggtgtctttggttaagtcagtgacctatctgagcctttttttcctcatctgtacagtgggaatactactacctacttcatatcacaaagattacatttaattaattaatttttttagacagggtctgttctgttacccaggctggagtgcagtggcataatcaaggctcactgcaacctctgcctcctgggttcaagcagttctcatgcctcagcctccctcccgagtgactgggactacaggcgtgtgccaccacatccggctaattttggtattttaagtagagacggggttttgctgtgttagccaggatggtctccatctcctgatctggtgagctgc

SEQ ID NO: 524428 - DNA, 134 bp, Homo sapiens
gatcctctggtcatagatgctcacagctccacataccattattcatcgagtacttttactccgaaaagatcaatgaccagcaatttattgatcaatgaccaacaatttattgatcaatgaccaacaatttattg

SEQ ID NO: 524429 - DNA, 1561 bp, Homo sapiens
cagttacactaagtaagtggagggaatgaaagtgtttcgaggtgcaatgtggcatcatacatttccctcttctgcattatttattcttcatttggttcctcaacagcaacactgggcaagcagcatagacattcatctcatcactttcttttttcttgtgagcagaaccgtttaaaacaattacacagcatcatcatttcaacaacagtcaacccagcatcaaaagtcagcaccatgtgcatttggttcaaacaatcacacaagttcaaaacagttaaacagttacaccacaatgcacagttcacaacagtttccatccagcacaactttcaccatcatcttttagaccaaatcatcatattgcataatgtggtcatgcgccattcatcacatcggcacaacatcaattcttgtgcagccaaccagcaagctcattatatcaactcacgtagcaaagcgtcaaagccgcagcattcacaaaacatgccctcattcagagtgttttcacaaacatgcggcgtctttgcagcaaaaaaaagacacaggcaacaccacagcaagaatttcaatttcaaaacatccaaaccgaaaacaaaacatcgaggtcatcccttggtgtactctgcatcagcaaccaacagcaagatttcaccttcaaaatcattaattagggattccctcggtaaaacttaaggcacgttccttcctccgcactaattgttcaccctcacatctttaaattacagtacaacgtatccaacgaggcttctaaacagtttcacggcttcgcagcgggcaacatggcaaaacaacacaaccaacacactaattcaacgcttggataatttacccttaacaagaagagtatcgccttttacaagttaaagagccagagtacctttaaggatctcaaccaacgaaacatcacaccaaggagcacgtacacagaacagtatgaccacgggattgcccgctggcgagggagcaaacagggacagtcccaacaagcgtgacgaacgacaaaggttagacacactaaagttgaggagaaccacgaagaataaggcaaacacggaaaatagcagcagcaaagccaaaacaacggagtcggcaccaaacatagcaggaaaaaccccatgacaatgggcgacaagcgacaggagcaaaagacaagtacgaccaaacaacatacgagatgaacacgaagagactaatagaagcagacgaagaagctcgcaccgagacagtatcgagacaccaagaggtaatgacagacagctactgcagcaccgtgagcacgacgtccacgcattagcgcacacggaacaacagtctcacactgtggaggagcaaacaaactgacaggagctggaccacgaccacacgaactgccaatacacaccaagagggaatacgacacaacgtggaaagagcagaaaaaacaacgagaaacaacgacgggacagaacaacacaggggcgagcaagacgaaaacaaatgaatagatccgtgaacgcaatgaaagacacacacacagagcgaagatcgggtcacaacgaga

SEQ ID NO: 524430 - DNA, 609 bp, Homo sapiens
tcaaaaaaaagaaaaaagaagagttttgtttttgccaaactttatatcagcttaagattcttgatataaataggatttcttttttgagacgaagtctcgcactgttgcttgggctggagtgcaggggcacgatcttggatcactgcaacctccgcctcccgggttcaagcaattctgcctcagcctcccaagtagctgagattacaggcgcccgccactacgcccagctaattttttgtatttttagtagcgacgggatttcaccatgttgaccaggctggcctcgagctcctgacctcgcgattcgcccacctcggcctcccaaagtactgggattgcaggcgtgagccaccatgcccagctgtaaataggatattttaagcagaccacctctggttgccttgcaccgtgcatcatgcctggaatcgtaccactttgcgatgccacggccggctcatcactttccttcacgcccttcctaccactgtatctcatttgtcactcccttacttcattctcagtaccaccctgtgttccactgccctttctctcttccttcttcctctttactgccataccttacttctaccctatctctctcttcacccg

SEQ ID NO: 524431 - DNA, 166 bp, Homo sapiens
gtgaaggtgtaaaagcagcacaagtccaataagagatatttcctcaaatttgcctcaagatggaaaccctctgtctcagggcatcctcttagctggcactcggttcggatgtgtaatcagtgatattcctgcagagctacagctcactctagcatcatgtggatga

SEQ ID NO: 524432 - DNA, 250 bp, Homo sapiens
cattagtatgtacatagcatcagatcaagagtcaactgttagagatcttccgtgcctgtcgtaataaaaatcggatcccccggtatactctgtctccgtcaaccggcttcatgtacctcagtggccttgccgctatggtgtatttcattcatatgtatatttcttctattgcctgttgctttcactggcaatgcagtccccacaagggcgggcatatcggtctgtgttcttccctggaatatctagggta

SEQ ID NO: 524433 - DNA, 1363 bp, Homo sapiens
  misc_feature (340)..(340): n is a, c, g, or t
  misc_feature (618)..(618): n is a, c, g, or t
ggcttctttgctacacaaccccatcagtgggctggtaactgacccactgaacccactcacatgctcatcttgggtgacgatgcacgacaactctactcaatagtcgcgaagactctcctagatgcttgcctcttgccaggagtattagctgttgacatgggatagcagatcgaacctgtagccattgtgacccatgctcctcacaaggatgcatgggccgaataatagcgcgacaaagcagacattcagagacatgactcgactaattgtgaccaatatgatgggaagacgcctttcccgtaggacctctcatctgcaatggaatgcacagaccggcaantaactagatcgagacaataggtacatgtgtccaaatagtaccgttggttggcggcctagtcggctctgaagacaaattgccacatataccgaaagaatctcttccaatctcgtaggcgtacaacctcgagaccggagcaatccacatctagtccatggttctctgtggcttgtaacagctcaaaatcattcacaatgtagttgtgtgtcacctctgggggacacggtagttctctactatcgtcaaaaatctgagagccggcaggcgcaggagtgacntgtctgagagtcacgtaacctgtgactttgctctgatgtgtgtgcatcctctcgctcgtggcagacgcggactgaactgaatgactgaagcgcctattacattgagacttcccatgtttgtcggaccaatgtgacggtcggttctgttggacaagacgtcttgtgacactttgcgcggagaaattaggctaattgttacacaacggccgattatgtgtcggttggaacagtttggcccgtttgcgggctaggaaatctgaagaccttcctaattccaggaatggcctttgcccctaaaggaggagccttccgcgttctgggataaccataccctttgacttgttcgccatttcgaacacgcaataggccataagtgggacctggtaggccctcggtgtaaggcccgttgctttgggcctaaaaggttccccaaacccgggcataggaatttgtttccccccaaggaacatttgttttggcaccccttaaatttaaaaaaacggcaattgacttccaatttgttaccccggtttatatggagaggggggctaacggtcgccccccgaaggcgccccaagaaagatttttcggccacagattggccattggtgcacaaagagtatccccagagaacacacaaacggaaaacgcctttcacttcagcaacgggggaaaccccttttttgaataaaaggccgttttgtaccaggacgaaccacaattgggggtatttccttctccccag

SEQ ID NO: 524434 - DNA, 170 bp, Homo sapiens
aaaaaatttaaagggggaaaaaaaaagaaacttattaactgccctggaaaggtagaaaaccttaccatgaatgcctgcctgtggaagggattttactgcttaactgacgtccattccttaagctgaaacacaaaaaattgcccgtggcactggttggacttttgggtacc

SEQ ID NO: 524435 - DNA, 959 bp, Homo sapiens
gtatttgtcagaagtaggggtctacgacgggcattgtgatccgtccccaggcagcggattaggaggccagaaggagatcccttccacggtgtctaggctgagatggatcctctcagggccccaacagctggctgcggagctggaggtggagatgatggccgatgatgtacaacagaatgaccagtgcctgccacacggaagtgtgtgcctcctcactacaaggaagcagagctctccaagggacgagtctgtgtgcctggacccgatgtgtctctaagtacctggacatccatgagcggatgggctaacaagttgacagagttgtctatgctaggatgacgagctgatgaagagggtgccaggcatgagactctgggccattgctatgaggtccctgtcagtataccaccctggggtgtaccccaacccttcccactttaatatacgtgctccctgttgggtgtccttcggtgaccgagacgctgtctcccacatggggcggccctcgcgtttaaaccgggttggtcgccagaacaccggtgtcgtggaaatactagaccctgaaaggtctcactgacgggcaaggcaacggactctttgcgaggtggtcgtcatgtggccgctatatgcgcgaattcatcacttcttggcttctggtcttaaaagcggtggactccaataaggacgctggaaacactttgaaagggggtgctgacatggaaagggcccctaagtatgggctggttaggataatgaagctgcgtggtaggggtttgcatgatttcctgtgattgaccgggtttattggcgtgtggcccggaccagtttgaagtgtagataggacgtggtcaattgagagtggattgacgtttaaacggaagtgacttggtagggaaagggtaagaatgcatagaatatggtatagccatttgtgggagagtggagtacacgggtgagcg

SEQ ID NO: 524436 - DNA, 584 bp, Homo sapiens
  misc_feature (235)..(235): n is a, c, g, or t
  misc_feature (240)..(241): n is a, c, g, or t
  misc_feature (255)..(255): n is a, c, g, or t
  misc_feature (259)..(259): n is a, c, g, or t
  misc_feature (263)..(263): n is a, c, g, or t
  misc_feature (269)..(270): n is a, c, g, or t
  misc_feature (279)..(279): n is a, c, g, or t
  misc_feature (296)..(297): n is a, c, g, or t
  misc_feature (309)..(309): n is a, c, g, or t
  misc_feature (311)..(311): n is a, c, g, or t
  misc_feature (316)..(316): n is a, c, g, or t
  misc_feature (324)..(324): n is a, c, g, or t
  misc_feature (326)..(326): n is a, c, g, or t
  misc_feature (339)..(340): n is a, c, g, or t
  misc_feature (571)..(571): n is a, c, g, or t
  misc_feature (580)..(580): n is a, c, g, or t
agcatacgccagcagcgagtgtccgctcactggcctacatgcggcactgagcatatgggccatgcagctagccctgcaacagcagcagcacaaaaaggcctcctggccaaaagtcaaacagggcacaggactaaggacagggcctatgtttggaccaaaggaagccatggcaaacctgagcccagagtgagccgtctgaactgtgggagggaagtgctaacagcccagcctccancctgnncctttcctccttcncctntganacctcnntgcaacccntgagccatcaggacaanncataccccttcncnttctntccacccnanttgtgccagtaanntggggtgttgagggtgggcctaggcaagcattagaatgcacttgatttatttcgtttcctcacactgttaccctgacgtgccgtgagaatgttcgaggagagtgtcacgttgactttcccgcatggtaacattacatggtgatgaacagactccactggggtacaaagttagaatgagcccagagtggaccgaaagaaaagaaataaaaaaaagaaaagaccgtatgcggnccgcaagcnttat

SEQ ID NO: 524437 - DNA, 714 bp, Homo sapiens
cggatttcttttggcccaacattaataagaagcttatagaaccaggcccatccctccttttagtgatcttgagggtcaacaccagtccctccctggggtatccctttattctctgaactctctcacaagcatttgatcagagctcattttgctgtaatgtcatcaaatgcaatgttttattttttcatccaaaataagtacattcatccctttaccatgagacctttaccacacccccattctcatgcctataacacttaagctccgtaaagttggttctcttagccatctacatggttctaaacagcagcaaaaacatctttatgtctaagataaaacaactatttggccaatatttgtgccctctggacattagtaggctttggtaaatgtgagaaaacttttgtagtattattatataatcaattttgtcatgctttcttaaatgtgttataggtgaattcccacacaaagctacaagctatgtaattttgccctacttaaaagattaacatatcagtgttctaagtagtgataatggatcctgttacaggttaacataatgtgtatatatctgtttgaaatatagtttatagtattttcaaatgtgctgctctattttgacatctaatatctgaatgcttctgaagccagcagtttgttttcatagacttcgattcctaaactttaaacaacttttaataaaatattttc

SEQ ID NO: 524438 - DNA, 144 bp, Homo sapiens
agtgctccagctataccgagtatttggacggtcagcacggtgctcacgtgtcgacggaacttgtacatgggacgtgcatgcacctgcagtggtgaatacacgtacgaccatggctccagtcttaaccgatattttggatggtca

SEQ ID NO: 524439 - DNA, 364 bp, Homo sapiens
gcgcgtacggacgctctgcccaccgtcaagccaccggaaagtgtcgttgccgacgctggctacggatctcaccactgatcacagccgcctactcacggataatgctgtctgtcaccaccgctggtgctgatattgccgccgatgctgccagcggaaatgatgatggtgtcagtatcaaaaccggtgaccaggttgcccaggatggcgcctccggacatgtcatagatgttctcggccagcttcatattcactcggccaatggtgccaccgctctggtaggccacatcgccgtcctcagaggcatcgacgaaggtgcctccctccatcctgaaggtgtcgtgcccatcgccctggaacagcgcct

SEQ ID NO: 524440 - DNA, 324 bp, Homo sapiens
tgcctgtaattccagaacctgggaggtggaggttgcagtaagccaagattgtgctactgcactctagcctgggcgacagagcaagactctatataaaaaataaaataaagcatgagtttatgggtgtgtgaccacataggtgtgtatgtgagtgtgtattgtgtgctcttgagcctgtgtttagatgttggcgtggctggtggcatcactgaatggctgtgctacaggggtcttagtacacagtgagcgtgtgtatgaccgctggtatctggccatgtgttggtcgagatgctacagcctcagctgagtgtctgcgtgaatgtg

SEQ ID NO: 524441 - DNA, 919 bp, Homo sapiens
acagtgtgagtggcttttggaacacccgctcgagtatacttgggctgctcttgcacaagggctgcctggggcaatgtccccggggacccacagtccctccagtcggggagggctgccatttcacaggtggtgctccacaaagtacctggtcccccgttgtgtcccacagggtcctcccgccagtctgtggccgaaagtgtttctaataggcagggcccccgtgggcggcccctcattagtctggcgggtgaccgaccatcgtcccccgctcgtttggaatgtggaacaaccttggtgtttacggacgcgcccaatattcggggcgtgtcggggtccgcccctcctcaatggcccgggggacaacacgccccccctgcaggggcctccacgcgcctcgaccatctttctcatcaggcaagctcgccgctagagcatgcttccgccctcataagttcctgggggtcggcgggaagaccagagttgaacctccaagcgcgccttcgcgcaaaggcgtcacattctcgactgcagccgcgaggcccacgaaccgcccctgcgcccaggaagccacagaccccgctcgagcgatcgtcatgtctgggtgccttgcccaacgcaggcctggcgcttctaagtgtcttgtatacccggctcacgcggtcatacgcgcgtggttgttcaccaacgcgtcccgcccgacccagcacggggattcgcccctctcgcccattcctataacggaagggccctcccctccctccggggaggttcaccaattcggcttggcccacgggcgttctttttgcacctcggaaacgaagttggtgttggtatcggactctttttggaaacacccaacataccccctattcaagggcccgccccaataaaaacacattttaagcgggcgaacataaca

SEQ ID NO: 524442 - DNA, 676 bp, Homo sapiens
  misc_feature (557)..(557): n is a, c, g, or t
  misc_feature (565)..(565): n is a, c, g, or t
  misc_feature (591)..(591): n is a, c, g, or t
  misc_feature (607)..(607): n is a, c, g, or t
  misc_feature (627)..(627): n is a, c, g, or t
  misc_feature (648)..(648): n is a, c, g, or t
tggaaagcttggcacgaccctcttgagccttcagtttaaaatgaaacgctggcgccagatgtggccaccacattgctgataagtccagtaccttccgtttgtgcaaagctttgtgatttaaggttaagtagttttgcttacttctctcatttgagccttataaagacagtgtgaagtctgtagtgagtaaaagccctattttaacagaaaaggaaccaagggaccaagttggaacttgaatctggggtctactgatgttccattcactacactgcttggtataactgcatatcaggttatttggattttattttatttttttctttttcagcctttattcagtaactactaccagattaggtaataggcacatagagacatgagacatacattccctaccttgctatgctgttcaacatagtagcacgtggtaatttaaatttaatgaaaagtcaataaaatttaaaattaactttctcagtacaactaggccatattttaaagtgcttcaggaggccattatgtgcctagtgggctgctgtattggggcaggggcngaagttcntacccggggcagcactgtgttctacnggcttaacattcttantgagggtttaaggacagtcntcacttctttttctgtccccntttggctacttccctggcagtttcattc

SEQ ID NO: 524443 - DNA, 185 bp, Homo sapiens
tggagctccaacgcccaacagagtaccttcggagactaggtgtttttcagaagtacctaaggccacaagtgtcccttccaacacaactggtgctaagtagagacctggatacagacacgttatctcacacgagtggccacctgagaacactgcaagatggccaactgacaacctaggaggtggcc

SEQ ID NO: 524444 - DNA, 159 bp, Homo sapiens
  misc_feature (113)..(113): n is a, c, g, or t
  misc_feature (154)..(154): n is a, c, g, or t
ctctgttttccaaacgcccatgtgtgctatactacaactcttctcgagtctgatcaatttgcagtagaccattttagttcttacgacgttaataacaaacacttcaacatcantgctccaatctgaagttcttgttgcattgttaaaagaaatntctaa

SEQ ID NO: 524445 - DNA, 167 bp, Homo sapiens
agagcaaggctgactggactccaacatcttttgtactctttcatgcttatatagaatctgagtgtcatgctgcagagtgtgcagccaatagatttataccctttcccagaaagctggaatcatttaccaaatacagcccagcccggaaattgacagaactagattcc

SEQ ID NO: 524446 - DNA, 153 bp, Homo sapiens
gaatattgccaccattctggaagcaaagtgtgcactgagatatatgattggagagctggtctactccaaaatacaggtcagcaaacttgaaagcagcctgaaacagagcaagaccagctgtctacattcagagatactgtttaaggaacaaat

SEQ ID NO: 524447 - DNA, 843 bp, Homo sapiens
tctggcccacacaggggttcacagccccagcactttcgggaggccaaggctgtggtgttgggaggattcgccgtgagctcaggagtttcaagaccagccgtgggttcattagcaagacccttgtcccttaaattaaaaagatacattcagtggccgggttgcggtggctcacgcccggaattcccagcatttgggaaggctgaggcgggtggatccccctgaggtggggagttcgagaacagccttgaaccagtgtggagaaaccccccattctctacgaaaatatacaaatttacccgggcgtggtggtgcattgcctgtaattcccagctactcaggaggctgaggcaggaaaatcgtttgacccaggaggtggcaggttgcggtgagcccgaatcgcgcattgcactccagcctgggcagcaaggagcaaattcccttctcatacataattacttacttatttacacaccaactgatgttgggccgtgtaaccccttggcgtatagtccccagcttatcaggaggtgaagaaggacgctccagtggatccagaaaccggaaggctgcagtgaagctatacggtacactgtacacctggggcgaagggcagaccctgcctccaaagaataaggcgaatttctgccccgggccccgaacagtgtgcctgtcatgagccctgcctatggggggaccgtcccgaggaacgctgttgataacccgtggcagcccacgtgtctctcacaggggacacacttgtccaatatagcagcacccctttttcagggggggttcacacatctacaaccacgcgcgcgcttagggggagacacggatagcagc

SEQ ID NO: 524448 - DNA, 503 bp, Homo sapiens
caccacgcccagctaattttttgtatttttagtggagacggggtttcaccgtgttagccaggatggtctcgatctcctgacctcgtgatctgcccgcctcggctcccgaagtggtgggattacaggtgtgagccaccatgcctggcctaacatgatttttatactggattttttaagattatgtgttctagctgggtgtggtggctcatacctgtaatcccagcactgggaggccaaggcgggtggatcatctgaggtcaggagttcgtgaccagtctggccgaattgtgagacccgtctctactaaaaatacactacacattacgccacagcatgatggcaggcgctgtaactcccagctactcgggaggctgagcacaggagaatcgcttgaccctggaagcgtggaggtagcagtgcgctgagacttgggcattgcactccagcctgggcaccaagagcatcaatccatgccaacaaccaacagcaacacgaaaaaaatc

SEQ ID NO: 524449 - DNA, 107 bp, Homo sapiens
  misc_feature (107)..(107): n is a, c, g, or t
gggttttcaattctgttttgagtgtctagtgtttgctcagatttcctcctttgtatctcttgaatattgatgtgggggaggcaactcttgggcccccctaagaaggn

SEQ ID NO: 524450 - DNA, 258 bp, Homo sapiens
cccctgcgagctcttgctttttttgttgttgttttttgtttttgttcttttgcttaagatttaaacaaaaaattaacttttaggttcaggggtacgtatgcagttttgtttttgttgtacagatttttgtcacacaggttctaagcctagtacccaatagttatttttcctgatcctcttcctcctctcaccctccgccctccactaggccccagtgtctgttgttcccctctttgtgtccgtgtgttctcatcattt

SEQ ID NO: 524451 - DNA, 333 bp, Homo sapiens
  misc_feature (43)..(43): n is a, c, g, or t
  misc_feature (54)..(54): n is a, c, g, or t
  misc_feature (107)..(107): n is a, c, g, or t
  misc_feature (114)..(114): n is a, c, g, or t
  misc_feature (246)..(246): n is a, c, g, or t
  misc_feature (295)..(295): n is a, c, g, or t
aacttctagagagggtcctacggcgccctgtcctcctcctccnccctctgggcntgggaacaaaggatgacgatgttcctttgatgtggcgtatgaagcagcatgtnagctgtnggaggaaggagttctgaatcctgagacgacagtggtggccatcttcccatctcccatgatgtatgctggaccaactgaggtccagtggcattgcagagacggatggttgcagggagccaacttttacattgntggacgagaccctgctggcaagcctcatccagaaacagggaaggatctntatgagccaagtcatggtgccaaagtgctgacgatagc

SEQ ID NO: 524452 - DNA, 645 bp, Homo sapiens
ggaaacagctatacaggaatagctatacctaggataccgctattacaggagtccgtatgaccgggagaccgctattatctgctgcacacgctataacgcgcatactgctctcaccgagaaaccattctaaccccaagacaaggtccttgactggaagaaattgttgctgcacacgccgatttcccataccaagagggattctctggagcctgaatagctcgtgaagtttgccttgatggggtaacggacttgcttgggccccagcaccctttcccagttgcctcttatctctcttttggaacgggagcgtctgtccagtgcctgcgatactgtagtatttagggaacatgtaacttgttagagttccgtggtttacggctggaggggagctcagcttcagggtgagcgaatcgcactctgagtcccacccagtcctgattcaagtgatgtattgtagagacttgggactacacaccttagcgctgatgctggaataagacttctggggctgttgggaatgggatgactgtatttgccatgcaagaaggatatgaataagggggaggccagggacaggatgtactctactgaatgtctccgtcccccaaaaatctgtgttgaagcctaaccccagtgtgattttcg

SEQ ID NO: 524453 - DNA, 652 bp, Homo sapiens
  misc_feature (2)..(2): n is a, c, g, or t
tntttttttttgatggaacagctttattagtggagtttcttgtaagagttaatctggaacacacaaagggagaactcggatttaaaacatgtaggcaagcattggtcaaggcggcagctgaaatactggactgtgactgggcctgcctgacacatgctcttactagtgcttctgaggaaccttgatgacgaccgctactacctatgtgaatgccttaagtcgattctaacgaagcttcttgccgactacagatgcgttaaccgattcaaatggggagtggtaggtgacaatataggaactgactactcacacggaaccgaaccgaagtgcctgcatgaatgacatggccttgactatatcctaggctaacacatactgagccaggctataactggtgtctgttgtactctcaaccacgatgtagatcttcttgaacgtgaacatgtgctgctcatgacccaaaaactgagctttggaaaactgtatgtgatacctgctctccccttaaggacatgcgacttgataataaaccaagcttccctaaggatagttaaacctgtgtaccgaaatcctgtaacctggggatccggacgcctggatctgtcgtccccgtaggggcttccgctttgaattctgtaacgagggtaattcg

SEQ ID NO: 524454 - DNA, 385 bp, Homo sapiens
cctcatataagtaccccagggcctttaagagaaaaccggaaaaatatacatctagtctctgcaattaaaaaaaaatcataacataaacaatgttagatataaattttgaagtccatatgttgttttctacatatatatgtaatcacggctctttaagccaaggccaggtggtaggcatatgatctgtacaaacttacagtagtgtatattccaaataaagggttttcttcccaactatggtatgacaatataactgttttctgagatgcaggtacccgtttaaaggcttaaggggtgtaacccctttggaaggcaaacagcttagtgggaaaaaattctggttcctttaaaaatggggtggggaaaaagtagggtaccgagctcg

SEQ ID NO: 524455 - DNA, 158 bp, Homo sapiens
ctttcatcatttcaccagaataaaagcaagtccttacaacgggctgcaagtccccacatgcccatcattcactcagtcttcaggtctcccaagacagtgtcctcagtttcccgttctctctgcctctgtttcgtggcagacgtctcctgatgatttga

SEQ ID NO: 524456 - DNA, 110 bp, Homo sapiens
cctgtgggcacggacgcacgccactttttctctgctgatccaggcaaatgtgcaataccaacatgtctgtacctactgatgggtctgtaaccaccttacagattccagct

SEQ ID NO: 524457 - DNA, 423 bp, Homo sapiens
  misc_feature (254)..(254): n is a, c, g, or t
gagccaccacgcccagccgcatgtacttttacacaaaatgcaaacaccattcttggatcataaaagtgataccacagctcccgtgaagttttgccaggtagtactcataattaccttgggtaaactttttgatgttaaactgtatcttcttattacgagtttttccattgtattaactgcttttacaacaacacaaataacaagttattttacaaaccatttagaaatttctgtactatggtcccagtaatgtnaaatatattaatgcctattacattcagataaattatacacttggaaaccacatacttatgacttacagaaacttacataaacaaattatagaaattatatgctcaatttttaggtatatagtcttaaattaagcttaaatatacattctcaagataaattaacagttca

SEQ ID NO: 524458 - DNA, 383 bp, Homo sapiens
gtaggcaagggatgaatcctagtagattgtacaatatgtaagtatatgatgtgtacggtatataaacactaaggttcggtgtcagaatgtgatgcaggaactaaaaggtatcccacaggcgatctgacacaaattccagaacttagccaaagaatggtttattctgaggccaggcaatcccagcagtttgggaagccaagttgggtcagatcacgaaggtcaggagttcgaagatcagcctgacataacatggtgaagcctcgctgggttcgggtgattctagctggcctcagccatcctgagtggttagggattacaggcatccgaccagcagggccagctaattgattgagtgatttgtcagtagagatgggggtttgcac

SEQ ID NO: 524459 - DNA, 754 bp, Homo sapiens
ggaaaaaaaaaaaaaaagttggtgcgggagggtttacgacttcagaaaagacgggctcaccaaataaaaataccatgggtatttttaaaaacaagccaaagattaccaagatggcagtccctcggtccagaggggaagcagcaccgttttctcacttgacgatgatcatctgtgtgagcatgggtcacggtggtttggcccaataatccagcattggtaaaaagtcaggggataaacacctgggtttttggttggtgggagttggtaatttcacagaaagaatccagggtttttcctggtttggaggactaatactatacagaagggctctattttttggagacagagtctcactctatggcccaggctggagtcgcagtgtcatgatctcggatcactggcaacctctgcctcctcagtttcccaagtagcgggggatatacagggcggttgtgccaccatgagaaggggctctatttttaattggcttttttgggttttggtcattaatccgtttatctccatggtcttggaatcctttatcccgggcgtgcaagattgtttaacctggtctatttctctggacttcggggacctgatatgtgcggtatgacaagtaaagactccaaactgccagactgggctcagggctcatgcctgtaattctagcctttggacggcctgagatgggtgaccctttgaactcaggagttccgaagaaccagaacatggcaaccccttgttccgaaaatta

SEQ ID NO: 524460 - DNA, 143 bp, Homo sapiens
tattcactacccacctactccagctgacacaggatgccattcaaccattacccatttattgatcgatagcttagcatgttctagacggctgatcaaccagatcgcgaatgatgtgaaccgcgttctggcgagaaagataatac

SEQ ID NO: 524461 - DNA, 1248 bp, Homo sapiens
aggtaataagaaatattcagtaattggctttagcatttgtaattttttaccgctgagttcctgctagatttcgtattctattagtcaatgtatctaacagtgaacaatgcaagaaatattcccattatctttgaccagttatcaactttttgagatcttaagctgcttgtcactttgaactcccggtgatgcgtgaatacatcgtctggctataagcaagcatctctgattctttcgaagtgtgtagcaccactctcttcatattttcaacgatgtaaattcttacatctcgtgcactgttctgtaaaaatcacctcttggaccactcaattcttacgattgcacgctttcctaagttcaatgtacctggcagcaatggtgaccctctctgtcgaaccaggaaaactgtccgcatgttactaacttctcgggctctcaccctggtaaacctatatcgtgggtttacttactcaccgtgtcttatattattcgtggtgaggagtttcaacgggtgtagccttggaccaggtggagaattacgccactatttacaacacaacgaaaagaaaccccctgtaagggcgcctccaacatggttgcaccagaacgcacaacgcatacccctccagcctcaccatcaggtcacgaactaccactatcacacggctaacaaccaacactggcaaaaataaccacaacaagcacaggagaatcggaaaccaaacaatcagccgacaacataaagacaccaacatgtgcaaggtccacagggtgcctataagcagacaaccttgagatcacgaaagaaaatacacgcctcccaacgctagcaagtgcgaccacagcgcacgccacaggataccaggaatgaggcgccaccatgacgagccaacaacgtgcggcacacacataaccaccatacaccaagaccacacagcaggcggaaaccccacactagacctacagagaaccccatagcaaagaactaggactccaactaagacagaacaactagagaggaagcacaaatgcgagccaaaggcgacacgaccacccccattgggtactctagatagaacaccacaacacagacgcactcatcacaatagcggccagacagagcaaaccaacatgaaattagcgatcagacgagtaaacgaagacaagagcagaaaggtggatacgaggaaagagcaccgactcaccatgtgcgacactggatactgtgaatgagaaatagacgcaaca

SEQ ID NO: 524462 - DNA, 186 bp, Homo sapiens
  misc_feature (47)..(47): n is a, c, g, or t
  misc_feature (57)..(57): n is a, c, g, or t
  misc_feature (69)..(69): n is a, c, g, or t
  misc_feature (75)..(75): n is a, c, g, or t
agaggttgaagataacagagtgcaaagtttccttctctccctctctntctctctttntctctctctctntctttntctctcttttaaaaaaacatctggccagggcgcagtggctcgcgcctgtaatcccagcactttgggaggttgaggtgggcggatcgcctgaggtcgggagttcgagaccag

SEQ ID NO: 524463 - DNA, 280 bp, Homo sapiens
ttgtttccagccatttgctaggagctggggacacaggtgaaccgggttgtgcccattgccttcccagatgactgctatggtaccgacgtggacaagatgctcgaggatgtagatgaaagacctttatcttatagaggtcaggcaaggccttgagaggaggtgacattggaactcagttggaatgttctggtatttgcctggcactgtgggaggggaacgggctcattctataagcccttttaagaagttaaaaagaaaaatctcaaagggctaaatttaa

SEQ ID NO: 524464 - DNA, 599 bp, Homo sapiens
  misc_feature (366)..(366): n is a, c, g, or t
  misc_feature (468)..(468): n is a, c, g, or t
  misc_feature (486)..(486): n is a, c, g, or t
  misc_feature (507)..(507): n is a, c, g, or t
  misc_feature (568)..(568): n is a, c, g, or t
aaggtttctttggcccttatggcttattcttggtgcttatgtaagcagagggcctgctgcccaaggagaacttggtgcatataatttttccagggacggaaatatcgtgatccaagtaaacagaattctgtttttactgttgagtcctagatcatggggggaatgaatgacatgatcatccttcagatatttgttcgtctttttgtttgggttgcacagcaaacaatacaaacagttactctcttgtgaagatttcctcatttctgtttctcatttcagttctcagtgttttcattttgtccttttcactttgctgagtcagtcagtaaagatgaccagtgatttaattgcagtcaaatccagcgngcaattcctagccccttcctcacaggaccctttgtctgcctttgacatccgttacttcgaaactgatattttctccatggagtctctcttttcttggctctntaaaagtccacttcaggntctttattatttttcttatgncactgaaacgggttgactagtgtctccccaaaatgatgccacctagaacctcagaatgtantcttatttggaatagggtctttgcagatgta

SEQ ID NO: 524465 - DNA, 1474 bp, Homo sapiens
  misc_feature (1)..(1): n is a, c, g, or t
  misc_feature (1200)..(1200): n is a, c, g, or t
ngtgtggtgttgtggagggaatgaatgaggtagttctcatggcagtaacgtgtttcgacacatggggtgggtgccacggtgtatggatgcgactcgttggtaaccaccacacaatgatggggccgactcccatacacacacacacaagtatggatgattggcaccagctacttagtggcgagtgcggatggtgtggcgcacacactacggaggttggacttagtctttattatttgagtgtgatgttcttgttgtttctttggtgttggtcggtggtgagatatagatgttgtttattatttagtggtgggtccaccatcattctgttctctagcttggcacgctacatctggcttgttctacacagcagatgttgtgcatcggctccacacaccagaacggtaagtggtggtgtgtgccagcgcgcactgactacatatcacgacatcaacagatcgtacgaggtgtgtgttcatcaaatagtttggtggtggggtttgttgttttgggttggccaaaacgaatattcctataggggtgcggccatcactattccgtagtagcggtagatagatgatgttgctgttggtagtgagaaccatcagcgtgttgttggtgtggtggttgttcttaagcagctcaaacagagtggcaccaccacaacaacaggcggtgtgcaccaccactgcggtggtgatgagaacagcagtggtgggtgcggtgatgagaggagatgatgtgctcctgtcctgagttgcggttgtctccacagctacttaagatagacgaacaacacacagcttgtgagtggtacgacagctggtgtggttaggtgctggatggtagttgtgattatatggatgaagggactgctccacaacacttcttcatcacaacaccacaagtgtatgatctcacaagaagacgacaccaagagtgttgtctaagatggaggtgtttgtagctacacacagtgtggagatgtgtgggtagatgtcactatctgtgtctctacacactgtagcaacttgtttgtgtgtgtcacacacacggtggcacacactgtgtgtgcaaacaacacacacagacagtcactcctgtggaatttttcactgaggaggagaaaaccagcgagattgttcgtctgttgttcaacacggtgacatatcaccgcacacagtctccacacacagaatatangtgtgcaagttctcatgcttctgtggtgtatgttctcccactgtgtctcatgtggagaagaggcacagaacagctgtgtgctacacaatgttctacttattgggttctaatataacaaaatgggccacacaggcacacacagtggccttcagctttgtgaggggttttctggccaccactttccacaatgagatataaatttttttgacagctccaaaaaaaaaagaagaaaaagacgtcgagcatgaactcggggacgagtaagagtagtgat

SEQ ID NO: 524466 - DNA, 163 bp, Homo sapiens
aggccagatctgttcaggctcgagaatctggagaagagctggagattggatcgtattgtctgtatgaggagactttaatttctgtgtgagaccaagggaggagagatgtgtaaggtgcagaattgagatgagttgtggtacactatcttatgtgacctgtctg

SEQ ID NO: 524467 - DNA, 1174 bp, Homo sapiens
aaagaaggagatagagggggaaggaggaaacagcgcggcttctgctgaagccagtacaagcctggttatctggcttgacccgcccacacggaggcctccccagcgttttctttttcccgagaagagctccagctcgcaggtccttagaacacggcagagcaggagcatctcaggaaccaacggccagctccttggcgctgtccccagccccacaggcctgctgcggccatccgcaaacgggcatttccttgaacttttgagagtgcctttgaccagctgttcgcagctgggaaactccaacttttgaagtcagagcttggagcggcccccgcaagggcgtggctcaaaccctccccagagctgggagccattgcttatgcaagcccgtttcttttgatgtaaagatggaagtcgttactatattttaataatgcaaatacatcttttaaaataagttaacatttcttaccaccagatggatcaggctttgaatttaatcatgtaaatgtttgtaattttatgtcattttgttaaaatgggacgctttcaattggtttccaagaaagatgatacctctgcattttctggtggaaaaggtgtaatacccttaatgagatcaaagtgttaggggaaaaaaattccaaaagtagttacaagctatatcaatgtcaaagtaaatgcacttcatcaaagctaagaagtcacaggaattgttctcaggtttttaaaaaaatttttcctgaattcaggaagtgtcttctgaatagcagctagccaaataaagcggtgtgtgtgtactgcagctgtaggtgaacttaaaaataataataaaaagaacaaataaagcagtgtgtaccagccgctgagccggccctgtctctgtcctgtgagacggaggggctgtgcctggaagtagaggggtgggcgttgctgcagcctgcagcccggcccgagtctgtcccagtgcctcctgtgtgcctggcacctcctcaggcatcttcctggctgccccatgttgcagctgagcctcagcgtcctgctagaactgcgtgtgggatttgctcactgccaggatgggactgtggctggaatggaggcagaaagaaacacatctcaaaggcaaaaatgacgcacgttgttgtctggaaaaatcttaagtgaccaccaaaaaaaa

SEQ ID NO: 524468 - DNA, 797 bp, Homo sapiens
aaagaaggagatagagggggaaggaggaaacagcgcggcttctgctgaagccagtacaagcctggttatctggcttgacccgcccacacggaggcctccccagcgttttctttttcccgagaagagctccagctcgcaggtccttagaacacggcagagcaggagcatctcaggaaccaacggccagctccttggcgctgtccccagccccacaggcctgctgcggccatccgcaaacgggcatttccttgaacttttgagagtgcctttgaccagctgttcgcagctgggaaactccaacttttgaagtcagagcttggagcggcccccgcaagggcgtggctcaaaccctccccagagctgggagccattgcttatgcaagcccgtttcttttgatgtaaagatggaagtcgttactatattttaataatgcaaatacatcttttaaaataagttaacatttcttaccaccagatggatcaggctttgaatttaatcatgtaaatgtttgtaattttatgtcattttgttaaaatgggacgctttcaattggtttccaagaaagatgatacctctgcattttctggtggaaaaggtgtaatacccttaatgagatcaaagtgttaggggaaaaaaattccaaaagtagttacaagctatatcaatgtcaaagtaaatgcacttcatcaaagctaagaagtcacaggaattgttctcaggtttttaaaaaaatttttcctgaattcaggaagtgtcttctgaatagcagctagccaaataaagcggtgtgtgtgta

SEQ ID NO: 524469 - DNA, 833 bp, Homo sapiens
agcgggagtgcgcggcggccggaccgggcgggcggagccgggcccgcggtggctgctgcggggcgatcgggccgggccgcgtgcctgcgccatgggctccctgtgtccagcctgagttccagctctcactgagtggcacagccccaaagtgctgccagccgagggaagcgccccatgtcactgaccatgtctattatggaccacagtcccagcacgggcgtggtcacagtcatcgtcatcctcattgccatcgctggcctggagggccttgatcctggtgctgctggtgctacctgcggctgaagcgcatcaggcagtcagaggacgaggagagcatcgtggcggatggggagaccaaggaacccttcctgctggtgcagtattctggccaagggacctgtgcgtggagagaagaggccacagctgatgactcccaatcggcccggaagtccacgggctgagtccagtgatgcaagtgtcctggtcctgtgttgcagccggccaagaggcgctgaggaggggcaaaaccatactggatgcgcgtgctgtcttgagaggacgggctgacacttgctggcgatggcctctgcgggcttccgatcatcgcattgcactgatgccggcgacctggctgtcctggggcttcccctcgggctccagggtgaggttgcccatggcaggcactgggcagggcctgaccttgcttggggctcatgggccctgtagctgctttgggttacttgacatggtctagctgaggctggttatcgatggaagctactaatggcaatgcgtggaactaacaaacctgtgaagctggcaactaggccctg

SEQ ID NO: 524470 - DNA, 158 bp, Homo sapiens
ggcccaccttagctagttttttggtattttttttagagagacagacaggtttcatcatgttgcccaggctggtctcaaattcctgggctcaagccatcagacttggcctgagtggattataggcatgagccaccgcacccagccgtcgtaggcagtga

SEQ ID NO: 524471 - DNA, 974 bp, Homo sapiens
aaagaaggagatagagggggaaggaggaaacagcgcggcttctgctgaagccagtacaagcctggttatctggcttgacccgcccacacggaggcctccccagcgttttctttttcccgagaagagctccagctcgcaggtccttagaacacggcagagcaggagcatctcaggaaccaacggccagctccttggcgctgtccccagccccacaggcctgctgcggccatccgcaaacgggcatttccttgaacttttgagagtgcctttgaccagctgttcgcagctgggaaactccaacttttgaagtcagagcttggagcggcccccgcaagggcgtggctcaaaccctccccagagctgggagccattgcttatgcaagcccgtttcttttgatgtaaagatggaagtcgttactatattttaataatgcaaatacatcttttaaaataagttaacatttcttaccaccagatggatcaggctttgaatttaatcatgtaaatgtttgtaattttatgtcattttgttaaaatgggacgctttcaattggtttccaagaaagatgatacctctgcattttctggtggaaaaggtgtaatacccttaatgagatcaaagtgttaggggaaaaaaattccaaaagtagttacaagctatatcaatgtcaaagtaaatgcacttcatcaaaaaaaaaaaaaaaaaaaaaacaaaaaaaaaaaaaaaacaaaagaacaaaaaaaacaacaaaaaaaacgacagaaaaagaaaacaaaacaaagaacaaatcacaaacaagacacagaagagaaacaggagagaagctagggagaggcggggagaggtgaggaggaggtagatatcaaaacgattgcaagaggtcgtggcggacatgtcccttcgcgcctggaagcgcgcgttgtcagcggaagagacgagggcgcacgctcatgaggcagtgagacgcgacgac

SEQ ID NO: 524472 - DNA, 154 bp, Homo sapiens
atcttacgatttgtacgtaggaccgctacggacctcaacaggagccacacagatgagccacccaaagagccacccaaagagccaccccaagagcctcgctgatgtgccaccccaagagccacacgatgagccacccaaagagccacccaaagag

SEQ ID NO: 524473 - DNA, 339 bp, Homo sapiens
  misc_feature (103)..(103): n is a, c, g, or t
agatcagtgtgtgggagaagaaagaagtttgagtatttatcacctaggaagggggacttccaggacactgtttggcagggatgctgggcctctactggagctnagttccgactgtgttgccctctccttcagctacagttacagttatagtgctttctagattctgggaactcctccctttcctgctcccttcaggcctaggaatggtaatacttcctaattgttgccaagtctagtgtattttacagtcctctatttttccgttttaacctttactgttatctgagtaggtcatttcttcctgccaagtcattaaactggtacaggagggagaaggag

SEQ ID NO: 524474 - DNA, 1060 bp, Homo sapiens
ggacgcggtgggccacagacaaaaagttgttactatggtatacttcaacaaatcagtcacctcgtacgcatgtaggtgtgtacagagattaaacagatgtatacactacatcgtagggtgacgtgactgctgatagtataatctacagtacaaaaagttgtacatatggtaaactaaagctagtttaacagctgtggagcatatgctgtaagataggtttttgaagactacacctagcttgggctaatagactaggtgagtacaacgtctaacttatacacatctagagtatgagacaggtcgtgaggaagaactgaagatatcaagctgaataagcaggagaggtgagaccttgagttatgagaaacaataactattagggaagaccatgtatcactactctatgaagttacaatagaacggtgctgctgtatgtcttcttattccgtacagtatccggataattatcgacgtaagattccgagggtcagtggcccattggtagtagatgaggcataatcttggtgaggaccggaaagcttgatacgagtaagcaaacagtgtagtaaacactggtatatgtccccactaatttcaatacggaagacctctcacgaaactttagtatacagctcggcagctaaactatacttgggttcactacccatggtcggactaggccacttctgtagcgtaacggtgttaccactcagacaaagcaaattagagactggaacacaacacctctgaagtagccacaaatggttgagagcatagataaaccggcactctagagcccaaggcaaccaagcagccacgcacggggcaagtagcggtcgtcaacccacgtatgagacaccacgacaaacgcagacaaggtggcacaacccaaccggtccgcacacgcgccgacacgagacaaaacaaccaacctagaagcacgtaccaggtgcaacaccgggacaacaacaagcagacaagacgcgaaccgacaccaaccagaggagccaaagacgacgacgacccccccaaagccacagaaaacgcaccacgccaaacc

SEQ ID NO: 524475 - DNA, 949 bp, Homo sapiens
gatcaccggaattttctgtaggtcaatgtgctgaccgacaagtggggtgaacggcgtagacatttgaaacagatctcattgtccaaatgtatgaatctggtatcactgatgatgtcaaccaattatgctctatagggccatccatcaaattggagaagatagcaaggacctgaagactctttgatagtcctaattagagaattaagcagtgaggcattcttcatcaatattacttagctttgacagagcatatgatagaagtattagttctctcattatttcctattaactgatagaagaaatgagatgagtggaagaagaaccagaaggagttgacaggggggagatgacaggcaggagattcttggactatataggtttgaggagcatggcatctgatagtattatttatagatatatttccatgaaatataatcagattagttactcctgtacattctagaaatgatgcataacagttcaaggaaccaacaaatgtggtgagatatgaatgcactgtgaatcagaagcatgctgtgatataatgttgtaaggaattagctgcttatgagctcttatgacagtgttgatggtgatcagtgggtttaaaaaccaggttcttccaggaattacagagtcattcacaatgaggtataaagggcattgcgaacgcagggtgattttgggctcatcggcagggggatgtctgtgaaattcgaagtctgacttaaagaacgcatggttgattgaaagcaatcgtgtaacttggtttcagatcaagaaggaagtgggcggaattggaaccaggggaaattttggacgtacccggggaagagatggattaggaaaaatggggtaacacggtttggtacgccgtttaaccaatttcgggtatggggagtcaaatttacagagggggtttgggggatgggggacaaagggctatgga

SEQ ID NO: 524476 - DNA, 289 bp, Homo sapiens
tgcggtccgtagcacccacaagcctcatcatactgccttacaaccttagttcctcttcatttctgtcttctcacttacctgcagaaacccagttgattcttgttctccctttaccacaccagccttgtaactgtgatgaatgaccctcgagctcactggaatctgaatcactcaggaattcaagcaaacaggatgttttaaccactgtacagctttcttatggcatgacagagcacttgtagagataacacaccagtttgcaggaagaaaggaagagaatggaaacagc

SEQ ID NO: 524477 - DNA, 275 bp, Homo sapiens
tgcccaggccgccgctcaggaatgaattcagagatggcttttgccatgttgcacagactggttttgaactcctgaccaagtgatctgcactccttggcttcccaaagtgctgggattacagatgtgagccacccctgcccagccaatgtaactgcaatatttcaaaattgccgtgtgtgtgtgtgtgtgtgtgtgtgtgtgtgtgtgtctatgcaatgtactttctaaatgggaattatctgtaacataaaatatatacaatatctggaagccct

SEQ ID NO: 524478 - DNA, 456 bp, Homo sapiens
  misc_feature (6)..(6): n is a, c, g, or t
  misc_feature (63)..(63): n is a, c, g, or t
  misc_feature (110)..(110): n is a, c, g, or t
  misc_feature (135)..(135): n is a, c, g, or t
gagtgnctgctgcggactgcctcagaccctgatacccgtactgatcttgggaactggatcttngagtcaggattagttcttacttaatacccccacctttgagaacgggnttgttaaggacgctatgtagggccntactactggcattgggttcgggaatgggattgacttggcttcaggctccttggtcataaaatatgggagtagaaaacaacaagaatggatggactcttaaaacatgaagagctttatcgtttgtccctgaatgtagaatttgtttttgatttcataattctgctggtaaatgtgacagttaaaatggtgcattatgtatatatattataatttagaaataccattttataattttactattccagggtgacataatgcatttaaatttgggatttgggtggagtattatgtttaactggagttgtcaagtatgagtccctc

SEQ ID NO: 524479 - DNA, 355 bp, Homo sapiens
  misc_feature (11)..(11): n is a, c, g, or t
  misc_feature (22)..(22): n is a, c, g, or t
  misc_feature (175)..(175): n is a, c, g, or t
  misc_feature (192)..(192): n is a, c, g, or t
accctcaaggntccatcccccncgggcccaagaaccttccaaaatttaaatggaaccgggctgatcccctccatgaaatcccagacaaagaagaaaaaaacccccctgttattgggacctaaataatcaaaagcataatgttttccataattttcctatttgaaaatgtgctgantcctttgaatgttttantctccagatttatgaactttttttcttgagcaattggtaaagtatacttttgtaaacaaaaattgaaacatttgcttttgctctctatctgagtgccccagaattgggaaactattcatgagtattcatatgtttatggtaataaagttatctgctcaagttc

SEQ ID NO: 524480 - DNA, 433 bp, Homo sapiens
  misc_feature (23)..(23): n is a, c, g, or t
  misc_feature (42)..(42): n is a, c, g, or t
  misc_feature (82)..(82): n is a, c, g, or t
  misc_feature (90)..(90): n is a, c, g, or t
  misc_feature (110)..(110): n is a, c, g, or t
  misc_feature (149)..(149): n is a, c, g, or t
  misc_feature (189)..(189): n is a, c, g, or t
  misc_feature (270)..(270): n is a, c, g, or t
  misc_feature (375)..(375): n is a, c, g, or t
  misc_feature (426)..(426): n is a, c, g, or t
gaaatgggaaattaagtgccccntaataaggaaaaaaatacnaaaaagaaatggaactccttcctggacccataaagagganaccagtgnaaaaaacagacctctgcaanagagccgtcactgagaaatgaacctgctgccctcctgancttggatgggccagcttcagaaatgtgaaaaataaaggtntcttgtttaagccaccccaggcaatgatatgtgttatggcaccctaagctgactaaggacagctttcttcctcaatctcantcatgggcctcaggactatgagttggatatttttcatcagcatgctgatataatgcctttgtttaattttctgtgtctcgaatttttagctctaggtccagaacnttcctttggcttctatttgtgtgtgtattgcatctgtctcaccatatattnacaggta

SEQ ID NO: 524481 - DNA, 125 bp, Homo sapiens
tcaaagccatatatgtggtgtgtcgaatcaatacgaactcaggggcgagctgccttccttggatgtggtagccgtttctcaggctccctctccgcatagtattgtggtgtgttgaattcaatacg

SEQ ID NO: 524482 - DNA, 344 bp, Homo sapiens
gagatggagttttgctcttgttgcctaggttggagtgcaatggcaccatgtcagctcaccacaacctccacctctcaggttcaagcaattctcttggctcagcctcctgagtagctggaattacaggcatgcaccaccactcccacctaattttgtatttttgatagagacggggcttctccatgttggtcaggctgttctcaaactcctgacctcaggtgatttgactgtcttagcctcccacagtgctgagcttataggcaggtgcacgacacctggctggaatcatttatttcaacatatctctgggtccaacaacatggtgatgcaactttcctgcatgg

SEQ ID NO: 524483 - DNA, 1200 bp, Homo sapiens
  misc_feature (496)..(496): n is a, c, g, or t
  misc_feature (534)..(534): n is a, c, g, or t
  misc_feature (622)..(622): n is a, c, g, or t
  misc_feature (731)..(731): n is a, c, g, or t
ctgaccaggacaaccgttagccaaagccatttacccaaataaagtataggcgagtagaaattgaaacctggcgcaagtagatatagtaccgcaagggaaagatgaaaaatgatgaccaatgcataatatatgcaagggactaatccccatataccttcgtgcatacatgaagtatagacgtagtaaagtaagcttgggcaaaggacgagccagagagcgtaacgaccgccgcgaaacccagacagacgctcaccgtaagtaaccatgcataaatagagccacgactcgcggtcatagtcgtacgcgaatagatagtggggcaagagtttataggagtatgacggcggatcgaaagcctacactggtgccttgggttggatatggcttgggatcttggtccccataggcataatggaaatcgttccagtcttccgaactgtgtacacattctgaccgccacgagagatacaccgtgctcatagatctcgccctgtgntgagaatttctgagacatggtgttacgtggccagaagnacggtacatccagctcgttatgggaggcatctaggcggagaagatgaccttttgtacgaaggagacgtacagagatacatttctacancagcctcactatgctatgggggcctacagagagggcaagctcatccaacttagagggaagaagcggttcacatgctcaagcaggcacactgacctaagaagaatgccantaacatataagcttgaacgtcctcagcgagcgccaactgtgggaccaagtgctatcgaccctagtaggaagaatctagtgtaacgtactaagtagacattgagaaacatttctccatccggcatgaacgcactgggtcagattgaaagagcactggaaactggacaagttaacaggcccacatatctatcaatcaagtcgaacaagtcacttagttacccttcaatggtctagaccaaatacaggtcatgctccataagggaccggttcaccaaccacgtcacgaggaactcgggggaaatctttacccgggctggtttacccaaaaagcatcaccttctaggcattaaccagtattaggatggtcccggctgagccagctggcgccattgtttaccgggcgggggatacctaaaccgtgcaacggtggcaaaaacacgtgtgcctaagtaggaggctcgtataaatgg

SEQ ID NO: 524484 - DNA, 169 bp, Homo sapiens
ccgggtaatagggcctatgcaaagaacggagcggaaataaattctaggacgatgggcatgaaacatgtgggtatgctccacagattgcagagcattgaccgtagtatacccccgtggcgctgtagcgtatgcaacagtggtttggtttagacgtccggcgaatggcatc

SEQ ID NO: 524485 - DNA, 567 bp, Homo sapiens
gccaagggcctgggaggttttgtgtaagggaacctggggggcccttttgggtttcattgaccgggttcttattataaaattagcgggggaaaccgggggcttttgataaagggaaaaggtaaatttccaaagtgggaaccttcaggggtttccccctcggtcaggggggagattaaataggggcacctttcccaaaataaaaaggggggattttcccttgggtggaaaatttccccgggatatgggaggaaggggggttttcccctttttcccccgggggaaaaaaaaacctgggttttatttttagggaaagggaacccggaaataaaaaaatagggggaatttcttggggggaaggcctttaaagcttttttaaagggggtttttttgggaagcccttcctttttaagaaatggggttttaggccccggtttttaatcgggggggaaggggttttttaagaatttgggggggccccagtttttcaaaacgggaggggggaaaatgggttaccccccccggggttcctttgggggcaaccaataaaactttggaatttagccccca

SEQ ID NO: 524486 - DNA, 415 bp, Homo sapiens
taagcacagaacacagtatttaattttaatagaaggccagtctatcagttttttcttctgtggatcctgatacttctttcaagtactgagaactctattgaatagctctaagtcccacagatttacctcttaggtaagcttttaaaagtttgatggtcttatagtaacatttaagtactagtgatccattatagactaaacgattgagttaaaagatagtagaggattagctcaaggttctattttgtgtgtagtagtaggcctgtcgatagtccagtaactaccagcagcaattatagaaagatgatctataccttcattgaattgctttagcatctttggcaaaaatcagttgagcatatctgtgtgaatctgtttctggatattttattctgttacattgatctatgtatcc

SEQ ID NO: 524487 - DNA, 1670 bp, Homo sapiens
cgcgacggtgagcgacatcgagagacggtgtcttgcggctcgctcttggcgcagggcgtggatcaccgcggagtagctcgttggatgtccgtcttagggtctctgtagctgtctcctgtatcagcgtctatctgttacggctgacatcgtagtcgccgtcagtgggtgcgtttgccacaggtctgtttgtctcacatcgtggcgtgattacataggcgctgatccattcatggcggtggtctggcagtctcgccgtctatattcatcctcccaagttgctgtcttccgcatgtcccgtcctgacgctggcaatcgtggtctctactccgcttctttcggggtagcgtacgagtgcgttctgtgcatctctccggacggtgtatgcgttgggttgacgtgccttagaccctgcgtgatgttttcccgtgcggttgcgtgtgactctcgctgtgttgtgttgtgctagtacgcgtgggatggtttggatactgcgccctgtttagttacgcgggcttgctgttgctcgctagttacgtcagatgtggtgtactatgcgatgtttgcgcatggtgctatcgtggtggtcgctccaactagactttgccctgtgctgtggcgctgtgcggcggtgctatcagtcgtgtgggcgctgccgttgcgggtgtgtatttgtggcgccgctgtggactaatgcggatcacgcgtcgcgtttggcgtagcgggaaggctgtaatgcgtggttcgttgttggccgacacttgtgggcgttgtgtggggccctcgtttatgaggtgcgacgtggtgtgccggcggttatattgcgtgttgtcgggtcctgccgtccccgtgtggggttgtcatgtactgttttctccagagtgccgttcgttgttgtgcgcgtgtccgttgtgtcctgcgttgtggtggttgtttgggctggggcacgctcttgggttcgtgtcgttcttctccttgggtgtacgtggagaggcttgctgtggggtgccctggatgcgcagcatgtgtttggcccagggtcggtgactatctatgtataggcggtgtgggtagatgacggcgcgcttcgctctcttgctagagcgttcgatgcgagattagttattatggccagtgggtgctgtgtaatagcgcagatattcctagtgagagaggtcgttagatagcagagtacggatggcgtgcgagtagactgaggtactgttgagtttagagaggagagtcatgcagagcgtggtagaagcagttgatgagagtaactttaatggagttgctagttgttagtcttgtttgtgaagttggcaacgagttattagtttgttgctggcgtgagtagtaggttatgagagtaagttgtgttaagagtgtctatgcgttgaagagtagaaagtagtgtagttgttaaggcagctgcagcggcaaatggtaaagtgcacacgttttagaagtgtgtgtgttgctaagttttttgccagtaagagagttgtaaagcattgaagctgaacaaagtgtagcgctataagtggatttggttaatgacttatgagcaagctggtttggccagacagtagtacccaaacttgttatatgaagtatagcagaatggcgtagtcacagcgttgtgaaattctcttgtaacaccctggatttgg

SEQ ID NO: 524488 - DNA, 667 bp, Homo sapiens
gctcccagcaacgcctgtgtttccatcattggtttgcactgatgtgtctccgccgcactctcaggctgcagctgcaggactgagccgtgcacccggaggagacccccggaggaggcgaagcacttcgcagtgccgtgacccaagccccagtcctgggtagcctgcagtccatgggccagcgtgttcctagccccttgcgtggcagcccatggtcctggcccaggctcctgcgagcgtttagcagatgtatctggaaggagcacagctcagaggaccgctgcttttcgcgtgcgcatcgctgggcgacgcggctagctgcatgggcgtgcttcgtgctggctgccccgtcaagccaatcgccgttgcccatctgttccagctatccttgcggtacacacgccctgagcctgccggagcgtgtgccttgggcgtctcccgcggggtccaaggttggaccttttccttgtccccggggccggaggcaggtgctaggaacggctgcttgggttgggctgcggtggtatgtgccgcggtcgaatggttggacacctgagggcctacgcgggttctccgtggtttggcctactgccgtgcgttaccccatggagatctgcttcaccctgtggcgttcgtaccctgggtgccttgagtcggagtcttggggccc

SEQ ID NO: 524489 - DNA, 255 bp, Homo sapiens
tactgaccgtcttcatatactagccaagtagcttgagatcacatgtgttgcacacccacaccacccagcttaattttttttatttttatgtcgagacagggcttcactatgttggccagactggtctcgaactcctgacctcgtccatctgcctgcctcagcctcctgaagtgctaggattacaggcatgagccattgcccctggcctctttttttttttttttttttttttttttttttttttttttttttttt

SEQ ID NO: 524490 - DNA, 914 bp, Homo sapiens
gtggcatcctgaatgctgacaacattctggccgctatgtctcgctctgagacctaaactgggctcgggctactctctctgcctgggcctggaggctatccaatcgatacgtgccaagacgattcacggtttgatctcaacggtaagatccacgtcgaggagcatatgtgacgaagtcaatcatttgcgctgaatttagctgagtgttgtactggatgtactatcgcatccggacatggtagaagtatgcttgtactgaaataacgtggaacgaggagactgtggcctacaaagtggtgcgcactgcacgagatagttctgtcaagcccaatgatctgggtcttgtctattctcttgtactacatgttgttatcttacccccattgatgaacatggatgtatcttgtgcctgccacgatgtggacaccactgtttgcactatggtgcgagccgaccccaatggataatggttcaagctgggatgcggagacgattgtaaagccatgcattcatgagtacgccttgcgaggatgactcgggcatttaggcaattgcgatgaatagttgccaagtttctgcctgtggttcgctgtacaaagatatcgatatgcttagtactcttacactgtgttgcacctgagtgtgtgggcgtcgctaattgtatgtgaacgcttggacttggctctgcttttagtactcgctagctttggagttgctgtctccatgtttggctgtatctgagcggttggtgccacccggtagctcttggaggggtggcccccgtaatggtgggggagctgagacgttgcgccttatccagatcatccttttggtccgctgtgactccttcaaactctgcgctcaacaggctgtgccgatagttccgcgggcttattccttgcaggtcactactcg

SEQ ID NO: 524491 - DNA, 251 bp, Homo sapiens
ttgggatcccaaaaggcaagggacggaaaggaaggggggaaaggggaacgggggggttgggaaaggattgaggcggggcccttttcttccccggaaggaattggggggttgtttaaattgggcccttggaaggaattttggcaacaaagggcttggtttggggaaagggaagaattggggattttggggcttcccttcccccaaaaactttaaattatttcccaagagggcttaaaaaaaataaatatcac

SEQ ID NO: 524492 - DNA, 993 bp, Homo sapiens
  misc_feature (429)..(429): n is a, c, g, or t
  misc_feature (485)..(485): n is a, c, g, or t
agcggagcaccggcctccttcccagccgtgcggtttcctccagaccatctcgggcacgggtgagccctattcccagaggcaggtggtgctgaccctgtagacaccaaaggaggacaactagttgtgctgaagctcaatcattgttgactaggtgggctacccatgtccgttgtaagcttcaggcagagctaatgtgagacctaacaggagaatgaccccaaagatcctatcaaactctcggagtctctcatggagaatacactcaagcgacaggctcttggatgaaggaatagtcacgactgtggatggaccatgcttctcttaagatattggaccgattgctgtgccaggcatggattcgtagtagacgagcgagatggggcataatgcgcattttgttacaggatacgtcgcaattgaagcgcgccnatgcaccggcgctagcatgatgcaatgcgtgaccgacgaacttgggccgaggatgncatggccccgagagccaggaacccatgcgaacgaatcgaagcgaatggtctgggaagagctcttaagctctgtagcagaccccgaatggcgctataaagagagacaggcagtctgccatagtacagttggctaactatctttgaactaatgattacgtaacgagcgacgacttctatcgacaggcatcttcgactaccggggccgtctgtcgtcccgttgccgaagtgcccagggcggtccctgtggaaggctgccaccgaggtacacatgtccctattgggtccggcggtgtcaagaatctaacagtgacctgtcaaagctcttttggcacgttccacaaggtgtcaccaagcagctcagccaagatcaagttcagagagcaatgaagctgtcaggacatcaagaacggacgcttgacaccagatcaagtccaatagtcgattgccctgatgaaccggttgggcccagaaccgctggcagagccaaagggccatccagatggcagaa

SEQ ID NO: 524493 - DNA, 267 bp, Homo sapiens
  misc_feature (232)..(232): n is a, c, g, or t
gaggatccaccgaccatggaacactctcaatggctgcaaccaccccgtggcccccctaccagccccaatctccaaaccccgcacgtcgatcatgacgccaccaacagctgcagcccctgagatcttcaccttagaccctctcccgaagcccgcagccgcccctgcgaaccctccaactcgttcacacgcgccgaaagcctattcccaggactctctgcccctacgtgaccgnccctagctgctagtcgagaatccgaactccgctcc

SEQ ID NO: 524494 - DNA, 257 bp, Homo sapiens
  misc_feature (2)..(2): n is a, c, g, or t
  misc_feature (59)..(60): n is a, c, g, or t
  misc_feature (63)..(63): n is a, c, g, or t
  misc_feature (70)..(70): n is a, c, g, or t
  misc_feature (88)..(88): n is a, c, g, or t
  misc_feature (141)..(141): n is a, c, g, or t
  misc_feature (156)..(156): n is a, c, g, or t
  misc_feature (159)..(159): n is a, c, g, or t
  misc_feature (162)..(162): n is a, c, g, or t
  misc_feature (164)..(164): n is a, c, g, or t
  misc_feature (171)..(171): n is a, c, g, or t
  misc_feature (186)..(186): n is a, c, g, or t
  misc_feature (226)..(226): n is a, c, g, or t
tncagaggtaatgctgtggcatattgcttctgcctcagtgtatcactggagtcacaggnngcnggcccanctgagttcccaataaagnaaaacctccccttctgaggctgctttcccaaaactccccctgcatctttatcncttcatcctatcccnccnctngnctgaacntcccacctttatccngtgttctgcctttgttttaattttaactcatgttcatccnggcaacagaagcattctctaggtcccagttt

SEQ ID NO: 524495 - DNA, 222 bp, Homo sapiens
  misc_feature (3)..(3): n is a, c, g, or t
ganttaaagtctgtacctctgatcatcatcttcccatttcctcctcccctcagccctgccaaataccattctaattctgttctgtttctatgagtttgacttttttagattccgcatgtgagaacataaagtatttgtctttctctgtctgacttagcataatgccctcaaggttcatccattttgttgcaaatgacagaatttcttacttttctttgtcct

SEQ ID NO: 524496 - DNA, 915 bp, Homo sapiens
ggtacgaggactatatgtggatgaaagtaaaataaggatcaacctctacaggcatacttcttccagctcgatagcatagcatctgaatgggttggacttccagctctgccttcagccaggtgtctcttcggtctggggagaggtgggagtgataagaatctatgtagattgcgaaggctaaaggacacttctaaacagaggcttcggttggcattcagatatggaatgctatgatcctgtggctgcaaaatggaacgaagtaaagaaactccctatcaaaagtcatatggtcataattgtgattttcacataataatgggatgatatagtgtcgtaggaggaaagaagatgaaaaaagatgtagcaaaacaagggtgtttatcttatcgagaggccccgaaaataaaaggagagttggatagatgatctgtgggtcctaaatgagaaaatttcctcgtaacccaggttatggagtgacgctagtccagtaaaggcaaatatggtgatcgcgggagggtgtcagtgaagatggtctttgaggttcagtgtgaagctttaagaacttaccaaaaaataaatgggatgttatgaggaatttcgcaaagaaagaagctcattgagttgtggtcagctgggtgggatctctgtctgcaggggtgtttggtatgaatcagtgggagtctaaagaagtttgacgcactggagtcatgactatgggagtttgcgttataacaggatgggtggccggtggcagaaaaagtttgccaggaggggtggccaggaccgttaatttttcaacgggtctgtgccgggggcacaaagggggggggtgggaagggcaaatcgggaatcgaaccttcaattcaagttgtcgcggagacacgtttgggggaacctcacgaaaaaaaaaggggc

SEQ ID NO: 524497 - DNA, 343 bp, Homo sapiens
caataaattgtcaaagtggaattggaacgtgtttttaggattttgatatgaagcaggcttcccatgtgacctttctcacttcttgttctgaagtctaacactctgcttatctttctctccctctcttcattgatttgtatagtggctgctaaatggacattgtgggaactgagctttcatcccctgtattagccatagagatgaggactttgagggcaccatggaatccgattgctggaaataaatcattcataaaggaaaggaaaacctaaaaactcaggtgcaacaaaagcaaaatgagaaaactgttaatctttacaattttataaagaagaattgcata

SEQ ID NO: 524498 - DNA, 364 bp, Homo sapiens
  misc_feature (26)..(26): n is a, c, g, or t
ccttatgaatctggaatcccgaaaanttacgacacttctctgctactttatacagcaggattcatcagatgacattttgctgtgaaaccattcagtgttctctggactaagatttcaccccagaggttaagtgctttaactagatatggagctcccatcaattccctccctggccctgcaagcacatatccccatccctgaaggtccatgcacagagattctccttgttcacataaggctttattttctactgtcttagaagcattccttagctatgcaccttcctacggtttgattctgactccagtaattccctaattatagagacagattttctgtcttgttattctaacacggattccat

SEQ ID NO: 524499 - DNA, 442 bp, Homo sapiens
cacgaggggttgcggacgcgctccgccgttacctcgaatcacaccccaatgcatccgacagcctggagggggtgatgcgctggtggctggcgagcgagcgcatcgaagcgtcgcaagccatggtgcgcagcgctctcgcacacctcgtcgaggatgaagtggtggaggtgcgggtcctgtccgacggcacccgggtgtatttggcgggcgcccgcgccaggttttcgcgcccataggagataccgccatgtctcaactccgcgttcagctcagctcccgcaccggaaaatccttcgctggccatcgggtcgtggcttcgtttgctcagctcgtgacgatcgacgcagaatccgctccgcgcgaagtccccggtgaagcgtccaaggcggtggaagacggcggccttgcgctgatcgagctgcccgggaaagacaccctttcc

SEQ ID NO: 524500 - DNA, 589 bp, Homo sapiens
  misc_feature (46)..(46): n is a, c, g, or t
agtcggcacgtcttatgagatctggaactggatgacttctgccagnttttcggctagctggtaatcctgacttggggaggatggtgcaggtgcagcatgcctaccacatgtgtgtgcccatggttctgggcatctctagtccttacacttgttgacaagcactttaaccacagagcctctcagccaagaagccgtctctggaagagctttttttcttttggggttttcgagacagggtttctctgaatagccccggctgtcctggaactcattctgtagaccaggctggcctcaaactctgaaatctgcctgcctttgcctctgcctcccaagtgctaggattaaggcgtgagccaccacgtattttgttgtttttgagatggtctcactatgcagccccagctgtcctggagcttgctgggtagagcagactgccttgatctccgagatgagcctgtctcagcctccctcccaggcactgggatcaaaggtgtgcaccacctcagctgatccctgcacagctttcccacatcatcgtccctcagaatgtacatccactgttctaaagtacttcctgctgttaaaaggc

SEQ ID NO: 524501 - DNA, 257 bp, Homo sapiens
atctacagatccttagtgcatggctggccggagtgcaatggcttaccggagtgcatggctcatgccgtaatcccagcagtttgggaggcaaggtgggcggatctactgaggtcaggagttcaagactggcctgacccaacaatggtgaaaccccatctctactaaaaatacaaaaatcagctgtgcgtggaggcgggcacctataatcccagctacttgggaggctgaggcaggagaatcgcctgaacctgggtggt

SEQ ID NO: 524502 - DNA, 126 bp, Homo sapiens
ggctaggtgtaatactctgggtcgctacgagtctggtgagaatagtgttacatgtctttcatgatagaaggaagagaagtaagccgagggcgtctttgattgtgtagtagggtggaaggtgatttt

SEQ ID NO: 524503 - DNA, 191 bp, Homo sapiens
ctggcggcatgggtctgtagcgaagcaggtaggcagcgggcggtgggcgggcttgttgggtgccccgctgcaggggcacgggctggacggcctgtttctttccactgccccccggaatgagatgggccagggcgccgggtcggttaccggagtgcaagctcgaacggagacaggccgtccagcccatgccg

SEQ ID NO: 524504 - DNA, 176 bp, Homo sapiens
caggatctctgtgacgagacggctatactgtctgtctgaggcagaagataacagcatctcgaccagcctctgcttaaaggaatctttattaatcacgtgtggttcacagataattctttttttaaaaaaaccccaagctcctagaagaaggcacacttgtcaagagtgggctttcc

SEQ ID NO: 524505 - DNA, 1598 bp, Homo sapiens
gagcgggcagagcagcggctggagatgaggcggacacgtgtgcaacagcggtagcagcccgggcggcggctagcaacagcggcgtgcggcatcggccctgagcgcgccggccgccctcgccatacgtcgcgacggccgcgggcaggccatagcgagcacgaccaactgcgagcgcgcgccgtgtggccaccgcgtcccgacagtggcacgcgagcggccgcgggagcgacccatcggcacgaatgcatcgccaacacagagggcgaaacgcagcgaccggtagccaagacgaggccacccgccaccgactcgcgggcacaaggcgcgcacatgcgcagggaagagaacagacatcgaagcccctgccgagcctggccccacgcacccgacagcagccccgcgcacgaccgcaccgcacgcagaggaccaaagaatcacacccaccgcagcacgcgcgacgaaaactaacaggatgacaaacgcatacgcccgcggcgcacatagagcccatgacaccccatcaaacacccgcgaccgcgagccccggcgagctcggaccaccccttggtgcgcacccggagcacaggaaaacaccgatgacgacagagaagcacatcaccggccgccacatcacacgcacgcagcacacccaacggccgaccgacgcaaaaggcccacgcaaaacaggcccaggatcaaccaacaccacaaccaccgacccaagcgccccatcccagccatcggcacaaccaaaccatcgcggcttcgggccagcataacaacacggccccgcggcaccgtcgaaccgcatcaccacgacgctagcaaccacggcacccacgacacaccacacctgacacacaccgctaacgccccccacaagcccaacaccaaccacccgccaccacgcaccaccaccacaccacccaccacacaccagcccgacccacgaccgcgaccaccgacccccaccacaacgaccaaacaccagaccgacacgggcgcccaaaacaacaggaccaagaccagacgcaggaaacaccaccacgcaaccacagcacaacacgtaacacgcgtccagacagaagcgcctgacgccaccaccacaccgcagcacacacatccctaacagacaacgaacagccacgcacccccgcaccaagagcaaaccaccagccgcgcaaacaaaccaaacaacaacggagcaagcacacacacacggacgcaccagcagcaagaaacaagcaccagcacgacaacagcacagacagacagacaagacagaacgagcacagcgagcgacagcagaacgacgaagcgaacgaccgacaacagaagaagcaacacagacaacgacacagcgcagcacgaaagacaacagcagcactagagcagcgaacaacgcgcccacgcacgctacgacgccagacagagcacgcacgcgcaccgcgagcgcagcccgcagccacgacaccgccagaaccagacaagcaacagccgagccacacggcgcagacagaccgccgcgacccgaccacaccagcgcagcacgcgccacaccacgcccagaccaccagaccaccaccaccccaccaacc

SEQ ID NO: 524506 - DNA, 123 bp, Homo sapiens
gaggactcggtcacaagaggaagataggataccagggcagatgagtattatgaatataagcacgtaaaagccaaacggagactattagaggtcctcatcagcaagcaagatccggctgtctca

SEQ ID NO: 524507 - DNA, 135 bp, Homo sapiens
atttccaagttaccagaaatacagcagaccctaacttaacaccctctcactacccaactcatccccctaaattcaacccaactacccaccaccaccacccaccccctacttcctaatatcatgaatgcatttcaa

SEQ ID NO: 524508 - DNA, 611 bp, Homo sapiens
  misc_feature (586)..(586): n is a, c, g, or t
  misc_feature (588)..(588): n is a, c, g, or t
gagtaagggtccagtatatcatgttactgtatttttgtagcttcaatgttattaagaaaagactaattacttgtcaatttaccagaatttaccatacccggatcactcccctttgtattttattgccatgtaatgggatgttctttaaattctctgttgaatgaatgagactaggtctgagtgtacaacaattaaagtgacatcaacattctttaaaccagagttgttttggagaaattcccagagaggctctttcttaagacatgaggctagggaactagatgtgatttagtgtagaagtcctatccccttggaaccaaagcagaacctattattcactaagggtggagtcgacaggaggtaggtgacttaaaccaacaaatatttattaagcatctactaattgtcaagtgctggcaatccaatgagattaagacagatactattcctgccttgtagagcttacagcctggtggaagaattggaaatcttattactagaaataaaggtgagaataagatggaagtgatccccttaccacctcagagagaataaaggattatacagaagaaaactgtaagacttnanattttttgtttataactcctcgt

SEQ ID NO: 524509 - DNA, 512 bp, Homo sapiens
  misc_feature (487)..(487): n is a, c, g, or t
  misc_feature (489)..(489): n is a, c, g, or t
gagtaagggtccagtatatcatgttactgtatttttgtagcttcaatgttattaagaaaagactaattacttgtcaatttaccagaatttaccatacccggatcactcccctttgtattttattgccatgtaatgggatgttctttaaattctctgttgaatgaatgagactaggtctgagtgtacaacaattaaagtgacatcaacattctttaaaccagagttgttttggagaaattcccagagaggctctttcttaagacatgaggctagggaactagatgtgatttagtgtagaagtcctatccccttggaaccaaagcagaacctattattcactaagggtggagtcgacaggagagcttacagcctggtggaagaattggaaatcttattactagaaataaaggtgagaataagatggaagtgatccccttaccacctcagagagaataaaggattatacagaagaaaactgtaagacttnanattttttgtttataactcctcgt

SEQ ID NO: 524510 - DNA, 838 bp, Homo sapiens
  misc_feature (78)..(78): n is a, c, g, or t
gaagcttgaagccaatatggagtccgtcagttgctccgctgctgctgtcaggaccggagacatggagtccaggggacntgagcctggtgcctgagcggcttcagagacgcgaacaagaacggcagctggaagttgaaaggcggaaacaaaagcggcagaaccaggaggtagagaaggagaacagccactttttcgtcgccacctttgctcgggagcgagcggacgtggaagagcttctggagcgcgcggagtcggcacgacgcggctggacggaggcggcctctcggctccacgggctgcagaaacctaatcaacgactcagcttttatcttcctagccgccttacgacctgcctgccccaggacaacgaggcgctgcccgcggctgcaggcggacttggccgagcggcgccggtgggctgcaagcccaagaagacgtatacgcctttcaagaccggtagaaaggatgctgcttcgtctaccaaagtagcacgcggctcctggcatccccatcggaagttgaaagcatacacgactccaccgaatgaccaagaaggcggcaacagagacctcggacacagctgagtcctgcggatactccaaaacatggagtcccagagctctatggaaaaagagacgccaggagaagttggcaacaagcgacgacgtacctatatggaccagaactgagcaactgcacaggtcagacctgtatggaacatcgcaaccaccctggggctaacaaaggcacacagctgcagctgaactgcgaagtcggatgatacatacagtttacatggcacatgacgagacttgtcccagccagggcatgcaacgcc

SEQ ID NO: 524511 - DNA, 105 bp, Homo sapiens
cccgcttggactgcatggctctctattctctaaaagaagtacaacgagagctattcttactctcgataaccagtcaggggcacaaggtcggctttgcgcattcac

SEQ ID NO: 524512 - DNA, 436 bp, Homo sapiens
  misc_feature (110)..(110): n is a, c, g, or t
  misc_feature (315)..(315): n is a, c, g, or t
  misc_feature (343)..(343): n is a, c, g, or t
  misc_feature (393)..(393): n is a, c, g, or t
  misc_feature (425)..(425): n is a, c, g, or t
accaggacaagaagaactcacttagaccccctcattcctgattcctgagactaggatccagctccaccagcaaggcggaagttactctggcatgagtacgtcaatgcgangtagtaaaaacaaaccacgatagcgcaggaaatatgaaaagcaccctttaaaaaatatttactgttactgctcgttctttatccttagtattccttcataaaaaatagtagtttgattccaacctcaaagtagcaatcaaaaaaaagcattatcagggaagaagataatcaacgctggcaagggtgcatcttgaataaccataanggctcacaaattagtggcagcaccaagncacatttattggaatggtgaataaattcttacacactccaatcctgtttnctattaactaatgttttttaaattagttgggngccatcatccc

SEQ ID NO: 524513 - DNA, 106 bp, Homo sapiens
ggaccttctttttctttataaattatcagtcttgggttatctattatcacagtatgaaaatgaactaataggctgggcgcagtggctcacgcctgtaatcccagca

SEQ ID NO: 524514 - DNA, 305 bp, Homo sapiens
cgcgtcagcatcccaggcaggtgtcctgctctgggagtgctccgtaggcctggccctggcacctacctgctccttccaggcaatgggagtggagggtgcgaaggaggtccagtgaaagagagctgtgcccaggaagggctcgcactatctgggggcgcggggctgtgggtagggcgctgcttaggaagagagaggaggaggagcaggcctggagggaaatggagggaggccagccttagccccagtgctgggaaattaggagtcaagcgacaaacctcgttagcgaggagcgcgccggctgcagg

SEQ ID NO: 524515 - DNA, 100 bp, Homo sapiens
cttcctgctctgccagtggtcttggtgaggagggtcttggtgatggggcagaagcaggaagcagccattttgttaaagcaggaagggcataagcaggaag

SEQ ID NO: 524516 - DNA, 756 bp, Homo sapiens
ggagtgcggtggtgcaatctcagctcactgcaatctccacctcctgggttcaagaggttctcctgcctcagcctcctgagtagccggggagctacaagcatgcaccaccacacccagctaatttttttttttttttttggaagaggagtctcgctctgtcgcccaggcttgattgcagtgggcgcagatctcggctcactgcaacgctctgtctccggggttcatgccattctcctgcttcagcctcccgagtagtcccaggagtagctgggactacgggtgcccaccaccacacccagctaattttttggtattttagtaaagatggggttgtccaccatgttatccaggatggtttggatctcctgacctcgtgatccgccccgccttggcctcccaaaagtgctgggattataggcgtgagccaccgcccgggcaaattttggtattttaagtagacgatggggttccaccgtgttggccaggatgggtctcaatctgaccttgtgatctgcccacctcggccccccaaagtgctaggattacgggcgtgagccaccattcttagccttaaggccatattccttaaatatacaagggtagattggttatgaaaatggttgggggctctaataacctaccttttaggaatgagaaaattgcgtgggctaagggaagttcaagtatgaatcaagattgaaccattcaaatgtgggtggaatctgaatatttcaaaggaggggaactttctgaaaa

SEQ ID NO: 524517 - DNA, 100 bp, Homo sapiens
  misc_feature (56)..(57): n is a, c, g, or t
gggaaacacggagagttgcttctgccttgtttggatgctactaatatttgggtttnncctctctctgctgcctgagacttgaccgagccgcagtacccag

SEQ ID NO: 524518 - DNA, 310 bp, Homo sapiens
gttgtcccactttaagaaatcatcggtggggcctggtggctcatgcctggaatcccagtatttgtgggggccaaggtgggccaatcacttgaggccaggagttcaagaccagcctggccaacatggtaaaacctcgtctctaccaaaaatacaaaaattagccagacgtggtggcacgtgcctctaatcccagctactcaggagggtgaggcgggagaatcgcttgaatctgggagggggaggttgcagtgagctgagattaagccactgcactctagcttgggtgacagagtgagacttcaccaaataa

SEQ ID NO: 524519 - DNA, 704 bp, Homo sapiens
caattcctcgtgtctatcctcctacttcaatgtgcaccaaacctccccaaaaatttgttatatcctccaacattataaaacgctgcccataattaatatcggcggacccaaaattatcgaagaatccacaccgctgcgttgttacgccccctaattactataagaccacgttgctctctataatgaattattagatactacccaccgcccaattttttataaaaaacagagtgttactataaagattttaatcagcaccccctgtacgccctctctctctctttgtataaatatatacatacaccgtttgcacatgctttattataatcacacgcggacgacaatataatatattcctgtatgcattgatcaataacaacagagttcttctgttacacccccgcacccacgctgatgtaacaattcctccgtcacgtagaacacccctctgcagtggtagaaaaatgttttccaaaccctctgtaaattattgtttctcacatactctatacccattctccctttttcgtgtagggctcccccacaccaccactatttttccccaagtgtgtgtaccgctcaatatatgttttgcctccacttttcacgcccattacccccatatatatgtgagcagaacacacccttatatatatgcaaaaatatcagtactcttcgcaccacatcaatgatacaagacaaat

SEQ ID NO: 524520 - DNA, 523 bp, Homo sapiens
  misc_feature (12)..(12): n is a, c, g, or t
  misc_feature (38)..(38): n is a, c, g, or t
  misc_feature (78)..(78): n is a, c, g, or t
  misc_feature (92)..(92): n is a, c, g, or t
  misc_feature (102)..(102): n is a, c, g, or t
  misc_feature (472)..(472): n is a, c, g, or t
  misc_feature (484)..(484): n is a, c, g, or t
  misc_feature (490)..(490): n is a, c, g, or t
  misc_feature (501)..(501): n is a, c, g, or t
  misc_feature (517)..(517): n is a, c, g, or t
ccacatcggtancatcagatagggctttccatgttganttcattagacccagtcacgttcctgtgactcttgtcaccntggatgccatggcngcagcaaatnagataatgtttccccagatccagtctgagctactccaaccatatccaaatccactgagagcaactggccagccctgagcttgaatagcagtgggttcagtaaagttctgccttgcaatcacatccatgacattcgcaggaaagtttgcttcataaaaattcagaacaggttttggacagttgtgacctctaactgtaatttccttgcttcttctgtatgtatctacctcttgtgcggtgcgccttgccaaatcagggtgttcttgataaaaattcttctcaaatttgggcagctcatcaagattccacttctttttaactagtttctccccaggatttccaaacttctttccagagaggggtcctgttcnactccctcccanatccgngttgcaccaanccctcgattcccggcngcggtc

SEQ ID NO: 524521 - DNA, 176 bp, Homo sapiens
tctagcggatgcttataaatagccgacggggcgtgcagaggagttgtctttaggttctccgagcggaaaactcggctccgctcatcttgccttgaaagccagcggggggaaatgcgtgtcctcagttagcattagtccgcgtgtttcttgccgatggagcgcgctggggattattt

SEQ ID NO: 524522 - DNA, 672 bp, Homo sapiens
  misc_feature (482)..(482): n is a, c, g, or t
caacattgatgccacctgtaaaggaggctcaccttgaaaggattatgtgactccctagccataggtgcagaacagagaaacggttgcattctcattagacatttgagtacactctccacaggaggcaagcaccgatgaattgagctctaggagcacagggcctactgtaatacaatgaccgtctggagatccctaaacaaggtcctggtggactacatctttgaacgttgatattccagccgctcctgagatgcttgttctgccagacggaccgcacccaggctatgattacagctcaatccatgaggcagatggtcactcatccatcgagacattggcttggatgatgctgctccacagattctcccagaaacctggcagtgctcacccttctcagatccgtgcatccgtaagtgtcagctcacaggcgcaatagtcaaatgcaatgttgagcagctcagaaccatctacatgtacagtgngtttctacagtgcccagctacatgtagcactcaagagtaccgtcactgatgtcactctctcacacattatctgaaagacgcccgttacatgtaactgccactcaagtatttatgcgtcacgactgcttgtatttgcaatacagcttacgttttcaagtgagccgtcaatggaccacttgcgctttggtct

SEQ ID NO: 524523 - DNA, 181 bp, Homo sapiens
tatctgggagatggagatggagagcttgtcagggggaggtggttcctactgaatgaagaagcctaaggacgcaggcctacaggaagagcttgaggatacggggagcagggtctggaggctgcccgaggagggccattgggtgatcttgttttccaacttttgttgcccaaggtgactacag

SEQ ID NO: 524524 - DNA, 708 bp, Homo sapiens
attctagaggccgaggcgggccgacatgtatatggtgtgcattatccaagaaaggaagtttgtcgctgatggatcttcaaagctgaactgaatgatacttactcgggagctggctgaagatggatactctggagttgaggggtgcgagttacagcaaccagtgacatgaaatcattatcttagccaccagaaaccacatgaatgttcttgcgtgagaagggccggccggattcgggaactgactgctgtagttccagaagaggttggctttcctagcagggcagttgtacaggcttttattgctagaagaaaggtggccacttaagcgtctgtgattgcctatttgccctagtgcaagaggtctctggcgtgacaaaacgtcctaagcgaggggctatgcttgatgccggagaggcctgcttaatgggttgtgccatggcggtctccatcatgagagaatggggccccaaggcgtgccagaacgtttgtgccggtctgggaaaactcccgaagggacagcagggcttaaaattcccatgacaggttcggtggactgggcctgtattgattccacagtgggaggaacctttgtttaactaatctaacgtttgaccacttgcattggtgcgccccgtgttgctccagaacaagagccggtgccggggcatccagggttggacggatcttggctgggcccttgtggacgca

SEQ ID NO: 524525 - DNA, 964 bp, Homo sapiens
tgaccaccgaggcactaccagagatgttatccacaccaggtcgaactgtgtggatattagcttaacatctacatggggtgagattgacttttgcaaacaaaagggaaaagcatgcactagaaaaacagtacaagtaatgaccacaaaaacatcgctactgactgaaatccagctagctaaacagaatcctcagcatcactgacaggaagagcactgaaacactaggaaagaagttctggctgcatttcatctgagggcaaatccccaggcttaggcttatgacattggattcagcggttggagcgtctatacacctcttgtgtgatccttgataccagcaaactggttccaaatcccaggagttatcctcactccaccatggactcactgtagttgtagcacatattagtattcccagtagttaaatgctacctgtgcagctgacatcactggactagatctgggaatagatgaaataatgttgacaacaacaacttaagcaggtagccttctggtatcagcatgctgcaaggccttgcacgcaatccagagtgtgtccacgtcccatctactgtatcaacggccagagtgtggctaccatgctcttacggcacaggggtacacccaatacacggagaccaagaggacccaacagcgtaacacactaacccctaatactgctaatgcaccgaaaacatgtaacatctggcttcccccagacacaggctcacacacaactgcagaacgacacaagtgtacctgcgacaaaaccccctatcaccaggcgtgaggaccaaaaccatagacacaacaaataaacagcaagaaaaaatccaacacgcaaaaacgataaagaccacactgcccgacaacacatgagcgccacaagacccaaaaacatcccagccaaagacaacaggacacgaaacgcagcaacacaccgcaaactcagacacacactaaa

SEQ ID NO: 524526 - DNA, 873 bp, Homo sapiens
ggggagtggcgtgctgggcgtgcagcggactgcgtgtacggcgctgttggatcccaggcgggttcagctgatgagtaggtgacgctgcctgtaggccgcgaatagttatccggcgtgtttggatctgtggatgaggaagaggatcctgcggcgggaaggattgtactgaattggttcccatctgagacagacgcaatacgcgaggtggcaggacaagtctggtcctcggtgccagatgatcccagtcacaattgatcaccgggtattgaggtgctgggaagatagacacttctgaactatgattcctgacagagcggacctagtaaacagagtagggggtcatttgaaagtgaatctggggaagtgaagtgcggctggggaaatcactatagctgtctagcgcaaggtggagagctctatgaagagtggctggaatttatgaaacggttgcctcgtgctgtacagtgaagggacaatggtcttaagagcgtatgtgagaatatgagtgccgaaagaagggggaaagtcgagtgagcatagtggttaagaggactcactgggattacgcagatccgtgggtgtagtgactttctatgtaaaggggttgactgcctgaagttaggagagttgataattatctttgatgggcatcataaactattaggtggaagtcaaaaatatggatttaagaacattttaatcaggacagcagctaacccctgatgggcgcttattcgaatggaacgctacctaaggccaaggtaggctttagcaggagtattcacttctccatttatacacatgtgtgactgggttccagaaacgaacgattgttgacgacattcaagaagggacaatttaaatccatacatg

SEQ ID NO: 524527 - DNA, 923 bp, Homo sapiens
gtgcaccagcccagtcagattaacatccaaaggactgaaccctgaacagagttaagttaccttttaagcatttgtggggccgcgggggtggggggaatctgtgcagggggaagcatattacagaagcaagaaagacagttattcaattaactgagacatgcattacatcatttcttacttttcaaggaaaatcatgttttacgacttgagtttatctgtctagttaccttgcagctgcacagctagagaaacagggtatttacaatgcctgggaaaggaggagagataaggctcactagccacagaaaaacaggcagttaatttttaaaggactccagctctttctctttctcacggggaatggattttcttacatgcaactgaatttctgcttacacatttttaaatttcttttaattgcttttccaatgcaatagcatgaattattattctgttgacctattgccttactatgagctgagggtagttcaatatgctcactctttttttttttttctctggagatgaagtttggctctgtccaccaggcggagtgccccgggggaacgaaaagcaccaaacacctcagaaaaccacaaagacagccagtatgaaggaggtcaacacacacacacaccgaacgaagacaggacacccgacagccccacgaacccacagaacgaaggaggagacaaatcgacccaacacgacacaacaatgaagacaaacgaaggagaaagcgacagccaaaacgaacgacacacacgaacacaaacaggaaggtgaaaacatgaaacaacaagaacacacgtaagagaggaaaaacacacaccaagacaggagccaaccgaggaagaaagacatacaagaaaacaacaggaacaaagcgcagacaaccaaagagggaaaaggaaaaaagaaga

SEQ ID NO: 524528 - DNA, 938 bp, Homo sapiens
  misc_feature (2)..(2): n is a, c, g, or t
  misc_feature (108)..(108): n is a, c, g, or t
  misc_feature (112)..(112): n is a, c, g, or t
  misc_feature (116)..(116): n is a, c, g, or t
  misc_feature (163)..(163): n is a, c, g, or t
  misc_feature (172)..(172): n is a, c, g, or t
  misc_feature (182)..(183): n is a, c, g, or t
  misc_feature (190)..(190): n is a, c, g, or t
  misc_feature (333)..(333): n is a, c, g, or t
  misc_feature (352)..(352): n is a, c, g, or t
  misc_feature (354)..(354): n is a, c, g, or t
  misc_feature (356)..(356): n is a, c, g, or t
  misc_feature (369)..(370): n is a, c, g, or t
  misc_feature (378)..(378): n is a, c, g, or t
  misc_feature (401)..(401): n is a, c, g, or t
  misc_feature (409)..(409): n is a, c, g, or t
  misc_feature (412)..(412): n is a, c, g, or t
  misc_feature (420)..(420): n is a, c, g, or t
  misc_feature (429)..(429): n is a, c, g, or t
  misc_feature (451)..(451): n is a, c, g, or t
  misc_feature (457)..(457): n is a, c, g, or t
  misc_feature (469)..(469): n is a, c, g, or t
  misc_feature (526)..(526): n is a, c, g, or t
  misc_feature (871)..(871): n is a, c, g, or t
  misc_feature (916)..(916): n is a, c, g, or t
gnaactacgtgtttagcagcagagctgaataattatgaatataaacaattactattgggagaaaatacattacactcattgcttggaaccatgaataatacttatatntgtncganatatagaaaaataaaataggttaccataataaggatataggccattnttttttttnattttttaannccttttntttttccttaccaactggggtagttaggggccctgataatagcttttttattttcttggccccccagccacttacttttgtgttccttcttgcattatctgttcccgatcctagtccagttttcccattcgttttactaagcnagccaaattttttataccncncngggtaaaatcccnncccatgcncctttgtttttggatggccatcnggggccanatncccccacnttaaccccncccccctttgccaccccctccncccgcnaccccccttgcngcgtttcccgccatatgccccccgggttcgttctcccttccccccatcctctgaccngtgcctttgggtctccggcccttgtcccgggggtccctccggctccgcctttccggaggcgggagcggggccactaggctgaggtctggccctgttctcctcatctgccaaagcctcacagtactgcgctggccagtccttggggtcttgattatggaccttggccacaaacttaagaactttcatcttgctggtttccaggttggttcgcgggccccactggaattcgtagtcgacggggtcggtgtggggtatccgccggtattccaggtaacgctgtcgcacaaagtcctcagtaatgagtttctttggatctccgaaaattaaatgcttcttgggtggggnagacccctaagcgccgcagaaagtcccaggcttcagtttccttgntgggtgttgcccttcataaaga

SEQ ID NO: 524529 - DNA, 539 bp, Homo sapiens
atgggacccaggctgaggcaggagaatctcttgaacccaggaggtggaggttgcagtgagccgagatcacgccactgcactccagcttgggcgacagagtgagactccatctcaaaaaaaaaaataaatctggtgtggtggcatgcacctgtagtcccagctaactcaagaggctgaggtgggaggatggcttgagcctgggaggtggaggttgcagtgagctgagatcatgccactgcactcagcctgggtgacagagcgagactccacctcaaaaaaaaaaaaaaaaagaaaacctctttaatcagtacttggctagtgcagaagtaacgggggacacagagcctacctttaaaagcagcatggggaaaatattagccaaagcaacggtgccgggcccggggcttagggcaacctcagagtatccctatcagagggtactacggttatcccattttacagagggggaaagtgagggcccaggtctagggtcacctagtggtgaacagggcacaaagattcaagccatatttagagaa

SEQ ID NO: 524530 - DNA, 764 bp, Homo sapiens
gaacaacacccgtccctcactacaggatcttcactgtgtgactaatagtaaacaaacctttgaaagttagcattgcaaagagtcccattttgtgtcgtaccacactgtgcaaaggagaaattgttgatctctccttccattctctactctcctctcttatgtgacagaatagcaaagtgtttagataattacagatatatgctaagtatgaaccagctgtcgaataagtagtgttggtccatcactgtgtggctaccgtgcacatgtactggctctgtactccagcggcttggatcagctgtgaaccctcgacatgtggggactttcgacagtgtgatctctccaccctgtcttggaaagtccttcataaagccggtcttccttaggcctgggctgtgaggaagtcctggtgaaactttgcggttcaacattgccaatagtgtcctgaatgaccttttcattactcgtctttcgtttatctgtgttctgtgtccttcattccctccttttgttcttcctatcctgcctaatcttttcttcttgtcctttcttctttcttgtaattcgttcctgttcttcctattttcttggtacaagtggaacaaaaaccaagcacatagttttaagctacacctttctgcacctgatgtaaaatgacattaatcactatttaacttctaaaattatttctgaatacagtggagataggctggtttcatgaggaagtgattggtttagtcttcctttaattcttgaaagtggcc

SEQ ID NO: 524531 - DNA, 120 bp, Homo sapiens
cgcgaagctagtcatgtggggtgaaatgcatatttttccaccctttgctggatcactggccttctcttcaaaacgcgtataatagccagtgaagcacacatcactatggagtctctataa

SEQ ID NO: 524532 - DNA, 113 bp, Homo sapiens
ccattggagatgtagcgaagaacatgggagagatgtaggaataacactgctagcagatagacaagcagccttatgaaaagaaggctgcgaagataaaggaaaaatatgaaaag

SEQ ID NO: 524533 - DNA, 302 bp, Homo sapiens
  misc_feature (297)..(297): n is a, c, g, or t
tcattgatttcttccctgatggcactatttttttcccatggagggattgggatttgatttgtttttgtttttccaaggccctaagttgtatcattaagtaaattcatttgctgtctttaacttcttactggaggcaccaatagctgtaaactgcccacttaagaccaccgttcataatttttccatggattttggaatgttgtattttcatttttctctaggactttttaaaaaaaattccttcctggtctcaagttattccgttcatccgtccaagcaatggtggggtgcagtaancatga

SEQ ID NO: 524534 - DNA, 365 bp, Homo sapiens
  misc_feature (33)..(33): n is a, c, g, or t
  misc_feature (147)..(147): n is a, c, g, or t
  misc_feature (201)..(201): n is a, c, g, or t
  misc_feature (206)..(206): n is a, c, g, or t
  misc_feature (225)..(225): n is a, c, g, or t
  misc_feature (241)..(241): n is a, c, g, or t
  misc_feature (245)..(245): n is a, c, g, or t
  misc_feature (248)..(248): n is a, c, g, or t
  misc_feature (251)..(251): n is a, c, g, or t
  misc_feature (255)..(255): n is a, c, g, or t
  misc_feature (258)..(258): n is a, c, g, or t
  misc_feature (264)..(265): n is a, c, g, or t
  misc_feature (267)..(267): n is a, c, g, or t
  misc_feature (273)..(273): n is a, c, g, or t
  misc_feature (279)..(279): n is a, c, g, or t
  misc_feature (281)..(281): n is a, c, g, or t
  misc_feature (283)..(283): n is a, c, g, or t
  misc_feature (289)..(289): n is a, c, g, or t
  misc_feature (346)..(346): n is a, c, g, or t
  misc_feature (354)..(354): n is a, c, g, or t
ggggatttaggatgcggtaaggaaaaaaaggcnccacatttaacctttcagacacaaatggtggaagacataaaataactagactgaaaatctggagccacaaggagatgaactttgccaggataagaaaaaaaattactatttaanataacaaacagtcaacactgattacgatcaactctgcccaagaatttgattacnttaanggaaagagggtagtttcantgctctggctgttganaggnggnggntggnggncacggnncngggggngcaccncngngtatgnggggggttcgggccagggcaccataatttaactattccagtggaaggagggcttggnaaccctcnctggggggtaa

SEQ ID NO: 524535 - DNA, 790 bp, Homo sapiens
gggtcgggtggccgctgctcctggatccgtgggacattgcgggagattcaccccttcagcgtcgctagccccagtctcagctcttactgcgggcgctccgagcggggtccatcctgtcaggcactatgcggcgcgaaacatctccttcgccaaaagcaggcgccgccatccggcgcatcgtgtcggtcataggcgcaaatgcgtggcagcgctccagtttgatgagggactaaacacccaattctaaatgcccttggaactgcaaggcaggagaccagactggtttggacggtggcccagcatttgggtgaaagcacaagtaaggactattgctatggatggtacagaaaggcttggcatagaggccagacacgtactggattctggtgcaccaatcaaaattcctgtcgggtcctggaggactttgggcagaatcatgagtgtcattggagaacctattgatgacaagaggtcccatcaaaaccaaacaatttgctcccattcatgctgaggctccagagttcatggaaatgcgtgttgcgcaggaaacttctggtgactgtatcacggttggtacgatcctgatagctcccttatgccaagggttggcaacactgggggcttgtgggggtgctggcagcttggcaaagactggtctggctcatggggttcactcaccactggttgccaagcccatggcggcggacctgtgtttgccgggttgcgccacggaccgcgcacggccacctttttccctgatggcgaagcggggttctcacctaacaatgca

SEQ ID NO: 524536 - DNA, 1135 bp, Homo sapiens
  misc_feature (465)..(465): n is a, c, g, or t
ggtcagtagataagtgcaccagatcctacgaggtgagtaatactatctggcgtggcgcttggatcctgctggcaagaccacatcttctgaagcatgcttgaattcgtgcacgacgagtcacgtccggcaatcacgactctacacgggggctttcgagagcactcgaacacacgtgctacacatcgacaacggtgtgttagaacgtgcagatgtagtggggacgaattcgggtggatccagatgtgagagacattcaggagcacagtacttggtagacgaattgtaattgtggacacagagtagcgcggattatttcatgtattgatgagtgctagaatcagaccagctgtcagtgacgagtaacacaccacgtagtttgtacaggagtggacgggtgtccacggtaatgcctaggcggaactctcactggagagcatagaagagaggactatagtttgatggtgncctaatgctgccgtctatctccttttggtcataaagatcgagactagggggagttttccggctggcaatctagggcgacgtcacccggtggactcgtgcgttgtaccagatttgtcttatgcacattgggaggcttgaaatccgtagtcgaactagcgcgaattctccgtccgcaacaccgtaagtgcgtgtgcacgaattcaccagttctttttgaccttcgatgccttcgtcagtcaagggaaaagaaaggggcctgtgtcaaggagaatgggacaatagaatccatgcgggctctgtggcagacaaacattgatcataattgctatatagggaaattgacacattattgaactcgttaggaatcggaaaattgcggatgagttgccaaagcgaaatgcctgggcccggtgggagcgccgcggataattttgcgagaggttccctttttggaaaacagaggctatcgtaaaaattttctgcatggccctattccttggaagcggctataaaagttgtggtcatatatttcccaaatttcggtaaggttggttaaatcaagcggcgtccactccaccgccaatattgtattttggatcaatgcaacgcagggggcggaaaaccaaaagccatcaggggattttttcacgtacacacttgaacaattcgg

SEQ ID NO: 524537 - DNA, 243 bp, Homo sapiens
ggtgcttacggatcttaccgactagccgactggtgtctcgcattacggacactggctctgctattgtccaccatgtcgtccctccgcagctctacctgcgatggtgctgccaggtgcagacttcgggctgaaggactcctggccctggggagtttgcgcctcctgtctctggcaggcttgccgctgttcaccaccaccgtgctgtcgggctagtcggggacccttgtttggggctagtcgagg

SEQ ID NO: 524538 - DNA, 365 bp, Homo sapiens
cgtcagcaagatagtcgtgtacccaggtcatacatgggaagaacaaatacaactcctctctggaggaaagcagcgaccacccgatattcaaggcattactgaaggccagcaaaacaggaaaacaggtaaaggattctcaggcaactcacaggacataaacggtacatcttgattacgaaataatctgtgtaatacgcgttagaaaatagcctgacgacgtaataagtgctaagtgaacgttagctatgatgatgctggtgacaacaatgatgatttcaagtctttttaattctctcctattaattgatttctcttgctttgttaaaatcacaccagtttaattaacacttgccgaagcttgatca

SEQ ID NO: 524539 - DNA, 132 bp, Homo sapiens
ctgtccactatgcccacctactgagcctctgtccatctgccttagcatgaagccaaagtgctaccagtggacccacaggcctcgatacagaatatgacctacatcgatcactgccacgcacaccatctcatc

SEQ ID NO: 524540 - DNA, 141 bp, Homo sapiens
tcgttagggagttataaacacaagtactttgtgggcttatgggaaggagagaagggataaggagaatgatagagaaggatacacagagttcttttcttttttctgtctcccttttttaaaaaaatagagaaagggctcact

SEQ ID NO: 524541 - DNA, 112 bp, Homo sapiens
tccgcagcgttaacgtgacaggacagaagtgtgaagcctgttgcgcttcccggtccaccagaaggcgcgcgatgtgtgtatcatcgagaaaggagcagaacactgtggacat

SEQ ID NO: 524542 - DNA, 103 bp, Homo sapiens
  misc_feature (14)..(14): n is a, c, g, or t
aacactgtaggcancttgcacagtgacctggagtacacggtgacctcacatgaaggagggcctatgttctgaccttgcagtggaaggaaccatcggagacttc

SEQ ID NO: 524543 - DNA, 180 bp, Homo sapiens
  misc_feature (11)..(11): n is a, c, g, or t
  misc_feature (120)..(120): n is a, c, g, or t
  misc_feature (153)..(153): n is a, c, g, or t
  misc_feature (176)..(176): n is a, c, g, or t
ccttccctggncccccggaggccgggagggagcagggtctccctcagggttgcaggggcaggttgccagaagccccaggatgggcctccccggagggggagggtgggggggagttctgtnccttggtgcccgaggtggggcagccccttctcnttttatacaataaacattctccnccta

SEQ ID NO: 524544 - DNA, 200 bp, Homo sapiens
agagggtggttcaggagataaagctacttctagcatacttaaatagatctctcaagctgtaataagtatagatataactaaactggaaagataaaaagaagcttttacagatatcctacatacttacaaggcacagttccaacagttaccatattccaaagaatataccattgctttctgtagaccagacagtatccttt

SEQ ID NO: 524545 - DNA, 1401 bp, Homo sapiens
ttctatctattcctgtgctgtcctggcaggaccctcagtgacttctgtggggcagtggtgcgaatcatgcatggcctagatgaccccatgcctagaaaaatgtgcacgtgctgtcgggctgtgtgtgctggtgctgcactgtgcctgagtgaacgcagatagctgtcccctgcgggcctgcgagccctggtcaccacgggcgcgaagactggacacagttgacgtccagtgccctgcgcctagctacccctctcctctcgtgatactcacactgatcttgaacacgcacagcctgccccccaccaccccccgccctatacccacgctcccaacgtccacacgctaccagctctccctctgccacgcaccacccagacgccgccccgcccgcgcacggcccccctcggcaaccctcggccccgacaactcacaaaccgctgcgcctgcgcctccactcgctcgacacccacctgcccaccacacgacacgcgcctcgacacaccgaacccgcgccacgcgccactcggcagcagccgaccgcacaccacacacctacaccacaaccactgcacccgacccgccacaccgcccacccatccgcacaccccgccccaccccaacgctcaaccccaccaacaccaccccactcccccaacactccacacccgcacctgcctccacctggcaaccgtggcccaccacacccagccacgccccccccccccccacccaccccccgccagacagccaccgccacccccgccccccctccggcccgcgcaccgcgcagctcgacccacccggcccagcgcacccaccccacacgccccccctcccacttcccgctcaggacccatttcccaagtgaccggccttcccgtaactcaaaggcacctcggcccccctacctacccccaaccaccgcacctccccgtctccctccacctcgacttgcccatcccaagcacagacggcctacaccaccatcctccccacactctccctcctgcccccacgcgacacgcgccccacaccccactccgccccgcaccaccacagcaccccgcccgatccgcacccacccaccgaagcccccaccacccccccacacccccccacaaggcaactccgggcccgctctctccacccccacaccgcgaccgggggtaaacccgccagccaaccccgaacgcgaaacgcgcacaccgcggccagcccgcgcccccctcgcctccccaccggagccgcaccgcgcacccccgccacccccacccccaccccccgccccagcgccaaccgaacctcgccaccccacctacgccgtacacaacccggcacccaccgcacctacacgacagcgtcacacaacgcacccacacccacccccccccgcccccgccc

SEQ ID NO: 524546 - DNA, 184 bp, Homo sapiens
cagtataataatttttaaataaaggtatgtacatagtgctatgcaccacttaatagattacaatagagtataaacataacttttaacaattaaaaaacaatattttttttgggtctttttttagggccacacccattgcatatggaaattcccaggctaggagtctaataggagctgttgttgc

SEQ ID NO: 524547 - DNA, 455 bp, Homo sapiens
gtgttcagtttatctcctttcattgggagatttttttcattagatttattagggaagtatagtattgtgctttagggttgcttaatttgtttttgttttcgtaattaatagacaatgtcaggagctgctaaacctgggtttttgtatagcaggtgaatagaattagaaccatggccaggcgcagtgtcttgcgcctgtaatcccagcacgttgggagcctgaggcagatggactgcttgaatcaaggagttcgagatcagcctgggcacatggcgaaaccccaactctacaaaaaaatgcaaagagtaggcaggggtggtggcacatgcctgtagtcccatctacttaggaagctgaggcagaaggatcatttgagactagaatatggaggctgcagttagcttaggtaaagccgccattgcactctggcctgatggcagtttatccctgtctca

SEQ ID NO: 524548 - DNA, 126 bp, Homo sapiens
  misc_feature (76)..(76): n is a, c, g, or t
acccccaaattagcatatgccagcctgccaaggtaaatagcaaaaactttagactgctcaatctgtaattaaccanaagattccttctaggagatctttaaagagaaaaaaataacgcgggcgtac

SEQ ID NO: 524549 - DNA, 335 bp, Homo sapiens
ggcagtcaatcaaaccagacacttctgatcaccaggtgtttttaccacagggagcaggaagattggaagcttccttaatgggctgaaggacttccacctgtgacggccaaggggtgggtgggcgctaaagcccttaccttcaatgggcaagaatgtcccccacattagggaacaggtttaattccacctggagatgacagacttaagctttgggccttaggagaggtgacaggcccttaggatcttctacttaccctggctggggtgactgccccgctttacaacaacttgttcaaagatagaacgtggtgggtagccaagagccggcttggctt

SEQ ID NO: 524550 - DNA, 249 bp, Homo sapiens
atgactggctttcgattaagacaggcagacgagaataaagaaagaaagaatgaaaatgagtgaacaaaacctccgagaaatcagggattatataaagagaccaaatctcacgactgactggggatacctgtaaaatgatgtcggagacatggaaccacagttggagaaacatacttcagtgatatcatcaacagagaacttccccaagcctagtcaagacaggccacagccacggttcaaccgcacggt

SEQ ID NO: 524551 - DNA, 1501 bp, Homo sapiens
tttattagtatgttagtacaaataaagagaaaaagaccctgcactttcatcaagcagggcaaaaaaaagaaaagaaaaaaaaaaagaaaaaaaaaaaaggggcggggcccgtctgcccgtagcattatctctcactgaagaggtcacatactaggtgcaccgactcccgcacatattaaaaaggcatagaagcaagaggcgctcctctacaatgggagaacgctcttctatatatgataatacctacacacgcaccgctggcccagcgccgctatatcacaaccacatcgagacaagtagtgtgagaaaaagaagcgaaaaaacccagggagagacctctctctacgagcaaccacaaccaacgcacacctctctcatacttcatctctctgcgctgcgccagctgaagagaagcacacacacacacaagagagcacacaccacaacaccctccacactcaatcaacaaccaatctttataatatatacacaccctaactcccatgcaacccacacacaacaatcacaacacacatctgctaaccagacgagcgcagccaacataatagacagcggtgtgatgatcagcaaaaacaacgccagctaggcggcgcactaatacgagacccagacgcgagcccgagacgccacgacgagaaaacgacgcccatatcactgctcatcccacacaaatacaacgaggagaagaaaaaacaaagacaatgacagctcctcactactctgatagaagacaaacaaaaatgactggctatctataaatccgacgccgcgcacgcagcagacgccactactcaacacatcatgaacggctcgaccaatcaataacaccacccaacactggcagcaacctcgcgacgtcaatcatactgctacactcgacaaggcaacgctagcactcacacgaaacagcgacacgcacagccacagagacagcgaaagccacactcgagccgacaccaagacgcgtcacatcacacacagcacacgactacacacacgagagaacgacagccgcacaacaacacacaacacaaacacacccacacacacacaagcatcgaaccaacagcacacaacacaagaaagcgataagaaaagaaacgaagagcatgcggacagccacacctgcatgacggcggacacagggaaccataatgaccagcaacacgacagagaagcagagatgcaacgtgcggagactagccgatgacgcacgcacagcaagactcacgcaaaggatgatacgcaagaggaagaaagagagcacgacgagacgagcatcacagatgtgtcagagcgcgcgacacgcgagctcgagagtgacggtcagctgtcgcgagcgccagcgaacgagagaaacgaaggaaaaagcggcgacgagggagggggcggcagacagcgcacacggacagaccgagacggagagcacggacgagacagtgagctcggcaggcggcctgcaggtcaggaggggcgaggg

SEQ ID NO: 524552 - DNA, 301 bp, Homo sapiens
gcgcacacccagcccgcctaattttgtatttttagtacagatgaggtttctcaagtgttggtcaggctggtctcgaactcccaacctcaggtgatccacccgcctcatcctcccaaagtgctgggattataggcttgagccaccgtgttcggcctcattatattgtcattgtggttaaacacatgcttccttccctatcattcccgaagggaggcatgtttatctccattttgttgatgtgcaaaccgagacctggtaagggaagccccgtgcgccagggtctgcatgcttctctcttacc

SEQ ID NO: 524553 - DNA, 113 bp, Homo sapiens
  misc_feature (89)..(89): n is a, c, g, or t
  misc_feature (98)..(98): n is a, c, g, or t
cctctctaaatccgtgttactaatttgttacgttaaacagctataatctggtattactcaactaataattcatgtacatttaaacatcntggtgaaantttcaaagggatgac

SEQ ID NO: 524554 - DNA, 368 bp, Homo sapiens
ggacgcgtgggtcgacccacgcgtccgctgacactaaaagtgagagaatggagctgggcgcagtggttcacgcctgtaatccctgcactttgggaggccgaggcaggcagatcacctgaggtcaggagttccagaccggctgggcaacatggtgaaaccctgtctctactaaaaatatgaaaaaaagttagccaggcgtccgcgtgcctgtaattccagctactcaggagactgaggcaggagaatcgcttgaacctgggaggcagaggttgcagtgagccgagatcacgccactgcactccagcctgggcgataagagtgaaactctgtctcaaaataaataaataaataaataaataaataatctt

SEQ ID NO: 524555 - DNA, 364 bp, Homo sapiens
tccctccacagcagcacaagccatgaatcttcagctcgttccttatccacgtctcacgctcagcatcgtcctcgaaagcatcgaagtggtcatcactgtcctcttcctgcgcctcggccatcttacgggcggtgagaaggcatgcttcgtagtgatcaccggcaagaacatactgagagtagtcaccttgatcactttgcggccagcgaagggtcacagaaaacagtggttgggtatgttccgcggggatagctggttgagtcatgttattcaccattcaaatagttgagtcgagagagcagcgatcgcaatcgagagacaatgtcagtgcgccagcgcgctggtggaagggagggggatcctc

SEQ ID NO: 524556 - DNA, 480 bp, Homo sapiens
  misc_feature (128)..(128): n is a, c, g, or t
catggtggcagatgcctgtaatcccagctacttgagaggccaaggcaggagaattgcttgaacctgggaggcggaggttgcagtgagctgagatcgcactactgcactccagcctgggttgacagagntaagactccatctcaaaaaaaaaaaaaaaaggaaaaaaaaaaactttttgggcggctttgggccttgggaaaagtttttataaaccatttggtttgggggcggggccccaggttgggttagtgtgttgaccttgtggtcttgagtcgtgttcctaaggcaaatctcgggtcaatgtactagtgtctgggtttctcaacaattaaaaaaggcccgggggggacgaccggaagggtttttgaaaaaattctcagaagggaaagttccgaaggctcatcaagcaaggatctataaccgggaagttcaagggagagctgcgaatttcaatttacgcgcgctgtgggaaaaacagcg

SEQ ID NO: 524557 - DNA, 282 bp, Homo sapiens
ctcggtacccacactcctatagatcagtgatcataaattatccgcatatctatgaattttccaacaaattcctacttcctgattggattggtttttgccgctagatgttcaagtgccagcccagcttcttcagttccaaacaagcaattctgcagtcttttccaacaccactcagtctcagcaggttggaccatttgtccagggtgttcttggcacatcggtgacccagtgtgcaccttttttggttgccagttggtgttgcccttgtcacactccattcag

SEQ ID NO: 524558 - DNA, 786 bp, Homo sapiens
agtctaggtaagagtttgttccctgtggttgcggatgtggtcaattgcccacacccggaaacctagctgaggtaaagttgcgtcttggttgtagatgacgacaacttctccgcttcctcggtgatggcggcgtcctgtggagcggtatggcccgagaaaacctgtgtgaacttggccaacgaacagtgcaggaagctcagagtatcgatgaaatctacaaatacgacaatgaagacatgcagcaatgaaatcctggctggcgaagccctgtgactaagtgatcaccattactttaagtacttgcaaaatctcagcatttgtgctctgctgaagatgtgtgatgcattgccagatacgggagggaactttggtaagtgattgggtcttgatgctaggaaaggtggatggtgaaaccatgatcattatggacagtatatgcttttggctgtggagggcactgaaaaccgagtaaattgctcaggcctgtctgcatattgaagtaccactgttggtgcctatcatatgaaaattgccaaacagtgttgtgccgtcttgagaattgtgcctcgggtgggatcataagcaccctggggtaaggattgctgaggttctgggattgatgttatactccgatgcgccatcagcaggtcccaggaaccatttgtaccagtgtgatttggtccacaggacacatatcgccgggcagtgatcttggtgcttatgaataccaatggtaaacctctgttgaggcttctgtcaaatcctaaaaaacactcggtctgacat

SEQ ID NO: 524559 - DNA, 193 bp, Homo sapiens
tagtactgtcttgtttactagaaagactgtggcagtatcacagtgctttgtacaagtagcccttacattacttagtaatggccccaaagcacaagagtagtgatactggcaactcggatttgccaaggagaagacaaagtgtttcaacgtgaacaagatgaaacgttcttgcacttaactaaacagaacaaaa

SEQ ID NO: 524560 - DNA, 109 bp, Homo sapiens
caactgtcacagcgcgtcaactgcaaagcgcgttcaactgcaaagcgcgtcaactgcaaaggcgcgtcaactgcaaagacgcgtcaactgcaacagcgcgtcaactgca

SEQ ID NO: 524561 - DNA, 390 bp, Homo sapiens
atcaaagggtatgagtcactttttgacaatataaatgctgctgcaaagatgagaggtgaagtaaaaccgatacctgacctgcaggtctaaaatttgaatggaaattcatgcacaagtactggggacacatcaaagtgtggtggatggtttgactggagatgccacgttgaatcatgtgaatctagattaacattaaatagattgagcataattttacaaggatatttttaaaggtgtgatatatgagagactttgataaagagcctagattttgccagacttaatccagcttgacaagattgagaggcccatgccaacagtgtaatctaagagattagcctatcaaacttaccatccagttgcctgctacagaataactcttcttaactt

SEQ ID NO: 524562 - DNA, 177 bp, Homo sapiens
actccgtgccgtgtcgatgtggtatgcctggccagcctctcccctgtacccataattctgcctcttccataatccgtggttcagttgactttgtatataaagtaggggttttctttttttttatttttttttatttttttttttttttcttatttttttttttttttttcccgcgct

SEQ ID NO: 524563 - DNA, 802 bp, Homo sapiens
gcaaaacacatcctgggattccaaatggagggtcttaggcctgtccctgcccgaactgcgttagaggcaaccgaaacttgtgtaaagttccacactcctatacgggttcacactgtcaagtgttgcagcagggccgcgcaaacatccgttgtaagggacaaacaagtctcttcacgccccaatgtgccccgcgcgatcccgccccactatgtggcgacgtaagtgtccccagaaactagattcgcggaacattatcacacagcaatatctctaaattatcgaaatttcgcccaaacctccgtcaatatgaagaagaagaacatcttctcgcccccgaaaatattttgcgacaaatccccccacgtcctcgggtgaaatagccactcctccccctccgagactcggctaccaaagatggtccttttcaaaaacttgagatttcttcgatctgttttcttctccccccgcagtagacaatctacacagatctatgataactcgcctagacgtccccgcccccaaacagacaaaaattctatattatctctaggagcaaacccctctttctgtaatagatatctcacgcgtcatttataattctcataattgccggaacaaaagtttaacttatgtaaatgaaactattatagcacttgctaccactgaacaagaaattttacatcgcttttctggaactaacccattaaaattgagactcgagagaactcacccccccacatacgacaagtactaaaataattcaaacattaacccccctaatcttcttatcaatacaataaca

SEQ ID NO: 524564 - DNA, 155 bp, Homo sapiens
  misc_feature (46)..(46): n is a, c, g, or t
  misc_feature (130)..(130): n is a, c, g, or t
ctggagtggcatatactcctttaggaagaaaagtgacgctggcagncccctgttgatactcagtccccaaatgtgtgtccagttggcccaccggaatttatgtacaattgtgttaccaattttttggttncaaattcttaattgtttggctacat

SEQ ID NO: 524565 - DNA, 495 bp, Homo sapiens
cctctactggtgttgttaaaatatgtacagtggctgcgtgcaggtgtgtcagctgtatcctagcactttgggaggacaaggtaggtggatcgccagcctgggtgacatggtgaaccccgacctgattagtgttcaagacagcctggttcgagacctggtttgagaccagcttgggcaacatggtgaaactctatctctacaaattataaaaaaattagacaggtatggtggcacatgtctgcagtcccagctatttgggaggctgagatgggagaatcactttaacttgggggggttacgggtacaatgagctgtgattgtgcccctgcactccagcctgtgtgacagagtgacagcctaggtgactctgtgtcaaaaaacaaaaaacaagccaggtacagaaagacaaataccacatgatctcatttatatgtgcaatataaaaaaggtaaattcatagaggtagagagcctggcaaggtagagagcctggcaa

SEQ ID NO: 524566 - DNA, 162 bp, Homo sapiens
  misc_feature (45)..(45): n is a, c, g, or t
  misc_feature (52)..(52): n is a, c, g, or t
  misc_feature (77)..(77): n is a, c, g, or t
  misc_feature (157)..(157): n is a, c, g, or t
ctgccactgccacagtagctcaaccaagcagttgtgctgagaatngcacctngttgagagcctgctgtgtgccaggntttgtgctgagtgctgtacgtgtattagttcctttactgctgaccacattgtacccatttcacagagaaggagcagaganattaa

SEQ ID NO: 524567 - DNA, 818 bp, Homo sapiens
ggcttttatctcaggttgcccaatggataagtacattactttttaactctatgcctgattgaccaaggtaaagctgaaagagtctcatctgaactataacccaagtgggtaagccagtcccttggcactgcccaggaagaagatatggatgggaggactactccttcttgaatgcacgaggatacaagttatctgggagctcttttacgattgtggagaagataggagaacgtgacagaacgggaagacgagaaaaaaacagagaagaaagaccaggacaaagaagcataagagggacaagtagaagaaggaacaggacaaggaaccacgcaacggaaaacaaggatacgctgtcctcttttgactagtaggttcaaccaactcttctttaccatggaagggatttcagtaggaccaaaggcttttcccatgaaatagtaattatcttgataagaacctagcacattgttaccaagctccttaaatttgattccctcaaaaggaagaaaagtgtattctggacaatcctctgaagatttcccagagtccccccaaagaccagttgctatttctaaccagggagagaaaagccagagtctctttgtatatatagggttaggaggcaaagtaaaaatttctccttccccttttcccacaaacctgaagcagaaagtttctcctggagattcaaaccagtaaaaatcagccatataatcgaattagggctcccgggagaagtcttaattgcaacggggaagctctcactaatcaagcaggaaagaaaggctgagaataaaaatcacatacgggaatcaaag

SEQ ID NO: 524568 - DNA, 87 bp, Homo sapiens
gtggacacagccacatactactgtgcacacagacgggacgattacggcagctcctaccgttactggttcgaggcctggggccaagga

SEQ ID NO: 524569 - DNA, 182 bp, Homo sapiens
  misc_feature (65)..(65): n is a, c, g, or t
ctcgattcggtacccggaaagtagctgtactgtaaatggtatttaaaattttcatggttcaattnattgtggcaagtattatagaaaaataattgatttattcttgttttctcttttctttcttttttttttagactgtgtcttgccctgttgcccagtctggagtgcagtggtgtgatctc

SEQ ID NO: 524570 - DNA, 1068 bp, Homo sapiens
cttgaagcgtccgacgtgcccgtggttgagagctgattggtacatgtactcagcctctcgaggtaggtgacatacagagctatgcccacggtcggtgtgattgcagatccttctgatctgtgggataatgccagctactgtgtcgtgggtaacaacgtgattctagtgccctgaaacatcccctgtaacctgaggattaccaggatttgacttctataaggactcttcgagcggtatggttgcaggcaagcaaaacccggagagaggtaatgtagcgtaaggtagacaaaaggcagtgagaggcatggacttatactcagaggagtgtagtgaaatatgactaaatgtgggcatacgaaattacttgtacagggagggatatgggaaaatggcgtggaagcactgatctagaggaaacagtaataccagaggtattgtgtactgtgtgggagaattcttatgtctaccgtggtgcatactctggacaggagttttggactgttgcttgatttgaacaattcttatcttgagactccgagagctcaagagatcctcctcagtctcccaagtagctgagattacaggtgccaaacacatacctaagttatggcttttatttttaagattgtggcatatgtgtggcgggcttggtggtcacgcctgttatcccagcactttgggaggcaagtggggtggatcacgaggtcaggcgatccgggacagctggcaaatggtgaaacccgtctctactacaaataccaaaattgaggcgggtgtgggggctgggccgtggtccagctcacggggaggtgaaacaggaggtcactgaaaccggggatacggaggtgcgatggtaccagaaacacaggggtttgcctgggagaatgggaatctcacgaagaaattaatagatggtacaaaaaacataaaataaataaaaaaaaaacaaaagaggggggggttataagcgggcgagacaccttataagaaaagatgaaaaaaaacgcagagaaaaagcgatgagaatttgtggtacaaaaaaattattttttattgactaatatgagg

SEQ ID NO: 524571 - DNA, 460 bp, Homo sapiens
atacacatcttgctgccccacacccgcaaataaatagtgtagtggtgtgggcttttggagagtacagagttacagcttcagagtttacagggcttatatgtaagtgttatttttgggaaaatattttatatcagtggtttgggaatttgctgcaccaaaatatttcccagtgcccttccctcagcacagcccgctgcttctcttcccctgccagctaggtctgctttaggcattgttttcttccttcatttttgttagattgaatgaactataagaaattaccaatatttcatcatatttgacttataaaaacattttcatatggtttaacataattgttctttttttttttttgagacagagagtttcactctttcacccaggctggagtgcagtggcgcaatcttggctcactgcaacctctgcctcctgggttcaagtgattctcctgcctcagcct

SEQ ID NO: 524572 - DNA, 152 bp, Homo sapiens
actgatagccagcccagaactgaagcgctgcggcatggcgcgcgcctgccaccaggccgtcaagatacctcatgtacgccttcaacctgctcttctggaacttcctgctgctgctgctagtgtacctgctggaggccaccgtcgcctacgca

SEQ ID NO: 524573 - DNA, 166 bp, Homo sapiens
  misc_feature (1)..(1): n is a, c, g, or t
ncggggttgggggggaaggcccccccccttttttttatttgtggggggggggggccccccttttttttttggggggggtttggttcccaggccccccccccccccccttttttttttttttgggcccctttgggggggccccccccctttttggggggggggggga

SEQ ID NO: 524574 - DNA, 294 bp, Homo sapiens
gctcgacgaataaaattagaataacttagcagaacttccgaaatgacagaagttaaattttcagtgtccctaagggtcttgagcatttaacctcacctcacatatttccaaaggctttgattaaagtagttcaaggaccacagcttatggtgagcagatcagaggcctccagcatgctactatttaattcaatttcccttctgaaacactaggtactaaaaagtgccgggtgacatttagaaactacaaaactctgcagttcaattccatggactccttcaatctggcctgctt

SEQ ID NO: 524575 - DNA, 704 bp, Homo sapiens
ataaatcagtcttgacatgcatacagttgagcactctccccagagggcatcgcgtcacctgactactctcacacatctgggtcttgctccgagaatcctacttagattcaccttctctgcaactacaattggtgctctggatgaatcctagataataatgtatttgaatgaccaatctccaaaacctgattaggctatccctttgagacgtggagactcttgacagacagaggctttcaatcatgagctgtcgagaactgtccactcagtcagcattccacctctagattgtcgctggggggccttctttcatcatacagttcttaaagatgcagggtccatatcgtgccatggtctgatataaatctgctggtcgcgcacacactgttgcaataaatagactgccattaatgtttcttatctatatctgtatctatttatgtagatattggtatatggcagatttataaaaattgcattatgtgtttctgctaatagaggaatcatagccatttgagaattttttttaaattctgtagaaaaggcttatataagttttctttgctgaattggatggatgttctcctgtagtgtgatctgatatgccagttgtgttaaaacatttgcaacacattatgaagttattaaatttaagggacagaggtagtatagttagatatactttctcttaggaaacaataatg

SEQ ID NO: 524576 - DNA, 215 bp, Homo sapiens
atacagccaggatgatcagaaagcaccccggtcgatcaccgagggtaccagtcccggtcagacagcccccgggggtcccgagtcttcacggagtcagagaagaggccactcagcatccaagacagcttcggggaggtatccccagggggcccccggccccgggtccgcctgggctcggagatccgggactcgggggggcgtggcggatcatccaa

SEQ ID NO: 524577 - DNA, 260 bp, Homo sapiens
gaggatcccccagtttcctgccttcttgaaagccttttcctccctgtcgtcaccgaggtcgctcgcgtgagagttctccgctcgtctccgatcgtcatacgccgctcgtgatgcgctacgtcgcctcctacctgctggctgtcctagggggcaactcctcccccagcgtcaagggcatcaagaagatcttggacagcgtgggtatcgaggcggacgaagaccgggtcaacaagggtttcaagaagcaggaactgggggta

SEQ ID NO: 524578 - DNA, 1038 bp, Homo sapiens
ggccttctttgtctctttgatctttgtgctttaaaatctgttttatcagagactaggtttgcaacccctgcctttttttgttttccagtttcttggtagatcctccatccctttattttgagcctatgtgtgtctctgcacatgagatgggtttcctgaatacagcacactgatgggtcttgactctttatccattttgccagtctgtgtcttttaattggaatatttagtccatttacatttaaagttaatattgttatgtgtgaatttgatcctgtcattatgatgttagctggttattttgctctttagttgatgcagtttcttcctggtctcaatgatctttacattttggcatgattttgcagtggctggtaccggttgttcctttccatgtttagtgtttccctcaggagctcttctagggcaggcctggtggtgacaaaaatctctccgaatttgcttgtctgtaaagtattttatttctccttcacttatgaagcttagtttggctggatatgaaattctgggttgaacaacttgttttctttaagaatgttgacatattgcgccccactctcttctggctgtagagtttctgccagagatccgctgttagtctgatgggcctccctttgagggtaacccgactttactctctggctgaccttaaccatttctttccttcattttaaactttggacaccatcacacggccagggtacgtccaacagaacctgcagctgaggttcctgtcctatcagcaggcaaaactagccaaacaggaaaggacatacacagcaaaagaggaccacatctgcgtaatattcaggcagtcatccaaacgagacccaacgctaagaatcaacatcaccaaagatgggggaacaacacatgcgagccacacacaacttgggacaactccataagaaacgcagcgatggccttacctaccttcccatgggaacggtaagtaccacaccagagcagagcaaccaagctgaaaggagaaatgcctttgagacagtgagagacaac

SEQ ID NO: 524579 - DNA, 136 bp, Homo sapiens
ttatgccttaactgagctgcctaactgagcgtctgtaactgatgctgcctcctaacactgtctgtaagagcgcttcctgtaactgatgctgccccgagcgcttcctgtaacgagcgccagaaaaatgactggttga

SEQ ID NO: 524580 - DNA, 273 bp, Homo sapiens
  misc_feature (87)..(87): n is a, c, g, or t
  misc_feature (194)..(194): n is a, c, g, or t
atgttaagttagcaatgtctcacctgccagatctcttaaacatgagaaattttacacatttttataaatagtgttatttattttttncttttttttaaaatagagactgagtttcaccgtgttggccaggctggtatcaaactcctgacctcaagagctctactcgggaggctgaggcaggagaatggtgtgancccgggaggcagagcttgcagtgagccgagatctcgccactgcactccagcctggggcaacagagcaagactctgtctc

SEQ ID NO: 524581 - DNA, 355 bp, Homo sapiens
acagattcccctgcggttatctagctttgctgtgtgttatgcctgcttagttctgcctggattgaaagtgtccatccacgttctctgtgtggtccccgtagtgtcctacttagggaggctcaggtgctgaggatagactcatgctgtgtggtcgatggagagcagtctccgcgaagctcatctgtcgccttctccgccttcataactcaggggtcatggcccttcctgatcttctgtcttgaatctgtctctgtgccgttctgaccgagccactatagcctatctaagctccctccagccttaagccttggattctacagtcattggggcgaagctagcccattttttgccctgg

SEQ ID NO: 524582 - DNA, 251 bp, Homo sapiens
  misc_feature (66)..(66): n is a, c, g, or t
  misc_feature (120)..(120): n is a, c, g, or t
  misc_feature (140)..(140): n is a, c, g, or t
  misc_feature (234)..(234): n is a, c, g, or t
cggccccggaggctctcggcgagcgcggcgggttaacaagtgggcgaggatgccgtacgagatcangaaggtgttcgccagcctcccgcagtggagaggggcgtctccaagatcatcggnggcgaccctaagggcaacanttttttgtacaccaatggaaagtgcgtcatcctaaggaacatcgacaacccagcccttgctgacatctacacagagcacggccatcaggtggtngtgggccaagttatgcg

SEQ ID NO: 524583 - DNA, 868 bp, Homo sapiens
  misc_feature (115)..(115): n is a, c, g, or t
gatcatctatagtaccccaacagtggtcagtctacagaatcctccccatggattcatcgctccaggataaaattatgcccatctgacgaccagcctagctctccacctcctcttngagtcacaagtactctctcctattcccttaaacttacccgcatccctgaaaaagaacaataacccctgtatacctttatatttacagtagacctttacacagtcaccccatattaaaaactctgtcatacttatgcccctaatcaccattctcacctacttcataaatgccctgtttgggtctatactgccagttcacggcttttcctccagaccaatggtagctgataccctcatggagtcacccttcagttgtaacccttaaactctctctaagagtgatagatgaccttctgtggcaaaagtactctccaattcttccatcctgaatagaagttctttctctttaatacttactcttgtgtcttactcccgttctcctgccaccctctatccctccctaattatctccagaatacatcaactcacccattccctcttcacatctcaatctttcctattgcattccctctcttcctccttataataaaggtgtccttgccctgcaagcccattggggaatttccccccattgccctatacttcaaaactctttcaggggcccaatttaacctcctgacaagttttattcctagaaaattaggagaatcccttggtactctacaaagggggggtgctccaatacagaattatttccaggattccgacctgggtgggctctataaaataccctgggcttgtgtccacaaggggctcgtgcccctttcttttccacggcgcaatggttggtaac

SEQ ID NO: 524584 - DNA, 768 bp, Homo sapiens
gcttgtacgatggcggcgcacgagtggagcgcgtagggccccgtggatccgggaagcggcaaggttgcgggagtctcttcactctcgtctcaaagccatatgtgccgtggccgtgctctacggcatagatgcccggagattagtggaaagctccgattccagaaatgggaagcaagacatgaatgaacggtgcctgggtgtccacaaacgctgtgcaactggagagtgcaacgaaatagtgcggtgttcgacacgggggagctgcatgggagtccacacccaaacggtggttgcttagggcactgagccggagtaatttctccaccaggacaagaacctgtgttggtctatcaaatagtgccctacggtctcccttgtgctatggttgtccctgggggtcctagctctgccatcatcgtgattggtagctacctatccgtgggacaatgatgctttcatgtggcacaaaggtgggagcccttgcagatttgtgtgccaccggttttggacagaaggaacccacgaggtgtatagatggatgttaggctttggggaacaatggagcagtgggcatcgattccaaagtcccaagattgttgtttagaaacctcgttcagcgtggatagaaatgagcgtactgtgagccatcaattgtgcattgttccccaatgccccttctggcactggaaaatcgctgggacattgccccattggttgaaggcattgaagggaggcaaggcaccgttttgtaaccacatatatgacgtg

SEQ ID NO: 524585 - DNA, 245 bp, Homo sapiens
tcctcttctcatgcttgagcttccctgtttgcacgcatgcgtgtgcaggactggctgtgtgcttggactcggctccaggtggaagcatgctttcccttgttacggttggagaaactcaaaccttcaagccctaggtgtagccattttgtcaagccaggaagggcattgtggtactggcaatgacaccaaaagcgtaggaatattgtaccattaaacaaaaataaaactataaaaggaaaaaaaaa

SEQ ID NO: 524586 - DNA, 221 bp, Homo sapiens
aggtgaggtgtcacatgaacagtcacaaggttcacaaatctggggaggagagcttattatttagacggagtcatcagtctgttgcccaggcgggagtgcagtggcgcagtctccgctcactgcaaggctccgcctccgcgggttcaggccattctcctgcctcagcctcccgagtagctgggactataggtgcccgccaccacgcccggctagttgttttt

SEQ ID NO: 524587 - DNA, 342 bp, Homo sapiens
  misc_feature (70)..(70): n is a, c, g, or t
  misc_feature (119)..(119): n is a, c, g, or t
ggcacgagatggtgaagaaactccacacagcaacaccaccaaccttcggagtagatctcatcaatgagcntggtagagaattttggcaggtgtccaaaatggtctggtcggcaagcccnttgtctttgtctgccagactgtcattgaagacgactgcctccccatggaccagtttgctgtgcactttgatgccacatttgctgaccttggcaaatgacagggttcccaatgttagagtgctgcttgcgaaaaccctgcgacagactctgctggagaaagagtacttcttagcctctgccagctgtcaccaggaggccgtggagcagacaatcatggccctgc

SEQ ID NO: 524588 - DNA, 1050 bp, Homo sapiens
  misc_feature (572)..(572): n is a, c, g, or t
agcggagagcgagatagcaactgcacatcctagaacaccgagtgagggtgctgaacgctggcacgctcaccgggtctctggcatctacaatccaaccgttcatcacgctgctcttcctgccccgccggagccggtgcgagcttcgttcaggctgacggagcagccccgtgatggattacacgcttagtggatgcgaccgatgcgcacgggctttaagagagctgcctccctagtcttgaggttcctgcgaagctagcgtgacggccagcactgtgcttggtgcgtgaagcgtgtcgctctcatcgagccgggtcgcggcatgttgccccgagctcgctcggggtcgaccgaattgactccgccctggttcgcgtcgatctgctgccagccttgcgtcggacgacacctcacgttgtccttgttgcttggatcgcattgtaccacattatccacggacggacgttctattccattgagtgccggggaggccagcgaccctcgttcccgtcggtggatctcacgacgtcttggcgcgcaggagttccgacgttttgacccgtgcaaggctgtgncgggaagagccctgtgccttgtgaccgaagggatgcattccacgcaagtggcttttcccccggcactcaggcattgggccccaggccccaacggtggcatccccaatccaagagccccacaagaaccgcttactgtagtcctccacactgggacccctgagaccgctttcccagccaatcgccaacaccgctcataggatgtcctcgttctacatcgcacaagaaccccaaaggaggcagccctctaagcagtccttgaaaccaggctccatcaccgttctttgcctttctcccctcatcgagggtaattatctcccatttgtcatggattgcttgaaacaccgcacaagttccccagtgaacctcctgcttgaccaggttcctcgggggagcttgtggacggattggtgcgcatcgagtgggaagccccctggggctttgattgcattgtggatcgtggccacgcttcaggtccccg

SEQ ID NO: 524589 - DNA, 242 bp, Homo sapiens
  misc_feature (172)..(172): n is a, c, g, or t
gttgactcagtggttggcggaaacagcaaagatagattttagagcacagcagcaggggtccctggtcagccccgctccctagagcaggagatcttgagtgggagaacattcttgttgtagccacagctgaggccctggaccagctctctccacaccgcatgctccgagttgngactctaaggagtctaggaattttcattcaaacttggccttacaggtcactcatcagaaaaatacttttt

SEQ ID NO: 524590 - DNA, 134 bp, Homo sapiens
ggacccccccccctttttcatatccccggccccgggtgtgaatgcccttttttcccccggctgtgtcccctcccccgtttgttccctaagtggtgggccccggccttttaaaaatggttggcgggccttttgca

SEQ ID NO: 524591 - DNA, 122 bp, Homo sapiens
tctagaggatcccacaagaaaactaataatactcaacatctcagacgctcaggaaatatgaaacctgtctgaactatcctgccctgcatcatcctagtcctcatctgccctcccatccctat

SEQ ID NO: 524592 - DNA, 162 bp, Homo sapiens
ccccccccccttttggtttttttaaaccaagaaaaacgtttggccccttttttggggttcagaagcatttaagaaaacccgtcctccattataattacctttcaaagggcaagtcaaaagttgtttataaattccaaaaaaaaggcctattatgacctttta

SEQ ID NO: 524593 - DNA, 1200 bp, Homo sapiens
gctgtttattttgcacgattacaacatgcgtgacaaacccagtgcgagatgatgcgatgtctactgtgttccataacccacctctgtgctgacaatggtggtggccccatgggtgccggatgcccatgcccctgatggctggacctacatccatcactccatctccctgaagactctctctcgaactgtgtagtgccatgaatgcaatgctgtctgtggtctctttgtgtgtgacaatggtggatgcccctgtgtctccacaatctcaaatgcccaaaaatgctgaaggttctggagcaaggcgtggatcatgtcctcgacggtatcattgttggaagcaaattgaagacattgtgtctgtgatctgcaagctgtggtcctcagatgaactccatgtggagaacttgcaaatgctgtgtccttgctcccctctgggacaatgctgctgcctgcccggggatctcagactgtagagaggcttgccggccaactcaggcactgtgttcgccatgattaatgggcgttagtggagtctgggattgacgccttggacctgtgacggttgacgaatccatcgatactagtggatacgaagggacagttaagattccttcctgttcacatttacagcccgattcatcggagatagaaataacgtatacgctgacaacgacttgtgatcccttctgactaattacctcgacccaacttgggatcttcagagggttggggtgcacggggacatcacgggaagcaccaacgaggacccggaaacccacggagtcaccacacaggcaaggggaaggggaggaccctggggaaccctcaataggatgagaagccaggaccgaggattgtggcagggcacaagcagacacgagaatcgaagcacgatgggcatgtgaattggatggaccacagagggaacacccaatcaacaccactggacaacagaaggtacacttcgcggagacccgcgatagaggagagtaataacaacacggacacgagttggagatccagaaaactggaaaaccacaaagaggtatatcactagatcaagacagaacccacaaaattagcagagcaagtaccaaaaataggtaacgaacatagaacaacgttagcaacaacacagctaagtgcgcacattctgcctgttaaagagtagtacactactaatacgaaacatactataag

SEQ ID NO: 524594 - DNA, 425 bp, Homo sapiens
atcatcttagaggattccccccgccagtctggggtctggcaggtgggctgacggatcactggcccaagccgctagggaagtcctgcactgacagctcagatctgcagctgcaccgccattgtacttaatacggccagtgatgtgctggcacaaggccagcaacctcattgaggaccgtcgaacaaaggcagctggccatccaggccaccctcagagccatccccggcttgccctggtcgctttcgctgtgaccctggctctgccccgctgtgtctgctgcctacctggcctgcgcgtatgttgaattatgccctgtagcgtgcagttgagacatgcccgccagcgactcctgagtgacttgcttcctcctccccctgggacatttcacgacgctctgagccggttgaactgactgctgctgctgg

SEQ ID NO: 524595 - DNA, 489 bp, Homo sapiens
taatagtgagacatctcagaagcgactattgcggtggacgggagcgtccagtagcacatctatgatccatgtagagcatccaagacatctagccagaagttcttcttgagggtactacaggtcatcatccagctccgggacgacacgcgccgggctaacaagaaagccaagacagacaggcaggctagagtacctccggtaaaggctcagactaacagaatccaggcagctgttcgagagctggaggctgaggctgatgccataatacaactgtcggagtctagccagtcagaggcgtctgtccggagggaggaatcacccatggatgtggaccagacatctcccagtgctcaagatactcaatccattgcctccgatggaaccccacagggggagaaggaacaggaaggcagaccaactgagttacccatgctcagagagcagctgagtttggacgagctgtgggacatgcttggggagtgtctaacg

SEQ ID NO: 524596 - DNA, 382 bp, Homo sapiens
ccagggatcctcaaattaacacgccagaaaaagtagagaatgaacatttgttggatgggtttcctcgattgtttgtatagatcactattgtcccatgcctggatatagacttcagttattccacaagccacagcttaatcctgccgctgcttcctgcccagtcctttccttctttcactccctgaacattccctggctatccactgagcagcaatttgttggcattaacacgggcttcaaagcaatagggaaagtgtgtgtgtgtgcgtgtgtgtgtgtgtgcagggcagggcaggtacctgaggagttcctaagaggatgacacactccctggagatggagctccagggtcgacgcgcccgcgaatttagtagtagtaggc

SEQ ID NO: 524597 - DNA, 1037 bp, Homo sapiens
  misc_feature (792)..(792): n is a, c, g, or t
  misc_feature (1037)..(1037): n is a, c, g, or t
ggggtggcagtttgccgcgggtgtgtgcacgggagacagtgtggaggccacaagggtactcgcaacgatgagcagcaccttagctaagatcgcggagatacgcacgcagagatggctcggactcaaaagaccaaggccacatgaaaccacttagggctgcttaaggctcgtctgtgctaaagcttcgtcgagaactcattactccaaagggtgctggtgcttggcggtccaggacgacaggtcttgatgtggccaacgacaggtgatgctcgaacttggcttggtaggtttcccatctgtggggaagtcaacactgtttagtaacctggcaggggtatattctgaggcggccagcctatgattcactactctgaccattgtgccgtgtgtccatcagatccaaaggttgccaagatccagctcctggatctcccaggtatcattgcaggtgccaaggatggcaacggtagcaggtcgacagtcatttgccagtggcccgaagcttgtacactagatcctagagtggtccgggcatgtccgtgcaaccttgggaacactacgcacgctcactggacactgcgtggcaggtttgggcatttcgttagaccaggcaaccccgaaagttgtgttacgagcacggcacgggaggatagttccacatcatttgccccagttagtgtgttcatacgggcacgctctgggacaaactacacgccgcagtgccaaggtctgtgcaacggagcctatgttgtagagccgacatctgctcattagaagggtccacgggggctntgcgtgcttccatccttgttttttttcgcgtctcctagcttctttgtcttttgacgtgcagacgagcgcagtacgcaggatcgacgaagtacgaactagtagcgagaaggcgcaacgtcaggacagagctgcagcgttaggcagcagctagcaacacgcgagtagacagagaaaggcagccgagtcagctgagcagagagagcatgcacacacgaaagcaggatagagcgccgacactgtacatn

SEQ ID NO: 524598 - DNA, 709 bp, Homo sapiens
gattctgtacatgagtgatagccatcataatcggaggcttagggaacctgtctaggtaaggaccagatctacagaggttatcgtcacagcgcatgcattggtaataatcttctacatagtagatagcccatcataatcggaggcttaggcaactgactacattcccctacagtacaactcggtgcccgcgatatgggcgtcgcgccgagataaacggacgataagcttgtgactctgttacctccctcgtctccgtagctgcctgcttgcgcgtctgtctaatagtggtaggccggagacaggaacgaggttgaacagctctaccctccctgtagacagggaactaaagagaagaaaaaaaaaaagataaaaaggaaataataaaaaagagaatactcagaaaaaaaaaaaaagaaggatggcgtgcgtggttttggggtgaggagggatgaagacaaccgacttgtcctgggcgtacgtccatgcaggggactctgccagtcttggcttttatgaagtctggaaagtctgggtatacgcacatatgctgggagaggagaatacttatctcgggcgcacatcactatataaggctcgcctctgcagtgctgaatactttcgctgacattgccctggctcctatggaagctgctaaggttcgaatgcaaacccagcaggtgatgccaacactttgagggatgcaagacca

SEQ ID NO: 524599 - DNA, 131 bp, Homo sapiens
ttgtgtactagcaataattttcatcatctacttgtagctgagaaaattcttgctgggctacctgttcaactgatgctacgaagatcccagggatattccattttattgtgaaccccaagtcagactcttcc

SEQ ID NO: 524600 - DNA, 276 bp, Homo sapiens
gcccatgacagcaccagcaggatcgtgcaggcggcgagaaacccgaaggcgatctgaaggccatccttgcggctgaaggcagttgccatcacgatcggaatgagcagcagcttgacgtaagggccaacccatttgaatgcgacggggaggggttcgctcgaccaggtcacgccaatcaggatcaacgcgaacagcgcggccggaagccatgcggccgggcggcgtgccgttgtggtaaagcgctgaaggtcgagggttgcgatcgcgagcaccacg

SEQ ID NO: 524601 - DNA, 184 bp, Homo sapiens
gttcgggagcttaacctcaccaagctgaccctcagctcaccccagtgagtggcagtggaagggcaagctggagggtcgtggcactggactatgaggcccgatggcccatctatgagcctctgcacacgcactggtctcacaacttttcttggtctcttcctgctcacggtgggcagcgagcatc

SEQ ID NO: 524602 - DNA, 749 bp, Homo sapiens
tggtaacccccccgtgcccagccctccacctgcaccggaacccccatggcactgtggaaaccggggtagactgcggaaaccggggagactgtgggggacaggggaaacaagcagcaggccatggcacggggtcggggcgcctcaatgggaaacagaggcgcccgagggggcaacctagggtagactgggcacacagccgttccaggggaggccctgcaggatccttccaccctgtgccttgccaaatgtcgcctggccagccagacctccgccatattggtcataggacgggcagcaaacgttggccacgtggctgcatgtggcctccaagccacatactttcttcccagcgggggcatttggccatggctgctgccgacacttcgtgggacccgggggttcacccggtgaccattacgcctgctctatgggtgccctcaggggacgcatccaggtaaggatgccacaaggtcaggagagagctcaccttcctgtggaaaaagcttgtaatacccctcagcccggctactcgcctaaaacccttcacgagctcagtggatggccagagggattctcctccttatgatgaccgggttcagtggttgacccctgtgctgcagagacgcctgtgggataactggtctccattgaccagttccgggacccggccgaggactctgcgaaggtgctgcatcatcagagaacgcctgcctgccttcctttggtggaccctttgtcccgtgcccgtc

SEQ ID NO: 524603 - DNA, 235 bp, Homo sapiens
cgtctccgtggggccccacactgcacactgtctcccccactgtcctggaagccctcggggatcaggggcttctttccttatctgagcaccacagctcctcagcaaatgcttattgtgtgcatgagagtgtctctgtcctaccctagcagaccctctggagggtagggcctgttttttgggaaatgccttcttctctgtaactcaggtgcaagccctcgggacaggtgcatcttct

SEQ ID NO: 524604 - DNA, 940 bp, Homo sapiens
ctgtcgtcggtcctaacgcgtcaccagaaaatggttctgtcaacccgagcactggcgccagccgaaactgttctctgttgggcccaaatttttaataccccgtcccccagttagtggccttctggggattcacactgcgtgccaactacgcccggagtcacaacaccctgaagaaaccaggggcctggggaccacgcgacaacttgcctcgggtatctcaaccgcccgcacggccccacctcttctcacgaaattaaaggggtttcttaaatgtcttgtaagctatttctcttacaggggccctttttcattcctctgtctattaaagggttttttttcgcgccgcacgttcccgttttgaatgagcccctcccccctgttgggccccgcctctggtttgggatggaagaactctttggagaaaactaagtgttcaagcggccccttcgcagtttgcagctggagcacaacaaccgggggaatgtggggccccacccagcggcgtggtgaaacctgtggcccgtgatgacccctcccaggcctcgaggtgtccccaagagccccacaggataatttttttcgccgaacgccacgaaatggagcgcctgtggccgctttttttatgccccacggttcccgcgtgggcaaccaccagaggagcccaaaccttcttgctcgtaaatgtgttgttgttgcaccattagtgaaaaacaccagaccttgcagagttccacagccgcgatttgtgggtgtgtactacaaagcacggcctcttcctacaacagggggtggaagagaaccacacccctttcttccctcttggtaggaatggccttgaagtttggcgttgtgggcacggctactcggtttgtatgaagtatttagtagagccaccgccctaattttttttaatttttattaaaactgaaccgagaataaa

SEQ ID NO: 524605 - DNA, 1206 bp, Homo sapiens
gctacgaggctgcggtactcttcccacgggaagaaggcaagagagagtgagcgcatatcaccggagccacagaaggccgagcccaagcctctggaatcagccagaaccagcgagaccagaaacagctgacagtaattctttcagacgtacgctcagacacctacaggctgggtaggacatgggcattctggctgcttgacactaacagcctggcgttccgcgcacgtgtctatgctgtatcctagagggggaccgagtggggctgatcagtcaggtcttcctcataagaacgcagcaactctctggggatgcaacgctgagccctagctcgaaggatccgacccatgtcgtcgcttcgacttggtagccagcacgcatagctgtgtaccgacggatcagcactgacgacattcgaagccaggcgcgagcctccgaacgggctaatagcacgggtaccctccctctcagccgcaaccgcagaggcagaacccacaccgagtttgagtggcttggggccaaccttgaagcgcggacttgcaccgacaagtcacggacgacgccgggtcttggcgagacgtggcgcgctttcttgcagtgaaaacctggcgtgtcttcccgtttatctttgcgacgaaccgagcaagacgctagcggtcccggcgaagagagggcgtttggattctcacgccgttatggtcccgaaggatgcgacagggagaagggcttcaccagaacggggcccacaggcaggtacccgtgccaaccaatgggcatttgcatttccttaagcagggacgcttttcacaccaagggcccattgggacggcaccggtgtttttccccccgaggattggcgttacgccatttcgcccaagcgttttcacagcgccaacccttaaatggcggaaaccatttttggtgcgcgcccaatgggcgcttagtgacacccgcacacggaagacacaccaccacactttggcgtcttgcacgttacgagcctcctattcgcgggcgtccacgacgacggaatccaacctcgggtgccctgataaggcccccaatggagcgcgtgagtacgtttttccccccaaaggaggcgttccgatgcggtctcggtgcggtttcgagcccacgagagggccggggtgttcatttttctcacagagatcttctgaatttgcccccgtgtgttctaagacccgttaa

SEQ ID NO: 524606 - DNA, 429 bp, Homo sapiens
atgctgtcagtctaattattgactttttgtgggtagtcttatctctctggctttttagatctcttcatcttttgtgttcagtttcaaaacaatgtgtttaagaatgcaatttccttttatcagcttaagatgtgtgaagcactctaaattctaggatttgccttcaatctggtctagaaaattctctaaaaagtcaagaagctttgacttttctcattttctatcactctctatagtaaatgctgcattctggattatttcttcagacctatctttttgctcactaattctctcttcagctgggcctaatctgtttatccattctaatttcaattgttatatttcattttcagtccttcctgaaatctgccttgaccttctttattgacttattcctttgtcatacatttgattcagtcactgcactct

SEQ ID NO: 524607 - DNA, 1252 bp, Homo sapiens
  misc_feature (555)..(555): n is a, c, g, or t
  misc_feature (579)..(579): n is a, c, g, or t
  misc_feature (602)..(602): n is a, c, g, or t
  misc_feature (708)..(708): n is a, c, g, or t
  misc_feature (828)..(828): n is a, c, g, or t
  misc_feature (833)..(833): n is a, c, g, or t
  misc_feature (836)..(836): n is a, c, g, or t
  misc_feature (862)..(862): n is a, c, g, or t
  misc_feature (911)..(911): n is a, c, g, or t
  misc_feature (913)..(913): n is a, c, g, or t
  misc_feature (932)..(932): n is a, c, g, or t
  misc_feature (934)..(934): n is a, c, g, or t
  misc_feature (974)..(974): n is a, c, g, or t
  misc_feature (1040)..(1040): n is a, c, g, or t
  misc_feature (1058)..(1058): n is a, c, g, or t
  misc_feature (1069)..(1069): n is a, c, g, or t
  misc_feature (1196)..(1196): n is a, c, g, or t
ccctgcgaactactcatcgtctgtgtttctcttcaccctgccgttcatgtctatacttcacgagtctccttaggaagagacccaaatcagctgagcgtagaggtctcttgcatatgtggaggtgctctgagactttgcaaacgacatcgtgtatgagcagcctgacggagcctactctcctgagcagatgtgggcatctgctactacggcacgtgctgctgcgctaaatgacgccagattccgatcaactagcgctagaggcgacttcgcgacgggccatgttggggtgctttagttctagcgagtagtgccgcagcgtgctcgagaagagcagagtcggtagtgccatgccctatagcacacttgcacagggaccaccactataggaggtgagtagtgggaataacgatgctatgctagagcatagccaaacaggaacgatgcgtagctacatcactatctaggacagcacttcatccatatacgtaaccaagcggtagaggcctcgactctgatagcgtgctcgcaagaaagagcgagtcatctctcgatgtntggcttgggcctagtatcacaggnaggagacgcacccaccttggaanagcacacccaataaaagcccttaacgcagggagtatgaattgtattgaaacctaccgatgaatttgtgcatacgatatcattgtagcaacgccttgtacatagganacaactccaagtggcacattgggatttcccgggattgggggcaccgattgtcgcccaaagaaggcaaccagaagggcgtgggggtcctttctttgccccttaatttgccggctttacatncttcntcntgcaaccgcaaaccctacgttgcacnttccgttgctagtggaagttacacttgcactggtgatccacctttcgangnaccaaactcaccgcccaanangccgttggtcggcaaacaattgcggtcccacgcaaacggntcgttagcagagcgggttcttatcgcaccaccaccaaggcgcgccctagttccaatagcgggctcntgaagcatcggtcggtantttgtgccttntcgatgtaccccattggcaccccaggaaagaagagctccctcgaaatggtaagggcgtatctctcggtcgacaacaattccgtatgtccgagaaattgggggttagcgctcccgatttgtgagacangtcggattgggcgatattttgccggcggcctcgagcgcagaggtttggaaccaatc

SEQ ID NO: 524608 - DNA, 365 bp, Homo sapiens
ggcctatcttgtcgggttgggactagactgtgcagcattacgtattaggtctatatcctacagaaccacgtgaagccaggaaagtgttttaagctggggtgtgacaatgaaacccatcaagttcgtgttttggcacagattgttgtggcttacgggtgggtgtggggaagcacgagagaagcactagagcagaacagccggaagctggtacgcggtggtggacactgtgactgtgaagactgtggggtttctgtcttgggtttcttgtatctcctccatttgcgactgggcttcgaccacattgtttggcatgaagagggcgtctgcatctgcttagtcactatggcaagaactaggtcattttg

SEQ ID NO: 524609 - DNA, 908 bp, Homo sapiens
gcgaccgtggactattctctacaagaacacaaagacattggaacatctatagcctattattaccggcgcatgagctggagtcctaggcacacgctctacagtgctcctctgagttcgagccgagacgtgggccagagcagggaacctgtctaggtaactgaccgatgatctacaacgttgatcgtcacagcccatgcattggtaataattcttcgttcatagtaatacccatcgataatcggaggtcgttaggtcaacatgtactagttacccctaatagtcggtggccccgatatggcgtttcgccgaataaacgaacataagcttctgactcgttgaacctccctctctcctactcctgtctcgcatctgctatagtggaggccggaacaggaacaggttgaacagtctacccgttcccttagcagggaacggagtcccaccctggagcctccgtagacctaaccatcttctccttacagcgctagcaggtgtctcctctatcttaggggccatcagagttgcattgcacagacaatttatcaatataaaaccccctggcataaccaataccaaacgcgcctcttcgtctgatccgtgctaatcacagcagtcctacttctcctatctctcccagtcctagctgtggcatcactatactactaacagacggaactcaacacacttcttcgaccccgcggaggaggagacccattctataccaagactattctgattttcggtcacccctgaagttatattcttatctaacagctttggaataatctcccatattgaaataagtactcgggaaaaagaacctttggcactacgtatggctgggaagaaataacgggtcccaggtatcggggagcccatttaggaatattagagattttcaccacaat

SEQ ID NO: 524610 - DNA, 220 bp, Homo sapiens
cggagtatgcgcggcactgccactatcttaccgctggcggggacggcacctgccttaccaaccttactgagccccaagaccctaccctctgggcttggatgactatccccgggtcttcacacccttcagtaaccgaggcggcacctggtacctgctcatgttgtggtggcactgtgttgcccggtgtgctgacagcggctgtgcagacgcatcgtgggtg

SEQ ID NO: 524611 - DNA, 315 bp, Homo sapiens
  misc_feature (302)..(302): n is a, c, g, or t
ggagtttgagaccagcttagcaatatggcgagagcttgtctctatgaaaaaaatttaaaaaattagccaggcttggtggtgtatacctgtattcccaggtacttggtaggctaaggtgagaggattgcttgagcctgggaggcaggaggcagaggttgctgtgagccaagatcgtgccagtgcactccaccctgtgtgacagagcaagactccatcaggaatgaaagaaagagagagagagagaaggaaggaagggagagagagagaaagggagacagtggaagagtgagacttcgtctcanaaaaaaaaaagta

SEQ ID NO: 524612 - DNA, 248 bp, Homo sapiens
  misc_feature (142)..(142): n is a, c, g, or t
ggcccccccccccccccccttttttgggttttttttttttcccccaaaggggggccccccccccccccagtttttttggcccccccgggggggggggggttttgccccccccggggggggttccccacaaaaaatccccttncccaaaatgggggggggccccccccccccccccggcccaaggggttttccccggttttttttttgggggggggaaacccccctaaagggcccttttttttttttta

SEQ ID NO: 524613 - DNA, 184 bp, Homo sapiens
atgagggacaaggggagggtctcgtggcaggaacacgagtactgccaacaatcaggtgagctccgaagtggagtctttcccagtcgggccggactggcatgtagtgaggacagaaccaactaatcacagcagctgtataagaaaaccaaaccccagagtggaaggtaagtggggtaccgagctc

SEQ ID NO: 524614 - DNA, 215 bp, Homo sapiens
cccccccccccccccccaagggggggggggggttttttcccaccccccaggggccccccgtgaaggaccggggtttttttttattaggggttttttcccccccggtccccccggaaaggcaattttcccaaaaaaacccccccggcttttgtttcaaaaggcccggggcccccccccttttgccttccccccaaaaaaattttttttttcgggga

SEQ ID NO: 524615 - DNA, 154 bp, Homo sapiens
gtctgagcagctgggaaagtccactgaaatttacatagcagtgtatgcaagcattcttacataattcaagacctaaaaccaacctgcagtggatggtttcatgtcctctgttcagtgtgcttagacatgaagccatacagctgatgagctatga

SEQ ID NO: 524616 - DNA, 1140 bp, Homo sapiens
ctctttgtttggtttttccccccgccctctgcgctctctccgctgagagtgtgtgttgagttgggtcggcaccgcgttgtgttgttgtggtggggcagcagcgcggcggtttcttcttattgtttttgcacacagccttttttgttctctgcgctgcgcgacatattagataagagtatcgtttgtgtgcgtttgttttcgtgttggtgtctattctcgcgcccatgcctgtctttggtagagtgcactctcttcgggtcgcgggagagagagagagagcactgtttgctgcgcccgcgcgctatattatcgtagaagatgtgtgtgagcaccttctctttctctcgtcggtgagagacattatagcacaacactctctctctcttagtagatatttgttgtgtgtgtggagcaatcttcatatctgtataaaggagagaggagaggagatagtacaccccccctctctctgtctgtgtggcgatgggttttccactctctttcacacactctggtcgcgcgctgtcttgtcgtctttgtgtgtagtaaggactctcttgtcatctctcatcacctctctgtgtgcgcatctctggtgcgctctctctgtctctctctctctctgttgtctccacacgccccttctgtgtgtgtcgcgcgcgcaaaggagagactcgtgtctctacacacatgcagaatgctcgtgtcctatcgtgttggctacaacaccgtcgttgttgtggtgtgcgcgcgtcgtggagaaaatataattttgatatatgtgtgtggtgtgtgtgtgtgtgtgagatatatgagagcgggtgttgtgtgtgttatatgggatctgtctataaatgatttatgagagaaacacacaccgtagggccgctcgtgtttatgtataatatgctcgcgcagacatatcaagagactctgccgcggagtggaggagatgcttatatatgagcaacgaccttatttttttggcaagcctccccgtggtttcctataattggtgaaaaagagggggggaacacacaccctgccactctttgggcccctttttttggggccctttttttttataaagacaaaaaaaaattggggtttataaacggtggggatttatttttaacccca

SEQ ID NO: 524617 - DNA, 982 bp, Homo sapiens
  misc_feature (1)..(1): n is a, c, g, or t
ncgcatgttagtgtgccgagcgcatcagtcacatacaacacacaagcaataacagcacagcgcgcagtagagcaccttccacaattatatgccgagacatgctgtttcattgggagccacaccagataccgtgcccactggggtctcgcccccgtgttaagacaatcgggcgaaactgggaatcggccccacggggcccgcattaacgacaccacactgggggcactcacacacaaacagggggcaaacacagcccgtgacagaatccgctcatgatggatgcggggcacaacattttgaatgctagcggggcatgcacggtctctccacaccgccgggtctctgctcccgccccatagccacggagattttgtgccatagccagctcttgtaactcaccggttgtttcccccggccagtgttttagcgcccgcggtgccacaaaaacttggtagggcgcctggccagatcgagactaggtggacacaagggcctttatattttcttgcacgggaacaaaaccttggatttatctgctgactgtccaactcctccaagagtcgtcccacgtcgcttagtgtgggggcttgtcctgtattaaatcccgggctaacaatgttggatggcaaccttccttctctctccgtcgaggcaagtacccgcgaaacatattttctctgcgaggtcttccactgatgggaggggcgcgcaacatttactcattaggggcgtggtttatagccgaccccacctgggtttctcgatgaggcgagccaccaacgaggatgtgttaccccgaggtatgtgatggtgaccccccgcgtaaggagcaacacgctagtgtggtcgctaaacaccaggtagcccaaaaaacagatgataatgggtataagacaaaccgtggctgccagaagcataaaaccccccaggtatagtgttcaggtttgaaaccaaaaaatagaccctttcccccaacatgaca

SEQ ID NO: 524618 - DNA, 437 bp, Homo sapiens
gtgggtttaggaagttcacttttttttttatactttacatacatgttaccaaatttttaatgtatttaatgtttttatcaacgcataataaatataagtggtgttttgttttttgtgtttttttttttttttgagatagagtctccctctgttgccaggctggagtgcagtggcatgatcttggctcactgcagcctccgcctcccgggttcaagcgattctcctgcctcagcctcccaagtagctgggattacaaggcgcgcgccaccacgcctggctgatttttgtatttttagtagagacagggtttcaccatgttggccaggctgctctcgaactcctgaccttaggtgatccacccgcctcagcctcccaaagtgctgggattacaggcgtgaaccaccacccccagcctaattttggtttttttagacagg

SEQ ID NO: 524619 - DNA, 147 bp, Homo sapiens
attatccgtaaatgaatcttctttattaacttgacttgctatctcagcagataattacaaaaaacaaataagaatcctgcagtgtatacggaactcttatatggtaaatcacggacacctcattatgcaagaactgaggggcgggct

SEQ ID NO: 524620 - DNA, 114 bp, Homo sapiens
cgtggcttgcatgtgcgtggtggtgatgtcctgcccacagacctcagacagcacattgctgcagaagataggggccatcctggacaacagcaccttgcagagtgaattcaagcc

SEQ ID NO: 524621 - DNA, 183 bp, Homo sapiens
atctggggagcggacccactcgcctcacattccacaggcccatgggactcacttttgtgaacaaactcctaccaacacgtgcccaataaaagaaaaatgtgggttttttttttttttttttttttttgttttgtttttttttgcagcttgggcgggtgtttgtgtgatttgtatgttttgtta

SEQ ID NO: 524622 - DNA, 310 bp, Homo sapiens
  misc_feature (194)..(194): n is a, c, g, or t
  misc_feature (231)..(231): n is a, c, g, or t
  misc_feature (233)..(233): n is a, c, g, or t
  misc_feature (237)..(237): n is a, c, g, or t
aatacattgcgccatgatggctacgacataggaatttttcagctccattataattttatgggatcaccgttgtgaatgcagtgcattgttaaccaaaatgtcattatgtgttatatgactgtatatataatctcgacttttatttgtaccaatatatacaatgggaaagtttgtaccatgtcaaataccagttnagataattatcattttgttattgttattaatacatantncaangtttttttcagggcaaggattattaccaaggtgtgtttctagagggttaattaggtcatggcatgggggggac

SEQ ID NO: 524623 - DNA, 881 bp, Homo sapiens
  misc_feature (46)..(46): n is a, c, g, or t
  misc_feature (121)..(121): n is a, c, g, or t
  misc_feature (143)..(143): n is a, c, g, or t
  misc_feature (156)..(156): n is a, c, g, or t
  misc_feature (158)..(158): n is a, c, g, or t
  misc_feature (179)..(179): n is a, c, g, or t
  misc_feature (189)..(189): n is a, c, g, or t
  misc_feature (196)..(196): n is a, c, g, or t
  misc_feature (208)..(208): n is a, c, g, or t
  misc_feature (239)..(239): n is a, c, g, or t
  misc_feature (257)..(258): n is a, c, g, or t
  misc_feature (309)..(309): n is a, c, g, or t
  misc_feature (315)..(315): n is a, c, g, or t
  misc_feature (317)..(317): n is a, c, g, or t
  misc_feature (319)..(320): n is a, c, g, or t
  misc_feature (356)..(358): n is a, c, g, or t
  misc_feature (369)..(369): n is a, c, g, or t
  misc_feature (371)..(371): n is a, c, g, or t
  misc_feature (373)..(374): n is a, c, g, or t
  misc_feature (378)..(378): n is a, c, g, or t
  misc_feature (388)..(388): n is a, c, g, or t
  misc_feature (390)..(390): n is a, c, g, or t
  misc_feature (415)..(415): n is a, c, g, or t
  misc_feature (417)..(417): n is a, c, g, or t
  misc_feature (429)..(429): n is a, c, g, or t
  misc_feature (435)..(435): n is a, c, g, or t
  misc_feature (437)..(437): n is a, c, g, or t
  misc_feature (472)..(472): n is a, c, g, or t
  misc_feature (474)..(474): n is a, c, g, or t
  misc_feature (492)..(492): n is a, c, g, or t
  misc_feature (505)..(505): n is a, c, g, or t
  misc_feature (566)..(566): n is a, c, g, or t
  misc_feature (569)..(569): n is a, c, g, or t
  misc_feature (572)..(572): n is a, c, g, or t
  misc_feature (577)..(577): n is a, c, g, or t
  misc_feature (598)..(599): n is a, c, g, or t
  misc_feature (610)..(610): n is a, c, g, or t
  misc_feature (622)..(622): n is a, c, g, or t
  misc_feature (625)..(626): n is a, c, g, or t
  misc_feature (628)..(628): n is a, c, g, or t
  misc_feature (640)..(640): n is a, c, g, or t
  misc_feature (644)..(644): n is a, c, g, or t
  misc_feature (647)..(649): n is a, c, g, or t
  misc_feature (655)..(655): n is a, c, g, or t
  misc_feature (658)..(659): n is a, c, g, or t
  misc_feature (662)..(662): n is a, c, g, or t
  misc_feature (667)..(667): n is a, c, g, or t
  misc_feature (673)..(673): n is a, c, g, or t
  misc_feature (682)..(682): n is a, c, g, or t
  misc_feature (686)..(688): n is a, c, g, or t
  misc_feature (706)..(706): n is a, c, g, or t
  misc_feature (718)..(718): n is a, c, g, or t
  misc_feature (725)..(727): n is a, c, g, or t
  misc_feature (732)..(733): n is a, c, g, or t
  misc_feature (740)..(740): n is a, c, g, or t
  misc_feature (742)..(743): n is a, c, g, or t
  misc_feature (753)..(754): n is a, c, g, or t
  misc_feature (756)..(756): n is a, c, g, or t
  misc_feature (762)..(762): n is a, c, g, or t
  misc_feature (764)..(765): n is a, c, g, or t
  misc_feature (767)..(768): n is a, c, g, or t
  misc_feature (772)..(772): n is a, c, g, or t
  misc_feature (779)..(779): n is a, c, g, or t
  misc_feature (803)..(803): n is a, c, g, or t
  misc_feature (813)..(813): n is a, c, g, or t
  misc_feature (816)..(816): n is a, c, g, or t
  misc_feature (827)..(827): n is a, c, g, or t
ccacccccctcccgcctcccgtcccaccttcaccctcagccaagangcttgggtgactctgagtaatacgttaacaaaaaacaaagcttctttgaagaaacagcatgacttagtgcaaaanattctctgcagcaagaaatgangcccacgcagggnancccccgcctacctgcccaggncgtggccgcngcccggnctcatcagaggncatccacagaagctgccgataaattagagancacggtttacggccagannttttttgctttctctacctgatttagggtttttcaaaaagtttctcttccngtggcncncnnctgtcctcttggctcctgggccactggtccgcctgnnngggtagggtcncncnncccncccttgcccngngtgtggggacatggatttgaggtgncnctggggttgtcngtcccncnccctgtgtcctgctctagggtagcctctgcctgtngnccttgcaatcattattcngggccccctcccncttgcccccaaagtcacacggccatgggcagtccaccatagtgctgccgtgactgcaaggntgnggngcagngcaaggggtctctgggtgacnnctcgcgccccntggtcgcccccnctnncntgaaaaaaaggnaatntgnnncaaatnaannaanaaaangaaaanggtgacaangatnnnggggaaaaaaagaaaaanggaaggaaagangggagannnagagnngagaaanannaaaggggggnnanaagatngnngnngggngaaaaanaggggtatgggggatgtgtttgangaaatgaggnatntgaagaatganaaggaaaattgggaaaagagtttaaataatggataaatgaagaatagataaaaa

SEQ ID NO: 524624 - DNA, 1056 bp, Homo sapiens
attctaatcgccaatggcattccttaatgcttaccgaacgaagaattctagagctatatacaactacgtcacaggccccaagcgtgtgtaggccccgtaggcgggctactacgaagcgcttcgctgacgccataaaactcttcaccaatagagcctcctaaaatccgccatcatctacgcgatcaccctctacaatcaagcgccccgatgcattagactctgcaccagtcgtctctctcgtagctatggaagccactccgaatgccactataacaccgaagcctatggtacaggctcaatgtgaggtctcctatttgtactagttccaaacctactgagccgtaaaacgtgtgctacttcaaagccttctgtatctaagggttgtagctaactaaaatcttcgaagtaacaaccccctagatcagtgggctactggcttgagtcatgttaactctcggagggaaggtgcggtgtgggagcccggcgcactccagcccatccaagtacctcagtttattcaaagccaatgtcagttcataccacatgctgggcatcccgttgtaaaaccgctgacgtgaacagccacctctcatcaactacaccacctgacgtagacattcctacttgccttttatccttcgagccacaagcaaatgggctcccatcttgtgtccgttacatcaattccggcattattgttcacaccatttaaaaccagaaggatggcatacgccgaaatcgggccacatatacgaacactatagcccgaaggggggggacgtgcctgcaaaagtaaaggtatcctccagggcgtatggaggcactcacggaattacagccccgaaagagcccgccttttcgacgccttaatcacctctgcagtatcccccgaatataacggcaaaaacgatttacttcagtagcttaagacaaccccgtgcaacgccacgttataaaacattcgctaagggacaccaggcaataatggaggacaactctcgggccatgcaaagtgcgtaaaagaagacactataaatgacgaggcaaaggagccct

SEQ ID NO: 524625 - DNA, 582 bp, Homo sapiens
ctatgtctatgagataatcatgtgtttttttgtcttcagttctgtttatgtgataaattacatttattgatttgcatatgttgaaccagccttgcttcccagggatgaagccaacttggtgggtggttgataagcattgtgatgtgctactggatttggtttgccagtattttattaaggatttttgcatcaatgtccatcaggcatattggcctgaagttttctacttttgttgtatctctgccaggttttcgtatcaggatgatgctggcctcataaaatgagttaaggaggagtccctccttttcaattgtttggaatagtttcagaataaatgctaccagctcctttttgtacctctggtagaattcagctgtaaatccatctggacctgggatattttttagttggtaggctatttgttactgcttctatttcagaacttgttattggtctattcagggattcagcttcttcctggtctagtcttgggagggtgtatgtgtccaggaatttacccatttttttaggttgtagggaggtgttttcctactgggtgtattagattattttatgttacta

SEQ ID NO: 524626 - DNA, 270 bp, Homo sapiens
agctatcggttattgggcccacatatgttgcacgatagggttctcaccacagctagaattgagtactcagactggtcttcctatctctcaggaacgtggggccagcggtgtggaggcacatctctgcatgctgtggggactgagagccgcaggacgtgcacttcggtggggtgcatgtagagctggtgagtaggctctacgctgctagctgcggaggagagcccgtcatggacctgttaacgatgttattgaacctggataagcttgccg

SEQ ID NO: 524627 - DNA, 205 bp, Homo sapiens
tcacctcccctgtgtgttacttgggagaggactggcccattctccttagagaggagagtggtggcttttaggatggcaagtgcatgacacttctgtgtactgaaaagacaggagtgaccatgccatgcggctgacaggactgaatgaattactaaagtgatagactcatcttaccagagagatagcagctgatgaagtaggagaa

SEQ ID NO: 524628 - DNA, 433 bp, Homo sapiens
  misc_feature (2)..(2): n is a, c, g, or t
  misc_feature (65)..(65): n is a, c, g, or t
  misc_feature (86)..(86): n is a, c, g, or t
  misc_feature (93)..(93): n is a, c, g, or t
  misc_feature (101)..(101): n is a, c, g, or t
  misc_feature (105)..(105): n is a, c, g, or t
  misc_feature (119)..(119): n is a, c, g, or t
  misc_feature (133)..(133): n is a, c, g, or t
  misc_feature (136)..(136): n is a, c, g, or t
  misc_feature (140)..(141): n is a, c, g, or t
  misc_feature (143)..(144): n is a, c, g, or t
  misc_feature (148)..(148): n is a, c, g, or t
  misc_feature (152)..(152): n is a, c, g, or t
  misc_feature (157)..(158): n is a, c, g, or t
  misc_feature (163)..(163): n is a, c, g, or t
  misc_feature (166)..(166): n is a, c, g, or t
  misc_feature (168)..(168): n is a, c, g, or t
  misc_feature (170)..(171): n is a, c, g, or t
  misc_feature (175)..(175): n is a, c, g, or t
  misc_feature (229)..(229): n is a, c, g, or t
  misc_feature (247)..(247): n is a, c, g, or t
  misc_feature (258)..(258): n is a, c, g, or t
  misc_feature (404)..(404): n is a, c, g, or t
cngtcatagctcagggaggcaaacagccacgggtcagccgaggaccagtccacggcatagacgcngtcctcgtgctcctcgtaggnggcgatngcgttgtnctgnaggggctccttgcncttctcttcagaanggnggtnntnntggncacngaggnnatcgncgncnannaagnggccgaaggctccgacgagatggacaccatgttggaaaggatgactctgctgtnactgctgcccgtgaggancagctggtcangagagtggttgtagcggacgttccacacccagtgggagtgctcctccagggtcttcacgggttcggtgacatttcgggtgtcccagaacttcaccttacagtcgtctccgcagctggccaagtagtactgcttattgggattaaantcaaggtcccgcaccagctgtccgtgggc

SEQ ID NO: 524629 - DNA, 246 bp, Homo sapiens
  misc_feature (58)..(58): n is a, c, g, or t
accgacgcgttcttcacgacaacctgcttagcctggagactgcggtctgagaacagcnaccttgtattctggctagatgaagtggcgaggagcagacgcagtcttccgttgcccggagcaggatgtcccgtttgacggcagctccctggacgtggggatggatgtcaggccctctgagcccccatgggaactcctggcgatcttcccagatctttaggtgaagtctgagccatctcctcctcagct

SEQ ID NO: 524630 - DNA, 264 bp, Homo sapiens
  misc_feature (49)..(49): n is a, c, g, or t
agaaaagaatgggctaatggtaatcgaggtcccgtgcgggtttttaagnttgggcacgcaggagcagcagcagcagcagcagcagcagcagcagcagcagcagcagcagcagcagcagcagcagcagcagcagcagcagcagcagcagcagcagcagtagcagcagcagcagcagcagcagcacgcagacaggcagcagaaataccagtagcagacatatagcacgcatctcgagacagaaaacggataaagtcaactgattat

SEQ ID NO: 524631 - DNA, 359 bp, Homo sapiens
atatgaaatagtgttcatcgtttaatttgaaaaagcattaacatttgggcattaccaaagtggcaaagatattaaaactttatggtgaaatgggagtattgattttgcggtacataattagaaaatgtccagcaaatgggagaacaggccaattattacctttaaaactattttttagggccaggcacagtggctcatgcctgtaatcccagtacctttgggaggccaaggcaggtggattgcttgaatccaggagttcgagaccagcctgggtgacatggcgaaaccctgtctctactaaaaatacaagaaataagtccagaatggtagcctgcacctgtagtcccaactacacaaaa

SEQ ID NO: 524632 - DNA, 366 bp, Homo sapiens
ttttccctcccccccagccatcctgtccctcattgggtttgtgctttcccctatacacagtccccgtcccaatgagaaacaagaaggagccccctccccatggatttccccctgcaagtgggcaacgacattcagtcctgccctgctcccctggggttaattaataattcctggctgcccccccatcctctttgatttgtgagaaacaggtaagctgctgtgacttccctttagggcaatgttgggttaatctttgaagggccccccgaagacctttttactgtgattttttacccctttccctcttggcttttttatgttgctttcatgaatggaatggaaaaaaaatgcctcagtttaggcccc

SEQ ID NO: 524633 - DNA, 149 bp, Homo sapiens
tgattgttgtgcttacatgttggaggtaacctgtgatgttgtcacgtcacgtcatttgcgcagtgcatgcattgtgtgcgcctgtgggtgtgtattgtggcgggcagtgaggggttataagcccagaccctccaggtaacaaccacagc

SEQ ID NO: 524634 - DNA, 144 bp, Homo sapiens
ctcctcctggcatacccttcaatgcattgcatacagttgtgctgccatggtcaattcaggtgtcaacatggtcaagccagtccaccatacacatgtttttgtcaattggtcattaattttgcagcaggcaaggggcatcctcta

SEQ ID NO: 524635 - DNA, 945 bp, Homo sapiens
  misc_feature (535)..(535): n is a, c, g, or t
agcggaggtggagccccaccgccccgcctgaaagctggttttctggccaatcagcgacttgagagttccttcaagagcgtgctagctgcgcggcgtgcacatcgctacatctgctgcgcggctgtgaaactggaccttgacatttggcccggcacggaacgtagatgaatgtggcatgtaacaccgttgacgtacggaacaacggactttcctgtcttcctagacggctcctgtgaacacgtggcatgagactacctgagccgctgtagtagtgcatcgcgacacctcccctgctcggcaccagctgtcgggcggtgcccggtaggtctcatgtgcatgctatgcgtgaggcgctgtattggaggcatggttgcacaggtcgctgcggtgcgcgcattcgtgtatgccggaactcgtcatgtggtccgcaggcgtgcgcgcgcgcctcagggcgtgtgggcccctgttgcccaatgaccggggatgattcgtcttggagccacgatccttaaaaggctcttcatctccctggaangctctagctggttgatttatattcacggctgcttacctgccgagagacatgtccttctagtcaactagagctccgtggagcgtatcatatggatgccttgatatcttccactttctgcgtcaaaaaatgtggagtttacgagtatggcgccaccatgcattgtagaatactatgcgagagaaggcattagttcagcagcagtaattataaatcttatgattattactccgtttcctccctaagctcatctcttgtaccgttcaacttttccattttcaaagcagttataattttactttcgcccgagagtattattgaagtcctgggcacaaaattagagttgcccattgagaattttcccaatgaaaaacttgatttggatcacagcatatcgatcattaattccccaa

SEQ ID NO: 524636 - DNA, 578 bp, Homo sapiens
ctagaggatcctacgctggtcgcagtctagggaaaagacagcagagtctgcacatcggttttcatctggtgtgtagagaattcacatagtagcgttttttggacttggacactaattcatctttatctaatagttgattgcagatcctcaataaacaaattggtgggacattatgggagccatctaataaacacaggaatttgacagcacaaattctcacataatggtcttctctcttagtattttccataacaatatttgccgcacaagtcatgtccaaggttttctatgaaggtctgtacatcctgaacaagtctttgatcacgcctaaaacacagttccaaatatacaagcctcaaggataagttcgctataatttttagcacttgataaagatccttgggacacatttgaagcagacactatccaagactgacagcagtaacttatcagtgtattgaagactccagtctttatagcagacatttcaattatcttgtacataatctcttttattttgaaatatgcctggcccttgattttggcagcaatggtaagaactttgttatcaaaaacaa

SEQ ID NO: 524637 - DNA, 142 bp, Homo sapiens
tatatcttaaggaggtagacactactatactagtcaactatatctctatcctttaatcttatagctccaatcctcagaactacgggaagctagatacacaggacaatgtatctaaatagtaccttaactacccgtggctacc

SEQ ID NO: 524638 - DNA, 384 bp, Homo sapiens
  misc_feature (23)..(23): n is a, c, g, or t
  misc_feature (94)..(94): n is a, c, g, or t
  misc_feature (107)..(108): n is a, c, g, or t
gtgtattgcaaagagggctttgnagcgcgagcgcggggcgcgggcaaccccccttattaaatcggacaccccccggcccgagcgcgaaccgcgngccagcgaccggnncggcggccagccacgaaccgaactaagccgagctaggtagcgaggcgtgcgcgtgggccggggcggcggcgccccccatccccagcaccgaggggcgagcatggcccgcccgcgggggggctggaccgccgcgcacgccgcccgatccccgcgccctacccagcccgggtcgccgccgctcgcacccgccgcttagcgctcgggcgccgctcgcttctccgggcatcgcggaaatcccgccgcagacggacacaatggcggcggcggcggcggccg

SEQ ID NO: 524639 - DNA, 715 bp, Homo sapiens
ctcacccacacctacattctctgtaaagttggaggtggaaataatcggtaccctctttttcctgctggtcgacgggccctccaagagtttggggcgcggaccggagtaccttggggggagttatgtcggggtcggtagggtctgtcatttcgcggttcttagaagagtacttgagctccactccggagcggctgaagttgctggacgcgtacctgctggatatactgctgaccggagcgctgcagttcggatactgtctcctcgtggggaccttgcccttcaactcttttctcttgggcttgatctattgtgtggggagtttcatcctaacgggttgcctgagaatacagatcatcccacataacaaatcggatttccaaggcatcttcccagagcgaggctttggtgattttatctttgccagcaccatgctggaccttgttgtcatgaactttgttggctgaatgattgtcatttacttaattgaggagtaggagactaaaagaatgttcactttttgaatttcctggataagaagtcttggagatggcagcttattggacacatggattttcttcagatttgcacttacttgtagctttgctttttatgcaggagaaaagcccagagttcacctgggggttagaacaactttgtaacaaacatttattaatccaagcctgggctttcaataaaaggaaacctttggcttttt

SEQ ID NO: 524640 - DNA, 278 bp, Homo sapiens
tgtagtcgctcttgggggggggaaggggagagggagagcttttatatcttcttgagttcttgtttaattcatccgggctcctcggtggtgccatcttcattaaccggtttggcctcttccccatcgctgatattatggctaccatgtatcttggccccatgagtttcctgtttactctgatctggggtgccctttctacttccgggcctgtttacaggtcttccagctggggatataagggccatctttatcattagaaaccaagagcgacggacagg

SEQ ID NO: 524641 - DNA, 468 bp, Homo sapiens
  misc_feature (26)..(26): n is a, c, g, or t
aacggattacctcaagatagattatncctaacttaagactgaaactaaaaacatactagaagaaaacctagaaaaaaatattctagacattggcttaggcaaaaaatttattacaaagaccccaaaaaatgcaacaaaacaaaaacagacaaatgggacttaattaaactaaaaaccttctggaaaacaaaagaaatgatcaagggaataaacagacaacctacagaatgggatcagatatttgcaaattaggcctccaaccaagggctaatatcaagaatctataaggaattcaaataacttaacaagaaaaaacaaacaactctattaaaaactgggcaatgggcatgtacagacatttctaaaaagaagaaataaaaatgggcaacaaacacataaaaatatgttcaatatcactaatcattagaaaaataaaaattaaaagcacattgaggtaatccgtgaggg

SEQ ID NO: 524642 - DNA, 209 bp, Homo sapiens
  misc_feature (1)..(1): n is a, c, g, or t
  misc_feature (3)..(3): n is a, c, g, or t
  misc_feature (15)..(15): n is a, c, g, or t
  misc_feature (91)..(91): n is a, c, g, or t
nanttcggcacaggngaattgaagtctggcttaaatcttcagaaagttatatatctattttattttatttttttgagacagagtctcgccngtgtcacccaggctggagtgcagtgccacaatcttggctcactgcaacctctgagtcccaggttcaggcgatactcgtgcctcagcctcctgagtagctgggactacaggcgtgcacc

SEQ ID NO: 524643 - DNA, 113 bp, Homo sapiens
ctttgccattctgatgggcaaggggtctggccctgtatgatgtcgggtgaccattctcgctctccatccagagccttttaggagaaccaaacattgatagtcccttgaacaca

SEQ ID NO: 524644 - DNA, 633 bp, Homo sapiens
  misc_feature (155)..(155): n is a, c, g, or t
  misc_feature (234)..(234): n is a, c, g, or t
  misc_feature (249)..(249): n is a, c, g, or t
tggaagttcggaatcctcttttgggaaatcatccttttggggaagtgcctatccaaaaattcccctaaaggacgtgtcccctcgggtggaaaagggctcaagatgggatgcccccgccggctgccccgcccgcagtctataaagtcatgaaaaantgctggcacctggacgccgccatgcggccctccttcctacagctccgagagcaggttgagcacatcaaaacccccgagntgcacctgtgacggntggcctccgcctgggtcatgggcctgtggggacttaacctggaaaatcatggacctggtgcccctgctcactgggcccgagccttaaattaaccccaacggggtggcgggccttttttctgggttccaacctgcacccctccgggccccgtttttttttggacccacctgtgggggcctggggagcccccttaggggccagggaagaaagaggccccggaacgggaggcagcgcccccccacgttggggttccctggcctcccccccctcgcctttttaaagttttattcctttccttttttgaaattttttttccgggggtttattttttattatttttcaaaataaggaaaaaaaaaggacccaccaaatgggcctttttca

SEQ ID NO: 524645 - DNA, 861 bp, Homo sapiens
  misc_feature (24)..(24): n is a, c, g, or t
  misc_feature (83)..(83): n is a, c, g, or t
  misc_feature (100)..(102): n is a, c, g, or t
  misc_feature (109)..(109): n is a, c, g, or t
  misc_feature (159)..(161): n is a, c, g, or t
  misc_feature (163)..(163): n is a, c, g, or t
  misc_feature (166)..(167): n is a, c, g, or t
  misc_feature (176)..(176): n is a, c, g, or t
  misc_feature (183)..(183): n is a, c, g, or t
  misc_feature (388)..(388): n is a, c, g, or t
  misc_feature (391)..(391): n is a, c, g, or t
  misc_feature (415)..(415): n is a, c, g, or t
  misc_feature (432)..(432): n is a, c, g, or t
  misc_feature (493)..(493): n is a, c, g, or t
  misc_feature (497)..(497): n is a, c, g, or t
  misc_feature (514)..(514): n is a, c, g, or t
  misc_feature (659)..(659): n is a, c, g, or t
  misc_feature (744)..(744): n is a, c, g, or t
  misc_feature (749)..(749): n is a, c, g, or t
  misc_feature (751)..(751): n is a, c, g, or t
  misc_feature (753)..(753): n is a, c, g, or t
  misc_feature (757)..(760): n is a, c, g, or t
  misc_feature (762)..(762): n is a, c, g, or t
  misc_feature (765)..(765): n is a, c, g, or t
  misc_feature (767)..(767): n is a, c, g, or t
  misc_feature (810)..(810): n is a, c, g, or t
gaacatcagactgaatatcatcanacacatacacaaaaccactcatctctaaagtcattttctataccctctcaaaatttttncagtttttttttcctcnnncaatttnccactccaaccccaaacaccaacatggaataaatggaaacactagccttnnngnttnncccacagtnccaaagngctattacagggggaatatctgcggcaggggggcattcttgctgctgggggtgtgagtaaaatgcttagttccttctaaaatcataattgcaatatggacttctgcttcacgctgcatcctaaggcacaaatcaggtaacctacatctcccaaatgatcaacagagcactccatcctattttacccccaatgctgagaaattacnccngggcccagaagttgtcacataggnggcttgggttacttggngcccaggcaacaactgccacaggccccagcttgatgaacaccatcaatttctttaaatatnttgntactaagatggaggccnctgctcagaggaagcaaggacgtaaacgctgggacagactgcactgagggtcactacactaacagacccagatgacacgatggaacatgaatactgaagctgacaatcttctgaaaaatctctttttcaaaacccatacgcctantcgagaaatcagggacagggaaacattcgcataattacccaccaacatgttcttcttaacagaagtgaagattattttaagaatnttttnantntttnnnnanatntnttttcagggatagaccagagcagcagaagtacttttcagagcnggttcattttaaagtctatctcaagaacaagggcagcctgctttcacaagg

SEQ ID NO: 524646 - DNA, 134 bp, Homo sapiens
tctacaggatcttactggtatcccaccagctataacaagattctccttgctcaaaggggcttctatggaaggagtgggaatacttagaaacaaggaacatggtgtccctgtttattgttgtccaggaacttggg

SEQ ID NO: 524647 - DNA, 195 bp, Homo sapiens
ttacgactcgagctcggtaccatgctcatccctccttacgagccacagttctcgaactcaaaggacctgggggtgcttcatatccctctagaggagcctgttctgtaatcgagtaaaccccgatcaagcctcaccacctcttgctctgccttatataccgccttatgctcatccctccttatgctcatccctccg

SEQ ID NO: 524648 - DNA, 988 bp, Homo sapiens
tggccgggggtacaatttatccaggggcaacattattatacagaaataaatggtatggggggtgggacacgggaacccccggcagccccaccccttagctgggctctcggggtcctggcagggggcaagaagctggccggagacccgcatctgggtggccagtgcacaaagaaaccactcgacagagggccagacaagaatctctatcgccctctcaaggtggctctggggagatcccggggtgggcaaagatctcacactgcggccacaggggccatgggggagaatgtaagacgcccagtgggtgacaggtaacccaatttccccaaaaggaatgcacaaggggcgcttctgggcgtaggcgtctgggggagaagtgcgacacacacagacgcgacaggcgaggggcactctggtgcctcacagggggtctgagagcgccaccagggagcggggacaagcctcctataaggcgcgcaccataggggggccctctcatctgccgggcggggtcacaccacggcccagagaaattgcgcgacgggatatggagcctataattcccacaccacagggggtccatcataccattccacagggagaccccttggggggggggcacccagggggacgcttgggacggggtgagagaaactcccttaaatgggcccaagtggcccgggacactgtggggcggcaccacattaccacgggccaactccaaatggcgccaagggcctataagggaaccccaacacagggcccaccttcatccccggggggggcctcaggggaacactgggggagcgttagaaagcccaagggaggactcgtgggagctcaaaaacccctgttggaggcgcacagtggggggtcagaagattcgagaaaacgggacagggacacgggacaggccccgtgggggaacgcgaccacagaaggggggttccaaacgcctccagggggagaggacatactctggccccaa

SEQ ID NO: 524649 - DNA, 383 bp, Homo sapiens
ctgccccatttgctgcctgcgctggggttcaaaaacaagactgtccctaagaagcgctgcaaggactgttacctggtgaagaggcggggtcggtggtacgtctactgtaaaacccatccgaggcacaagcagagacagatgtagaccctttccctccagagtcacgcacatactcgtcatcgcatcacttgggagaatggttggattttaaggaaggaattatcccatcaaggagtcaggggaaagtggctggaaaccaacgccctaaaagttacccctcccggttcaggggaaatgaggaactaaagaagaccatggggtattttatttcccaaacggtcccactaaaaaaccttttcctttttaaataggccttccgaaaa

SEQ ID NO: 524650 - DNA, 950 bp, Homo sapiens
ggaactcgggcgggtaggcgtctgcgctcggttgagggctcggcgtcgggtgttcccggtaccttcttgctgcgcggatgcacgctacgggaattcggcctgacccaaaccccatggcttcagaagagctacagaaggatcgtagaagagtgtaacaggtgttgcttggtaaaaatggctatgtaggaaacgagtacggtgatgcctcttacatgctgaggaatgcaaagattgagagagatcgtctaggaccaaggatgcatggagaagaattatggaagagatgcagaatcttctgattggtgagaaagatcagctggatgtggattggtcgccagtgaaaggggtgttatacggtgaaccatcagggggagtttatggagtgggactcaagacgagataagttgtgagaaatcctacattaccttgactggagtacatcaacgttcccacgtgtgaactgtgcaggtgcatgccacagagaaggtcatgggagcgtttagagtgccacgaatctataactggctacagaggtgtcgatgattgtgaacgatcgctgggaaaccgatctctgtgcgcaggcagttcaacgcaagtccaggactgctacaaggctcaatattgtgtgaccgcggcgggaaactgcccggtgggatcactgacccaggttgcaccggagtggggagacaagagcaggcctctagacatgaacatcgtcctctgacgttgggacatgcaagagagctggacgacggcgtgctcgtacgacctcaacgccggtggcacggggggacgccaggacggaacggataaggaggaacgtaagaggccacgtgtccagcgacagggcgatcacaggacagacacacaccagaggcgacacacagggagaagacgaacagaggaacgaagggagctcgaaacaacaacgaagcgtcagacggaacaat

SEQ ID NO: 524651 - DNA, 613 bp, Homo sapiens
ccatcctgaacaaccaagatactacatgcttaagtccaaatgtgctagcttacttcagtgtaataacaaatttgagaattattggtattctggcctggattggccatggatagtagaccaggaccagtatgtttcacatctacacaatattcatcttcaagatttgtctccataaatggactggccgtcggttcaaacatgtatggtgatatctcctccttggcaaacaaaatctggaattactctgtgaaaaatggaattctagaatccaaagcctttctctccagtgcatagtgctctgaagttctcagcagtccgaggaacaatgtttgaaaataattccatagttatccgccctagaggttcaccgtccgcacaaacaccaaaaaacaccacaggattggtctcctttgatagttctgctgccagtgatacatgtcctttctggagtttcattaaattctgctgacattcttcaaatgttttcttgaaacaatcagctacttctttagttttaaatctcactgcaagctgttctacttttgcttctccatcagcataatctgaggcagtccaaactaaagcattatttgaaacatttacgggctttaat

SEQ ID NO: 524652 - DNA, 167 bp, Homo sapiens
gcaggaggaggaagggaagagctggtaccctgggcgatcaccacataccaagccctggacggctagtgactaaggaggcgggtagactgtctagctagcatgctgcttatagtcatgcgagacgcactgaacagttgagggacatataggattactggagggagccc

SEQ ID NO: 524653 - DNA, 111 bp, Homo sapiens
aacatattaaagtcgtgacagaatttcaccaggtaggcccacggctggtctcaaactcgctggcttcaagcagatctgcctgccttgcgcctacccaagagtgtttaggat

SEQ ID NO: 524654 - DNA, 272 bp, Homo sapiens
gaattctggatcctcgttgggggaaatattagacatctgagactcaaaataggaggatttgggtagattttcatatatctgttataaaatggaagcattattattatttatgtgtggtaaagccaacagatcagaagacaactgccattgaaaagagagtttgttactcacagtttcctggaggaggagcatgcagaaccacatggggaagcacctaagcagaagtgcagcaagacatgccagcagagtccttactgttgggccttccagga

SEQ ID NO: 524655 - DNA, 868 bp, Homo sapiens
  misc_feature (1)..(2): n is a, c, g, or t
nngctccctcgctggcggtgggtatataacagagcggctttgtgtgagccgcccgcgtcgtcctggggcagcagcccccccaccgcttgtttcgcgcccccagtagcaaacagcccccgggcggtagtcactccctctagggtggtttgtcttatgagctgcgccggcgggggtaacaaacttttttcctcaccagcagaagcgcacgcagtctagctcccgcttcgtgcgcgcctcttttttgggaggagaccacttagtgaacacacaggttcgtgttgtagacagacaacacacacggcggtgggtgtttctcgttgcctcgcgtttttctcccgcggtgtattgtttggtccacgcaccgcgcgtcctccgagcgacgcacgcggggtggcctcggctggggtgtgtcatcacaccacccacgccgtgtgaatacataaaagcctgtcttctgggaggcgcggcgcgcgtggtctccctcatcgttgtgctcccccagtgtcttccaggggggcgtgatggtggtggttttatcctctccttcgccgcccccgccccccctctctttaacacctgaggggggtgaaaggctgctctcttctcgcaaaagcattttgttttttcctgctgggccgcctctctatgatgttttgttaggtagtggaagtgatggtggttgtagaatgaacagcacgaccttgttgctacctctctgcccgaagagaggaagaattatatttttgtggccccgccggctgtttttttttttggccggggccccttttatttttttttttttttaaacacctcttttttttggggaaacccccgccccccaatttttccccagttttgggccccccta

SEQ ID NO: 524656 - DNA, 269 bp, Homo sapiens
aacagtggatacgctacatataaaattcaggtagatatgtttttcatctagcatattaatgttatcagaatcattagcttgcaatgattctaataaaaagtttgctgtaattcttaccttatgtaatagtttgctagggctgtcatatgaaaatagcacagactcggtgtctttttttttttttttttacaaatggattatcaccccgccccccaggttgaagtgctgtgttgcgacctcagtcaattgcaccccccacctcccgggct

SEQ ID NO: 524657 - DNA, 225 bp, Homo sapiens
tgaatggtgatctaacgacgcctatggtcctgtggctgtcagatccaaagttcctgtattctgagcttccccgctgatgcagtgcttgacagattgcacacgaggacgaggcactggagattcttcaccgtgtccacgacggagccatagctttcctctgatttctatgcttgagaggatgtaaccattgttgaccctgttatgacttctgaccccaaactgaac

SEQ ID NO: 524658 - DNA, 496 bp, Homo sapiens
tcgaggaatctgatgcgagaatagtagcagactctgatcagctgacttcagtgatgattttagtgatgattttgttacatgctcgtcgaaggcggtcaaggagaaatcagaaaagactaattaactactaagaagactcagaaagtgacggttcccagaacattttgcgacgtggtcactaattaaagcgagttcacgagcgaagactttccagctcagagagtgaagagagctatttgtccaagaactctgaagatgatgagctagctaaagaatcaaagcggtcagttcgaaagcggggccgaagcacagacgagtattcagaagcagatgaggaggaggaggaagaggaaggcaaaccatcccgcaaacggctacaccggattgagacggatgaggaggagagttgtgacaatgctcatggagatgcaaatcagcctgcccgtgacagccagcctagggtcctgccctcagaacaagagagcaccaagaagcc

SEQ ID NO: 524659 - DNA, 281 bp, Homo sapiens
  misc_feature (32)..(32): n is a, c, g, or t
  misc_feature (50)..(50): n is a, c, g, or t
  misc_feature (58)..(60): n is a, c, g, or t
  misc_feature (239)..(239): n is a, c, g, or t
  misc_feature (259)..(259): n is a, c, g, or t
atagattttagcatttcattagggcgaggtgntgtcggagaatgagctanggataacnnnaaagtctgcctaaagaacgagagattagagccccgcagaccttcttgaaaacttaacacccctcagacccccaaaactctaccccctcacacagcctcacactcacttggaacccttctgccccctcaaattaagcccctcacaacaactggcttcgacctttctaggctgtacctccnataaatattttaattaatgnattcctacagatgctgggagcc

SEQ ID NO: 524660 - DNA, 772 bp, Homo sapiens
tataatgtaatatatataggggagtttttaaaaatttaattattattattattttttttttgagacagtctccaccatgcccggcagggagtttattaagtaataacttacatggtcacaaggtcccaagtagctgggactacaggtgcccatcaccacacccagctaatttttgtatttttagtagaaatgggttttcaccatgttgtccaggctgttcctgagctcctgacctcgggtgatctgcccgcctctgtctcccaaagtactgggattacaggcgtgagccaccatgcccggcaaggagagccagtccgagtctcaaaactgaacgaacttggggtctgactgtatgagggcaggacagcattcacgcagggcgcacaaagcatgtagactggcgcaggcccggcccatctctctctcacacaattcctcatgccctgcttcactcctccgctgccacacctgcattcagatatgtgccctaccacgatcacagcacggactctgcacttcccacagcccactgatctccacatatcacctctctactcccggcaaccacaccaacacacaccacaccctaaccattaaactacttccgatattacccctccaactccccaacatccaaactccagacaaccctccacgcactatacacccaatccaccattgacaccccacactcgattcgaacgtctaccacactcaccagataattttcccctcggccattacaacttccatctcaattctcccaaactac

SEQ ID NO: 524661 - DNA, 297 bp, Homo sapiens
tgtgtggaggaatacgatttgcacagattacatcacttttcagagttagagtagcataatagcttggaaagtatagtaaacagcttgacaaagcaggagtacattcaattccgtacatatatactctatagtttgtgacgtgaccatcatttctgctggtttgcaggtgtaagaattaaaagaatatatttgtacactttagcatacttgcggctaccaagatcccgatctaagattcttgaggcactacgtctctacctcgataaagtatacagtattctaacagacatttttgaa

SEQ ID NO: 524662 - DNA, 368 bp, Homo sapiens
gcacgaggtagcatttatcaacactttattcctttttgtgggtaaataatattccattgtatggatataccatacgttgtttattctttcatcagttgatacacgcttgggttgttgccacatttagctattatgaataatgctgctaaaacactcacatacaagtttttatgtggatgtatgttttccactcccttgggcatatacctcggagtgggattcctgggtcaacatagtgagaaccccatctctacaaaaaatgtaaaactggctgttagtggggcacacaactgtaggtccatctattcaggaggctccggtgggaggttaggctgtagtaagcccaattgtccactactccaaccagg

SEQ ID NO: 524663 - DNA, 1432 bp, Homo sapiens
  misc_feature (1432)..(1432): n is a, c, g, or t
aagattgtaaactgaagatgaacatgattatactctgttggaagagcctaagaggaaactgatgacatgagtttcagagagtaatgcttaagccactcagtgtacgacaggatgcgcagtcttgtcgtttgcctcttctgttaagttgacccactacgagtgatttatgtagatctgctaatgggttgccaaccacaaccgatagcgttagacacttgggacttcagatctacatgagaggattgcatatacaagtatctcctggtgtctccgatagcacgtgccttcccagggaacgaggatcttgcgcgatcagcaataattcaggtggttgtcctttctccacttgtgttgctaatatcagtcggtccagagaagataacgccaggtggtctgcacttcagccagaggggcgagatgcagctataccgtgttctatcaccttttctagtccgtcactctagtcttgataagcatttaatgatcgtcagcgtgtgagttgtaactctattaattatacatattgaacttataagtcttcaatttatacatttaattattgctgacgatgggaaggttccaactcgtgtttcgccaggcctggacgtgagatgtgtgtacaaatcatgtgggctcatcatgggaaggcatagcgactctcccgaggatttcaaagcaaaattctttccctgtggtcaagccatcactgaagttggctggggactaactggggggcggtaacctgttctttaagatagaagcaactgggggttttcacccaatgttcgtgccaaccgaatgggtcttctaagttccgcttggagccctattgttgtgaatctgtggcataggcctcaaaaggtttgcgcgcaaagagttgcgttggagatttcaactggtgtgttttgacgcgatttacaggatcccacggttttgctctatgtttgtcaagctgtgaaaagcctaaaaaagtttgtatggcaataagtgataacggaagagagggtgatctataaaggagactggacacaagaggtatagtaaagaacagaagctagatctaatgaacaaaaacgcggacctttcgtggcaccacagggtgggaacagcgagggggacaagctacttgagaacaattaaacccgcaagcaggagacaaaaaaaacttggagcacaaacactacacaaaaaaaagagagaaagaaagggagggcaaacaacaccagaggagcgaaatgttagaagaacaaacaacggagcggacaacacagaggaaggatacagaacaaaaagacgagcaaagacacactacgagcgatcacaaagatatgagcaccgacccaaccaaccataatatagcaggcaagcatcggacgaacagaccacaaacaacactactcctccctcccgatgacaacaacctccactgtgn

SEQ ID NO: 524664 - DNA, 274 bp, Homo sapiens
  misc_feature (2)..(2): n is a, c, g, or t
  misc_feature (65)..(65): n is a, c, g, or t
  misc_feature (67)..(67): n is a, c, g, or t
  misc_feature (94)..(94): n is a, c, g, or t
  misc_feature (131)..(131): n is a, c, g, or t
  misc_feature (154)..(154): n is a, c, g, or t
  misc_feature (198)..(198): n is a, c, g, or t
  misc_feature (216)..(216): n is a, c, g, or t
  misc_feature (226)..(226): n is a, c, g, or t
  misc_feature (228)..(228): n is a, c, g, or t
  misc_feature (235)..(235): n is a, c, g, or t
  misc_feature (255)..(255): n is a, c, g, or t
  misc_feature (263)..(263): n is a, c, g, or t
  misc_feature (267)..(267): n is a, c, g, or t
gnctttcctcttgaagaacttccactggactttgatggcgagtattcagtcgttgatggagggcntntggcaagcggaggtgcagacatgcgcntggggggggtggggggggccggagcggggcgcggggngggggcggggcgggggccgggcnggggttgggagggcggggccggcggggagggtcgcgccgcgggngcccgcgctttacttgancgccttttgngntttttgngacgatttggtgaatttgcnggcgccgngctnttttttt

SEQ ID NO: 524665 - DNA, 111 bp, Homo sapiens
tcccagacctgcgcttatcagctatttgactcttatctctgagtttgaagattttaatctataaaacaagaatagggccaggcacagtggctcatgcctataatcccagca

SEQ ID NO: 524666 - DNA, 165 bp, Homo sapiens
ttttttaaaaaaaaaaattttttttaccccttttgggttttaaatttctttcccccaaaacccaaaggcccggttttgtttttacccttgggaaaaaattaaaaaaatttggggccttttttttttttttccccccggaaaaaaaaaattaaccccttggtttta

SEQ ID NO: 524667 - DNA, 164 bp, Homo sapiens
tagaggaccgccagaggacaggaggatatacaaggggagggacgggtctccatttaaactttggaccacaaagtgcaaggggacactcagcacctctaagaaattctatattttcctaaaacttaatccctactccccaaaaggactctatcatgccttctcct

SEQ ID NO: 524668 - DNA, 166 bp, Homo sapiens
tgtgtgtgtgtgtgtatgtgtatatggacatggcctggtgtgtgtgtgtgtgtgtatatatatatggcatgtgtgtgtacatatatatatatatggtctctgtgtgtgtgtgtgtgtgtatgtatatatatatgtgtgtgtgtgtgtgtgtgtgagacccggtgtg

SEQ ID NO: 524669 - DNA, 368 bp, Homo sapiens
tataaagaggtcccgtggaactacacgtgccgggagctggcacctactgagtggggctggagaacggaatcccacggggacctgatccggtgcacggggctcacctaccagtgcgagcctggcttccagctgctaggctcctacattcttacttgccagtgggacctgtcttgtagcgcctggccaaccggctgccaaaagatcatgacttgtgctgaccctgtcgagattgacaacggtcaccgaaccgcctcggacgccggcttcccatgtcggctaccacgtccagatccgctgcctgacatggtacatgctaaatggggcaaacatgctcacctgctacagccgggacacatgcacacgcaagt

SEQ ID NO: 524670 - DNA, 100 bp, Homo sapiens
tttgagtagcagagattgaagagtacaaatctgaccaagatgttgatgttggataagagaatactctgctccccacctctaaagtagcccgccaatcgaa

SEQ ID NO: 524671 - DNA, 373 bp, Homo sapiens
  misc_feature (57)..(57): n is a, c, g, or t
  misc_feature (59)..(59): n is a, c, g, or t
  misc_feature (314)..(316): n is a, c, g, or t
cttactttttttctacggagcgcgcattgtgttgtacagggattcggcattttgccngnggagctttattttttaatcgaacagggcttaaaaacccaccgggtccttaaattccaaaccttgttttaaaaatttggtggggggaccctggggaaaaacccaccctctctgggggtttttttttatatttttcccccggaaaagggggcctttttttttttttttgggcaccaatttttccccccgggagaaaaatcttttcttttgataaaaaccccccctttttttttttgtggacgcacacaaaaaaaaannngggggggtggtgcccccgccccccccccttctgtggtgggggaggagaaaaaacaac

SEQ ID NO: 524672 - DNA, 271 bp, Homo sapiens
  misc_feature (6)..(6): n is a, c, g, or t
gtttgntagtagtatttagggttggaaagtggtcttcccagattcagacaaggtttcacgtgcctcgccctactcaggatactgttaagtaaaaaagagttttcatatacgggagtatcaccctctatgcttaaactttccagattattctattaactctttttagtctatgttacagtcctacaaccccactagtaaactagtggtttgccctcttacgatttcgctcgccgctactttcgtaatctcatttggcactgtttggactctg

SEQ ID NO: 524673 - DNA, 1418 bp, Homo sapiens
  misc_feature (1093)..(1093): n is a, c, g, or t
  misc_feature (1160)..(1160): n is a, c, g, or t
  misc_feature (1174)..(1174): n is a, c, g, or t
  misc_feature (1176)..(1176): n is a, c, g, or t
gatcatttttaaatgtggtgttgggagacttcgctgatataagaggtgtgggcagacaaccaaatgacgtgttgggggtgtgtgtcccaccgaaagaaccgtggtctaccaccgaaggagacacatggtttttcgtaccgacgaccagcccccctgtggggaccacccagaaagaacccctctgcacacagagaattggggcgccgcacctttttttggggagtttcgccaacaacaacgcggggggaatttttttctcttaagatgtttcttttttgtggccgaacacccaccacataaagaaataatattgtcgggggagacaattggggcgcccaaaaaacaccacggggtaatgtgttttgacaccccacatttgtgaaccttccaaaaaagggggaaattaaatgtcctctcccccacccgcttaagcttgccccaactgccgtgtggaggttgtataagatgtgggtggcggaaaattatctgtcctatatattaaggcgagaacattttatatggcaggtgatatatctcctcgttatgggttaccccttgtgggagaccccccacgagaaaaaaatagtgtggggatatatttgtataaaaagcacccggagatgcccctaaacgccccggtaataatatatgctttttggagacataatggagatcgccccagaaagatgttctcacaccccgcacatcggctctttgagaacacacgctgtgtttgcccctctatagagaaaaaaaggctctttttgcatattatctctattctccctcgtgttgacacacactatttttttctcctgttatatgtttaagaattttctcggctcttgcgtgtgttttcctctgcgcacatctggcacatctttaaatggagtgccccctcttgtgtctccgcccacacccctctccacacaccacacatacacactctttttgtgataagaatgttatacaatgagagtgtgtgtatacatcacttgttatacaatgtgagtgttccccgctgaccacactttaggtgaagagcactctcgagagagacacacacaatgtttctagaaataatatgtgtttnctctctcacacaaggggctcttgtgtataacccacactctcactctgtgtaacaaagggagacagtnttctctctggtgtntnttggtgtttgtgtgtgtgtgggtgtacgccacttatgtctaatatatttgacttttaagaggggtaacacttaaactccacgttattttttaagcctttttatgaacctttgagtcttgctaagggagttctccacaataatctctcccttgagggcctcttttatattttttaaatgagattataagatatgtgatttgccttgttatgtggctaattagtcggccaagctggaagtccca

SEQ ID NO: 524674 - DNA, 653 bp, Homo sapiens
  misc_feature (560)..(560): n is a, c, g, or t
tggtgcggcgacttgaaatctgtttacccacaatctgctgagctcgcatgtgcggggggtggggtcccgtggtttccccctgcgcctccaggccaccgaggtccgtatctgccctggtggaatttcaaccccaatttcgtgtggcgcgttatgaatacctaaaggtggaggtggctcggcgtcccgtggaggcggccgataacttgcgttctgactccaggtgccgaaagggccggttgagggatatgaggagaagtgaggagtttctctgaggaccagtgcaccaccgtgcgtgctggaggttggaagtgatagagggcacccttgcagttgcccggaatcgggacgttatgttccccatcagccgggggatccccaacatgctgctgagtggagaggaactgacagtcgattgtgccagggcgcaagttttccctggtaaatggacctgggtatctcggtggatctataccctgtttccgaattcggccggtgtgtttccccaacctttgacccattgacaccaaacacagtgttttagagctcggtatatatatcgntctcattaagggtttaaaaccctagaaaaaaacatcaatcacaacacaaacaaaactttttggcgccctgggcccctgaaaactttttaaaac

SEQ ID NO: 524675 - DNA, 365 bp, Homo sapiens
ccccactcgaatatgtaacggagatgctgagaatcagctgtttcttttgctctcccagcacgaagtctttgttgagagaggagatcgtggaccctctgtacggcatagctgaggtggagattcccaacatccagaagcagaggaagcagcttgcaagattggtgttagactgggattcagtcagagccaggtggaaccaagctcacaaatcctcaggaaccaactttcaggggcttccatcaaaaatagatactctaaaggaagagatggatgaagctggaaataaagtagaacagtgcaaggatcaacttgcagcagacatgtacaactttatggccaaagaaggggagtatggcaaattcttt

SEQ ID NO: 524676 - DNA, 849 bp, Homo sapiens
cacgcgcgagccaccatgacgtggcatgaacaggttataaatctttataagttaaagcaaataggccaggtacaccagggttggaaaaaccacactaggcaaagaacgttgcgtcgaaaatcaggactgaaatacattaatgtgggtgatttagctcgagaagtctgatcatcggatatcatggcagtcatggctagagatcggcgttcttcccaagagcgatgccgagatagatgcacagatgatggcgacaaatcctgaaggtatatggggattacagaatatgagccaagagttataagtcagatgttggagttgccttccgatatgtgagcacaattgctagatgatgcaaatagattcattcaagccatgctaagaaagctactgttgatgcagatgatgtgcgatatggcaaatccagtgccgcgcgtgatcagtcttttatgcgtctcctcccctgaagagatttgttacttagatatagcaatggcatagaaagtcaaacccgctttgcctattgatcaggccatattcaggtactaggttgccatctgatagatactgcttaacagctccaaagtataggctgaaatctttacggaaaaaggcgctccatctgtctgcgtggaagaataacagtcccgggtgcaaggtgttggtctcagtttactagcagaaccaagttactcccacatctaggcagcacgcaatccactatagacatgatttgttcgaacctaaaagtaggggactcccatgtccctccacagggtcacaggtgtacgggtaccagattgcctactttctacagtcctccagctgtgaacagcttcgaattcctggcac

SEQ ID NO: 524677 - DNA, 328 bp, Homo sapiens
  misc_feature (108)..(109): n is a, c, g, or t
aaagaaaaattgggccaaggggccagtggcacaccaccctgtaatctgggcctccccacagtgctgggattaacaggccctgagccccccggggccggcccccccctnnattggagaaagaagaatagaagaaaatcaacctgagtaaaagcagcactggttttgagttttctaagctcagggtcttcattagagacctctggaaatacattaaggatggtgggggtagataatccattcagccagacaaacggggccagctcttaaaataagaaagctgagactgaggaggtgaaactgaaaataaaaagagaaagttcatcctcta

SEQ ID NO: 524678 - DNA, 420 bp, Homo sapiens
gcggatccctggatagcgctcgggttacgtaggtttgttgtgggtgtgtgtgagatggagtcgcccaggctggagtgcagtggccgtgatcttggctcactgcttgctctgcctcacgggttccagtgattctcctgcctcagcctcccgagtagctgggacagtgattctcctgcctcagcctcctgagtagctgggactacaggcgcatgccaccatgcccagctgatttttaaatatttttagtagagattgggttttgccgtgttggtcaggctggtctcgaattcctgacttcagcctctcatagtgctggcattacaggtgtgagccaacatgcccggcccactttccacattttcgaagagtgaaacgaaaaaggtattatcatggtatctcttcccctaaaaccacacatgc

SEQ ID NO: 524679 - DNA, 422 bp, Homo sapiens
ggtagtggtttttgctttcatatctagtgctcctttcaagatctctgtagggtaggtatagtggtaacaaactccctcaacatttgcttatatgaaaaggatcttatttcttcttcacttaggaagtttaggtttggctgggtatgaaattcttggctgaagattttttatttaagaatattgaatataggcccccaatctcttctgacttgtagggtttcagctgagaggtcttctgttagcctgatggggtccctttgtaggtaatctgccccttatctctagctgcctttaacattctttctttcattgtgaccttggaaaatctgatgattatgtgtcttgtgggtgatcttcttttttttttttccttttttttttttagttggccaaggggaacccccggggtctcctcttgattc

SEQ ID NO: 524680 - DNA, 150 bp, Homo sapiens
gcgtttcatacaggtttgggaatctgtcatcagtcgtttgattgataacatgttctggtatgctgtaatctgctgagtattgtgtgcacgtcgtgaacagtcattatctcatgctgatttactttggctgcacctaggcgctatcaagta

SEQ ID NO: 524681 - DNA, 156 bp, Homo sapiens
cagaagtcatcaagtagaacctcagtttgctaactgaagtgttttattagtattttactctagcggtgtaattgtaatgtagaacagttgtgtggtagtgtgatccgtctgaatctaactagtatgggagaaaaagtcgagttaccgtatactagc

SEQ ID NO: 524682 - DNA, 507 bp, Homo sapiens
ggtgacagaggaaaaaactaaaaatgcctgttttttttgcatgaacacacgcaatggttttatcaacggatgaagaagtttgccgaatggtggtgaacgcctgaagacctttcccaatcttcccaagaacccggccctttccctggggaaaattttgattccaacccaaaatttcccctagcttttttttgataaaaacctttcccaatttggcttttcttgaaaaaattttgccgctactatttaacaaaaaaacttgctctctgggaaaaaaaacaaacaaccaacttccaaccacctctgaaccacatcccccccccccattccaacccactttcttcgaaaagagcaccattttcttttcccccccccttccccaaatttttttttttcttcacacatttttttcacccccccctaatttttccctttttttccacaaaccccctatatagaggggctttaaaaaaatcttacccccccctgtaataaaaaatggtggagtgg

SEQ ID NO: 524683 - DNA, 502 bp, Homo sapiens
tagacaaagtttcgctcttgttgcccaggctgtagtgcaatggcgtgatctcagctcactgcaacctctgcctcctgggttcaagtgattctcttgcctcagcctcctgagtagctgggactacaggtgcccgccatcacgcccggctaattttttttttttttttgagatggagtctggctctgtcgcccaggctggagtgcagtggcgccatctcagctcactgcaagctctgcctcccgggttcacgccattgccattctcccacctcagcctcccaagttagcttggggctaccaggcgcccgccaccaacgccgcggcttaagttttcctggtattttgttttttaagttagagacaagggggttttcaccaatgtttgggccaggccttcttaagcaaccacagttcccttcatttgaacccaaaccggtttctattgctccaggtagaagttcattccaggtcccgttatgggttatttagggccggagaaggag

SEQ ID NO: 524684 - DNA, 100 bp, Homo sapiens
ttgactccttcatttctaacagaggaagaactgtattatcaccccttatggtctacccatgaataaatacaatatttgttcaagcacccaaaaacaaaac

SEQ ID NO: 524685 - DNA, 101 bp, Homo sapiens
tcactagacacggagcctgctggagctcttggagctctgtgtggggcactgggggaaggagtgcaggcactccaccctgtacctgcccctaacctctggat

SEQ ID NO: 524686 - DNA, 758 bp, Homo sapiens
tcgcgtggatcacctgcagtgctcagcgagttctaaaccagtctggccgatcatggctataagctccatctctatctgaaagatatacgaaagaaaattagcttggtgagtggtggacacgatgcctgtaagcccagctaatcgggagagctgagagcaggagaatcaccatgtaatgctgagaagagtcatgggcgattgaccacggtgatgctgtagcaagtctcgagccatttgtcagctcacaggctcttatgggccacaatcggacgcagctaacatagcgcctttaccgctcacacatacaatagtgcggaaccttgaacacccttagtaccctgaaagcactctcgggtagatgccatacttggtggatatcacctgttgggaactacccccaacgcgagagctgacgtactcgcttcatctggcacgtaaccggcaacagcagatgcttagaacaccgtaggccattgccaccgactttacatcgcgcctccaggacaatccccaacggtacactccagggcgtcgatcaaccctttagcaaacacaaaccgctagcacacattgctcacccacacgcatacaccaacaatcggacgctcgctcctccccctcgggcgtccaattcccaacattacatgtccccagctaccaccttcttccaactcgcccacgcttccatcacttcaccgctccctctacacacctgcgaccctagccccaacacgactcgtcgccccctaaggcccctc

SEQ ID NO: 524687 - DNA, 658 bp, Homo sapiens
gaccgaacgcggtgtgtcggcagcgttcgcgcgggggcctgcgaagctgctgctcggggccggcactgcccgttgggatggacgcgccgccgactgacacaccagacgccgcacgactgccgccgaccatccagcctgggcacatgccgccgacgtacctggcggagccgagacacaccgcagagctgcaggagtaaacaccgacaggagtcttgtgagccgctgaagaagggaataaagagagatgcacgggattatgtgaggttacggcagccccagctgcaagatgcacatagaccgagctgaacccgggatcggctgacttgttggaaccggacgtgctctgcacggacgagtggctgcgattgacgcttgaacgatcagaccattcaccgagggcaataaatataaaacaaagacatgaccgacaaaggacaaacacgcagacagaccagagaaacatccaaatttcaggatctaaagcacaaactgactaagacgctaatcaaagacacaacatcaaaaaaaaaaatacaaccatcaacaacattatcaaaattacctaccaaaaataatgaaaacaaatacaatataaaaaaaaaaaatcaacgaataataaacacaataacacttgaactacaaaaaaatacaaacacca

SEQ ID NO: 524688 - DNA, 343 bp, Homo sapiens
  misc_feature (61)..(61): n is a, c, g, or t
  misc_feature (163)..(163): n is a, c, g, or t
  misc_feature (165)..(165): n is a, c, g, or t
  misc_feature (176)..(176): n is a, c, g, or t
  misc_feature (251)..(251): n is a, c, g, or t
  misc_feature (299)..(299): n is a, c, g, or t
  misc_feature (303)..(303): n is a, c, g, or t
cttccaaaattgatgatatctggaaccttgaagtaaaagaaaattttgctggagaagccanactccaacgcatataatcctctgggagcacagtacgaaaaaccacttacagctagaggcctctttttcaccaacggagaacatacaaggaaagccaccctgnantctctccatgnaaatgtcagctcttgttcaggccatgaagtcagcccagtcctccatgatttccctgccttgccagaagtgccctnatctaacactaagaaccagaagatcagatggaaaaatgaagtccggantcantctgggctttccagaccacgccgagccctatgctatttca

SEQ ID NO: 524689 - DNA, 183 bp, Homo sapiens
aatgggtaaaaagaaaaaaaagggttgtaattccccccccatgtaaacctgctcatggagttgaaagtaattaaggtttgatacactgatatcaatttttttatgtaactaaatccctgttttataaacttgttaatgaccaacaatttttgttttgattaaaattagttttttgaaagttga

SEQ ID NO: 524690 - DNA, 94 bp, Homo sapiens
  misc_feature (52)..(52): n is a, c, g, or t
  misc_feature (78)..(78): n is a, c, g, or t
ctaactctgtttttttttaaatagaatacttaaaaagataaatagaatactnaaaaagttttaaaacatgaacccttnaaagagttcaagaaag

SEQ ID NO: 524691 - DNA, 855 bp, Homo sapiens
ggaggaatattcatttttaatacacacacacacacacacacacacacacacacacacacacgtgtatcagagtaacggggagtttctctcaagggatgtcatactcctagtgagccgtggacccgagtgtgttctattagtgtcggaaacaatattatcatcatatagtgtaactcgtgggtaacgtgcaatattcttctttcgtgtgctgctcgtgtcaacgaagaggtgtatcgatggtggcttgcagagagagtcgctcttatatatacatcagacgctatttctactctcccctcatatcgtggtattaagaaagggaagggcctatcaattagattactcttgatgagaatgttatctagaatctctcataatagaagagactataccctccgtgaccgtgatcaaacgaggggatcaccctatcgtctcttatatcaacgagctttcatctcttttcatgacgagtgttgtgtggtattgaagatgaagggttaaggggcaaaatttcgcaagtatatcgcttaagggaggagttctttttacacaacaaattcacgagagaaaatgtggggttgtgtgagaagatgtgcagaaagagctagtgggtttagtgtagagagagtttggggtctttaaattgtttgctgcttagaatactctgagtagtatactacaagagtgaagggacactattcatcgtgagagcatcctctctgaataagggatgtctgtcgtggagtctccaatattcagtaacaaacacttccttagtgcttaacacttcatttagtgaaacttacatttattcaaaatttttccgtgtgtatacttttcatacaaattatattg

SEQ ID NO: 524692 - DNA, 1688 bp, Homo sapiens
ggcgcccttttttggttttttttcccaagaaaaggttctcactttggtgcccaggctgggatgtggcacggggcacaatccacgagcccatctggcaggcctgggatactcgcttagagctccagggccattcctcccgatcttcgacgctctcccaatgtatgctggggcctacagggcttggcgtataaccaaacccgggctaaacatttctggtatatttattgtgtagaggacaggagaggttttcactatatatatttctccacagggcgtggctccccagaagctctcctgtggcgcctcacaggataatctccgcgcgcacaccctctctaggcgctctccacagagggtctcataggcgggtctaccacagtgtgtgtgaaccgcccattttttgcagacccacgtctcgtaaaaggcttggtgtcactggagaggtgttgagaaaaccccatcttatagggggctggtttcattatcacagggcaaaaggagattcgggatgcacggggcgttacagaaacttgagaaggaggagggggcgagaatctctccagcggtgtctctctctttttagctacagagcgctctccaggggcgctcctccaacgggttgggggctactacaggagagggggcgagcgcctccagaggctcatcatatgagcgctgttgtcccccaacaccaccgggggttgaagcgggtttggtgcgcccaccgatttttttgtactccccaggaggttcgtgggagagtgtcgctcggtgggccagttggagagggctgcggaacaccaaaaagaggccccggggactatatacgaggaactccccttaaacagcgcccaacgggtgggtgccacttaccgggggggggatacattcgcccagaaaaccgggttccgaattggacaaaggtgcacagggtctccaataggcaggggggccatgggcccttgggccacgtccactctctggggggttgcgccccccggcggaagtgtggcttccccccaggtgtcgggatgtttttcttaaaccgtgggaaagagaggcggcctcccacatgtaagggcgggcgcccctgagatttctttccaacccccgggggtagttcggcgtttcaccatcccgcgagaggctcaccttcctcgggggcggcaaccgacacctttctctgggggcggagaagctgtcagcagaccggcggtcttcctcccgtaggggagacaaaagcttatactgttccctgatggaggcaacccccgtgtacgaggagggagacaacccccctttgttctgggcggacaaagtactcccaccaaccgcggcggagtgtggcgttatacagaggggccgacccccgtgctgagtgcgcgcgccccacatggtgagccgagcttggtgggtgcgggctggaaaagaaagattcccgccggggcaacatagggtaggacgacgaccacctctggtatatcatgtcggcatgcgtgcgtgcagtcgcaccacaccagctggtcggtgtggtgtgttgattacccgccgcccgtgttggttgttcgtcaatcgcctccgagtcggtcctaccatataggttcatgcccgcatgtgctgggtggctcgtgctatgatagtgtttgatgtttgttgttcgttattgtatcttagtgttcatgtgtcgt

SEQ ID NO: 524693 - DNA, 394 bp, Homo sapiens
  misc_feature (28)..(28): n is a, c, g, or t
  misc_feature (82)..(82): n is a, c, g, or t
  misc_feature (96)..(96): n is a, c, g, or t
  misc_feature (368)..(368): n is a, c, g, or t
ttgaaaaacttgtagtagaaatgacaanagttaacaataaaggcccagaccatcacccatacccagtacagcctcacagtantcctctgcctttantcctgttttctctttttcctatttttgattcatatttgggcatatgggattcaggaagtttctttcagaaagtctaaaatcaatgggaagcttagctctggtataatgtagagaatacttgctggaatccaacgactttgatttgtgtctggactcagtaactgaccagaagatggccttgggtcatttattttacttctctaatccttagtttgctgatctttaaaacagaagaaagtaataacactagatcttgcttaccatctaagatncactgagaaagtcaaatgaaaaaaaa

SEQ ID NO: 524694 - DNA, 276 bp, Homo sapiens
ccttatcaaaggagggctggggggcaggctgtatcagcagggtagccagacatgctatgaaggacacagtgaccatactaatgtaagactcgggattagtacacacattggtggattaatggaaatgtttacagagtcccctaagcctggcaagggaatttgcttcaagctccgcctggccccgacaggcctccttatcaaaggacaccatttggcaagctctatcaacaaggagccaaacatcctacaagacacagtgaccatactaattatacc

SEQ ID NO: 524695 - DNA, 174 bp, Homo sapiens
gcgctgggctgcaggtctctgtcgagcagcggacgcgggtctctgttccgcagatgggggtttgttaaagtggttaagataaggcctacttgaggagataccaggtgaaatttagaggacgacgagaggttaaaactgataataatctcggaaacgcttggtgatacagttaaa

SEQ ID NO: 524696 - DNA, 1525 bp, Homo sapiens
  misc_feature (1525)..(1525): n is a, c, g, or t
ctcaaacgtgtttggtggctagcgatctccggtcttggtgtaggttgagggtatgtcgatcctcctttccagctgtcttgctgtgagtaaggtgtacgtgcacgtacttctttgccctggcagttgctcgcgttctggaaagagtagcgcagccttcatcggtccgggctgaacattttgcgatcacggtaaggtgtaggtggtagtgtcagttatggcaacaacgttcctcgcgtctagatgcagttgtcttacgcaggtagtaggtgcaacgcaggtcggcgccactgatactgtgcaccaaggccacctactagtgtggataatgtgcagaacgagaccttccagcaaccgagaagggaaccctcataaggtagagttaagtacggaggatcctaaccatgtgcgcagtgctcgatctcacctatgcgggatcttgcgcgaatgtgtcgaaggttcaagacacacctaaatcggggatagtcgagagaagagcggctcaagtgcatgaccaatattgcgacgaaaaatccgcgaagggcaaagattggcaacggaaggggccgccagcggcgtagcgctcgtagcatctcccttgcgccagagatagttcgggcgcaaagcggttgcaagcccatggatcgatagatagctcaacaatccaggtatatctcccacaagttactcggagggggccacatctccctaaagaaagcggaatcccatggttggactaagtaaggtataaataaaccctataggggtagaccagttaatttcgtggaactcccttttggttttggtctaaccagggaagtggcactttaatgggccacggcattgcacacttggggtgcaatccctcagatggccatgtggggcatacgctgtccctagttcggttgctttacatccaaagagaaaacataacggttccacttgtagttcttttcacacttgtaagccagtttttgctaacttacggaatagcttagccatattggtgttgtaaaacggacgaacccatggggggagagcgatataggcgcgtagagtggtattgggcgcctcgatgtggcgttggagagagggttaactaacacgttggagccatactgggagtcccttgtggggcggatccaatcattggcgcaaggggtccaaatattcgcattgggtggccgccagaaaggacttaagtatccgtttcgcgagagccatatcaaggggcccgttcccccgagaaggtgtgggcgcataagggcagacctaattactggggaaaaaggattaagcgtaaattggtgccgccaaagggctgttttaacattccttaacctctctcatcactctattggtagcgcacctgggggacgagaaacgattagttccatatgagcctcacgaggactagggggcctgataagaacatccccagaggggaagtttgacaagtcgcaaaatctattatcgcggacacactatcaaagaagctgtctcccccacaacaacttgtgatggtagn

SEQ ID NO: 524697 - DNA, 161 bp, Homo sapiens
cccatcattatttagagaagataggatgaaggtaggttggctggaccccagccttactctgtagtcacaacccagaggtacttttcccgggttgcagggtcaagttgatgtgtgttgggactctagtatagctggtttttatggctacatggttaccattc

SEQ ID NO: 524698 - DNA, 334 bp, Homo sapiens
acggatggtcacgctgtacgcgggtatcgcccggggagggctcgtgctccgtgggtcggctcggtcacgggcgcgtcgagctggaggcccaccaggatcgggttgtggtccgaggaccgccactggtccgcggagtacaggtcctcggccacgtagttgtggcgcgagtactccagtgccacggattcgttcgcgttgatcatccagatgtcctggccggtgatcgccgtcgccgccgacggcaaggcgtagatcccgtccaggctgccgacggcgccgccgaacgcgtacaagtactcgcccgtgagcgcgccctgcgagaggtacccggccg

SEQ ID NO: 524699 - DNA, 110 bp, Homo sapiens
agcattgtgtactcagtgtcagattccgaagatgcctctttttgcaagtcttcttgggtgtggcattgatcgatttccatgtcgatccattttgcatatcaacttctata

SEQ ID NO: 524700 - DNA, 344 bp, Homo sapiens
actttagacggtgtgtttaaactctaaaaatagtcatgactctgccacaaaatatgtcagtgtactcctggtggccaccctgagagatgtacatggaactcagaagctgcatggcctcaggacagtgttacatgggacagacctggtcccagtgcagagtgaggagaagcgtgtgagatgtccctgaagtgcacctgggagaaatgacacgctggcatggattcaacagcatatcatcaagcatacacactcacaccacgctgcaagactggggccacagcacgacctcgccaacaaccaatcccttgttacaactcccgcctgtaaaggagaaaatcaaagac

SEQ ID NO: 524701 - DNA, 782 bp, Homo sapiens
agcggcgtggtggctcatgcctgtagtcccagcactttgggagactgaggtgggaggcttgtttgagctcaggagttcgaaactagcctgggcaatgtagtcagacccccttctctactaaaaatttttaaaaatcagctaggcatggtggcacatgcctatagtcctactcaggaggctgatgtgggaggattgcttgatcctgggaggtagaggctgcagtgagcttgatcgggccactgtactccagcctgggtgacagagtgagacctgtctcaaaaaaaaaaaaaaaaaaaaaaaaattatggggcaagaaaaaatgggctttgcacgctctctcagggaaaccaggagcacaggccctttacccttgttgcagagcagcttgcaagggccttaaaagcagccccttgaccttgagaattcttcctttcccctttcgggaaaactgggcagggctgggactcaatctcacttaggtgacctttccagcttccaccattcgatgtgaaagtgtgttttacatctcagaacccctgtgttccaagagacagcatggactcgtgggtgttcttcagccacaccatccttgtgtcacgcctcagggtgggcctagaacccttatagggggcgcctctgggagttcgccaaatttgcccagacttaaagcgaagggccttttctggtgggacaccggggaaccccttggaaagccaccgcgtcgttttccacaaccacacaatgtttgggcccccaggctgtgggtccaaaaattttcccca

SEQ ID NO: 524702 - DNA, 141 bp, Homo sapiens
cgccgcaccttgcgtagtggctatagcggtgccagtggtagtcagcagtggcttagagcctagggtaggaggaagcagctactcctatggcagtggtcttggcgttaggaggtaggctatacagttccagacagtgagcag

SEQ ID NO: 524703 - DNA, 588 bp, Homo sapiens
gcaaacatccacgttaacttcggtcctccttggcaatacaagaatctcgggaataggaaatggggtcttagcattagactgtcagcgttctaagtgtaagccgaacaaattctctcagagctttcaatacgtacgatttggaagagctcttgcggccatgggtgcccttggcgttctcgcatatagccaccacgaatgctgccaaggcgcaagtttcccgtccatcccgctgttcacctggatctgtatcagtattgcccctattgaagtatcacacggtagtgcacatagagcatgacctggtgcctcagaagtggtcaaggtgtgtcgttagcacggttaatctgcactacatgtcccctacagtcttctggcagatcgtcaacagctctgtctggtgatattgcctcatcatatagtgagtgaagtcagcgttcaccggccttttctatatgtaggtggaagccattgtctggcaaggtcatgtgcagctacattcatcattctggactccagactttcagccaatcctgcagcctgaggtccaactctcgctcgtcaagctaggtctaacaatctcgaccgtct

SEQ ID NO: 524704 - DNA, 339 bp, Homo sapiens
  misc_feature (6)..(6): n is a, c, g, or t
  misc_feature (25)..(25): n is a, c, g, or t
  misc_feature (216)..(216): n is a, c, g, or t
  misc_feature (263)..(263): n is a, c, g, or t
  misc_feature (307)..(307): n is a, c, g, or t
tccggngagcagttgtctgagcaanctctacaggtcatcatcctcatccgggagagcagttgtctgagcaacctctacaggtcatcatcctcatccgggagagcagttgtctgagcaacctctacaggtcatcatcctcatccgggagagcagttgtctgagcaacctctacaggtcatcatcctcatccgggagagcagttgtctgagcaacctntacaggtcatcatcctcatccgggagagcagttgtctgagcaacctntacaggtcatcatcctcatccgggagagcagttgtctgagcaanctctacaggtcatcatcctccccgggataaag

SEQ ID NO: 524705 - DNA, 544 bp, Homo sapiens
ctcacaaacatgagggagcatcagaactactcgaggggcttgttaaaacccagtgcgttagaagtcggatgcgggggctcacaccggtaatcccagcacttggggaggcccaggcaggcggatcacttgaggttaggagttcaagaccagccgggccaacagtggtgaaaccccgttctctactaaaaatacaaaagttagccgggggtgggggtgcagtgcctgtaatcccagcttctggggaggccaaggcacaagaatcgcttgaaccaggagacggaggtttcagtgaatgaagatcgtgccatggtattccagcctcggcaacacagcaggacggtgatttgctttggagactcctagatttgcgggggttgggaacggaattggtgggatgtgggcaagtgcctcttatgagcggttactttatcctgcattggccccaaaaagacttatctggaggtgagcaaagtatgtcgggtagtgaggtcacaaaggcaatcagccccttcctcccaagtcccatggccatcttctcagtcct

SEQ ID NO: 524706 - DNA, 967 bp, Homo sapiens
gtgcagccccgagccgagcgccgcgtttcgggagttgatggcagcaccactgtgcggccgcccggcgagcgcggagcgcaccactcgccgtgcccaggagcgcccaagatgtggggggcgcccggggcggcaagcggcgtagcagcgccaagggacgggggcacggcaagaagccctccggctcgcccgccttgtccttgaacctggcttcgttggccccccaaaagatttgttcacgccaaggtccaaggggaaccccccctccttcgttcctggtccagccagaggcacccgcccgggacaagtccttccaaaaaccaagggtgaaacgcgaaacgtgactcaaacggatccatcgtggacgcacattgggaaattaacgtccgggggcaggacccttggaaggggaccggtgcgccaacggaacttcaaaggggagaaaagctctctattaacgttaactcccaatctttccccaatcgtggattgcacacaccggggaaaccacatgttgcctggccaggccttaccagcggaccacacaggggaacatcagcgaatttgccccaaaagttttgtacaggctggcttgtgtcactgacttccacgtcctccccatttaaagtgtggtcccaacttcggttcgtcacacacagcgagggccactggttatcggagcattacggctatattaatcttctcgcatcaaacttctactttcagagggtgggttgccagatttgacccccttgtgctttgaacctaccgcggagggatgacatgcttgccgtccacacggaccgctgaatatacctcagtggcaagcaggctcagctagagaagtccacggtcgagctatgacggttataacccccggcacctcggttcccacggcgggaagcaacttcccctcctcaaggtgcctgttgtgtacccaggttgcctctcttgaccaggcctaaaggtc

SEQ ID NO: 524707 - DNA, 650 bp, Homo sapiens
  misc_feature (401)..(401): n is a, c, g, or t
tccaaagggagaatcccaatcttttatattacggaaagccatcaacgggggtgtggggagtatgtcaaagggttagtgaaagtccaggggattctctcctccaagtcctaccacacaaaggaaagctttcaaccctcctttttcacccctttcttaaattccccacaaaatagggggttggtcccaatattgtggtctccaatgtgattaaaacacttgtggtggtttaaagggttctcctccttataggacttagcagacaaagtttagcgctatattaccttttataatgtgaagaaccattataagcaaagtccagaagagggccttatagaggaaagccaagaagtctccttgggggagaaaacatctctatagcgcgttctcatatataccccagncatttttataccttatagggtgtataaatttcataggtctcatacaccaaagtcttggtgccgtgggttcaaacactttaacaaagggcacttgtagtgaaacaccccacaagaaagttcctcgagtggggaaaaaaacccgtggggagaaaattgttctttgataattcaggcgtgaattaaacgccagttttaaacaaccactgtgtacccccaaagcttgtggaaggggaaaaaccaattttcccc

SEQ ID NO: 524708 - DNA, 162 bp, Homo sapiens
atagaatcgagctcggtaccgacgatcacggcacgacagtgcgaggtgcgtttcacgcccgctactgggtgggcggcggcagtgcggtgaagatgaccgagcacagccgcttcctgcgcatcgacggccgttggtactacctcgacgcggtctgagcctcaa

SEQ ID NO: 524709 - DNA, 220 bp, Homo sapiens
tccccgtgacgctatccccaacactaaaataaatgagctatcaagtcttgaaaagatatgaaggaaacttaagtgcatataactaagtcaaagaagcccatctgaaaagagtacatgctgtatgattccaactatatgacagtctggaaaaagcaaaattatggacacagtaaaaagatcagtggttgccaggaagttgaaggtgttgggcgataacata

SEQ ID NO: 524710 - DNA, 188 bp, Homo sapiens
acttggtgcagctctttccactattggctttgcggattcttggaggaacactattgtgcagcgatctcgcggacagttacgatttgttgcacatcagcagcacttccagctccttgacgttgtggaccatgaacttctcggaagccactgtcgcagtatgtgctctgtgtttttgttgcttccattac

SEQ ID NO: 524711 - DNA, 489 bp, Homo sapiens
  misc_feature (408)..(408): n is a, c, g, or t
  misc_feature (435)..(435): n is a, c, g, or t
  misc_feature (478)..(478): n is a, c, g, or t
  misc_feature (485)..(485): n is a, c, g, or t
acactcctttcctgttgtttccattcatgccttaatgaatgaggcctgtgtttatttcattttgagagccttctatgtttcaggcataatgctaggcgtggagaccatgatagacaaaacaccctgctcttgaggagctcccatcagtccccaaagccagcgtaagtgtggatctgtcagattggttggttggattgcttcggtcccagcttcaggcctcctcccttggtttcaggttaaaactattcctttctcagccacctgtctcccaagaactgtggccactgaaaatccttggacttgccttggttctcacaagcacttttctcagtctgagtctgcacagagtatggctttttacccttttgtaaagccagagaaccagagaagagagcacggtattgtagnacttttaaaagcagggaaggtgtgggnttctaagcactgctatttattagttagggcaagggtactcagnatctttngatt

SEQ ID NO: 524712 - DNA, 892 bp, Homo sapiens
ccattcgtaacgtttgacctggtttacttgaggttgcgaactttacctcgcacttaagtccttttaattcttctgagctagaaatccggatcaacggaccttaccagtccctggaatggtccccagtcaatggatttcagtcccatgatcttgatttctttgacaacctcttgaagataagacagtgatgatgaccttgccatggaacattgcccatcagggacttcagggagattttgctccagattacgtatgattggggactacatgacttacagcttcctggcacaagttaggaactttgcaagactcaaacgtttggatccatgacaaaccagagccttgggtagcaatcagttaacagcttttatggacgattcctcagatgagaagcttcagagaaagcatagtgacaggctgaatttactagggcaattttcctgtaagaaatagagacttgacttcatctagtttgcttacacggtttccaatggccccataggaatatgcaataatgtagactgataaacccgttattttagtactaaagagggagccttggctatttcagtgggctataagtgttaaacatttttttaaatgaaaagtctgctacttgttactaagagatgtattttggagaatcttagataatagatgataaagtatatctagggtttatatttttctcgagaagtgttatctgcaatcatgtctgtagtttgcacagacttgttatgcactaagttcatctttgaaaaatatagaatatatggtctaatagtttttttacagcttgttggactaaagtattccacaaatcttacctctcttatggtcactgatggtcactcacgattcatgagtgccacattggtagactctacacccc

SEQ ID NO: 524713 - DNA, 420 bp, Homo sapiens
atgaacgctttgtggcacgatgacctctatgaaaaagagagatatacaggttttgcttttgttcactcaactaattaccaacctttcattatacctctactcggacatctaaacttcagttaagctctatgtttaagtgggatggatcttcaatttgcctacctaaggatttgaagtcaggtttacagaggcatcattttacaattatcaactttgataaatgcagattgtcatggaactaccaccagaatccagatagagaacatgctatcatccctgttatatccctttgtggctaatccaccacactgttccatccaccaaagtccctagaagccactgatctgttttatgtccctctggttttgtctttttcaaagtctgaaataaatggaattgtggagtgtgtaaaaaaaaaaa

SEQ ID NO: 524714 - DNA, 482 bp, Homo sapiens
ggggtgggttttcatacaaatatggttgagagtatatacggagcaccgtgtctcagtgaacgaaggacttatatgtgttgtacagaattgcaggccagtagtctctgtttatgaaatcatgactgttccctatgccacagagaacgatattgtgcgtttatactagttgacacaactttccgttaagagcgacctctcattaaaacatgtcacgacacactggcgtgggatactctccctggtgagaatagactctagttgggggatgatcttaggtacctatgcgatacttacggcacaatgaagtaagactgtgcggcgagaactattttaccgcattgaacagacgaggagctaatatgcactgtagggaggcttggtatactatctaaattccttcataggcagattttcactgttgtgaagaatagcatgaacctgatgaagagcagacacattttgcagttcctgagtagagatca

SEQ ID NO: 524715 - DNA, 352 bp, Homo sapiens
aacgtcaagaagtacttcttgccgaacgcctgatcgcgctcattcgcttgaaccctgccgcccctcgcgcggcgccccgtctcttctagatctcaaggatttccgtcatgtctcgcgtcaaacgcggtgtgaccgctcacgccaagcacaagaaagtctacaaggccgccaagggctattacggccgccgcaagaacaccatccgcgtcgccaagcaggccgtcgaaaaggccggccagtacgccttccgcgaccgcaagcgcaagaagcgcaccctccgcgcactctggatccagcgcatcaacgccgcggtccgcccgttcggcatgacctacagcgtgttcatcaacgg

SEQ ID NO: 524716 - DNA, 443 bp, Homo sapiens
  misc_feature (120)..(120): n is a, c, g, or t
  misc_feature (129)..(129): n is a, c, g, or t
tcagtagagacagggttcaccgtgttagccagaatggtctcgatcttctgaccccgcccgcctcggccttccaaagtgctaggattacaggcgtgagccaccgcgcccggcccagtccanccattttantcagatttccccagctttacatgcattcaccttgcacgttttttgtttgtttgttttgttttgtttttgagacagggtcttgctctgtcgcccagactggagtgcggtggtgcgatcaatggctcacaatagccttgagctcctgggcttaagcaattctcccaactgcttgggaggctgaggcgggagaatcgcttgaacccgggaggcggaggttgcggtgagccaagattacgccactgcactccagcctgggcaacagagcaaaaccctgtctcaaaacaaaaacaaaaaaacaaacaatcattacatcg

SEQ ID NO: 524717 - DNA, 159 bp, Homo sapiens
ggatattgtactactacactgtcttgcagaatgttaaagccattcatcagaagagggaaatggtgtagtgcaaacttgggttgatgggaggaggaagaagagcctggaaagccgcgcctctggggcgtgcttcctatgggtttcagctggcccaagccc

SEQ ID NO: 524718 - DNA, 131 bp, Homo sapiens
  misc_feature (60)..(60): n is a, c, g, or t
  misc_feature (79)..(79): n is a, c, g, or t
ggggtattctcctcctcctcctcagccagctagctgtcttctgattcacatcttcctganctgcagaaaggaggttggngaaagaggaaggagaaagaggaatttgctgagacaggggacacggggttgct

SEQ ID NO: 524719 - DNA, 419 bp, Homo sapiens
  misc_feature (13)..(13): n is a, c, g, or t
acctagaaaatcntcctgttgtgtattctaggtgcttgagtcactgtcttggagattttttaatcctccagagatttgagttatttaggccacttcatatatgcgtgggattgagataaccttctaaatgcgaatttcctaagcatctaacctcagaaatgttaaggaaagagtactatatgagaatataactaagagtccagctgttagccagaagtgtcccttctgggacagttgtcctctggggtcattctcaaagcagaggcctctcaccacctctcggaggtgacagcaccagccaacctgctcttacaactcacatgtctgctttgttccccttggaaaatgtcctctggagtatcccttacagtcttaagtcatcaggagaggcttggggcccagatccagctgggtcctca

SEQ ID NO: 524720 - DNA, 394 bp, Homo sapiens
ggtttagccatgtttccctccccaaccatgacatcaggtttacgtgataaacgatctatttatctcatgtttctgccatgttttccccagacatgcgcaaggagtaggagcgcctggtccagctggagcgggcggagcatgagaggaaggagcgtgagcgccaggagcaatagcgcaacattacaactggaagctggagaagccactggaatagcagtgtgtgatgtctacaacggtcgacagaggaggagaggaggaaacgtacccttgagaggcgacaggctgttctacgggaaccttgtaaatggcacgaccacttgagtgggaccggaatccaaggttagaactatgtatatcaaagatccaaataacgagaggacctagttgtcctgac

SEQ ID NO: 524721 - DNA, 1577 bp, Homo sapiens
  misc_feature (694)..(694): n is a, c, g, or t
tgggtggtgtgggattcctcctatttgctgtggtgaacctctgtgtggggctgggacacatagaagggcgtgtggtgtgcttgttgtttggggtgctctttttgggtgcggtcctacgcgagctctggtggggggagtgtgttttttgcgtcgttctgatgcctcctgtggttattgcatggggccgccagggtggctgttctaccgactggggttggtcttgatctgcggtatgtcgcctggcttcgagtgtgggattgcggcgggttgtgtattctctgtcggcgctgtggtgttgtgcgcccgccttgttttagaaaccgcgcggttttatgtgtatttgttgtcctccgcctggtgtgttaatgtctcctctgctagatgatatcatatctgcgtgggggggggcgttactgattttattcctctgacgctccgtcagtactcgtcttggtggggcgacactccacttctggtgggcggcgggtggttgctatctcaggtggagcgttttgttgtgtccgctccctctcgcgggttgccacgtcttgggctggcagcacgcgtcgtctctcgtgctgtccgcccccctactgtgtagagccggttttatgttgtgatcgcgccccaaagtaggtgcgcaactctgtcgggggggcctggtgtcctgatttgtggtgccccagtagagggncgcgcgctctcttcaatgtctttctgctggttgtgtcccctagtgctcatcttacagcctcgcaccgaagttggggtgggcttcgtttgcttctttgttctgtatttcctgtcggggtggagatagtatagtaggggcggcccccccatcttgtgtggtgtgtgtacttccccgtagctgctcctcttctcctcatggagggcgcccctcacgtgtctctgcgttgcgtcgaggtgtgatctgctctccacatcttggtgcggcgctgtgattttgtagctcgcgtcactatcgctcctcgccttgttcgtctccgtgatggccctcactccgccgtgtgtagaggaccctcccctctccccggggataaacactggcccacataggggacacgagacatctctttaagacatctggagtagaggcgcgccccacaatgagacactctctcagagaagatgcgcccattgagagacaccacatgcgctctctttgcacagagtgcccaacgtgcgcaccacacgacgcgcgcgccctctcttgggcgctcgcctcttaggcgtctctcttgtggcgcctctcctctctctctgtggccgcgcacaggagcctctttgtgtggggcgtttctttgcgcctctgctgttttggggcgccacaccccggggcttgggccaccacgttccccaggcgccccacccccctgtccaaagatcgggtaaacggaggcttgccctcccctgggccccccccctcttggttaactccgcccccccacccccccagcccttttccctcgccaccccctctctcttttggggactttctggtatgaccttgtacccgtgacccccatccccattaatgtgatccccccccccca

SEQ ID NO: 524722 - DNA, 305 bp, Homo sapiens
ctatatttaccattccttaccttcctatctattctttctttcttttactttctttctttctctttctttacttttcttttctttactttctctttctttcttttctttctttttttttctttctttctttctcccttcccttcccctccttctttctgtctctctcttctttctttctcttctctctttcaattccttaaagatgttgcccttatgttctggcctccatagtatctgctgagagatcatcatcattgattcttattgttgcttccctgtagtgatgtacacttttcgtttggtgc

SEQ ID NO: 524723 - DNA, 251 bp, Homo sapiens
gggcctcttttagatcgccaagaaatagacaggtctttgccagacacagtggctcacgcctgtaatcccagcactttgggaggccgaggtgggctgatcacctgaggttgggagtttgagaccagcctgaccaacatggagaaaccctgtctctactaaaaatgcaaaattagccggttgtggtggtgcatgcctgtaaccccagctacttgggaggctgaggcaggagaattgcttgaacctgggagacg

SEQ ID NO: 524724 - DNA, 887 bp, Homo sapiens
ggactctcttttcggactcagcccgctgcacccaggtgaaataaacagccttgttgtcacacaaagcctgtttggtggtctcttcacacaaacgcgcatgaaatttggtgccatgactcggatcggggtacctcccttgggagatcaatccccagtcctcctgctctttgctccgtgagaaagatctactaggaccctcaggtcctcagactggaccagcccaaggaacatctcaccaatttcaaatctggaccccatgaaaatcggactgttcaactcatctggcagccatcccagagcccctggaactctggcccaagcctcctctgactgatccttcccagatcttctcggcttagcagctgaacgactgacactgcccaatcgccttggaagccccctagaccatcacggatgccgaagtttcgagtacactctcacagtggagggaccgcgcatgaaaaaaccaaacaaaccaaaacaatttctttgctagcagactaaaaaaccacaaacaaaaggcctttcttctggactggacctatatataaatctcaaaaggatggcatcttcacaaaccttcctaccagcaagttctgtgagaagctgatcttgtcccctggagtggtcttcgagacacctattcctcatggggcctgcattctcctatgataacatgcattcttctgatcctctgacgactgctgggctcttaccactgagcgttgaacacgaccacggtaccccacgtatacaggtgttacgaatgttaaccgacaaagggataatcatccagtacatagcgcgttgtgccattttgcggacagggtgctccgctcaagtattacactttgcacacaccgatgacacccgggtgttcgaaagtg

SEQ ID NO: 524725 - DNA, 509 bp, Homo sapiens
tccataatgggtgcccacgactggttagagtcaggactttagagtcgtggatataggttggggtgtgtccccacccaagatctcatctggaagtgtaagtcccacaattctcacatgtggtgggtggatccaggtgggaggtgattgaattatggggtgagtctatactgtgctgttcttggtgatagtgaatgagtctcaggagatcagatggtagaaaaatgggagttaccagaccaagagtactctctcttcgcctactgccatccatgtaagagagtgacgtagctcctcatagttttctgccatgatggtgaggcctccccagacaagtggagcggtaagtcaagtaaacctcttattatacccagtcgtggagtgcgtctttatcaggagcgtgaatacggactagtacagagtcagatggtcattgctcgatagcctgggtctgccattacgggccgtggaaccaaaaacttgtacttaagtcctccaggcctgtaagatga

SEQ ID NO: 524726 - DNA, 777 bp, Homo sapiens
agcgagtgggaaggggacgcagcgccctgtggcccggtctctagtcatcgccctcgcagcggcggccaacatcaccgacactgcatccctcccagactgtggacgggacggatggagctcgaatggccgtcgctaccgacggcggggagaggccgggggatcccagcgggcattcaggtcatgtcggagtatcccagacgatcaggcggcagcatgcgtcggaagaaagctgctcatgaacatcggaacaagcgcatcaaccggatcatgggcttatcacagagcccgggaatcggcgcggacagcaagacacagtcacaccaaagatcagaagcaggcaggacaggtgatagactgaactccctcagcgttccttccgattcaaagcgagtagtagcagggtgatacagtcaggaccacgggaacaactgaccagcagtggtggtgatggccgagggtaaaggggacccaacagggagaccaatggcactcgatcattaaaccacgctgagtgcagaagtgatgtacaacctagaagctccggcaagcggacacagaggggacctgacagcaggaccgtcgggacccaagaaggggggtaccccaggaccacatgggggcctacgaaagccagataaccatttcccagaaattccgaaagacaggcaggtggacagacgttaagggaacaccagctgaataacgtgaaaccaaacccaggtcaaagaaggaatggaacagacacacagaacgaaatctgaacccgtagcgaaataa

SEQ ID NO: 524727 - DNA, 469 bp, Homo sapiens
cgactacctacccagctgcgcagtttagggtcgcaatcggatctctgctgagaatgccaggaaacatccattctttctcagcttgggggagcggatccacaaacttcctgacactacttccatatttgcactaaagggggtacagctacaaaaggaggccaacattcggtccacttctatgcctgactcaggcaggccagctttccgtgtggtggataccgagttctaagccaagttttaagccacagacagaccaaggccccagcaggcagcggctggagggatgccacaacccttacagggcagcccccatctgcaatcctccctgcttgttgcctgcttacctgcctgagccacactcccctgccaacttgtcccctgccacctgcccaaacaccaaaccactggcctggcctgtcaacccaaccattggcctgtctgctgggtgctaacaaagctctcaccacta

SEQ ID NO: 524728 - DNA, 221 bp, Homo sapiens
  misc_feature (72)..(72): n is a, c, g, or t
  misc_feature (204)..(204): n is a, c, g, or t
gtacccggcagcccccgcaagacgggcagcccccgcaagacgggcagcccccgcaagacgggcacccccaanaagacgcagcaattcacgtaaaactggaaagggacgaactggcgtcttgcgggggctgccggcagcccccgcaagacggaggtgtctgctgctttttgcctgtgcctgctgggaagttgcagtgctctgtgnggctgcgtcttgcgggg

SEQ ID NO: 524729 - DNA, 113 bp, Homo sapiens
aatcgctaaacaattaaacaaagcatcgcgtcaacacccgccgcgtgcttcgcgatgctttgttttaattgtgtagaattgaccagtcggatcccctggtccgcaccagttct

SEQ ID NO: 524730 - DNA, 278 bp, Homo sapiens
agtcggttggagcgagcatcccccaaagttcccaatgtggccgaggactttgattgcccattgttgtttttttaatagtcattccaaatatgagatgggttgttacaggaagtcccttgccatcctaaaagcccccccccttctttttaaggagaatggcccagtcctttcccaagtccccccagggggggtgaaagcattgctttcgggtaaattatgtaacgcaaaatttttttaatcttcgcccaaaaacttttttattttgttttattttgaat

SEQ ID NO: 524731 - DNA, 130 bp, Homo sapiens
gtacccggcagcccccgcaagacgggcagcccccgcaagacgggcagcccccgcaagacgccagttcgtccctttccagttttacagtgaattgctgcgtcttggggggctgcccgtcttgcgggggctg

SEQ ID NO: 524732 - DNA, 345 bp, Homo sapiens
  misc_feature (119)..(119): n is a, c, g, or t
  misc_feature (186)..(186): n is a, c, g, or t
  misc_feature (238)..(238): n is a, c, g, or t
  misc_feature (243)..(243): n is a, c, g, or t
  misc_feature (246)..(247): n is a, c, g, or t
  misc_feature (250)..(250): n is a, c, g, or t
  misc_feature (255)..(255): n is a, c, g, or t
  misc_feature (276)..(277): n is a, c, g, or t
  misc_feature (303)..(303): n is a, c, g, or t
  misc_feature (320)..(320): n is a, c, g, or t
ggttatgtaaacactacatacaaaagtaaaagtatctgaatgtcatgactatttctataacctatggtggagaaacccccttttttttttttggagatatagtctcactctatcacccnggcgggagtacaggggcaagatctcggctcacggcaagctcggcctccggggttcaggccattctcnggcctcagcctcccgagtagccggggttagggctcatgtgctaccacaccgngctanttnngtnttttnagtagagatagggttcctacnntgtgggccaggcgggtctcaaactcngtgacctcaggtgatcngccggcctcagcctcccaagggtgc

SEQ ID NO: 524733 - DNA, 580 bp, Homo sapiens
gggtaaaggtgggggtgtcttttttcactttaagcatcttgttttctaatcatgtgtgataattgggctgaaaaattcttagctcaaagtgttttacaaaacaggtaaagcaaagaaactagcaggaccactctcagttcaagattaaaactaaagtccagtgttaagctaaacggacgacatagcaaattaactggcttctacattctgtttgcggctgctaaggaacaaccagaacattctttcatcggtttctagaaggctgcgaaagtcctgggtcacggccccagcagatcctgttagcgtgagagcccgcttcctggctcatagcatggtgccttctcactgtgtgcgtgcgaagggcgccaagtgagccctctgaggtatatcgtctatcgacactggagtctcgctcttgttgcccaggctgcagtacagcagccacgatcctcggctcactgcaatctctgcacccctgggttcaagtgattctcctgcctcagctcccaagtagctgggacctataggcatgtgccatcacacctagctaattagtcagtcctgtagaaacagggttcac

SEQ ID NO: 524734 - DNA, 103 bp, Homo sapiens
aaccttcctaggcacaggaggctttcccccgggccaaggctcttcttttaggattttgtttgctcagatcagtccttggaaggggcagcgtttgctcttcgtg

SEQ ID NO: 524735 - DNA, 166 bp, Homo sapiens
ctttgaaaggaggtgatgatgctgaaaaggtagagaacgacaagctggaaggtgccagtaagcaacgtgagaagaagatcaaggtccagtgcatatcaagtaccaggctgaggaccagaagtgtcagcacatgtgaccactttatgggtgtgggggcgcagccgaa

SEQ ID NO: 524736 - DNA, 183 bp, Homo sapiens
gtcgacacaaataacttgttgtgcagtgcatactgtaggaacatgctggaggctgaagatggcccagagatgaacttcctggttgggatccacagtgggtgctcagtggtgtcagtgtgtcaaactgctcccgggatgatcactattgagctctattgaagttctcgcactttcttgcattga

SEQ ID NO: 524737 - DNA, 395 bp, Homo sapiens
acgctctctctgtggggtagccatttcttttattcctttactttctctcttttttttgagatggagtctccctctgtcacccaggctggagtgcagtggcgcgatctcggctcactgcaatgcttcgccacccgggttcaggcaattctcttgcatcagcctcgcgagtagttcgaattataggcatgtgccaccacacccagctgatttttgcatttttagtatagacaggttttcaccatgttggcgaggctggtatcccactcttgacctctggtgatccactcgccccttggctcccaaagtgctggaattacaggctctgtttattttccttctttctttctttcttttttttgtgagatgaagtctcactccccccacagagagagcgt

SEQ ID NO: 524738 - DNA, 408 bp, Homo sapiens
tgggtggatcacttaaggtcaggagttcgagaacagcctggccaacatggccaaagtctgtctctactaataatacaaaatacaaaataatacaaaaaaattagccgggcatggtggcgcatgcctgtaatcccagctatttgggaggctgaggcaggagaattgcttgaacctgggaggtggaggttgcagtgagccaagatcctgccagtgcactccagcctaggccacagattgaaactgttctcaataagcataataataataataggcctggtgcggtgtggtggctcatgcctgtaatcgtgccactgcattccagcctgggcaacagagggagacttagtctcaaaacaagaattccaagttgtgttaacaataccttaatagtgggcaggccaggcctta

SEQ ID NO: 524739 - DNA, 231 bp, Homo sapiens
gctacgaccaacaacttagccttgcaacaaagcaagatcccgtccttacaaaacaaacaaacaaacaaacaaaaaaactaattggccaggtgtgttggtgcatgcctacagtcccagctacttgggaggctgaggcaagaggatcacttgaacctagggagttcgaggctacagtgccctatgatggcaccactgcattgaagtatgggtgacaagagcaagaccctgtcc

SEQ ID NO: 524740 - DNA, 154 bp, Homo sapiens
ctattgtgccaggctgctgaactcctggcttcagtgatctctcacctggctcccaagtgctgattacaggtgtacacgtgcccgtagaaaactcttacatttatataaatgtaagtgatgattgacatttaggaattctgtgttaaatagtttt

SEQ ID NO: 524741 - DNA, 210 bp, Homo sapiens
aggatccccgaaagccgagtttcatacagaaagtagaaagaattagccaggcatggtggcacacacctgtagtcccagctactcgggaggctgaggtgggaggatggctggagcctagggtggtcaaggctgcagcgaatcaagaatcgtgtcactggtacttcaacctgggctgacagaatgcagaccctgatctcaaacaaaaacaaa

SEQ ID NO: 524742 - DNA, 237 bp, Homo sapiens
agtaagtcaagtgcactttccagtacacttaccatgttacgacttgtttcctctatataaatgcgtaggggtttagttaaatgtcctttgaagtatacttgaggagggtgacggggctggtgtggtacgccgcttcagtggcccttgtttcaactaatgcactactactcttcagttatacttgcttaaatccacccttcggaaccctataagttttcataaaggggctaattcgta

SEQ ID NO: 524743 - DNA, 942 bp, Homo sapiens
taattcagtgcacgggcggggttttaattccatacattacatggtccctcggtcgtacaatttcacaccgtcgcgccgccgcccgctcagcgtccgcgccgacatgggagtgcaggtggaaacatctccccaggagacgggcgcaccttaccccaagcgcggacagacctgcgtggtgcactacaccgagatgctagaagatagtgaaagaaatttagatatgccatcccagagacagaaacaagccctatttaagttatatagctagagcaagcaggaaggtgataccagaggctagagaacgaaggggttagcccagatagagatagtgggtcaagagagccaaactagactatatctccagattatagccttatggtgaccacatggagacacccaggcatcatcaccacacacatagaccacatctacgtactatacggataagtagggagcttactaaaaaataggaaatgacagagaatgagactccataccctataagactaccctgtatctatggatactgccatggaagaggatctgagtgcactaccagacatgattgcaaccaataaaataccaaaatagggaggactataaaccttggaatgatatcccacaacacaacattatgataataagaacaatcttgccccatggatcttgagatttgtagtttcatagatacaccttcaagcgtatataggttatcccgaagacagccatctggtataaccattcatatacccggcaatatacatacccattcgataattggtggtagttagtaacctatacagctaattaatggcccattaaaacccatccaagtaattcactattactataagataccactacagagaggatgacagaaatccaggttatcaaggcctagtggggcatataagggtatccacaataacgtaacaatgggta

SEQ ID NO: 524744 - DNA, 1132 bp, Homo sapiens
gctggacgagtgcactggggggaaggtacccaggccctcccccgccccccgccagcacctagtgcaatagtgaggagcgctggcttgtcctggtggacttgggtggcgagggagctttggtttggtgcgctgcatgtgacttctgacttacatggtcctaagacatctacgatggccttctcctttattaggcactgaggtgcaaagagtgtgcagctttcagtctgagaaatattccgactggaggacgggtccaacggtgaacaaggccctggtggctggtatcacccacagtagaccacgtgcgctccttgcaagtttagggagaccccacattacaattgggcgccacaaacgtatgggaggacatcagaagcccgcaagatgcgtactccgacgaactcccatggaacccaacctaaacaagattcacagcaaggtacagtccagttgattccgtcccttccagttcaagtccgttgcacttcaacttaacccatgggacgtttaaagtatacagttttatagcattagtcccttacctttggcattacgcggagcgccagtaatattcagccctatactgtcggtacccccttccaagttagccaaaggtgtggggttatgggggatccgggagaacgacgtaagggccacgggcgcacagaaccgagagattttaccagagggttatacgcccagaggtaaaaggcttttccaaagatttggcccttacttatgcataggacaaaaagcaaaacaagggtagaaagctaacatagagggtttggaagcctattatcaccgatttgtttagaacccaacaagttcccatatgagaggtaaggggaacacccccagtggggaatgtactgtgggcacaacaatttggtttaaaagacggttggcgttcagaagaaacaacactagtaacggaaaggccaagggcagttgagcagaacattgcgaactcgatatagatcccactgcaggcaccattcggactcaattgcctttttctacggcccaaaggccagtcccgaccacttatggagtagtaaggcatccccaatcggtaggcaaccaatacatcgttcgaacggcccccaattggttgcccattaaccacaag

SEQ ID NO: 524745 - DNA, 179 bp, Homo sapiens
acatagccacagcgagttgcggttgaatcagtcatggccattctccacgcccagggcaatcagtgctgcagcgagcggtacctgttcggcaatacgacggctcacaccctgacctcggcttttttcattcagtaaggtgatttcgcattccgacgaagaaaactcggcagtgcggggta

SEQ ID NO: 524746 - DNA, 267 bp, Homo sapiens
gcggcttcgtccatcagcaggagatcaagacatcctggttcacgcggtgaaaccatgtctctactaaaaatacaaaaaattagccaggcagtggtggcaggtgcctgtggtcccagctactcgggaggctgaggcaggagaatagtgtgaaccctggaggcagagctttcagtgagctgagattgcgccactgcactccagcctgggtgacagagcaagactctgtgtcaaaaaaaaaaaaggattaatatgaaagggcaggtcaac

SEQ ID NO: 524747 - DNA, 257 bp, Homo sapiens
attttcctcttaaaaattaaatcctaactaatctaaagctgtctagttaacaaatgcccaaacaaaatttaaaaattagatgggcatgatggtccgtcctgtgatcccagctatttgggaggtctaaggcaggaaagattgctcgacgcccagcgcaggtcaaggctgcggtgtgagccaatattatatgccccatacactcgcacgcctggggcacacagaagagacccctcatttcttaaaaattaatataaata

SEQ ID NO: 524748 - DNA, 196 bp, Homo sapiens
gtgatcctcccacctcagcctcctgagtagttggtggcgtgcgcaatggccccaactgatagtttgtattatttgtaaagatgaggtttcaatgtgttgctcaggctggtcttgaactcctgggcccacttaaggcatccacccaccttgggctttgaaagttctggattacggggtttagcccctgtcccagcct

SEQ ID NO: 524749 - DNA, 269 bp, Homo sapiens
cccggcttcgggttcatcgattctccttgcttcagctcccgaaaagcttaacaggtgcccgccaccatgccgagctaagttttgtaattttagtagagacggggtttcacaatgttggccaggctggtctcgaactcctgacctcatgatctgcccacctcggccttccaaagtgctaggattataggggtgagccactgtgcccagtgctgctccttttttcttgcaacatgcggattaccatacctttcctctctcacgttccctat

SEQ ID NO: 524750 - DNA, 506 bp, Homo sapiens
ggctggttattgaaaaaagtcataaagttcgaataaaattatggttttaaaggtcaaaaggttagagtaagttaggattaattactgaagaaaaatgttttgaataaatgtagtgtaatgtagcctaagtgtgcagtgtttataagagggtacagtagtgtacagtaatgttgaaggcctccacagtcactcgccactgactcgctcagtgcaacttcctggaagtcctgcaagctccattcatgttaagggccctaaacagtactttttctatgtttagatatgttgatacacaaatacttaccatcgtgttacaactgcctacagtattcagtacaatcacatgctgtactgatttgtaacctaggaggaataggcgccaccatatcgcctaggttttaggtataggcctaataggctataacatctaggtttgtgtaagtacactctatgacagcagtatccaatcttttggtttccctgggccacactgggttaagtaagca

SEQ ID NO: 524751 - DNA, 819 bp, Homo sapiens
cgcgtgtgccgtgctgagagcgcctgcctgtgcgccccgagcggtgtgcatgggactcttccaagatgcccacgttcgcacagagaccccggatcgcggaagctcgtgtctcgatagtgcctgtgggtcacggggggccatctcggtgggatcgtggggcgggatgacctccacgtgtgaaccttgtgctgctgggtgcttggatcaggaggctccgctcggctccccctggatgagacggcgcgatgccctggtgtcccccgtggctgcgtcgcggtcagtgtcattcagtccttatcggactccagacttgggggatgcgtattaaacgcacagactccttgcaaaggtctgtgcctatacaagcactcagcccctggggagagaacgggttggccgcggatgactggaacggtggcctcgaggtccctacaagagcccctaccagcgtggggaggcctaagtacctcagggttcagggcccacggagggagatcggggggagcgaggccggtgatctacgtgtgaagggagctggagcaggacctcaaaaaagggccaaggagacggcgagggggttccgcgcgtctgtaccgttcttgacatcggctgagtcctccccgcagggcgggtctccacggccctgcccgtcccgtgggttcaccgggttttcatcacccgtgcgggtagttcctggggattccgacccacagtatgtgtggcgatgggccaggagcggttggacgacaaggggtgtctcggcctgggagagttccaggtgaccgctctccacgggagagaaaggcggttcacctccgt

SEQ ID NO: 524752 - DNA, 148 bp, Homo sapiens
  misc_feature (14)..(14): n is a, c, g, or t
ttgattatatgcancgcacctacgaaggcattctggagaccgccgaggccgaggcctgcgagctgatcgtcatgggctcgcacggccgcaagggcgtgcaggcgctcatcctgggcagcgtcgcgcagaaggtgctcacccacgccaa

SEQ ID NO: 524753 - DNA, 879 bp, Homo sapiens
tgcccctcatttacataaatattatactagcagtttgccatctcacttcttaggaatactagtatatcgctcacaccgtcatatcctccctactagtgcctagaaggaataatgactatcgctgttcattatagcgtactctcataaccctcgaacgacccactccctctgagccaaatattgtgcctattgccatgactagtctttgccgcctgcgaaggcaggcggtgggcctagccctactagtctcaaatctccaggcacatatggcctagactacgtacataagcctaaacctactccaatgctagagactaatcgtcccaacaattcctacttactaccactgacagtgacttgtccaagaaaacacagtaactttgaatcaacacaaccagccacaggcctaatgagtagccatcatccctctactatcgtgacaagcgcagaagtcaatcaagcaagcctagtttaggctggttaccccaagccttagaacatccgaggcccctaacaagcgccccctcgctaatactagcatacctggactcctaggcgctgccgaatcagggcaaagacgaaacagcccactctatcccaagtggaaccacctatccagggaacagacaactcgtacccgtctcctcatacctagatctcccttcgcgacactctcctgcaactcattacctgccacaggcccaccaggcacctaacatgccatcacctccacaactcctcgctgccggagaaccacacacctcaattccccaccccttgcgcctaatcagcgccgaccccgaataaaagcgccaggccaagcccaaagagaccggcaggcaccccgcacggcgcacagttacctcccgaagtgcgaaa

SEQ ID NO: 524754 - DNA, 611 bp, Homo sapiens
gcatttttggctgggagcccccccccccaaatgcacgaatttttccgctgaaaaaccccctaacggggggagagaccctcaccccctccgaaggtttgtaaaccctccggatatcgagttgagaaaatgttaaaggccccagatccccggataaggaaagggattcctccctcgagttccgcccgaggagtgagttctttgctggccagcacacctggaaagatggagacgtaactcttgttctgaggctacccaaaatgtccacaaaggagagtttactcttcatcttgtgttgggaactttcgctggtggtgctaagaaaaagggagaagaaagttttacccccctccccaggaaggaattaagccccaggaggaaagaaaggtttaaactggctgtcctgaaatattataaggtggatgagaatggccaaatttagtcgcctttcgttcgcagagtgccctcttctgatgaatagtggtgctggggtgttttatggccagtcactttgacagacattattgtggccaatgttgtttgacttactgtttctcaccaacccgaagaccagttactgtatgaggttatatataaagaccatggacttacca

SEQ ID NO: 524755 - DNA, 236 bp, Homo sapiens
  misc_feature (5)..(6): n is a, c, g, or t
  misc_feature (16)..(16): n is a, c, g, or t
  misc_feature (27)..(27): n is a, c, g, or t
  misc_feature (37)..(37): n is a, c, g, or t
  misc_feature (48)..(48): n is a, c, g, or t
  misc_feature (60)..(60): n is a, c, g, or t
  misc_feature (65)..(65): n is a, c, g, or t
  misc_feature (67)..(67): n is a, c, g, or t
  misc_feature (69)..(69): n is a, c, g, or t
  misc_feature (92)..(92): n is a, c, g, or t
  misc_feature (103)..(103): n is a, c, g, or t
  misc_feature (110)..(111): n is a, c, g, or t
  misc_feature (115)..(115): n is a, c, g, or t
  misc_feature (159)..(159): n is a, c, g, or t
  misc_feature (183)..(183): n is a, c, g, or t
  misc_feature (189)..(189): n is a, c, g, or t
  misc_feature (203)..(203): n is a, c, g, or t
  misc_feature (213)..(213): n is a, c, g, or t
ccatnngcgctgtccnggctgcagcgngtcgagcttncgctctttgcngccgcctttccngtgcntngncgtggcggccccggcgatgactnggacccagggnctccttnnagtngtagatgtcccctgtatgggtgtggccaccctgaatggctcctncctggccttatcccgtccctcagnaccatncctgtgctactttntagctggggnctctggcttcttggcctctactg

SEQ ID NO: 524756 - DNA, 329 bp, Homo sapiens
aaaacccccaaattatagactgaatgtacgcttaatagtctggccagggatctgactcctgagtaaggtaagcctctcccctgccacgggcccaccgcagcccctgagggaacagtgccgtcttagagccagaccctgtgccgagatggtgggggccctgcaggagtctctgctgggctctcaggctggaggagcctctgccaggtcctccctgcacacaccagaacccacacgctggtcctgcctatgctagcgtctccccagccccacgtggcttcagataggtcccagcttctccctcagggacaggcccctgtccctcagttcca

SEQ ID NO: 524757 - DNA, 302 bp, Homo sapiens
gcaaagtagcctgtccatctgcagacattcacagagcactcagcgaggttcatggaccatgatgatcatggtctcacacatccccagcctccaaatagaccctcatgtccacagtgtggtgagtgcagtgggaggggggcacctgtgcctgagccaggcagaggagggagctggccaaggagggctgctcaggggaagtggcccttgagctagatctgcaaggatgagctagacaggaagaaggggtggaagaacatcttgggtcaggggaatagcagttgtgaaggcgcagaggcaaggag

SEQ ID NO: 524758 - DNA, 106 bp, Homo sapiens
ccattccggtgataattggtcgtacagtcattatccatccatccgcccaccgggaacctcccatcggatgcagaaacggtcatctggttaaactggtgggtccgta

SEQ ID NO: 524759 - DNA, 250 bp, Homo sapiens
cctgccagtgccacgagttagtaactgggccagcaaagttttgggtcaaagaccaacggggccaagtgcaggggctcgtgcctgtaatcccagagcttggggaggctgaggcaggtgtaccacttgaggccgggagtatgagaccagcctggccaacaaagcgaaattccatctctactaaaaatacaaaaatccgctgcgggtaggtggcgcatgcctagtaatcccagccacgggcgaggctaggatt

SEQ ID NO: 524760 - DNA, 305 bp, Homo sapiens
agaggccgcccttttttatactggctggcattttggctttaaggtcttctacagaactaggtcctttgggtgtttaggagttttttccggtttctggaaggattctggtcctttggatctgggtgtggatgatggtttggagtcttttccattctgattggactttggtgcattttgggctggagtatctcgtatagatttcttcacgggcgctttttcttcagcttcctcatcatcaaaatcatcatcatcatcatcttcatcatcatcctcttcatcatcatcgtcatcaggggtaccgagct

SEQ ID NO: 524761 - DNA, 752 bp, Homo sapiens
cacaaagatgattgaataccatgggagtgagaatgtggagtcctacatcctcaccatcatgaacatggtcactgggttgttccataacccaagcattggcaatgcaattcacattgttgtggttcggctcattctactcgaagaagaagagcaaggactgaaaatagttcaccatgcagaaaagacactgtctagcttctgcaagtggcagaagagtatcaatcccaagagtgacctcaatcctgttcatcacgacgtggctgtccttctcaccagaaaggacatctgtgctggtttcaatcgcccctgcgagaccctgggcctgtctcacctttcaggaatgtgtcagcctcaccgcagttgtaacatcaatgaagattcgggactccctctggctttcacaattgcccatgagctaggacacagcttcggcatccagcatgatgggaaagaaaatgactgtgagcctgtgggcagacatccgtacatcatgtcccgccagctccagtacgatcccactccgctgacatggtccaagtgcagcgaggagtacatcacccgcttcttggaccgaaggctgggggtactgtcttgatgacatacctaaaaagaaggttgaagtccaggtcattgccccggagtatctatggtgtcacaccggtgccgttaatttggccatgtactttgccggagtgaacgtgcaaccgggggcgcggaggggtgcgctaacgggtgttctgatgacccgggga

SEQ ID NO: 524762 - DNA, 1790 bp, Homo sapiens
agcgggttcgtaaggaagggggcctaggcccgggcctgcggctggtgggggcttgctgcgcgccgagcgggtcgctcctgcatgctgtcttccgactccagcattcgcccaacttccaccttgcccacgcggcggctggcgcagcaggcagcaagcaccatgcacaggcagcccactgcgcagcgaaccgacacgctgcgctccagcctctttgcacagacgaaacgaactgcgcaccacaagaactggaatgccacgcaacagcaaagcaaacccgctgcgccctgcgcacgccaactcagggcacctctctgccctacacaccgcgcaaggcctctacacggacacctactgtcgcataatgcaagccccccatggggcaaacttctaaccttggcaaccgcttcccagcaacacgcaacactccaggggacacctggattccacggctctaacacacttggccttaacttttcccggccaacagagccaaggcaacggccttaacccaaggcaaccttcgcaagggggacaaagcggtctgcaacccaatttacatatactcagtggagcccaaaaaacggcgtccaattcctctccaacttccgaaaccatggttcccctgtggggaaaacaagaaacacacctcataacttgcgaacgcgaacttgggaggagacccccaaagtgccgaacaacaccgtgggcaacgcaaaacaccacgggaaaccccagttattggcaaaccctacaaacaacgagcagagagcagagaagcgcgaaacacgcagcggaaaaaagacccccagttgggccccacgacagttgttgcaaccagaaggtttccgaggcgctaggcgcgaaagaacgccaaaagtagcccccagcgattggcacaacaggaggtgccgcacaacggcagaacggcacaaacacggtacacacagaacgcccttaaccccagtttgttcccccgaaaaggccccgggtgggacccacaagaaaggcttgggtcgataaaagacgggcccataagaagtcccacaagggcaaaacaacaccggtggcgaaactttggaaaaagagaaaacgcgaataacaaacgttgggcccattcccgggcaaagagacaaaagtttaaccgcctttcttaaaacttgaggacttttctcgtcccacaatatatcagcgcatatattgtaccagcacaaattccccggcaggtgtgccctaaaccgccaatagaaatgggaccagacaccgtttattcccattgggaaaattttacccactttgggaattggaccccggcagacagttctcggaacacaaaggaattgggagtaaacacgagggcgggaaacggcaaaacgttggagccaataatttggggcccatctgacgtcgataacagctccccatccccctatcacttccgcgagagaaaaaaacccaatagtatgggagcatcgcaaacattttggaaagccatcttaacgccgactactttctgggggacgcaaagaaacttttcgggagggagaaagggatgcgcagctgtgtgaatcattgttgcacaaagcagggtgaaaacaagagtgaaaaaacgattgttaaaagcaggggtgaaaagattttacgtttcgccagaaagagaaaacacgtctgtggtggacaacaacaggggtaaataagatggtgccgccgttgataagttttgagcgttatagcttttcacgaagacaatggggaagaaaaagagaaaggtttaaaaaagagtgagggtatac

SEQ ID NO: 524763 - DNA, 477 bp, Homo sapiens
  misc_feature (46)..(46): n is a, c, g, or t
  misc_feature (51)..(51): n is a, c, g, or t
  misc_feature (53)..(54): n is a, c, g, or t
  misc_feature (57)..(57): n is a, c, g, or t
  misc_feature (59)..(59): n is a, c, g, or t
  misc_feature (63)..(65): n is a, c, g, or t
  misc_feature (426)..(426): n is a, c, g, or t
  misc_feature (440)..(440): n is a, c, g, or t
cgtttgaagatctaatattccctcacctagctcccggcccaacatngtctnanngtnanttcnnngttcaaaggtgaatctggaagaggggtggaaaaggctctggaaagggggtggaaagcatcgcaggggggaaccaagattcctaaagcttcaaaagcccggagaaagcaaaataagatacctatagatttggtatgtggtggccatgggttaacaatatgccacgaggaaataactgttacgccaactgcaaatttctaaaaacctgcgagcatttctagttcccacgactgtaaccagcacccgaagcaatggggggttttgctattgtcctgaaatcacgaaagcttaacccgaaatttatccccctagggatatcggtacttttaaatccttctaactgttctataaattaatttaatnaatctaaatttctntctcgattttcgttaatgtgacttgcactgtctctga

SEQ ID NO: 524764 - DNA, 201 bp, Homo sapiens
tgaacattcgtgtcccattcgtgtccgtgtgtggtgcgtggatatggatgtgtgtggatatggatgtgtgtggatatggatgtgtgtgctgtgtggatatggatatgtgtggtgtgtggatatggatgtgtgtggtgtgtggatatggatgtgtgtggtgtgtggatatggatgtgtgtggtgcagtggacacgaatgtca

SEQ ID NO: 524765 - DNA, 440 bp, Homo sapiens
  misc_feature (300)..(300): n is a, c, g, or t
acacccacccacctcatgacaagcttttccccgtgtcagtcggcttccggatgtctgattatgtcctggaagagtcttggcttagtgctagcatatttttaccatctctgcaatgtttgctaatttccctttcaagagaaagaaggagtcagagctcagaatcagaatcaactacattgttgagtactttcgttactgttgtttctacagataccttctatttctagactccatttccactagtttttttttttgtaaattgaagtaaccaaagcaaagtatttaaaggctgggcacagntgctcatgcctgtaatcctggggctttgggaggccgaggcgggaggattgcttgaggccaagagttcaagatcagcttgggcaagaccctgtctctacaagcaaccaatcagtcaatcaataaaataaaataaaatgatt

SEQ ID NO: 524766 - DNA, 336 bp, Homo sapiens
  misc_feature (159)..(159): n is a, c, g, or t
  misc_feature (163)..(163): n is a, c, g, or t
  misc_feature (165)..(165): n is a, c, g, or t
  misc_feature (267)..(267): n is a, c, g, or t
  misc_feature (291)..(291): n is a, c, g, or t
ccaatccggttgttcagcaaaaaacgttgaccagcgacgttgccaggtgttgggctgtggagttgtggagagcgcgttatcgaaatcaaggccaaattgtggttggtcgctccattgatgtaaacgcgcaatttgctgaccaagaataaatgcgctatnatcncnagcggacggaggtggggagataatccattcaccaggaaaactgttagttcacggtcagcgccaacttgcccaaacctttagggcacggttgacggtttttanttacgcggacagttaacttcccantttgggttcggctttcggcggttaaaaaccgggggaagcatttcc

SEQ ID NO: 524767 - DNA, 985 bp, Homo sapiens
  misc_feature (351)..(351): n is a, c, g, or t
  misc_feature (487)..(487): n is a, c, g, or t
  misc_feature (961)..(961): n is a, c, g, or t
  misc_feature (985)..(985): n is a, c, g, or t
gaatttgggcgggaaccccccaaatcccaccattacggccccgggtagacgcccaacacgccatgagagaggcaagtaagaatatcatgtcacgcgtctgggagagaatggtacattctgttttaagcctgaaagtatcacccacaagaaccaaaaccccgcgcgatggagtgagttgtgtcaggggtgttgttttgtgtgaagtttggcggctggggcgatagcgctacgagggcacgatagggagagccgcatgcggggaggagagggcggaagtgagcgtcaagacgatcaaacattgcgatcgacaacacacgaatatcagccatagaatcttcctcctcgcaaagncaaccagtgctggcttgtgaggacgagatagagaggaggttcttgggtggtgtagccgaacgtgcgggccacggggcaggtaacaaacgagcaagaggacagcgacacacacgactgcctgaacatagcggaacgnggaaatgaaagacgacaacgaaacgtaacacacacactctccacaaacgtgcaacagaggacgacagagtgtgtgagcgccgtgtataggtagcccggcgcggttgaggggtccggtgggtgcgtatcgcctccgacactactcttccctgcctcgccggccgcgactccgctccagacctgcgactaccgacgcccctccacatttctgtgcaaactaattgaagcgacaagatggtcaacgcatcacccccacaaagcattagtcacgatcatgcacgtagctcgacgcgcggacgcaaataatgcccgagcacctctcctgcccaatcttggtcaacgtaacccattcatccaaatataaatcaacaataaaacagtggacgcatcgattgtaagaatcgctgaactagacgacatctatgtcgtgcgagacgctgcaatcttaactcctattgcagcgtaggcgaccctngtcgcggttcagtgaatgggcgcn

SEQ ID NO: 524768 - DNA, 1273 bp, Homo sapiens
  misc_feature (583)..(583): n is a, c, g, or t
  misc_feature (1273)..(1273): n is a, c, g, or t
gcgcaggcagacaactgtgctcccaatttgattcttgaagcggaccagaacttgcagtccagcaaatcacttgtcgaatgcaccccccttctggctgattgctactcatggttgtgctgtctgccttctgtcctcttctgcctgccggtgccggaggtcgcctttgctgtcggtggctgcatggcatgttgggccaaggaggtgtgcatggactcgagtttgatccttaagtcggactgactgtcggacgaagagagccatgggtgggttagctcatgctgtttgcttggtcttggtcatgaggggacctcgtctgtcaaggggcgagagtgagagtgtgcatgaccaatgcagagagtgtttttgcaactcctcgtatgtttgattccacacctatgaacatggatggctcgacccattctgagcgctaagaggactgactgatggtgggcctctatagctgagatggcctcgcatgcttcggtgcctcagtgccccgtggccttgtcctggttgtccgtgcgagcggctgctcctgttgtgtgcctggaaagtgacagtataaatccataaaagcgaaggnaagatagataccacacgcaataggtcacgtggcatcattgttcactgtcgcactacaacgggtactgttgtcagaccctgtcaaggtcaggaagcgcaattgcgagttaacgggaaagtcccttatgtggctggccccttcttatacccgagcgggccgcattctcccgcgttcccttagatttgcttgggcgcgtggatgttacgccgaccatgacccaccttgggacgcattccgtgggccacccatttggtctctgagtataaatacggcatacttggggagaacgtacatagttacgctaggttaagccaaacttaccggggggatcttgtatgcgtaccctacccttggtagaggagcgttctattacgttgtttcttacccgtttggctcgcagtggtatggttcgggaccccttggtaccggcacgtgtgcttttcccttatggccggagtatatagccggctgtcatgggctgcccccgtttgtgcgcgatttcggccattgagggcggagcatagggctggccctgggtgtcggtcgtcctgtggccatgtgggtcgttggttgcagtagttccgcggatttggtgggtccccaggctcctgcgttggtgcactccgcgtctttatgcaactttacactgggccctacttggcgttagtccatcgcgttactttgccacgn

SEQ ID NO: 524769 - DNA, 218 bp, Homo sapiens
cgtcgacctgagccggtgcacacctgagccagtgcacggtacacacctgagccagtgcacacctgagccagtacacacctgagccagtgaacacctgagccggtgaacatctgagccggtgcacacctgagccagtgaacatctgagccggtacacagtgcttacccagagtgcctgagcatttggcaaggccggcatggtgcccactgaccgtcgac

SEQ ID NO: 524770 - DNA, 484 bp, Homo sapiens
  misc_feature (232)..(232): n is a, c, g, or t
agtttcagcaataaagaagggtcattctgtattcaaaattgtactgtagataaatcattcatgagattgtaaaaaatgtttgtcttgtgaccttgtgcttttgaagtcagacaaaaccgtgtaatcaacttgcacaaaaagagggtacacagtgaacatataaacacagacctaatcaaacaggagcagattcctcatggtgcttgtttattatatatatttaatccctgcntgacactttaccaagggagatggtcccttttatcagttggaatgtagcaggcgttatttcagaagtgggggggccgggtaaaagaactccaggtccccacccacccccagttccaaccaaaatttttagggccaaaggccaccacccttttggtaggttaacccaccggcccgcttggaccattggtgataacgcctgtttaatatccaaatgaccaaataaaagctttttttttgggaagctcgaaaaaaa

SEQ ID NO: 524771 - DNA, 331 bp, Homo sapiens
aaccagacaaatataatatatatacagtagagatgaggtttacaccatgttggccaggatggactcgatctcctgacctcgtgatccgaccaccacggcctcccaaagtactgggcttacaagcgtgagccaccatgcccggacgtaatttcatgtatataaagcctcaattttcatcatctgtaaaatggggatcgtcataagatccaccccatgggattgacgagggactgtagttcaacaaggtgatctcatgtcaagagctcagcccactgcctgtcccaagtacggtgctccatggatgtactgtctggtgatgcggatgggaaaa

SEQ ID NO: 524772 - DNA, 706 bp, Homo sapiens
agcggggcttcctcttctcttgctgcacccttccgagctactgcgtgcaagtgcgcccacctatgacgtgctccccgaatatgcgcggctgctaatcgtgggtcgtcagatctgggtgtctggacccggacttagggcaggattagtgtagttccaagtgtgtaatcggggactctgcgtagcagatctcctcgctggcagtgcgcacccttgccctgtgtggcgtacacaaggacctggactcggcattggagcaggttggtgaagcccgactcatcgctgcgcggcgcaggacggatgcgtagccaatgtcctaatagttccatgagtaagataatttttgtacaacaagtataccgacagcgatactataagaacgtagtgtttgtcttgacataccatccaatgtagtgatgaacgcagattagctagaagagattagtagatcgagaaacgtttgctggctttgcaggtggtgggcctgtcctgggcatcggccgcgttggaggagacgccctgggtggccttagctgccctgaaccggtacacaggtggcaacgtgggggctcaggagttgacaaacacaaagaaagtagcgccgaattgccggtttatccgcagcttttatttggaagacagtgccacgaaagctgcaaatcctggtgtcccaaatagtcaataccaagttgaaaagcatctgggagag

SEQ ID NO: 524773 - DNA, 139 bp, Homo sapiens
tgctgggattacaggcatgagcattgcgcccagctgagagcctgtctcttaacacaaaagtatgcagtgtgccgaaaagggtgatggacttagcattcacagacgacaccatacaccactgtcacgagatcagggtttg

SEQ ID NO: 524774 - DNA, 653 bp, Homo sapiens
acggaaacggctgtattcactgctcgatattcatagaaccagacatgagttatcagaccgtgtaagcaaggcaccgaatggaactgaaaccccaaggagtcttcttatctttctgctttctagataccaggaaaaaaaaagaagcagttgagattattcactcttccagtaaacaggcctctagaaagtcagaggaatggctgggtgcagtggcttatgcctgtaatcccaacactttgggaggttgaggcaggcagatcacaaggtcaagagatcaagtccagcctgggcaacaagagtgaaaccccatctcagaaaaaaaaaagcataaaccaaaacttagtagtgtctgtggattcaggcaatccctaatggcaagaggttctctgaattgagtaatgccttaagtagtttggattttttaagtcataataggatctgcagatgtttggccagtaaccctatttgtatgcatgatacgttattcgtaccagaccaggggtcacaggctcaaatattctccaggtctcaggctgtgtcacagaaacaagggtgtcagaaaagcagtataaacccctctggtccagggctgctgactctgtttggcttctgagctttggagaaggggagcttgaaactaaatgcttcattgg

SEQ ID NO: 524775 - DNA, 311 bp, Homo sapiens
ccccccccccggggggcccccgttttttgggaaagtggggtttttttcccggggggggtttggggaaaaattttttcccccccccccggggttttttgggggcccttaaaacgggtttttggggggggggggttccccccccccccctttggccccttttttttttggacccccgggggggggggggggggggtgtttttttttggggggggggggggggcccccccccccccccaggtggttttttttttttgggggcccccccccttttttttttttttccaaaaaaccccttagagggggggggggca

SEQ ID NO: 524776 - DNA, 128 bp, Homo sapiens
actacttcctgtgtaaccttaagtttcttacaagtatcttttgttaactgttaaaaacgaaaggtatgttcatttcatgtccttggggcttttaaaaatgcgctgtgcattatccggaagtatgtagt

SEQ ID NO: 524777 - DNA, 142 bp, Homo sapiens
aaacggccagtaagccagcccctcaccctatgatagatattcctttaaggcaccagacttcatgtgtgataaatgattaatggttgaaattgtttctcttcttcggggttttcccagttaatacatggtccctgtttcccca

SEQ ID NO: 524778 - DNA, 164 bp, Homo sapiens
gatagattatcaagctacttattagagtagaatagtagaatttggatgatgtacttgataggaatttctgggcttcatcaacgggatagattccatttaacaaaatagggcgggcaggggggctcaggccggtaatcccagcacttggggaggctaagggggaa

SEQ ID NO: 524779 - DNA, 231 bp, Homo sapiens
gcagctggcgccgtcgtactacgcgacattgatgacggggctcgtgaagtactcgtcgtccatcgtcccagttacgacgacctttccctacctaagggaaaactcgaacctggcgaggatcttcccaccactgcagtgcgcgaagtggccgaggaaaccggcattaatatccggttgacgatgcctctgcaacccatcgtcgacgcggccgcgaatttagtagtagtaggc

SEQ ID NO: 524780 - DNA, 552 bp, Homo sapiens
tggtgttccagtgtgtgcaccaccctctcgctcgcgccccctcacgctcctcggtgggtgtccccgctcaccggtgtcgcgcgtgtcccacctgcgcgggcgctccccccgcgttctcgctcttggcgcgccccgctctctttctcgcactcgtctccccctcccgttttgcgcccccctccttgtccgtactagtggcacccccgtcgggggggtatgttgcggtctcctctcggatctcgtgggttcgctctcgtctccgggtctctgcattctcgcgctccgtgttgaggtccgcgcgcctctctctgtctctcaccgacagtggtgcgcgcgctcgctccacctcatgtcttttgtgaacacatctcagtgtaggtgtcgtggtcctcccctttatggtttctatcatttacacctgattctcttgctgtcgtgtacgtgtcttatgtcctccacgacattctttctaccccatataacacggaccgcggcgataaaatactactcgactcaccaaggtattccagacaatatatgtgtcgtgagcca

SEQ ID NO: 524781 - DNA, 425 bp, Homo sapiens
  misc_feature (397)..(397): n is a, c, g, or t
cctttgtctatatttataaatcaagagaccggctgcgtgtggtggctcacgcctgtaatcccagcactttgggaggccgaggtgggcagatcatgaggtcagaagatcgagaccatcctggctaacacggtgaaacccagcctctactaaaaatacaaaaaaaaaaaaaattagctaggcgtggttgcaggcacctgtagtcccagctatttgggagactgaggcaggagaatggtgtgaccccaggaggcagagcttgcagtgagccgagatcaagccactgtactccatcctgggtgacagagcaagactccatctcaaaaaattaaataattaaaaattaaaacaggagaccaaattttcatgtctgcaagggttaaattctaaccctaatatnagctgtaatactgagacaaagggaaaca

SEQ ID NO: 524782 - DNA, 291 bp, Homo sapiens
  misc_feature (62)..(62): n is a, c, g, or t
  misc_feature (109)..(109): n is a, c, g, or t
  misc_feature (117)..(117): n is a, c, g, or t
  misc_feature (132)..(132): n is a, c, g, or t
  misc_feature (223)..(223): n is a, c, g, or t
  misc_feature (239)..(239): n is a, c, g, or t
  misc_feature (269)..(269): n is a, c, g, or t
aacaacaatcagccacaatgtgcttttaaggatttaactgatagtaaagataaatgtgagtnttaagaatgggatttttagactaggctgacacaagggatcttctttnaataaggntcttgagcatttgtntttttggagctcatccttaagggctggacaggaagaatcctgtgttatgtgtgcatgttgagcaatgcaaaaaacactctgccaaatcctngataccacatggtctngagaaatgcatgagtgatttaacgcacggntgggtgtagtcattatgttcct

SEQ ID NO: 524783 - DNA, 117 bp, Homo sapiens
acagaggatcccgtgtcatcccccttcgtgataacagctttctcagaagcaaagacatgaagtgactgtctgccaatcatgtatcatacaacataaggagtcctctcttatcttagg

SEQ ID NO: 524784 - DNA, 174 bp, Homo sapiens
atcatctagccagatggggcccgcaaccccagccaaagcggacagcagcagggtctggctgctgaggtccaccacagaccagctcccggaagaccaaagattgaatcccgcattgtccagctatcgtaacacacggtcccccagcgctggtcatgcctcaaccaccagtcagga

SEQ ID NO: 524785 - DNA, 178 bp, Homo sapiens
acgacagttttcagcttctcccaacacagagctagattttggaggagctgctggatctgatgtagatcaagaggaaattgtggatgagagagcagtgcaggatgtggaatccactgtcacaatctgatccacggaaatcttggaactttgatccaaggctccagcacgatacaaatgc

SEQ ID NO: 524786 - DNA, 377 bp, Homo sapiens
tccacggtcgggcgtgtggtacgacccagaaacttctggggacgtcagtcatagttactacctatttggacggcacgtgggagactgctggccccacggttgacggtctcacgttacgacgcacgacccacattggacctacacgctggtttttcctttgggtttaggtgtaagtgaactattatcattggagtggagaactggagagaaagggttgtcactgtccagcactacacagctgccggcacccagatggtacacattcccagaaagacacataggtagacacgtgggtgtacacccatggcacacagacacaatcacgcatacctgtaagcatgtgtgtagacatctacttgcattcacacccagatgcc

SEQ ID NO: 524787 - DNA, 432 bp, Homo sapiens
tggaaacagagtctcgctcggtaacccaggaggggtgtgcaatgacaaaacctgggttcatggcaaaatctgcctccggggctcaagcgattctcccgcttcagcctcccaagtatagtgtgggactacaggttacccgccaccacaccaagctatttttggtatttttagtagagagggggtttggccagtgtgggccaggcgggtctcaaattcttgacctcaggcgatcggcccgcttgggccacccaatggtgcggggatcacaggcttgagccacaatgcccagttagggcataacctttggatggtcctcttggaccaaagtcctgaggggaagcacttccggggaggggggtatttaaagcaaagtgccagcgcttgggaaagggcagaccaggtctaacgaaatggggctaggggatagggtgt

SEQ ID NO: 524788 - DNA, 1056 bp, Homo sapiens
  misc_feature (739)..(739): n is a, c, g, or t
ccacgcgtcggggtgacaagaccaagcctctgcctcaaaaaaaaaaaaaaaaaaaaaaaaggaaaaaaaaaaaatttttttgggggaagggggtgagggaaattctcctttcgaccgaggtggagtggaagaagattttctctctcgtcgcagcctcttttttgctcccacaacagaagaagacacacactccacggcggggaaaagcagacactctctgtggatacgtgggtaagaaagtggaacctctctctttgaggttaaacttctgctgtgtaagtcggggcagagaaaaccaccgggagacgatgggaaatggcccaccccgagatattatactctccctctttctctatattggcccgacaacgagaatactcttataacttcttctctaaggcgctctgtgggggaaaaattgtgggggagtgtggcctatagagaacatctttatggggcgccctctcctctctcgccgggaggggtgggtgttcttttctaaaaacgggggcgcgcgagatgtaagagcggccccctgctggggagggagtgtgggttaacaacgttttctcacctctatagatttctcgccctcaagagggtctccccacaaaaacggggggggaaaatctctccgagagagcgaaacacaagagacgcaaaaatatgtggtggataaaccacagagggggggaatatctacacactcactcacaaatatatacaagtagagggacancctctctctgggggtgtgccccccctcatacacacacccaaaagaaagacgcccctgtgcagaacaccccccacacagtggggggctcacaatcgtgggggcaaacaaaggaccgcctgctcggagggccaccctcactctcaataaaagcgtgaaaaaccatcgaacgagtggtagtgaagggggacgcccccacacagcggggaaatgaagaacaataattgagagataactagttgtggaggcccataacaacaaacacatacaataccaacaacatataagggaacagaaatcaagaaaaaggacaacaaaaa

SEQ ID NO: 524789 - DNA, 230 bp, Homo sapiens
tactggcggaccggacaggtaagcgttactgaaggcactttctttataatatagcccgagtggaatgaggcgttcatccttgtccatattcttactctttacaggagttcaacatgcaaataagctccacctcccaggcacttgttagtctcaaaaagtcacaaaggggcgatccaggtcccatctctcaaaggtccacacgtcaatagccttcccgtgtggctagatcc

SEQ ID NO: 524790 - DNA, 408 bp, Homo sapiens
cgggaaaacacacacaggggcatctacttgctggaaacatgttccggagagagtgcacggagcaggcatgctttgttctcttcccaaacctgcctgatgtcaaagtacgtcaaaaggagcctcacagtcccaggagagcatcgtcccaggtattgctgtgacaggtggtgacccttgagccagatctggaacgccttcctgggggctgcccaggcaactcacccatgaatccagaagcacttttcactgctggtggtgatctgtcacatatggcagcaagcagccctccaggctgtacgacgagagatgtgaaaccgcagatgcgtttgctctgtggcatgtgggctcgctgactgttgctctgcaggctgcagcaggtccggccagtaacccaacagggcatccggc

SEQ ID NO: 524791 - DNA, 160 bp, Homo sapiens
tgcgtgatgatcagactctagagttcccccccaaatcaagtatgtacgggcagtcttattgatctctgggttccccactgcaccccatgcaggttagaagttgacccgatctattaagtgagtcgagggatccagtcttggctgggtgtgagggcttatg

SEQ ID NO: 524792 - DNA, 483 bp, Homo sapiens
aaataaagattgaggagatgtcaagctctccagagagaatcataagggtagggggtcgcgagtgtatagcttatatgcttagcacgtttctgaactgagaggtttatggcttagtagttttctaactaggtatatacctcttttaaaagcaggcggaaaagccagagaaagttgaatgcttttctaagttctaactaataacatagatgttctgaagagtggcagcgtctccatgtgatccctgagcattaccactctgtgattggtgttagggggcaaaagaacagaagactatttagtagatagatggaaagacaggacccagcttgcccaagtaagggctttggaagaaaaaggagagcagatgcattgacttctgtgagtagatgctagccatggtgccgaggcttcaggccactgattaagaaccatggcttctgccagtgagcagcatgtgtggcattccaggataaatgaggacaa

SEQ ID NO: 524793 - DNA, 110 bp, Homo sapiens
ggttcaaaatggcgacggcggcgcacgcgccgttaaattggctcctcccggcttgcccggtttccgttcccccaactttcggccgtaagttttgtctccttttttggggg

SEQ ID NO: 524794 - DNA, 102 bp, Homo sapiens
agacatgagaggtgtaggcagaagcaggaagcagcagaagcaggaagcggcagaaggcttcctgcttctgctgcttcctgcttctgcccataccaccctgaa

SEQ ID NO: 524795 - DNA, 555 bp, Homo sapiens
  misc_feature (511)..(511): n is a, c, g, or t
aagcagaagcgtcttagggtttttaggctcagtgaggatcttaggaggttctcccagtttggatacccatggctgcctgagaggccactgcagctccctgctcttagagtgaacacactggcaatatcctttctgcaatttcaacaggggcaccttgggtggcctgggactcatgggtccccaggaatggcccataacccttacaggaatccaagccagagcagaaagactttatagtttattgtctgggttaggcgcagaacaaagttgcactctagacaccccagaggcttgggtctggacgtggttgccatttgaagtttcctgctcctgtgacattcctgctctgtggccatccagtctctcctggtatgccaccatctaaaggaacctcagtctccatctccctccttcctgaagcaacagatagtagcatgtttctgacttcttgagaagtcttctttcctcttgtgcactggcgcctgcacctcagtcacttctgccaccccanccccatcctaactgagccccacattgaggaacctggccacccac

SEQ ID NO: 524796 - DNA, 104 bp, Homo sapiens
  misc_feature (63)..(63): n is a, c, g, or t
cgcgggtagtagggccttttcatgggtactgcatctacttcgaccgcaaaagagaagtgaccncaacttcaagaacaggcttcgagaacgaaccgctgtccctg

SEQ ID NO: 524797 - DNA, 334 bp, Homo sapiens
acctagctgtgctctgcacgtgcgatgggtcctgaatacagcacactatgtgtgcctctgcacgtgagatgggtctcctgaatacagcacactgatgggtcttgactctttatccaatttgccagtctgtgtcttttaattggggtatttagaccatttacacttaaggttaatattgttatgtgtcaatttgatcctgtcattatgatgctagctggttattttgcccattagttgatgcagtttcttcatagtgccgatggtctttacaatttggtatgtttttgcagtggctggtaccagtttttcctttccatattagtgcttccttcaa

SEQ ID NO: 524798 - DNA, 235 bp, Homo sapiens
aaccggtcgttaaccagactcacgatgaggctgaacgggataagtccaggctgagcattgtcagggaagctgctgagttattgaaccacttggtcacctttctctgtgagtcccaccaacttggcccccaggtagagctgaatggtggccccttgatggcaggatacagaaggtcaaattccagacggtcaatgctgagggaaatgggcactactcaaggacaagaaggaagttc

SEQ ID NO: 524799 - DNA, 567 bp, Homo sapiens
tctgtgcgtggagtccccaataaacctgtggtcctgcctggcaaaaaaaaaaaaaaaaaaaaaaaaaaaaaaaaaaaaaaaaaaaaaaacaggtgtgggcggccgccccgggcccccagaaaaagatttttcaaaccaccattctgggtgggggcggcgggggcccacaagagggagaaagaaagaaagcggggacaaaaggtgtgtttcccagaggaaaaaccgggggacaagaaacagaggaggggggagatttcccaccccaatataaaaaacgagccgcggggggcaaaaccgagagggtgtgttgggaaacaacaacacagagagagggaggattcagagaggggctaaaagggggggatcaccaaaagagaggggaccacaaaagggggaacgaggcgaaaaatacaaagattataacgcccccgggggggggggggctcaacagaaacaaaagaaaagagaggagagagacacaacaaaaaagcaggaacacgagaagagaaaaagaagaaaaacaatgacaacagagaaaaagacgacagaagagagagaggaggaaga

SEQ ID NO: 524800 - DNA, 577 bp, Homo sapiens
ggcacgatggcgcgtccatgtgaagagaccaccaaacaggctttgtgtgacacatggctgtttatttcacctgggtgcaggcgggctgagtccgaaaagagagtcagcgaaggggagataagggtggggccgttttattaggatttgggttaggtacaaggaaaattacagtcaagagggggtttgttctctgcgcgggcaggatgtgggggtcgcaaggtgctcagtagggggtgctttttgagccaggatgagccaggaaaaggactttcacaaggtaatgtcatcacttaaggcaaggaccttaagttagtcaaaacttaagacaaacttaagacaaaagaagtatctacacttcttttgtggtggaatgtcatcagttaaggtggggcagggcatattcacttctttggtgattcttcagttacttcaggccatctgggcgtatacgtgcaagtcacaggggatgcgatggcttggcttggactcagaggcccgacattcctgccttcttatattaataagaaaaattaaaccaaaatagtgttgaattgttgggacgcgccatcgtgcgctt

SEQ ID NO: 524801 - DNA, 141 bp, Homo sapiens
aatcgagctggtaccctgccgacgcgggtgtgcatgactcgccacccgggaggacactgcgccccgtgcgacggtcgggcgcgtctgttcgatcgcctgctgcgccgtttccgcttccaccacgcctcgccttgcacgtgg

SEQ ID NO: 524802 - DNA, 805 bp, Homo sapiens
acccttgtaataaattagggatcagccgccggtggcccaccggaccaccattggaccaggtggttgatactgaagtaaaatttgaaccaccgccaacatggtgaacccgtctcttctggaataccaattaccgggtgtgtggcgtgctcataatcccacctactcaggagctgtagcaggagaatcccttgaacccgccgaggtggaggttcactgaactgagattgggccactaccactcccgcctggatgacagacaggactccgtctccaaaaagaaaagaaatgtgaaggggtccaattttggggccaaaatatgtcattgcccgtgctccattttcccagccctctcttcctctgcccatgacccttggggaagtacatgttgagatggaggtgctaaatagttgagtcataatctcacctggatacgctgtaaccaatgcctggattatccaatcagttatgtaaactaaaatccttaacccccccgactgacagatgcccacctcgtggccgagggaatctcagaaaaaactttaaaccattcctggccctgatgggttgggaggtcagatgccacttgttataccccatccccttatggtttagacaccagctgccgagcctgaatggaccaaatagggatcatgagatggacagaacagacactgtggccataagatacccaattgtaaaccggacctaaggccatgcccagcacagggttaagtcatgtagagcccgccttcatgccccgcctcccctgccccccacttatgaataaactatgttctaactgcca

SEQ ID NO: 524803 - DNA, 242 bp, Homo sapiens
  misc_feature (99)..(99): n is a, c, g, or t
  misc_feature (158)..(158): n is a, c, g, or t
  misc_feature (172)..(173): n is a, c, g, or t
  misc_feature (199)..(200): n is a, c, g, or t
gaaagagaccagccttggtccctaagcctccaaaaaccgtcttctttaatccccaccttttctttactgcccaaaaaagaattgaacacccctgactcntggagtggtgtatactgccacaatcaagtgtttgagtcaagtccccagaggagaggggnaccctcctcccatnnttttttgcaacatctcatttcttccnnttgctgttgcttcccccctcacacaacttggttttgttctat

SEQ ID NO: 524804 - DNA, 374 bp, Homo sapiens
  misc_feature (8)..(8): n is a, c, g, or t
  misc_feature (13)..(13): n is a, c, g, or t
  misc_feature (115)..(115): n is a, c, g, or t
  misc_feature (118)..(118): n is a, c, g, or t
accaaccncggcncactgcaaccctctgcatccccaggttcaagcgattctccctgcctcagcttcccaagtggctggtattaccaggcatgtgccaccaagcccagctaatttncgncttgtttgttttggtagagacagtgtttcaccatattggctaggctggtctcgaactcctaacctcaggtgatccacttgcctaggcttcccaaagtgctggaagtacaaggtatgagccactatacctggcctgctttgtaatttgatcaataagaaatcttcatagagaactggcaagggcttctggaaaaatcattttgattaaagacatttaaaacaaaaaaggagtagaactatgtgtttaagtgtctaaa

SEQ ID NO: 524805 - DNA, 1557 bp, Homo sapiens
  misc_feature (1557)..(1557): n is a, c, g, or t
ttccggagagtggtggactgtatagatgaaggggtcaatattgtgcttacaggtgaaggagcgatgactgctcaaggcttccagggatttcgaaagtccttctctgctataaggactcagataagcaagttctagacgtactgggcaagctcaggtcaacgggatgtgagcagttagccaggttacttcctccatgccatgggtttgttgatgagtcattgaatggcaaccctgggtggaaaagtcgagagcctcacgaggactgctagaagatgtgactctcacttttctcccactgaaacttggtgccagtttgtaaaagtaggacatagcccttcttcgtattttttctctggatggcgtgcgtacgtgggcacagtaaccatactttcaacgtaaaggggacgataggacgtcgcaagggttattaggttctactctcgtcatcccgcgagacactgtatggtgagacttgaagggaaatggacttctatattttcctcctgttcttcgcatttttcttacacatgcggtaaaaacacacggacatttacgaaacgggtatggggccctccagggtccaatcttattacattgatttaagaaaccgccacgcttggtttccatgtaatccaacaatgtggttccaccgaagttagccgcctgtttcatacattttccttttgcggggcaccctgtttgacggcgaagtatggacctcgttgtgccaggtaggtcggctaaggttcagaccaggcggccatggagggggatgcgcgttgggtggcaagcccccattcgccattatcccatgaagttttattataagtcgttagattacgaagattgtcgtatatgcctgtggcccccatgaagggttgttcccatattaacattgttgcggtgttgtgggaggtgaccccccctgggggggtgacccaaaaaaccgaggtgggaattcttgattcgttccgccttcgaaattgtttggttagcaagccctgtgtttccagtagtatccaccaagcacaaggcggacgttactcagcgaaaggggtacacccccctgtgggtgcgcattgtacaagtccctatcctcatacttattacatggtgctgtcgtgtagttcaggaaggcgcgggacacgtccaggaccggtggactttacgcacgggcgcggcatcagcgcaactactgtgcacaagttgtgtgtttagagcgttgcaacacctgggctaagttgctggtggccccaagagggagagaaggacgcagcaggacaaacacagacaaacaaccgctggctagcttgtggcgctggcgtcacagtcggcacccgaggaagaacggagctacacaaccagcaaagtcgagtgtggagggcacggggggccacgcaggaggaacagcagagcagaaggtggacacacaggagacgtgacttactgcagggcagaactgctggagcaaggacccaggcagggagagagacagagcaccagacaagaaaacgacccggggcgggacaccagagacatgtcgtaacgacagacacn

SEQ ID NO: 524806 - DNA, 562 bp, Homo sapiens
gcggaggtgacggacttccttccccaggagccgactgagcaatcacaggcaggaagatgaaggttcgtgtgggctgcgctgcatggtcacattcctggaaggatgccaggccaatggctgagagcatggcggtggcagacagagccggagcccgagctgcgccaggagactcgagtggcagagtcggccgagcgctggcgaaacgtgtgcacatgggtcgtcttctgtggattacctgcgcggggtgcatgacactgtctgaccaggtgcaggaggatctgctcagctcccaggtcacccaggacactgagggcgctgactggacgaagaccatgaaagggacgtttgaccgggctctagcaatagtcgagagactggcaggaaccaacctgaacccacggctggcgggaggagactgtcggtggcaacgggtggtccaccgagtacgctgcacggcggaagacagggtccacgccattgcgtgcgacgtgcacaatggcaccgaccgttgtcgcgggccggcctggtggcagtagccgttgggcgtaccgttgcacggcca

SEQ ID NO: 524807 - DNA, 354 bp, Homo sapiens
tagttgttgattccattctaaagagtaattacagtcaggcatgactgctcatgcctgcaattccagcactttcagaggctgaggtgggaggattgcttgaggccaggaatttgagaccagcctgggcaacacagtgagatcccatctctacaaaaaatataaaaaaattagccaggcatggtggtatgtgcctgaagttccagctactcaggaggctgagaagggaggacagcttgagcccaggagttttagactgcagtgagctgtgatggtgccactgcactccagcctgggcaacacaccaagatgccatcccggtcctcaacagctgtagcaccaagcagagtaagatct

SEQ ID NO: 524808 - DNA, 146 bp, Homo sapiens
cacagatgtactcagatcgtatatcttcttcgtaagccacacttatccccaccttggctatcatcacccgatgaggcaaccagccagaacgcctgaacgcaggcacatacttcctattctacaccctccctgaagattgttggtgg

SEQ ID NO: 524809 - DNA, 118 bp, Homo sapiens
ctgacatggcgactcccggctctgtgattccggaggtcccctttgaaccttcgaagcctccagtcattgatggctgagccccactgtttacatgaatccagagagtttcatggataag

SEQ ID NO: 524810 - DNA, 306 bp, Homo sapiens
aggcaggacacgaacgcaagtcatggctcacatgtgtggcagcaggcaaagagagtgcttctgcagggaaactaccctttttaaaaccatcagatcttgcgagacttattcactatcatgagaacagcatgggaaagacatgcccccatgactcaattacttcccactaggtccctccaataacatgtgggaattcaagatgagatttgggtggggacacagccaaagcatatcattctgcccctggcccctcccaaatctcatgtcctcacattttaaaaccaatcatgccttcccaacagtccc

SEQ ID NO: 524811 - DNA, 312 bp, Homo sapiens
gggggagttcctttgagatgacatgatgactgacagtgccattagtggctctgacccagtttccacttcccaagaaccttctggccaagtgtgatacatgattgcaactgtcatccatccacatgctaagtgtgagtttgggtctccatagaagtttgttgtgggggccgtttactatggtcatgtctagatgttccactaaaggcaggtttagcagacgggctgacgggggctgtgtaacctaccacgcccaaaaacctagcgccagcgtggacgggaaactccttggcttgtggagcgaaaaagacagca

SEQ ID NO: 524812 - DNA, 745 bp, Homo sapiens
tttaaagaccctcatcaatagatggagacatacagaaaatagtcaaaccacatctacaaaatgccagtatcaggcgggcggcttcaaacccaaagtgatgttgggatgtaaagtgaaatattattgggcggataaagcagaatagtgaggaaagttgagccaataatgacgtgaagctccgtggaaagcctggtggctacaaaaaatgttgagccgtaaatgccgtcggaaatggtgaaagggagactcgaagtactctgaggcttgtaggagggctaaaatagaggcccagtaacaattgtaatgagcaggtgcttgaattattgggttccggtggttttctattaaactagtggtgagcctcagggtgattgatacctccgtgatgcgagtaaatacggatgtgttaaggagtgggactctctaggggatatagcggggtgatgccatgttgggggccagtgcccccctaatgggggggtaggggctaggctggagtggtcaacaggctcagaaaaatcctgcgaagaaacactttctgaggtactaaataggataatcccgtaattagaaggccttttgggaccgcgtgggtgtgtgttggccttggaatggtcctccccgtagtaaatagagccatcatggatattggtctggtgtaggaacaggcaaatagaaacgtaaaggaggaaataacacatggtatgccgaggcatagaggacagagcacttagccaggcggaaa

SEQ ID NO: 524813 - DNA, 518 bp, Homo sapiens
tgattatatgtgagtatcattaatcattagtttatagcaattactctttattccaatattataataatcctcactctacaatcataacctaggaaaaaccaggccatacagagataggagccgaggggacatagtgcgaagtggccagaagacaagagtgtgagccttctcttatgcctggacagggccaccagagggcttggtctagcagtaacaccagtgtctgggaaagatgcctgttgcaaagtggaccatggtctagcagtagcatcagtgtcaaggaaaaacacccactacttagcagactgggaaaaggagcctccctttccccgggggagtttagagaagactactcctccacctcttgttgagggcgtgacatcatgcatggcggcccgcagctatgcataagcctggattcctgttaagctgtgcttccctggtcacacttcctattggctttcatgtttcatcctgactacctggatatggctataaaatacaagagcacatgagtg

SEQ ID NO: 524814 - DNA, 709 bp, Homo sapiens
ggctcacgcccgtaattccagcactttgggaggccgaggcggtcggatcacctaaggtcaggagttcaagaccagcctggccaacatcgtgaaaccccgtctacactaaaataaaaatattagctaggtgtggaggtgcacgcttataagtctcagctactcgggaggctgagacaggagaatcacttgtaccttggaggcggaggatgcagatcgcaccactacactctagcctgggcaacaagagtgagactccgtctgaaaacaaacaaacacaaaaaaacctacccaggcacggtgtggtggctcatgcctcgaatcctaacactgtgggagactgtggtgactgaatcactcgaggtcaggtattcaagaccagccatggcaacatggcgaaacgcccgttgtactaaaaataccaaaattagtcgtgcagtgtgacgtctgacctgaatcccaagtactcatggagctgagtccgcagaattgcttaggaccctgaggcaagaggttgagtgagccacgatcgatgcgttagactgatcttggattgtaccactgcacttcagcctggagaatacattgaggctccattccagaactaaagcttactggccccagacttctggacgggccctttttccggattttaatcggagagatttaacacatcggccgaaatcgaccaaattttcctaggccattaggc

SEQ ID NO: 524815 - DNA, 290 bp, Homo sapiens
gtactccagcctgaggacccagtgaaactgtgtctcaaaaaaaatagaaaaatctgccggtcatgatggtgcacgcctgtaatcccagctcctagggaggctgaggtacaagaatcgcttgaacccgagaggcggaggttgcagtgaaccaagattatgccactgccctccagcctggcaagggggagattctgtctccaaaaaaaggaggtatatatacatgtgcttgtgcctccaggtatgtgtttgtgtgttctaggtttgacacgaaaaagactgatttacttgtg

SEQ ID NO: 524816 - DNA, 123 bp, Homo sapiens
ccagagacccactcgaggagcatcacagcgcatcataacctctctcatgacttcaactctactccactactactggactgtcagacttcagaatatggaatgtctcattgtgatttgatttac

SEQ ID NO: 524817 - DNA, 163 bp, Homo sapiens
tacttgtgatgagctactcctgggtcatgagaaggaacctgccttcagagactatgtggctgtggcacgaggaaacaaagatcacagcattcgtgcccaagaaccagagagtgggctttcagaagagacgcaggtgaagtgcctgagggaccaggcaacagat

SEQ ID NO: 524818 - DNA, 766 bp, Homo sapiens
  misc_feature (8)..(8): n is a, c, g, or t
  misc_feature (157)..(157): n is a, c, g, or t
  misc_feature (161)..(161): n is a, c, g, or t
  misc_feature (163)..(163): n is a, c, g, or t
  misc_feature (190)..(190): n is a, c, g, or t
  misc_feature (242)..(242): n is a, c, g, or t
  misc_feature (255)..(255): n is a, c, g, or t
  misc_feature (257)..(260): n is a, c, g, or t
  misc_feature (264)..(264): n is a, c, g, or t
  misc_feature (274)..(274): n is a, c, g, or t
  misc_feature (284)..(284): n is a, c, g, or t
  misc_feature (292)..(292): n is a, c, g, or t
  misc_feature (295)..(295): n is a, c, g, or t
  misc_feature (304)..(304): n is a, c, g, or t
  misc_feature (325)..(326): n is a, c, g, or t
  misc_feature (332)..(332): n is a, c, g, or t
  misc_feature (341)..(341): n is a, c, g, or t
  misc_feature (348)..(348): n is a, c, g, or t
  misc_feature (466)..(466): n is a, c, g, or t
  misc_feature (486)..(486): n is a, c, g, or t
  misc_feature (506)..(506): n is a, c, g, or t
  misc_feature (509)..(509): n is a, c, g, or t
  misc_feature (522)..(522): n is a, c, g, or t
  misc_feature (525)..(525): n is a, c, g, or t
  misc_feature (583)..(584): n is a, c, g, or t
  misc_feature (603)..(603): n is a, c, g, or t
  misc_feature (623)..(623): n is a, c, g, or t
  misc_feature (636)..(636): n is a, c, g, or t
  misc_feature (639)..(639): n is a, c, g, or t
  misc_feature (642)..(642): n is a, c, g, or t
  misc_feature (651)..(653): n is a, c, g, or t
  misc_feature (687)..(687): n is a, c, g, or t
  misc_feature (690)..(690): n is a, c, g, or t
  misc_feature (695)..(695): n is a, c, g, or t
  misc_feature (753)..(753): n is a, c, g, or t
cctgaggnccaaaccctgcctctcagctgcctcctgccctacaaactggtgactgctctcatccagcttctgatctgtttcatttaagatgattaaaatactcccctccccaattcgcttaaaaataattttcaaagattaaaaatttcatttgggngggngngtttttttaaataagaactttaaatgngggatatctccttcttcccctaggtccagttgaggactctggggggcctgcntcttcaccccaanannnnagcngccacttgangccccttggnaattttcnggnagtaatttntttcaaattttccctgcagtnncaaatnccacaaacngcttgcntaaacacgctgtcttcattataggcaccactcctcagctctggcaacctgatctctttctgtcaactagaccacatgcttcagattccctttggtgtggttgggggtttgttgggttngggggggctcgtgggggtcngggggggggcgtggggtggnttngagcacataatcnggnccatatgctgtgaaaaactcatgatctgggatctcagaggatagtgttttccctaggnngaccccggtcaagtatgtncagcatcgagccgtgttggnaaggttatagccnccnccncccaaaatnnntgttgccaactgccattgaagggtgtacttaagntanttgcnaattcccactggagttatgttaaaggagcacatggtatccccagctattgtgtcagcncccagctgtaaga

SEQ ID NO: 524819 - DNA, 312 bp, Homo sapiens
agttaagtttacaagtaaataagcttgctgaatacagtggctcacacctgaaatccccagcaccttgggaggccaaggtgggaggactgtttaagccccaggagtttgagaccagcctgggcaacatggcaaaaccccgtctctacaaaaaacacaaaaattagtcaggtgtagtgatgcatgcttatagtcccagctacttgagaggctgaggtgggaggatcacctgagcccggagaggtcgaggctacagtgagctgtgatcctgccactgcattccagctggttgacagagttaagactctgtcttta

SEQ ID NO: 524820 - DNA, 419 bp, Homo sapiens
cttttccacagggataggggagtgagttttgacaacagctagactgtgagacttgttctttcacctaaatcctaaggatgatgtacataacatttagtttgtgcctaagtaaattgcattttttctcattttgtcttcaacgtttggctattttccagcttactacatcttccaatatagaatgatcagatacagtatgggaaaaaaaactatacctactggtttcttttcttccacttattagaagtgtagataaagtatttgataagaaaaataatttaaactaaactagcatggggattttttattactaggaggctcactttccaatttccagctacaattcaaaattgttataattattggtagttagcaaaagagttcacacttgttagaaataaatcctattatcttattac

SEQ ID NO: 524821 - DNA, 595 bp, Homo sapiens
  misc_feature (53)..(53): n is a, c, g, or t
  misc_feature (390)..(390): n is a, c, g, or t
  misc_feature (454)..(454): n is a, c, g, or t
  misc_feature (497)..(497): n is a, c, g, or t
  misc_feature (522)..(522): n is a, c, g, or t
  misc_feature (531)..(531): n is a, c, g, or t
gggagaccacatgtctgctggtggtctcgtaagattatgatggagctgaacanttcctattgcctaggaaaggtgtactcattgacatgtcgtatcaccacgcattactcatgtgtttgtggtgatgccagtgtaaacaaacctaatgtgctgccagtccaaacctactgtgctgccagtcctataaaagtctagcacattgtgtatactacacaattaggtacagaacgtaatatttgataatcctaagtgcatcactggtttatgtatttactatactttttattgatgttttagagtatactcctatttatttaaaaaaaaaattaactgtggaacagcctgaggcagggccttcaggaaatattccagaaggcattgttattgtangacatgacagctccgtgcatgttattgcccctgaagacctttcagcgatacaggctgtggaggnggaagacagtgatgttaatgatcctgaccctgtgtgggcctangctagtgtgtgtgcttgagtcttantttttaatngttttttaaattaaaaaaattttaatagaaaaaagccgatagaataaggatataaaggaagaat

SEQ ID NO: 524822 - DNA, 146 bp, Homo sapiens
ctgctcggatggggcgggctgtcctcacaggtagtagagtaccagcaggtctggtccaaggtctggtgaatctctgcgtctcctccttggcactggccaaggtctcttctaggtcatcgatggttatctccaactttgcccacagg

SEQ ID NO: 524823 - DNA, 472 bp, Homo sapiens
  misc_feature (118)..(118): n is a, c, g, or t
  misc_feature (174)..(174): n is a, c, g, or t
  misc_feature (205)..(205): n is a, c, g, or t
  misc_feature (398)..(398): n is a, c, g, or t
acccacactcttctggttttccttctacatcagttcttctcagtctcttttgctggttcctcctcttcttgtgtggctctgaatgttgaacatcctaaagccagtcctcgatctcttncctatctacgttcaccacaaaactgccctcaagataatctcatcctgtctcatgtnttaaatacactaaggacagccgggcacactngctcacccctgtgatcccagcactttgggaggccgaggcaggcagatcacgaggttaggagatcaagaccatcttggccaatatggtgaaacccggtctctactaaaaatacaacaattaactgggtgtggtggtacgcacctgtagtcccagctacttgggaggctgatacaggagaatcgcttgaacccangaggtggagattgcagtgagccaagattgcgccactgcactccagcctggacaacaagagaaaaactctgtctc

SEQ ID NO: 524824 - DNA, 361 bp, Homo sapiens
tgttgagtaggctcacgaggaggaagaagaggaggggttggtcttgctgtctcagggttggcagaagcagaagaaaatttgtgtttaagtggacccatgcagttcaagctcatgttattcaaggatcaactgtacttataaaacttcctttcttgttcccctgctaagatggatgagctgacgaagcagaggttcagagaggaagttatattcctgccacttgctaggtaggctgtcagggcaagtcacttcacctctcagccaccttttccaatcccatgaggttgggatgataatgcctaacatgatttttggattgaggattcagagaattaaagatacatcatgcttggcacatgca

SEQ ID NO: 524825 - DNA, 451 bp, Homo sapiens
  misc_feature (46)..(46): n is a, c, g, or t
tgggattagtatatgaggtttctcactacctagtgacttctgtatngacctcgactctttgagataaaataaccgatgtgccgttccgtgtgcataaaagtagaagatgcagagagttttgcaaagtcaaagggaggtgatggacaaggggaatatttaggatgatgaaggcagagccaacagccggacagaagaatagaaccgggaggtagatggctacacggagcagatacagatgagcaggtacgaggatactgatctgatgatcacacattaaggtaaagagattgagctgtagacatagctgagcatgaaagctgacttggaagacacactggcagaaacggaggaacgcattggagcctatctggcgcatatatcaggcgctgatcagcggaatagaagcaaatttgggagatgtgcgagatgatagagaagcggatatgctttg

SEQ ID NO: 524826 - DNA, 217 bp, Homo sapiens
  misc_feature (199)..(199): n is a, c, g, or t
  misc_feature (205)..(205): n is a, c, g, or t
tgtagtcccgtgctttgggggccaaggtggtggattgcatttggctcagagttggccggcctggcgaatgcggaatgcctttctacaaaatacaaaaagtggtctggtgtggtggatgcacctgtgtcccagctacttgggggctggtgggggttcgcttggcctgggggtcggctgtgcagttggttgcacttctacnttccancctgggcgacag

SEQ ID NO: 524827 - DNA, 123 bp, Homo sapiens
tgaagaaatactggagttaaggggtcagagagagagcactaaaaattatgagcaggagattataaaagatttgctggaaactgcgattaaagaagcagttttaggtattgtaatcttaagaca

SEQ ID NO: 524828 - DNA, 519 bp, Homo sapiens
  misc_feature (25)..(25): n is a, c, g, or t
  misc_feature (78)..(78): n is a, c, g, or t
  misc_feature (80)..(80): n is a, c, g, or t
  misc_feature (82)..(82): n is a, c, g, or t
  misc_feature (89)..(89): n is a, c, g, or t
  misc_feature (100)..(100): n is a, c, g, or t
  misc_feature (105)..(106): n is a, c, g, or t
  misc_feature (115)..(115): n is a, c, g, or t
  misc_feature (118)..(118): n is a, c, g, or t
  misc_feature (134)..(135): n is a, c, g, or t
  misc_feature (143)..(143): n is a, c, g, or t
  misc_feature (147)..(149): n is a, c, g, or t
  misc_feature (153)..(153): n is a, c, g, or t
  misc_feature (155)..(155): n is a, c, g, or t
  misc_feature (159)..(159): n is a, c, g, or t
  misc_feature (161)..(161): n is a, c, g, or t
  misc_feature (163)..(163): n is a, c, g, or t
  misc_feature (198)..(198): n is a, c, g, or t
  misc_feature (203)..(203): n is a, c, g, or t
  misc_feature (217)..(217): n is a, c, g, or t
  misc_feature (221)..(221): n is a, c, g, or t
  misc_feature (223)..(224): n is a, c, g, or t
  misc_feature (235)..(235): n is a, c, g, or t
  misc_feature (239)..(239): n is a, c, g, or t
  misc_feature (244)..(244): n is a, c, g, or t
  misc_feature (246)..(246): n is a, c, g, or t
  misc_feature (250)..(250): n is a, c, g, or t
  misc_feature (252)..(252): n is a, c, g, or t
  misc_feature (266)..(266): n is a, c, g, or t
  misc_feature (274)..(274): n is a, c, g, or t
  misc_feature (279)..(279): n is a, c, g, or t
  misc_feature (283)..(283): n is a, c, g, or t
  misc_feature (292)..(292): n is a, c, g, or t
  misc_feature (301)..(302): n is a, c, g, or t
  misc_feature (305)..(305): n is a, c, g, or t
  misc_feature (308)..(308): n is a, c, g, or t
  misc_feature (314)..(314): n is a, c, g, or t
  misc_feature (316)..(316): n is a, c, g, or t
  misc_feature (321)..(321): n is a, c, g, or t
  misc_feature (323)..(323): n is a, c, g, or t
  misc_feature (333)..(333): n is a, c, g, or t
  misc_feature (337)..(337): n is a, c, g, or t
  misc_feature (343)..(343): n is a, c, g, or t
  misc_feature (346)..(346): n is a, c, g, or t
  misc_feature (348)..(348): n is a, c, g, or t
  misc_feature (352)..(352): n is a, c, g, or t
  misc_feature (364)..(364): n is a, c, g, or t
  misc_feature (368)..(368): n is a, c, g, or t
  misc_feature (378)..(378): n is a, c, g, or t
  misc_feature (396)..(396): n is a, c, g, or t
  misc_feature (398)..(398): n is a, c, g, or t
  misc_feature (415)..(415): n is a, c, g, or t
  misc_feature (512)..(512): n is a, c, g, or t
tggagtaaaaaccaggtgtaacatnttccggtgggggccctgggctctgcatccgcccctccgaagttagcaggagcntntnggaagtnaggtagcagcnaaganncccagcgtnttngaggggaagcgaaatnnttagtttnatannngttntntttntngnaatagcgccgcgcacagaaaaggaaactttttttngtttnttaagggcagggcngggntnnttgtaggaganggtnagctncnggcncnggcaggagcggatncaggagcngcgtngggncgcagagcnggacttttnnagnttntttttntntgcgntntttggtggangctncggttnatncngggnttttcaggtttntttnatgttttgtntgttttgttttttttttntnctcggttgttctcagcnctcttagatgttttcttcttgttgtatttgttggttgttgttggctgccgcggcgctgagtacttcacggggaagctgaggtcgggacggccggtgnagaccca

SEQ ID NO: 524829 - DNA, 802 bp, Homo sapiens
gagaaaagtctgaggccgctaaataccctccgttcaacgttgcactcccggcacgtgatcctgcctgccctgtcggtccggtaaggatgaactcaagttgaggcagcagaagcttcctcgcttctttgtgcattccctgaaccgctgcgtttagagatgccaaatgaggatcaaaatgagaacaatgaagccaagtgtctgggagcacagtgaagaccactgggagcacccgtggcacctgggagcacatgtgaagagcctgagagcatcctggcagcctggcggatgcgcaggttggcccctgaactgttctttgttgtacaggactctgctaacttctcacttggaacagacctgcgtaagagccaggtgggataagcgtaaagcaactcagctgctacagggctttgaatggagacacaaacggtctatttactgatacgtttggctgcactgttggaaacagctgctggaagtctccctgccgtgagagctctcattgccactactggaacatgagcccaggacaggcagactggggcagtgactgcaccaggaaaactagaggtcagaactccgggatcaggaactgtagcacatatcccatgcaggtgaaacgctctttgaggcctcctttaggaacagcgtctccccggtgcgtttgcgaaaagaaccattaattggtacacaccacattatcaccagcactccagggcattcggcccaagtatcagctgccgggtggcctaactgcaaactctgatctaccgaacccttataagggtattgagccggcaaaggc

SEQ ID NO: 524830 - DNA, 170 bp, Homo sapiens
gtgggggcccggggggggggggggggcccctttttttcccccccccttttttttgtccgcccggggcccccatataatagtgagatatatgggcttgttcttatttcaatattcatttagtggataaaatacaagtgaaacagatgtattagaacaatgtaaacatataa

SEQ ID NO: 524831 - DNA, 435 bp, Homo sapiens
gaaagaagaagaaaagctcctgactaaatcagggctgggcttagacagagttgatctatagaatatctttaaaggagagatgtcaactttctgcactattccagcctctgctcctccctgtctaccctctccctcctctttcctccacttaacccacaatcttgaaaacttccttcctctcctgtgaaccatcaattggccagatccattttcagtggtctggattccttttaatttcctttcaacctcgaaagaacctggccataggcccactatgtgttgtaactcccactagtgtcaggtccctcttgtttccaagagattcctgggtctccagagcccagacaggctcactaagctctaactgaagagcacaggcactcaggacagggtcaaatggtacacagctctcctgtgcccaggagaaggggtgta

SEQ ID NO: 524832 - DNA, 696 bp, Homo sapiens
acaacttattttctctatcataatcagtccttacaatctcaaaccacacacctcttccacagaatagtccctgggccttgaggagttgattagctttaatttctggcctgtgttttaggaatccagtttattttgatgacttcttctaccagacctgaagatgaggatttaatgctgtcagtgtttaagatttagcaagactggtgtcctttttagacccaggagtcaaagccctgtaactcaagtgtcacaagtactttaaaagcacatacagaaagatacacggatgtaatacctttaatttttttaaaaattttcttttaacctcagtttttttctaaacaaaccaaaacttaataataatggcataggaattatttcaataaaatgtaaaatctgttagtcagttaccaaaaagcaaaaaaaagaccttctgcagtgcacaaaatattatgtcggaagaaaacatttcctttagacctgtatgttagcatcaggccacaagaaacagaactcgagggaaaaaaaacttacatgagctgaaaatgagatgaaagtgaagcattactattttacacatttttaaacagggagagaaaaccaaaaatggtgagatgcataaaagtgacttgcgttgaaaaacgcaggaaaaattttggggtggccggaaatttataaaatttgggggggccacag

SEQ ID NO: 524833 - DNA, 112 bp, Homo sapiens
tcggtacctgattacgactccggtcacacactgtaagatcaaaaaaccattcacatttgaaagagatgtaggtgtattcatagggatggtggctcaacaaatcaagcaaact

SEQ ID NO: 524834 - DNA, 437 bp, Homo sapiens
attcaacttcttcgtatagtgccatgtggcatctaaaataactatggctaggaaataaaacatatttgcagaatgtaaggggttgacatcaaagacatggctcaaagtggcccttcatttggctccacgtcatctcacaatagtgaaatacagcagcaatgtcactaaactcacatcaacaactaaggggcagcagcattttgcaaccaacagggagtgcaagcacacgttttttgctcctgttttcaacagtcacttgtcactaatgcacacacaatagtgcatctcttctaggcccaagttggatccagtgcatccaatttcatcagcatttctgtttcaacatcatcaaaagcaaaaagtaatctgccaattagaaaaccaaaaaactcaaacttaagtgatgtactgatggagccactgtatttgcatagaga

SEQ ID NO: 524835 - DNA, 348 bp, Homo sapiens
agcggacccggctctgaacttaggctctctgaacttaggcaaataatattttacagcggattttatacattctaagtgtacttcatcccaacacagttgctttttgatagtgtttttaaaaaattcttttatcttaaatttcagtttgtaaaatgtttaaaaaatttcagattcataaatccaacacctacaaatcacgtctgtgtgcctattgaaagcactcatgttccacatgcctaaagccaaacttttaactaccattcccacatgtcctcctgactatcagtaccaaaaagcagacagacaaaagtgatgcaaaccgggtcctctcctaagttcagagccagg

SEQ ID NO: 524836 - DNA, 100 bp, Homo sapiens
aaattagaattctcagtacacgggcttaagttgatcaactttctagaaaatcagcccttgggggattccctgtgtactgggtagttcaccctttatcact

SEQ ID NO: 524837 - DNA, 344 bp, Homo sapiens
tacatcagagtacgctgatgaactcaggaggttgaggtgcagtgagctgagattatgccactatactccagcctgggcacaaagggtgaaactccgtctcaaaaaaaaaaagaaaactcagtttacccaaacggcccccactcttcatattattaccaccagtcattcatctcaattatggcactcttgcttcagagccaggtgctttactcattgtttctcaatctttcacaacagcccccagagggcaagtataagtttccctcacttttcaagcaggcttcagcacaggttcaagctcatttccccctaggtcctcacgtctggcattgcaccactcttgg

SEQ ID NO: 524838 - DNA, 190 bp, Homo sapiens
  misc_feature (100)..(100): n is a, c, g, or t
  misc_feature (111)..(111): n is a, c, g, or t
  misc_feature (158)..(158): n is a, c, g, or t
  misc_feature (179)..(179): n is a, c, g, or t
ctgcacacagtgggaccacagagatgctgtcatcatttgtgaattggctcagggaatcaggcaatgaattgcccgttggagaagacaaggaatagaacanagggaagaganagattaaaggttaaaagcactgggcgctgtggcttacatctgtaatnccagcactttgggatgccaangcgggcagatc

SEQ ID NO: 524839 - DNA, 363 bp, Homo sapiens
atgcaactgaagttaattttttactagcattaaaatatattgttggatcttgtagaggtgttagataatcccccaaggtactactaagaaaatatcggaggccaggcagcggtctcgcgcggtgtaatcccagcacttgggggggccgaggcggcggatcacaaggtgaggagatggagggcatcgtggctagcacggtgagacgcggtctctattaaaaatacaaaaaaaaaaaattagccgggtgtagaggtgggcgccgggagttggagctactcgggaggcggaggcagaagaatggggtgaacccgggaggcggagcttagagtgagccaagatcgggccaggggagtcgggccgggg

SEQ ID NO: 524840 - DNA, 459 bp, Homo sapiens
tgcggtggtatgagtggagggagcaaacaagaggttcggatggacctttgtaagaaccgtgtcactatggtgtgggcggaaatgaacgggatgggaaaatacgctacctatagaggcaggcactggaggtagtgaaacaatgaggcgagacgtgaggacctggggtagtagttggggcacggggaatattaggtggggtagcatggcgggaggggggggggtggggggcagccgttgctaaaaaccgcaggggtgaaagggggggtagtagccgtggatacaccagaggatactgactagaaattgataggactgtgcggggacgccgtagacgatacgtggcgggttacactggcgtgcgcatagttggcccctggggcaataccgcgtgcgctaagctgaccagcggttcgtgcatccaatagttgagaataagattagttgcctaatccggaggat

SEQ ID NO: 524841 - DNA, 106 bp, Homo sapiens
gaacagaagctctcaaagccctgccgtttcctctcgctgccactttggaaaataagagactagagattcactggacgcttcctcccggcatcacaagacttgactg

SEQ ID NO: 524842 - DNA, 162 bp, Homo sapiens
acagttggatcaggacatcccgcatgtgcatcccgctattaaatggttcgtttgttcaacgattaaagtctctacgctgatctgagttcagaccggattagtccaggtcgttttctatctacttcatattcctcccttgttcgaaatgtctctacctgtaca

SEQ ID NO: 524843 - DNA, 467 bp, Homo sapiens
  misc_feature (88)..(88): n is a, c, g, or t
  misc_feature (131)..(131): n is a, c, g, or t
ggctccagtcctgtcgtgcgcgcaggcccttattgagagcgggatgaagtacgaggacgccatccagttcatccgccagaagcgccgnggagccatcaacagcaagcagctcacctacctggagaaatacnggcccaaaaggctgcggttcaaagacccacacacgcacaagacccggtgctgcgttatgtagctcaggaccttggctgggcctggtcgtcatgtaggtcaggaccttggctggacctggaggccctgcccagccctgtgcccgccccctcccacaccagccaggctggtctcctctagcctgtttgttgtggggtgggggtatattttgtaaccactgggcccccagcccctcttttgcgaccccttgtcctgacctgttctcggcaccttaaattattagaccccggggcagtcaggtgctccggacacccgaaggcaataaaacaggagccgtg

SEQ ID NO: 524844 - DNA, 407 bp, Homo sapiens
  misc_feature (88)..(88): n is a, c, g, or t
  misc_feature (131)..(131): n is a, c, g, or t
ggctccagtcctgtcgtgcgcgcaggcccttattgagagcgggatgaagtacgaggacgccatccagttcatccgccagaagcgccgnggagccatcaacagcaagcagctcacctacctggagaaatacnggcccaaacagaggctgcggttcaaagacccacacacgcacaaacacatgcgcttcctcatcacccacaaccccaccaacgccacgctcagcaccttcattgaggacctgaagaagtacggggctaccactgtggtgcgtgtgtgtgaagtgacctatgacaaaacgccgctggagaaggatggcatcaccgttgtggactggccgtttgacgatcgcccccgcccggacaaggttgtgaatgggcgtgaggggatcctcagcagtcgaccacaga

SEQ ID NO: 524845 - DNA, 115 bp, Homo sapiens
cacgagggcaatgttcaacattaacattgatgatgactatctcccgtgtctccaagggatcacacgagctaccttctgcaatgtttatctagaatggattcaacactgtgcacgg

SEQ ID NO: 524846 - DNA, 1926 bp, Homo sapiens
gcggccgcgcctgtgcgcgagggcgcgcgcgtccgagccctccacccgtcgtgccggcgccgcccggaccgccagatgctgtgtgctgtggacccacctggggttcatggagtgggccacggggcccagccctaagcactgctgcgcccagggtcgccgcgcctcctgctgaggggtccccgtgccactggctctcaccattgccctcgcctgccgatggcctctgctgcccagcctggggccagctctaccgcctgagccccctgccccactccaggactcaccgtaccccgatggggtaacgtgacacaggccccacacgtcagaggccgctgtccccacggccactgcccgtgacccctggcccaaggcagctggagttggttcagttcaagttcattcttcctctggcccttgggggcttggggcccacctctgagtgaagggggctgtctgcccatccaccaatgtggagagggcgcccccggtgtggggtccagctctggacactgcttggcggccgggttcactttgagtttttaagttttctttgctgagcttttttggttgttctttttattttttgcctctttatgactatccagctctgagagacgggagtttggagttgcccgctttactttggttgggttggggggggcggcgggctgttttgttccttttcttttttaagagttgggttttcttttttaattatccaaacagtgggcagcttcctcccccacacccaagtatttgcacaatatttgtgcggggtatgggggtgggtttttaaatctcgtttctcttggacaagcacagggatctcgttctcctcattttttgggggtgtgtggggacttctcaggtcgtgtccccagccttctctgcagtcccttctgccctgccgggcccgtcgggaggcgccatggctcggatgaaccgcccggccccggtggaggtgagctacaaacacatgcgcttcctcatcacccacaaccccaccaacgccacgctcagcaccttcattgaggacctgaagaagtacggggctaccactgtggtgcgtgtgtgtgaagtgacctatgacaaaacgccgctggagaaggatggcatcaccgttgtggactggccgtttgacgatggggcgcccccgcccggcaaggtagtggaagactggctgagcctggtgaaggccaagttctgtgaggcccccggcagctgcgtggctgtgcactgcgtggcgggcctgggccgggctccagtccttgtggcgctggcccttattgagagcgggatgaagtacgaggacgccatccagttcatccgccagaagcgccgcggagccatcaacagcaagcagctcacctacctggagaaataccggcccaaacagaggctgcggttcaaagacccacacacgcacaagacccggtgctgcgttatgtagctcaggaccttggctgggcctggtcgtcatgtaggtcaggaccttggctggacctggaggccctgcccagccctgctctgcccagcccagcaggggctccaggccttggctggccccacatcgccttttcctccccgacacctccgtgcacttgtgtccgaggagcgaggagcccctcgggccctgggtggcctctgggccctttctcctgtctccgccactccctctggcggcgctggccgtggctctgtctctctgaggtgggtcgggcgccctctgcccgccccctcccacaccagccaggctggtctcctctagcctgtttgttgtggggtgggggtatattttgtaaccactgggcccccagcccctcttttgcgaccccttgtcctgacctgttctcggcaccttaaattattagaccccggggcagtcaggtgctccggacacccgaaggcaataaaacaggagccgtg

SEQ ID NO: 524847 - DNA, 2296 bp, Homo sapiens
gcggccgcgcctgtgcgcgagggcgcgcgcgtccgagccctccacccgtcgtgccggcgccgcccggaccgccagatgctgtgtgctgtggacccacctggggttcatggagtgggccacggggcccagccctaagcactgctgcgcccagggtcgccgcgcctcctgctgaggggtccccgtgccactggctctcaccattgccctcgcctgccgatggcctctgctgcccagcctggggccagctctaccgcctgagccccctgccccactccaggactcaccgtaccccgatggggtaacgtgacacaggccccacacgtcagaggccgctgtccccacggccactgcccgtgacccctggcccaaggcagctggagttggttcagttcaagttcattcttcctctggcccttgggggcttggggcccacctctgagtgaagggggctgtctgcccatccaccaatgtggagagggcgcccccggtgtggggtccagctctggacactgcttggcggccgggttcactttgagtttttaagttttctttgctgagcttttttggttgttctttttattttttgcctctttatgactatccagctctgagagacgggagtttggagttgcccgctttactttggttgggttggggggggcggcgggctgttttgttccttttcttttttaagagttgggttttcttttttaattatccaaacagtgggcagcttcctcccccacacccaagtatttgcacaatatttgtgcggggtatgggggtgggtttttaaatctcgtttctcttggacaagcacagggatctcgttctcctcattttttgggggtgtgtggggacttctcaggtcgtgtccccagccttctctgcagtcccttctgccctgccgggcccgtcgggaggcgccatggctcggatgaaccgcccggccccggtggaggtgagctacaaacacatgcgcttcctcatcacccacaaccccaccaacgccacgctcagcaccttcattgaggacctgaagaagtacggggctaccactgtggtgcgtgtgtgtgaagtgacctatgacaaaacgccgctggagaaggatggcatcaccgttgtggactggccgtttgacgatggggcgcccccgcccggcaaggtagtggaagactggctgagcctggtgaaggccaagttctgtgaggcccccggcagctgcgtggctgtgcactgcgtggcgggcctgggccgggctccagtccttgtggcgctggcccttattgagagcgggatgaagtacgaggacgccatccagttcatccgccagaagcgccgcggagccatcaacagcaagcagctcacctacctggagaaataccggcccaaacagaggctgcggttcaaagacccacacacgcacaagacccggtgctgcgttatgtagctcaggaccttggctgggcctggtcgtcatgtaggtcaggaccttggctggacctggaggccctgcccagccctgctctgcccagcccagcaggggctccaggccttggctggccccacatcgccttttcctccccgacacctccgtgcacttgtgtccgaggagcgaggagcccctcgggccctgggtggcctctgggccctttctcctgtctccgccactccctctggcggcgctggccgtggctctgtctctctgaggtgggtcgggcgccctctgcccgccccctcccacaccagccaggctggtctcctctagcctgtttgttgtggggtgggggtatattttgtaaccactgggcccccagcccctcttttgcgaccccttgtcctgacctgttctcggcaccttaaattattagaccccggggcagtcaggtgctccggacacccgaaggcaataaaacaggagccgtgaaaaacacacaaacaaacaaagacaacccacacaacacaaaaacaccacgagaaacaaaggcgcgggcggcaacagacaaaacccggggagacaacaaaggagacgaccgatctagaacaggagggcaccagagcgaggcacaaaagcaagcgagccgggacaaacgagcgcggggaagaagcagcacagatcctgcgggcgagcacaccacgccggggcagccgagacccaccgcataacacggcgaacagaactgtggaaaacacacgcagggggacgtctaaaacacagcacgaagcacacacacgccagccaccgccagcagcactagcacgcgagcaggcgacccgagacgcacgaccagcgcca

SEQ ID NO: 524848 - DNA, 675 bp, Homo sapiens
gacccacgcgtccgggggaattccgtcttctgcactatgcgggggaggtgagctacagcgtgacctgggttactggacaaaaacaagtgaccttctcttccggaaccttaaggagaccatgtgtatctcagagagatatcccattatgagccgagtgcttcgaccggatgcgaggctcagtgacaagaacgcggtccagagatcggtcgccacccagttcaagatgagcctcctggcacgctggtggcacgatcctgcagtctaaggagcccgcctacgatccgcatgcatcgaaagcccaatgatgccaatagcaggcccgggccgctttgacgaggtgctgatccgccaccaggtgaagtacctggggctgcttggtaaaacctgcgcgtgacgcagagtccggcttgtgcctatcaggcgcaaagtacgaagctttcctgcaaaggtacaagtcactgtgcccagagacgtgggccacgtgggcaggacggccggaggatgggagtggctgtgcttggtccgaaacctgggctacacagccagaatgagtacaagatgggcaggatcaagatcttcatccggttccccaagaccctgtttgccacagaggatgcccgtggaggtccggcggcagagcctgggcacaaaagatcctaagctgactgtcagggg

SEQ ID NO: 524849 - DNA, 1964 bp, Homo sapiens
gccggctccgcggcggaggggcggcgccccgacccaggcccagcaccgtgggcaccgccaggccggcgcgtatggaggcggtgggacgcctgcggcgcgggtgagcctggcagatgctgtgtgctgtggacccacctggggttcatggagtgggccacggggcccagccctaagcactgctgcgcccagggtcgccgcgcctcctgctgaggggtccccgtgccactggctctcaccattgccctcgcctgccgatggcctctgctgcccagcctggggccagctctaccgcctgagccccctgccccactccaggactcaccgtaccccgatggggtaacgtgacacaggccccacacgtcagaggccgctgtccccacggccactgcccgtgacccctggcccaaggcagctggagttggttcagttcaagttcattcttcctctggcccttgggggcttggggcccacctctgagtgaagggggctgtctgcccatccaccaatgtggagagggcgcccccggtgtggggtccagctctggacactgcttggcggccgggttcactttgagtttttaagttttctttgctgagcttttttggttgttctttttattttttgcctctttatgactatccagctctgagagacgggagtttggagttgcccgctttactttggttgggttggggggggcggcgggctgttttgttccttttcttttttaagagttgggttttcttttttaattatccaaacagtgggcagcttcctcccccacacccaagtatttgcacaatatttgtgcggggtatgggggtgggtttttaaatctcgtttctcttggacaagcacagggatctcgttctcctcattttttgggggtgtgtggggacttctcaggtcgtgtccccagccttctctgcagtcccttctgccctgccgggcccgtcgggaggcgccatggctcggatgaaccgcccggccccggtggaggtgagctacaaacacatgcgcttcctcatcacccacaaccccaccaacgccacgctcagcaccttcattgaggacctgaagaagtacggggctaccactgtggtgcgtgtgtgtgaagtgacctatgacaaaacgccgctggagaaggatggcatcaccgttgtggactggccgtttgacgatggggcgcccccgcccggcaaggtagtggaagactggctgagcctggtgaaggccaagttctgtgaggcccccggcagctgcgtggctgtgcactgcgtggcgggcctgggccgggctccagtccttgtggcgctggcccttattgagagcgggatgaagtacgaggacgccatccagttcatccgccagaagcgccgcggagccatcaacagcaagcagctcacctacctggagaaataccggcccaaacagaggctgcggttcaaagacccacacacgcacaagacccggtgctgcgttatgtagctcaggaccttggctgggcctggtcgtcatgtaggtcaggaccttggctggacctggaggccctgcccagccctgctctgcccagcccagcaggggctccaggccttggctggccccacatcgccttttcctccccgacacctccgtgcacttgtgtccgaggagcgaggagcccctcgggccctgggtggcctctgggccctttctcctgtctccgccactccctctggcggcgctggccgtggctctgtctctctgaggtgggtcgggcgccctctgcccgccccctcccacaccagccaggctggtctcctctagcctgtttgttgtggggtgggggtatattttgtaaccactgggcccccagcccctcttttgcgaccccttgtcctgacctgttctcggcaccttaaattattagaccccggggcagtcaggtgctccggacacccgaaggcaataaaacaggagccgtg

SEQ ID NO: 524850 - DNA, 194 bp, Homo sapiens
  misc_feature (156)..(156): n is a, c, g, or t
gcggcgcttagaggatccccaaacttcccgtggcgctacgcgtggcatcgtggtgcgtggacagtacgggatgaagctgccaggcatggagtacgttgacggggactttcagtgccacaccttcgacagcagcaatgtgagtgatgcgtccccccnccacaccgtttccctcaccccgctcttccacgcccacg

SEQ ID NO: 524851 - DNA, 1851 bp, Homo sapiens
gcggccgcgcctgtgcgcgagggcgcgcgcgtccgagccctccacccgtcgtgccggcgccgcccggaccgccagatgctgtgtgctgtggacccacctggggttcatggagtgggccacggggcccagccctaagcactgctgcgcccagggtcgccgcgcctcctgctgaggggtccccgtgccactggctctcaccattgccctcgcctgccgatggcctctgctgcccagcctggggccagctctaccgcctgagccccctgccccactccaggactcaccgtaccccgatggggtaacgtgacacaggccccacacgtcagaggccgctgtccccacggccactgcccgtgacccctggcccaaggcagctggagttggttcagttcaagttcattcttcctctggcccttgggggcttggggcccacctctgagtgaagggggctgtctgcccatccaccaatgtggagagggcgcccccggtgtggggtccagctctggacactgcttggcggccgggttcactttgagtttttaagttttctttgctgagcttttttggttgttctttttattttttgcctctttatgactatccagctctgagagacgggagtttggagttgcccgctttactttggttgggttggggggggcggcgggctgttttgttccttttcttttttaagagttgggttttcttttttaattatccaaacagtgggcagcttcctcccccacacccaagtatttgcacaatatttgtgcggggtatgggggtgggtttttaaatctcgtttctcttggacaagcacagggatctcgttctcctcattttttgggggtgtgtggggacttctcaggtcgtgtccccagccttctctgcagtcccttctgccctgccgggcccgtcgggaggcgccatggctcggatgaaccgcccggccccggtggaggtgagctacaaacacatgcgcttcctcatcacccacaaccccaccaacgccacgctcagcaccttcattgaggacctgaagaagtacggggctaccactgtggtgcgtgtgtgtgaagtgacctatgacaaaacgccgctggagaaggatggcatcaccgttgtggactggccgtttgacgatggggcgcccccgcccggcaaggtagtggaagactggctgagcctggtgaaggccaagttctgtgaggcccccggcagctgcgtggctgtgcactgcgtggcgggcctgggccggaagcgccgcggagccatcaacagcaagcagctcacctacctggagaaataccggcccaaacagaggctgcggttcaaagacccacacacgcacaagacccggtgctgcgttatgtagctcaggaccttggctgggcctggtcgtcatgtaggtcaggaccttggctggacctggaggccctgcccagccctgctctgcccagcccagcaggggctccaggccttggctggccccacatcgccttttcctccccgacacctccgtgcacttgtgtccgaggagcgaggagcccctcgggccctgggtggcctctgggccctttctcctgtctccgccactccctctggcggcgctggccgtggctctgtctctctgaggtgggtcgggcgccctctgcccgccccctcccacaccagccaggctggtctcctctagcctgtttgttgtggggtgggggtatattttgtaaccactgggcccccagcccctcttttgcgaccccttgtcctgacctgttctcggcaccttaaattattagaccccggggcagtcaggtgctccggacacccgaaggcaataaaacaggagccgtg

SEQ ID NO: 524852 - DNA, 117 bp, Homo sapiens
gggagactcttttttggtcggccatggacctgtagctctcgtgttcggatacaggaggcctcaactgcattgatgagcagagagcggaagcccccactctctagaaagtgcagggcg

SEQ ID NO: 524853 - DNA, 921 bp, Homo sapiens
gaccggtgttgtggcaccccaccatgtgtggcgaacccccctcgttaactttcataccaccatttttgttacacagatctcgccgctcttaaagtatctcccgtggtgcccacaaacccacatatctcgcacatgctcaacaaattacattttccgccaccttcataccaacatcgtgcgttcactcactttagtgcacctacacgctccttcaaacaatctttcccacacgtccacgctggaaacacctttagtcacgttccccaccgtccgccatctaaatatgcattcgtcgttttcagcccctcctccccaccaatgctttatgtcacaacatgtgactccactaatactatctttcttataaccaaatcctcccccttcaaacaccgcaaagaacaacaatcctccgaagtttataaattacttagtctttttagacaccacgcaaaaaaaaagtattatcacggcacttaacatctaatacgcaacaattctgtttaagtcgtctaccttcttgagcccatatgaaattgttctatctaactgcactcttcgcatccccacatgggtttgaacaaacctacgtattataaacacgttgcgttcgttcaccttattatttgaccccaaatggctacaataccctgccacgagcgccgcctaattcccaacagaatgagctgtttgggtgccaatacacctatacagagcacaccgcagtggagttggcgcaccccccggatgctgcgccccacacttgtatggaaagagagaacagacacggtggtactaccaccgacattgaggaagatttgctgtgggatgaatctcgcgataggcgccgtccagtagggtgctcacacccggcgaaacggtcgttgctgaattcaaacaaaacgccccacttcttacataaca

SEQ ID NO: 524854 - DNA, 176 bp, Homo sapiens
tctcactttgttgcccaggctagtctcaaactctaggcccaagcaatccttccacctcagccttccaaagtgctggattataggtgtgagccaccatgcccagccattgttttttattttcctttttttttttttttttttttggaaagggaaattggctgggtggcccgggggga

SEQ ID NO: 524855 - DNA, 2019 bp, Homo sapiens
gcggccgcgcctgtgcgcgagggcgcgcgcgtccgagccctccacccgtcgtgccggcgccgcccggaccgccagatgctgtgtgctgtggacccacctggggttcatggagtgggccacggggcccagccctaagcactgctgcgcccagggtcgccgcgcctcctgctgaggggtccccgtgccactggctctcaccattgccctcgcctgccgatggcctctgctgcccagcctggggccagctctaccgcctgagccccctgccccactccaggactcaccgtaccccgatggggtaacgtgacacaggccccacacgtcagaggccgctgtccccacggccactgcccgtgacccctggcccaaggcagctggagttggttcagttcaagttcattcttcctctggcccttgggggcttggggcccacctctgagtgaagggggctgtctgcccatccaccaatgtggagagggcgcccccggtgtggggtccagctctggacactgcttggcggccgggttcactttgagtttttaagttttctttgctgagcttttttggttgttctttttattttttgcctctttatgactatccagctctgagagacgggagtttggagttgcccgctttactttggttgggttggggggggcggcgggctgttttgttccttttcttttttaagagttgggttttcttttttaattatccaaacagtgggcagcttcctcccccacacccaagtatttgcacaatatttgtgcggggtatgggggtgggtttttaaatctcgtttctcttggacaagcacagggatctcgttctcctcattttttgggggtgtgtggggacttctcaggtcgtgtccccagccttctctgcagtcccttctgccctgccgggcccgtcgggaggcgccatggctcggatgaaccgcccggccccggtggaggtgagctacaaacacatgcgcttcctcatcacccacaaccccaccaacgccacgctcagcaccttcattgaggacctgaagaagtacggggctaccactgtggtgcgtgtgtgtgaagtgacctatgacaaaacgccgctggagaaggatggcatcaccgttgtggactggccgtttgacgatggggcgcccccgcccggcaaggtagtggaagactggctgagcctggtgaaggccaagttctgtgaggcccccggcagctgcgtggctgtgcactgcgtggcgggcctgggccgggctccagtccttgtggcgctggcccttattgagagcgggatgaagtacgaggacgccatccagttcatccgccagaagcgccgcggagccatcaacagcaagcagctcacctacctggagaaataccggcccaaacagaggctgcggttcaaagacccacacacgcacaagacccggtgctgcgttatgtagctcaggaccttggctgggcctggtcgtcatgtaggtcaggaccttggctggacctggaggccctgcccagccctgctctgcccagcccagcaggggctccaggccttggctggccccacatcgccttttcctccccgacacctccgtgcacttgtgtccgaggagcgaggagcccctcgggccctgggtggcctctgggccctttctcctgtctccgccactccctctggcggcgctggccgtggctctgtctctctgaggtgggtcgggcgccctctgcccgccccctcccacaccagccaggctggtctcctctagcctgtttgttgtggggtgggggtatattttgtaaccactgggcccccagcccctcttttgcgaccccttgtcctgacctgttctcggcaccttaaattattagaccccggggcagtcaggtgctccggacacccgaaggcaataaaacaggagccgtggcaaaggaaaacagaacaaaaaaaaagggcggcgacacaaaaaaacaccagggggggcacagaataaggacaccagtttttacaaaaggtccc

SEQ ID NO: 524856 - DNA, 127 bp, Homo sapiens
aacgtcggccggaccgacatggggacacacaagagtgtgacagtggacaagcgcgcgcatgtctctgatgcttgtatcattctgagcaatcgctcggtccgggacaataaacagtattatcaaagag

SEQ ID NO: 524857 - DNA, 2022 bp, Homo sapiens
  misc_feature (1986)..(1986): n is a, c, g, or t
  misc_feature (1997)..(1997): n is a, c, g, or t
  misc_feature (2003)..(2003): n is a, c, g, or t
  misc_feature (2013)..(2014): n is a, c, g, or t
gcggccgcgcctgtgcgcgagggcgcgcgcgtccgagccctccacccgtcgtgccggcgccgcccggaccgccagatgctgtgtgctgtggacccacctggggttcatggagtgggccacggggcccagccctaagcactgctgcgcccagggtcgccgcgcctcctgctgaggggtccccgtgccactggctctcaccattgccctcgcctgccgatggcctctgctgcccagcctggggccagctctaccgcctgagccccctgccccactccaggactcaccgtaccccgatggggtaacgtgacacaggccccacacgtcagaggccgctgtccccacggccactgcccgtgacccctggcccaaggcagctggagttggttcagttcaagttcattcttcctctggcccttgggggcttggggcccacctctgagtgaagggggctgtctgcccatccaccaatgtggagagggcgcccccggtgtggggtccagctctggacactgcttggcggccgggttcactttgagtttttaagttttctttgctgagcttttttggttgttctttttattttttgcctctttatgactatccagctctgagagacgggagtttggagttgcccgctttactttggttgggttggggggggcggcgggctgttttgttccttttcttttttaagagttgggttttcttttttaattatccaaacagtgggcagcttcctcccccacacccaagtatttgcacaatatttgtgcggggtatgggggtgggtttttaaatctcgtttctcttggacaagcacagggatctcgttctcctcattttttgggggtgtgtggggacttctcaggtcgtgtccccagccttctctgcagtcccttctgccctgccgggcccgtcgggaggcgccatggctcggatgaaccgcccggccccggtggaggtgagctacaaacacatgcgcttcctcatcacccacaaccccaccaacgccacgctcagcaccttcattgaggacctgaagaagtacggggctaccactgtggtgcgtgtgtgtgaagtgacctatgacaaaacgccgctggagaaggatggcatcaccgttgtggactggccgtttgacgatggggcgcccccgcccggcaaggtagtggaagactggctgagcctggtgaaggccaagttctgtgaggcccccggcagctgcgtggctgtgcactgcgtggcgggcctgggccgggctccagtccttgtggcgctggcccttattgagagcgggatgaagtacgaggacgccatccagttcatccgccagaagcgccgcggagccatcaacagcaagcagctcacctacctggagaaataccggcccaaacagaggctgcggttcaaagacccacacacgcacaagacccggtgctgcgttatgtagctcaggaccttggctgggcctggtcgtcatgtaggtcaggaccttggctggacctggaggccctgcccagccctgctctgcccagcccagcaggggctccaggccttggctggccccacatcgccttttcctccccgacacctccgtgcacttgtgtccgaggagcgaggagcccctcgggccctgggtggcctctgggccctttctcctgtctccgccactccctctggcggcgctggccgtggctctgtctctctgaggtgggtcgggcgccctctgcccgccccctcccacaccagccaggctggtctcctctagcctgtttgttgtggggtgggggtatattttgtaaccactgggcccccagcccctcttttgcgaccccttgtcctgacctgttctcggcaccttaaattattagaccccggggcagtcaggtgctccggacacccgaaggcaataaaacaggagccgtgaaaaaaaaaaaaaaaaaaaaacaaaaaaaacacaaaaaaaaaaaaacaaaaacaaaaaanacaaacaaaanaaaaanaaaacaagannaccacaaa

SEQ ID NO: 524858 - DNA, 2221 bp, Homo sapiens
gcggccgcgcctgtgcgcgagggcgcgcgcgtccgagccctccacccgtcgtgccggcgccgcccggaccgccagatgctgtgtgctgtggacccacctggggttcatggagtgggccacggggcccagccctaagcactgctgcgcccagggtcgccgcgcctcctgctgaggggtccccgtgccactggctctcaccattgccctcgcctgccgatggcctctgctgcccagcctggggccagctctaccgcctgagccccctgccccactccaggactcaccgtaccccgatggggtaacgtgacacaggccccacacgtcagaggccgctgtccccacggccactgcccgtgacccctggcccaaggcagctggagttggttcagttcaagttcattcttcctctggcccttgggggcttggggcccacctctgagtgaagggggctgtctgcccatccaccaatgtggagagggcgcccccggtgtggggtccagctctggacactgcttggcggccgggttcactttgagtttttaagttttctttgctgagcttttttggttgttctttttattttttgcctctttatgactatccagctctgagagacgggagtttggagttgcccgctttactttggttgggttggggggggcggcgggctgttttgttccttttcttttttaagagttgggttttcttttttaattatccaaacagtgggcagcttcctcccccacacccaagtatttgcacaatatttgtgcggggtatgggggtgggtttttaaatctcgtttctcttggacaagcacagggatctcgttctcctcattttttgggggtgtgtggggacttctcaggtcgtgtccccagccttctctgcagtcccttctgccctgccgggcccgtcgggaggcgccatggctcggatgaaccgcccggccccggtggaggtgagctacaaacacatgcgcttcctcatcacccacaaccccaccaacgccacgctcagcaccttcattgaggacctgaagaagtacggggctaccactgtggtgcgtgtgtgtgaagtgacctatgacaaaacgccgctggagaaggatggcatcaccgttgtggactggccgtttgacgatggggcgcccccgcccggcaaggtagtggaagactggctgagcctggtgaaggccaagttctgtgaggcccccggcagctgcgtggctgtgcactgcgtggcgggcctgggccggaagcgccgcggagccatcaacagcaagcagctcacctacctggagaaataccggcccaaacagaggctgcggttcaaagacccacacacgcacaagacccggtgctgcgttatgtagctcaggaccttggctgggcctggtcgtcatgtaggtcaggaccttggctggacctggaggccctgcccagccctgctctgcccagcccagcaggggctccaggccttggctggccccacatcgccttttcctccccgacacctccgtgcacttgtgtccgaggagcgaggagcccctcgggccctgggtggcctctgggccctttctcctgtctccgccactccctctggcggcgctggccgtggctctgtctctctgaggtgggtcgggcgccctctgcccgccccctcccacaccagccaggctggtctcctctagcctgtttgttgtggggtgggggtatattttgtaaccactgggcccccagcccctcttttgcgaccccttgtcctgacctgttctcggcaccttaaattattagaccccggggcagtcaggtgctccggacacccgaaggcaataaaacaggagccgtgaaaaacacacaaacaaacaaagacaacccacacaacacaaaaacaccacgagaaacaaaggcgcgggcggcaacagacaaaacccggggagacaacaaaggagacgaccgatctagaacaggagggcaccagagcgaggcacaaaagcaagcgagccgggacaaacgagcgcggggaagaagcagcacagatcctgcgggcgagcacaccacgccggggcagccgagacccaccgcataacacggcgaacagaactgtggaaaacacacgcagggggacgtctaaaacacagcacgaagcacacacacgccagccaccgccagcagcactagcacgcgagcaggcgacccgagacgcacgaccagcgcca

SEQ ID NO: 524859 - DNA, 365 bp, Homo sapiens
  misc_feature (253)..(253): n is a, c, g, or t
cgctgttgcgtgctgccagcgggaagctgtgtaggggtatgattgtcgcggcagggttccccgaggcctgcttagacgcgagcgcgccggtgagactgacagaggaaaggatagaggaacgtgctgccctaggtctggatagatgctcgaagcgaagcgtgtttccttcccgccaggcaacgtgacctttatgaaaccggggacgcctgacgccacattccgtggccgtgcattcccagtcccgttctcccgngaggcggaggtgacgtgaccatcatcgagttccttcggttctagtcaggtgagcccacttaccttgggcatgacagctcgtgaggaagtaacactcgaatgaaaggacaata

SEQ ID NO: 524860 - DNA, 2242 bp, Homo sapiens
gcggccgcgcctgtgcgcgagggcgcgcgcgtccgagccctccacccgtcgtgccggcgccgcccggaccgccagatgctgtgtgctgtggacccacctggggttcatggagtgggccacggggcccagccctaagcactgctgcgcccagggtcgccgcgcctcctgctgaggggtccccgtgccactggctctcaccattgccctcgcctgccgatggcctctgctgcccagcctggggccagctctaccgcctgagccccctgccccactccaggactcaccgtaccccgatggggtaacgtgacacaggccccacacgtcagaggccgctgtccccacggccactgcccgtgacccctggcccaaggcagctggagttggttcagttcaagttcattcttcctctggcccttgggggcttggggcccacctctgagtgaagggggctgtctgcccatccaccaatgtggagagggcgcccccggtgtggggtccagctctggacactgcttggcggccgggttcactttgagtttttaagttttctttgctgagcttttttggttgttctttttattttttgcctctttatgactatccagctctgagagacgggagtttggagttgcccgctttactttggttgggttggggggggcggcgggctgttttgttccttttcttttttaagagttgggttttcttttttaattatccaaacagtgggcagcttcctcccccacacccaagtatttgcacaatatttgtgcggggtatgggggtgggtttttaaatctcgtttctcttggacaagcacagggatctcgttctcctcattttttgggggtgtgtggggacttctcaggtcgtgtccccagccttctctgcagtcccttctgccctgccgggcccgtcgggaggcgccatggctcggatgaaccgcccggccccggtggaggtgagctacaaacacatgcgcttcctcatcacccacaaccccaccaacgccacgctcagcaccttcattgaggacctgaagaagtacggggctaccactgtggtgcgtgtgtgtgaagtgacctatgacggggcgcccccgcccggcaaggtagtggaagactggctgagcctggtgaaggccaagttctgtgaggcccccggcagctgcgtggctgtgcactgcgtggcgggcctgggccgggctccagtccttgtggcgctggcccttattgagagcgggatgaagtacgaggacgccatccagttcatccgccagaagcgccgcggagccatcaacagcaagcagctcacctacctggagaaataccggcccaaacagaggctgcggttcaaagacccacacacgcacaagacccggtgctgcgttatgtagctcaggaccttggctgggcctggtcgtcatgtaggtcaggaccttggctggacctggaggccctgcccagccctgctctgcccagcccagcaggggctccaggccttggctggccccacatcgccttttcctccccgacacctccgtgcacttgtgtccgaggagcgaggagcccctcgggccctgggtggcctctgggccctttctcctgtctccgccactccctctggcggcgctggccgtggctctgtctctctgaggtgggtcgggcgccctctgcccgccccctcccacaccagccaggctggtctcctctagcctgtttgttgtggggtgggggtatattttgtaaccactgggcccccagcccctcttttgcgaccccttgtcctgacctgttctcggcaccttaaattattagaccccggggcagtcaggtgctccggacacccgaaggcaataaaacaggagccgtgaaaaacacacaaacaaacaaagacaacccacacaacacaaaaacaccacgagaaacaaaggcgcgggcggcaacagacaaaacccggggagacaacaaaggagacgaccgatctagaacaggagggcaccagagcgaggcacaaaagcaagcgagccgggacaaacgagcgcggggaagaagcagcacagatcctgcgggcgagcacaccacgccggggcagccgagacccaccgcataacacggcgaacagaactgtggaaaacacacgcagggggacgtctaaaacacagcacgaagcacacacacgccagccaccgccagcagcactagcacgcgagcaggcgacccgagacgcacgaccagcgcca

SEQ ID NO: 524861 - DNA, 719 bp, Homo sapiens
  misc_feature (470)..(470): n is a, c, g, or t
  misc_feature (473)..(473): n is a, c, g, or t
  misc_feature (507)..(508): n is a, c, g, or t
  misc_feature (637)..(637): n is a, c, g, or t
cccaggcggggggtgaagctcatgcccaagctcaagctcaggctgaagcccaggcccgggccaaggcctactatgcatctcagaaggcgtagctgcttcagcatcagcatgagctgcagctgctacagccaccaccacactttcagtctactggggcagcccccaacggtgggggtggtggggacggacatgcggtgacaatacaccatagtggctggctgatgaccacgaccatcgtatatggaccgatgagctcttaaggacatctgacttactgtgacccactgcaccatacatgaggagcatctgatcagatcttagagatgcgcgctgtccatcattgggaagaggaacaagtcatgctgtggggaatcgtatgcaacactgggcgggaagagagaatttcttccgagtctggatttggatacgtcttcatgagcctatgctacggattgcctatacgggcgggnccntggggtgttaacttctgttcaaaaggacatttannccctcctgattggcaagggatactgagctgatggtgttattcagcagcctcccctccaagcaaagcttctaaaactggggggtcggtgcttaagggaaggattttgctatgaccctctagaaccttggncagtgtgggcaattaccctatgcctacccttcttatcctcaagtttgggctgatgtaatggcttggcctcctacaggggttt

SEQ ID NO: 524862 - DNA, 152 bp, Homo sapiens
ctttgaccatcaccactgggtgtatagataaatgatgggtaggtaggtagacgaatggacggatagatggatgcatggataagatggatggatgggtgaatagatggtagatagatgggtaggtagatagatgactggatggacagatggat

SEQ ID NO: 524863 - DNA, 130 bp, Homo sapiens
ctggagttatctgtttccctgtgcgatctacacacaggtcgcaggtagctcagttccacacttgagctagcaatggcatatacttccataaggtgcttccttcgtgtagtaggactagcatgggggtcat

SEQ ID NO: 524864 - DNA, 419 bp, Homo sapiens
  misc_feature (96)..(96): n is a, c, g, or t
  misc_feature (102)..(102): n is a, c, g, or t
attttttaggaacgcacggtggccccgctgcttgaggccggctttcggaaggagaacaacgttacggaggttaaggggctggttcccccggcccanttccgnttataacctttccccaaattattacgccccttgtggccaaaaggttagccccccccccgggccgggcccacccattgcctcctccgtgcctttttgggcgggagttcagggggttgccccccccctggggtgattcccactgtgtgttccccaaaacttttccgggtttttttttagggggtccccccaccccagggtgattcccactttgtgttccccacaacttttcccgctttttttttaggggcccttctgccccctgcaggggcccttaggttaaattaaccccggggctggggttggcccgttggccgtta

SEQ ID NO: 524865 - DNA, 129 bp, Homo sapiens
aaactcccgtccattcctgacagtggacttagatatgttctgtttctattttcttcgatgtcagtttttcattcttgatgtttatttcttttgtccatcagatctcttgtgaaatcccatggaaggttg

SEQ ID NO: 524866 - DNA, 781 bp, Homo sapiens
tccgttatcccccgaggccgagccgtgggggacatgaagagaccctaggcccgtttctagctgtcaaaaactgcccgcaagggtagccatgattgatggaagcaaggaaatagcttgtaccagggacttcctcgtcctgacctaccgtccccgcgtcctattgcccccctccgccactggagccgcccccagagctctgccccgaggatataaaccaccatttgaaattactgtcatatgcttcctattgccattgagccatggtgatctggagctagccagccaagtttgtccatccagctgaagggggaatcccagacgagtggcaccggactggctgaaggaagccccggatgaccctagaaacgaaaccagatagtgggaatcccgaccagcaatatgcccgccgccctagggatagggacccctcaggtgcagcccgagtgaggtttaggaagattttcataaagtcatatttcatgtccaaggagaatcagccgtgatagatgaagggttcgcacgcgagagtcccggacttgtctagaaatgagccggtttaccagtactgttctaaatggtaacacctgttgcatttatattctttccctttgctatcatgtcagtgaacgccccggagtgctttctttgccacttgtgtaacctatttctgttttttcaggttttactgatgaggcttgtgaggcccatccaaataatgtttgtgatctctactactgttgattttgccctcggagccaactgaattaagccaaccagatga

SEQ ID NO: 524867 - DNA, 458 bp, Homo sapiens
gaggaaaggcaaggaagagtaaagaggacaatggaaggagaaggagagagggaaagcggaatggaaagaaggaggccgaagaggggacataggaagaaagggaaaagaagaagggggagaggtgagaaagaagagggaaaaacgagaacagggaaaggcggaaagagaagtacgaagaaggagagataaagaagggaggagcagtaaagaggaaaagaataaaggacaaaagaaaggagagaaaagggacagaggggaagaagtgagaaagaggaggagaggatacaagaaggagagaggggtgatgagacagaaaggctagctaagtggaagcaggggaggacagagtggggatgagacagaggaagcacgatagatatatatctacactactactactactactactactactatatatatatatatactatatatagtgccgaattcctgcagcc

SEQ ID NO: 524868 - DNA, 273 bp, Homo sapiens
acgtcgagctcggccctcctcttctgtgcttctgcttgggcataatggagtactttagaaacagtgcaagaatgacaagatattaaaaaaaaaaaagaaagaaaaaaaaaaaaccccctactttaaaaaaaaatacctaaaaaattttaaatatggttttctctaccatttttttttctagtatcctggaattaaagcatcagggcggcatttctaactcccttaaacaaggggtccccctataagtcgccctggcgggcttcgaaggttggg

SEQ ID NO: 524869 - DNA, 840 bp, Homo sapiens
gagcactgaaatcctgaagaggagagattggttataaattaaaaaggtgggtgatcttaagtgcctcagttaatgcacgtacagtattcattgtggtgtggtgtgtactacctctcagaagtaaaattgtgtcaccttatggaatgagagtttcgggttgggggtggtttattgttgtgctttggttggtatttcggttgtgtgtattgtataaattttctgtataattagcccaggctgatgtaactataaaaattagttgaaaaaaaaatatgtgtttccttaatggaattctcacttcattgtgaatataagatttgggatgaaaggataggtataaagttgggtttgtctcaaggattggatccatatttatccctaaatatttcttaagggatgtaactttttataaccattaagtggggggaagggggtggagggggtggtaataattataactgaagggtttaaatatactacctaggaaaaagtacttctgtgacatttacaaaaaaatctagtggactagggcttcagcatgactagagatatcaatttcgcagaactgacggacactctcttcgtgcagtacaggtattccaagagagttatttcccttctcaataatgtggcataaattcggtaaatcagaaataggtgagggagatagtttattagccagtaaaaattggtgggattgcaggaaactaatgtgagaggaaaaggggtttcaatgaattataaccggagaattgacatattgttaatttgaagcctgtgagttaaactttgggttggtgagcaataaaggaggcatttttagcaagtgtgtgtttaaat

SEQ ID NO: 524870 - DNA, 311 bp, Homo sapiens
aaaaaaaaaggacaaggaaaaatttttccactgtagttaaaatggcaaagcttaaggtaaatataatcctaaaaactattgaccatcacttatttataataattttccacattttaacctggggggggagaaaaaccactggaaataactgtgttttctaaaacagtttaatcacgatgtagtccatatacatgcaattcacctatttaaactctttactccactgatcttgggtatactcccagggatgtgtaaccatcagcagtccaatttcagcattgtccctcaccacacaaagcagcattgccccc

SEQ ID NO: 524871 - DNA, 180 bp, Homo sapiens
cagtggcttaaatgacaaaaatttattatcttatagttctggaggtcaggagtccaaaaatgggtcaatagggatgtgatccttctggaatctctaggagagaatctgttttcttccattttccagtttgtagaggcagcccacattccctggctggtggcccccttctgtcgtcttctc

SEQ ID NO: 524872 - DNA, 209 bp, Homo sapiens
aaaagaccggaggtttctttaccaacggtttgactcttggcgcgagaattctcagtgatcagagatagtctataggtcgatggtgactgcacatggacatccggacaaggagtcagggtggggggccacatacaatgtggcttcggcagacctggtggaggtgagtaggcattcttggttaaagtttcatccacattacacttattagc

SEQ ID NO: 524873 - DNA, 168 bp, Homo sapiens
tcggtaccattcatacggaaagtctttattgaggtctgggttaaaattaggacttggcagagcagccagtaaccctgatcggcccaggtgtcgaggtgcagcagttggccgtcattgcgcaggctttgcgggccgtccagcatcccgaggtggcgcaggtccttgtcg

SEQ ID NO: 524874 - DNA, 236 bp, Homo sapiens
gggctgctgctgaagtagccgctgctgccacagctgctcatgctgcttctcctcactggagacacgatcttgatctccttgctggggctcactgacataaaagctggagatttcccgatggcatggctctgcttcctcaggcagaagggactgcatgaggttccctggggggagggggtactttttatttgagcagttccatcagtctttcccctccgcgggagttcattcttgac

SEQ ID NO: 524875 - DNA, 720 bp, Homo sapiens
  misc_feature (71)..(72): n is a, c, g, or t
  misc_feature (183)..(183): n is a, c, g, or t
  misc_feature (259)..(259): n is a, c, g, or t
  misc_feature (338)..(338): n is a, c, g, or t
  misc_feature (352)..(352): n is a, c, g, or t
  misc_feature (368)..(368): n is a, c, g, or t
  misc_feature (372)..(372): n is a, c, g, or t
  misc_feature (376)..(376): n is a, c, g, or t
  misc_feature (382)..(382): n is a, c, g, or t
  misc_feature (404)..(404): n is a, c, g, or t
  misc_feature (411)..(411): n is a, c, g, or t
  misc_feature (415)..(415): n is a, c, g, or t
  misc_feature (420)..(421): n is a, c, g, or t
  misc_feature (431)..(431): n is a, c, g, or t
  misc_feature (442)..(442): n is a, c, g, or t
  misc_feature (446)..(446): n is a, c, g, or t
  misc_feature (450)..(450): n is a, c, g, or t
  misc_feature (455)..(455): n is a, c, g, or t
  misc_feature (469)..(471): n is a, c, g, or t
  misc_feature (548)..(548): n is a, c, g, or t
tcagtgtgctgtccagagtttgcagatagtgatctgccaacatgttcatgacttaacaagaaactacagcnntatttagatctaacctggataagtgctatgtgatcctctgaacacgtccattgttatgccaaccagaaacctactggagttacttattaacatcaaggctggaacctattngcctcagtcctatctgattcatgagcacatggttattactgatcgcattgaaaacattgatcacctgggtttcttnatttatcgactgtgtcatgacaaggaaacttacaaactgcaacgcagagaaactattaaaggtattcagaaacgtgaanccagccaatgtttngccaatcggcatttgnaaancaantttgcngtggaaccttaatttgttctgnacagtcnaaanaaacnntattgagganaattaatatcncagnatanccccnccctttccatttgnnncagtgattattttttaaagtcttctttcatgtaagtagcaaacagggctttactatcttttcatctcattaattcanttaaaaccattaccttaacaatttcttattctttcgcaagtgtggcgtcttttatattcgaattacgtaactgtcatgaagtcatacgataatagtacatgtcaccttcaggtagtaggaagacttacaatttcttacaatcatctatctggataccatgtaaatcaagcaa

SEQ ID NO: 524876 - DNA, 471 bp, Homo sapiens
  misc_feature (38)..(39): n is a, c, g, or t
  misc_feature (88)..(88): n is a, c, g, or t
gggtcgatctcgaggatcccctctctccacacggtacnnaaagagatatagaccaatggaacagaacagaaccctcagaaataatgcngcatatctacaaccatctgatctttgacaaacctgagaaaaacaagcaatggggaaaggattccctatttaataaatggtgctgggaaaactggctagccatatgtagaaagctgaaactggatcccttccttacaccttatacaaaaattaattcaatatggattaaagacttacatggtagacctgaaaccataaaaaccctagaagaaaacctaggcaataccattcaggacataggcatgggcacagacttcatgtctaaaacaccaaaaactatggcaaataaaaaataagacaagatgctaccaatgatgaccagcaagtgaatccaagtcaaactcttgctttcaatgaccagtgtggagagaggggtaccgagct

SEQ ID NO: 524877 - DNA, 316 bp, Homo sapiens
ttataggacctgatcatgtgcattgtgtcacctctaaataccacgatcaaagggacagcatcaagcacgcagcatgcgctcaaaacgcttagcctatgcaaaacctcaggtcaacagcagtgacttaacctttagcaataagcgaaagtttaactaagctatactaaccccagggttggtcaacttcgtgccagccaccgcggtcaacacgattaaaccaagtcaatagaaggcggtgtcaagagtgtactagatcaccccctcctcaataaaagctaaaactcaccctgagttgtaaaaaactccagttgacaca

SEQ ID NO: 524878 - DNA, 515 bp, Homo sapiens
  misc_feature (45)..(45): n is a, c, g, or t
  misc_feature (79)..(79): n is a, c, g, or t
  misc_feature (87)..(88): n is a, c, g, or t
  misc_feature (105)..(105): n is a, c, g, or t
  misc_feature (112)..(112): n is a, c, g, or t
  misc_feature (114)..(114): n is a, c, g, or t
  misc_feature (117)..(118): n is a, c, g, or t
  misc_feature (178)..(178): n is a, c, g, or t
ctagatggagctttgctcctgtttcccaggaatggagtgcaacancaccatctctgctcactgcaacctctgcctcctngggggaannggggggtgctacctcancctcctnantannctgggattacagccacagaagcaaggggacaaaggcgacatcatcggttggaaagcgtcncaataagacgcacatgtgccactgctgtggctctaagggctaccaccttcaaaagttgacctgggggggatggggctaccccggcaagcgcaagagaaagtataacggcagtgccaagggtaaaagacaaaataccaccggggactggggcgaatggaggcacctaaaaattgtagaaccgacattcaggcacagattccgggaaggaacaccacctaaacccaagagaggagctggtgcagcatccaggtcatcttaagaatttcacgatgagtaatgcaatagatgtgtcggttaaaaaaaaaaatgtatgaatactaaaggttgagctttacat

SEQ ID NO: 524879 - DNA, 431 bp, Homo sapiens
gtaggtatttggctcactttgctgaacctggctatactgccatcgtccagacactcctgcagcgccagataatcattcacagtgtatcccacggcgtgttcatacctggatggtacccagaattagcgggccctgtgtgcaggtgacacttctttggcatcaatcatcacagggttggactcgataaatctcgagatgtcccacttgtcactaacgcacaatggcaccacattctaaaagagccagaagatggggcgatcatctccctacttgggccgcgattcatcaaggaggcggtaaaactcaaagaagagccggcaagtgccctcgtagaggcccttgcgagcagggttgacgatggagaggtcattgcagggactacccccaatcaccagatcgaatgggccccactcctggatatgcttctgtgt

SEQ ID NO: 524880 - DNA, 138 bp, Homo sapiens
gatctcggtgagaggctagagagtgctatccttggtgagaggctggagagtgctatcctcggtgagaagctggagagtgctatcctcggtgaggggttggagagtgctatcctcgatgagaggctggagagtgtgatc

SEQ ID NO: 524881 - DNA, 313 bp, Homo sapiens
gtcaaaagaattccatctcttctgagcattagacgaagagtagagacataagagatcatcaaggactattttccaacggaggcaaacatctcgcttcatcgctcggtacggttccagagcaatcacatggatatggtgatgaatggaatcaccagagaaaatttctttacttcccaaaacatcctggaatatccctcagcctggtgagcgtgatgttcgcgaggaggccttgtccacagaggtactggatctcatcttcatgccaggccttgatttctgagaaacatgtctcactgtcgagggcaagagataa

SEQ ID NO: 524882 - DNA, 452 bp, Homo sapiens
  misc_feature (58)..(58): n is a, c, g, or t
atccagtccttggagaatgcccttggccccataaaaatatataaggcccgctttgaanacaacctaaggagggtggggggcccctctcccctacaaaaaaggaaaataaacaggtattttttggccctttagtaaaaattgggccaaacccgggcaaaaggacaacccccggccccaaaatataaggccccttttaaaaaaaaaggaaaagtggaggggtaaattccccccccccccccccctttggaaaaagggaagggcttttattttggtattgccttgggaaaaaaaaatatccatgaaacacattcaaaaaaccccccccccccggaaaatggatgggaaaagggggttttaagccaaaaaccccaaaatttttggggctttaacaaaaaaaaaaaagggtcccttttgggagaaggggggcaaaaaaaaatttaaagttttttgga

SEQ ID NO: 524883 - DNA, 908 bp, Homo sapiens
  misc_feature (667)..(667): n is a, c, g, or t
ctgcgctcgttaatgtggtccaagggggcctccccctaggttgttgggggcgtttttcttctgtgggtgtttgcgtctaaaacgcgggggggctctgacgcgtatcatggcgccgccacctgagctgccctccccgtgggggcgactttgatggggggtccatcatgttggaggagaggttttttggcgcgtgtgtagcccctccctgtgggtgggacgagtagtgcattaagaggggttggtgggcacccccccatcgtcgtcgatattcttcgtgcgtgctcctcccccgccgcttttgttgggggggacccccgacctcccacacgggggagacacacgccgttcttttctttgggtggtcgcacgcacggccccctcggtccctcgcgacctaggagtgggcgcccctgtgttgtgtggcacaccaagctccctcatggccgcctaatcagttcgtggtggcgggccctctcctcccaccacgatcaggcgttctgctcaccacctggcgatcaatcgcacctccctcgtggccccgcgccgcctagtgttggtgtagcacccacatatcgtgatatttttatggggggaaaactctccccgggaactatgggccctttccccgatgtcgcccccccaagtggggggtcacacaaggctgttngaggacattgcgctcacccagtcccctgcccgtggcccacgatgggtgagcacgcataagaggcgcaagtagatgtctgtccaccccgcgatgtgtgtccccacttgttgcccccaccccccccccttgggaaagcggaggattctccccaagccttctttccttgtttttgttgttgttttataaagaacaaaacaaatataaatataaactttagcgttcgcggctatcgtgaaaaata

SEQ ID NO: 524884 - DNA, 589 bp, Homo sapiens
  misc_feature (279)..(279): n is a, c, g, or t
  misc_feature (446)..(446): n is a, c, g, or t
  misc_feature (487)..(488): n is a, c, g, or t
  misc_feature (490)..(490): n is a, c, g, or t
  misc_feature (495)..(496): n is a, c, g, or t
  misc_feature (500)..(500): n is a, c, g, or t
  misc_feature (503)..(504): n is a, c, g, or t
  misc_feature (508)..(508): n is a, c, g, or t
  misc_feature (510)..(510): n is a, c, g, or t
  misc_feature (571)..(571): n is a, c, g, or t
ttttgtcaacccaacctcgacctagggtaccctcatttgaaggacttccgaccataacatgttccagctgctcctccagataaagaaccgtgccccttcttgtgccccctttcgaatgggttgcatcaggccccccctgagctcccctgtggtgccacccacggtcacgctgcagcccgttatctataaataccccggccctgggcagagcgcccacggcgggtccatcctcggacccgagaacccgataattgccaaggacccttcctggatcatccngatgagcagccgtggcgctcgactgcacaggagcccgagacaatacacctccgagctgaatatgaaaagtcagaaatgctactgctttttccaagaatattatgtcattgagtgtcgccaaagcccttgactggcgagtcaaaaactcagatctatcttaagagtgnccaggaagaggttcattgaaataatcatgcatgaagcgccnnanatgcnncatntannattntncttgtctggcaggctcgttttacctcattctagaatatttaagaatctaaaaataaagggnaactctgaaaaaaaaaaa

SEQ ID NO: 524885 - DNA, 953 bp, Homo sapiens
agcggagtgggcggtgcgcgccgagacagtgctcgaagcgggcgccatccgagatcggcggtgtgtcctgatgcgccggatggcattgagtcgaacgattatagtggtcggagcgtatgcaggtgtcattcgttattccacacaaacagaaaatacagcttctgctacaatacatggcatccagatgcctaccgcattcatctgttccaggctatgttctaacagaaatagagtgttgatagatcactccaatttaaggcaatctgagaccgatgactgggacgtgaccactgtgacgggcctcttttgggagatgatgagcgatacatgccatcacgaagagagggatgaaaagagcgggagagctttggagattttacccttgggaaaagaaagaggttgcccttcgcaggagaaaaatacttacctttaccttttggcctagcggaaagtttcaccttagggaagaggggctccatgacttgagtaggtgaatcgttggtgtgctgaagggacttgaaggaatgtgattttaccctttatggatagagatgagggagaaggaattgtttaaggtgcggaagttctagtactaccccagataaggattttaacggagggtctagttggttagtgagtgttttcgaagggaaaggatgggtaagaagtagaattttttgaaggagaggcggaagttaggtggttggaatttggcgattagagcggctcgtggggtgcatacaattatcgcaggagaacctgtgcttcttgaatctgggtgtggcattgactttatacttcatttggaataccacttttgtcgaaccatgaagaaacattgtcccgaaagtggtaaataatgtggggtaccctggattaccctagaaattttatctgcttagaccacccttagatttgatgatttccgcttcatctctgttactatcctttag

SEQ ID NO: 524886 - DNA, 165 bp, Homo sapiens
cagacaatgatcttactgtatcatgaaaacacatattaacttagggaacgttacaaatagcatgtgagactggttccatggcctcttcagatctctaacttcaacatattaccacagacatactaaccagcagaaatgccttaccctcatgttcttgattcttag

SEQ ID NO: 524887 - DNA, 118 bp, Homo sapiens
gcacagctttcgaagcctgggctcactccattgatacctctgattctgatgacaaacgccaattggggttctgcaggtacatagaagtagccagcttttctggtacctggccgaatcc

SEQ ID NO: 524888 - DNA, 327 bp, Homo sapiens
  misc_feature (21)..(21): n is a, c, g, or t
  misc_feature (24)..(24): n is a, c, g, or t
  misc_feature (26)..(26): n is a, c, g, or t
  misc_feature (31)..(31): n is a, c, g, or t
  misc_feature (33)..(33): n is a, c, g, or t
  misc_feature (70)..(70): n is a, c, g, or t
  misc_feature (73)..(73): n is a, c, g, or t
gagagctttataaggattgtnctncntgttncnatcattaaaaggccgataaccggggctgagcgcagtngcntcacagcctgtaatcccagcactttgggaggctgaggcgggtggatcatgaggtcaagagatcaaccatcctggccaacatggtgaaaccccgtctctactaaaaatacagaaattagctgggcatggtggtgtgcgcgtgtaatcccaactactcgggaagctgaggcagaagaattgcttgaacctgggaggaggaggttgcagtgaaccgagatcgcgccactgccctccagcctgctgagagagcgagac

SEQ ID NO: 524889 - DNA, 207 bp, Homo sapiens
ctcaactaaacagcagagcagaacactagttctgatatctgtccatactctgtggccgtgataatattctttcatagccttctaaagatctaacttctggggggcaggcatggtgactcaagcttgtaatcccagcagttcgggaggcccatggtgggaggatcgcttgggcccaagagttcaagaccagcctgggcaatcaagctt

SEQ ID NO: 524890 - DNA, 137 bp, Homo sapiens
tctgcggtcgctctaacgctcccctacttttccacgggctctgcgtgtgctcctgggacatgcctggactgacctggctggctggaaggactgacctggactgggtgaccggactggatggactggctaccctacct

SEQ ID NO: 524891 - DNA, 223 bp, Homo sapiens
ggtgtttcctttgtctccatgtacattttactctttaatacttttatattattttagtgttgaggaaagaaatgagctatcaagccatgaagagagatggaggaaccgtaagtgcagattactatgtgtaagtgcagattactatgtgaaacaagccaatctgaaagactatatattgtgtaatttcaactatatgacattctggaaaagacaaagggaaaca

SEQ ID NO: 524892 - DNA, 187 bp, Homo sapiens
caggacctgagcttgtggagaccagaccagctggagatagaaccttcgagaactgggcagccgtggtggtaccttctggagaagagcagaatacacatgccatgtacagcatgaggggctgccgaagccctcaccctgagatgggagccgtcttcccagtccagggttcccatcctgggcattgctg

SEQ ID NO: 524893 - DNA, 718 bp, Homo sapiens
  misc_feature (32)..(32): n is a, c, g, or t
  misc_feature (111)..(111): n is a, c, g, or t
  misc_feature (210)..(210): n is a, c, g, or t
  misc_feature (535)..(535): n is a, c, g, or t
  misc_feature (554)..(554): n is a, c, g, or t
  misc_feature (567)..(567): n is a, c, g, or t
  misc_feature (582)..(582): n is a, c, g, or t
  misc_feature (590)..(590): n is a, c, g, or t
  misc_feature (599)..(600): n is a, c, g, or t
  misc_feature (602)..(602): n is a, c, g, or t
  misc_feature (609)..(610): n is a, c, g, or t
  misc_feature (625)..(625): n is a, c, g, or t
  misc_feature (687)..(687): n is a, c, g, or t
ttttcagacctaagttgactgccaataactgncactgcagacagttaaacctcaggtccgggaggactactgttgtctttcaggaattttctcctgaggggactggttgcngggtgggggggttgggcgggggggggagggccaggccagggtgtgttttcagggtctcagagtctaactcttattcctgcagggggaccaccctgactngggcaagggttaagaatagatcccaggccgggcttggtggctcttgcctgttatcccagcactttgagagttcaaggcaggaggttggcttgagtccaggagttcaagaccagcctgggcaaaaagtaagatccctgcccatccccatctcttcaaaaattaaaaacaatttgctgggggtggtggcactcacctttagtcccaaccactcggaaggctggagcaggggggtcgcttgagcccaggagtgtgtgccactgccctccagcctggttgacagcaagatcctgtctcaaaaaaaaaaaaaatttcccgggggttagcncttctggctcttgggccancagttttggcagnctgagagcagttttntgttttanaaaaaaacnnanccctgcnnttactggttgggggnggcttcacactgggggggggtgctgtgggcaaaagggatctcatatgctgtgggtggagcanaaacagcaagttgtgagaacagctaaagcta

SEQ ID NO: 524894 - DNA, 884 bp, Homo sapiens
aacagaaactagtccccggagcagtttctacgtcacaagagaaaagggaacggaaccgcctttcagtgggatctacctgaataacaaggaatcaggaatgtatcattgcgtgtgctgcgacagtccacgtcttcagatccttgtaggatatccagaaagaagtctgtagcatcataggatcaagaagtccttccacttcgagaggcaagtggcttacgatagtgaagtgtctgagaaaaagtactgctctggcactgggctgtgcctgtcgttttccgaggctcatggtgacgtctagtgcgtctgatgaaagaccacacaggggatcctgagacgtctggatacctcgtaaggatcagctcgcgacagaggttgtctgcaagcagtgtagaagctcatctaggtcacgtgtttcctgatggacctgggcccagatgtgtcagagcgtttagcatctaacaagtgtggcttaagaagttcaaacctaagggaaatcagctgaccatgctatcaaggagtcccgttcccttgtccgacgcccttcacgtgcagccctcaatattccacaattcacttggaatgacttgtgttaatacggcaactaagaacctggggctggaaacttgtggcaaaaaccatgaactaggatcacataacacacggcgggcaccacggcccattcaaaaaaatattcccccccgaagggggcccaggagcataaagccctttaccccgagtactttgtgaacgcaaacggtggtccccttaaaacagaggaccgcaatgaaacacaaaagaacaggggccgccgtttatacaaggcgccgggaatgcacacactgctcaccgggcactctcgcgcaccgaaccataaccacgactcg

SEQ ID NO: 524895 - DNA, 105 bp, Homo sapiens
gccaatgatcctgagtgacatgctgaacgccaaatactgaggtcatggtcgagcagaaccggaaggatgctgaagcctggtcaccagccgtactgaagaattgaa

SEQ ID NO: 524896 - DNA, 261 bp, Homo sapiens
ccctcaaaattggcccttttttttgtgagtttccctgcatcaagggccctgagaaaccccgtccttgttttaggtgttttatgggaggaagtgaataaagcctttaggaactttctgggcaagcttatggggctttttttgatttgggccccttccccccttcccgtcatgagtaatcatcaaggagcaagttggggtgtttccggggttttttttgtagaaccccaaaaattggggcctttcccataaacctccgcccta

SEQ ID NO: 524897 - DNA, 645 bp, Homo sapiens
tttatatgttattttatgcctcccaagtagttgggacacgaggcatgccccaccatgcccagttaatttttaaatttttatagagacaaggtctccccgattttgcccaggttgttctcaaagttctggctttaagtgatcctcatgtacaagcctcccaacaaagtggtgggttcacaggcatgagcctttgcgcccagccagttcttgcatgcttgaattgttaggcagcacacagtgacaaggagagctgagggagttcagggagcaaagataccaggcctgctgcttttgttttgttatggtagggtctacctgcacccctatctagcttcagatagattgatatggtatgtgtccccagccaaatctcatcttggattgtagttcccataatccccacgtgtcatgggagggacccagtgggaggtaattgaatcatggggatgattgctaacctcatggtgttcttgtgatagtgagttctcacaagatgtgatggttttataaggagcttttcccccttttgttctgcacttgttgccgctgccatgtgaaggacatgtttgcttccccgtgtgccatgattgtaagtttcgtgagtcctccccagccatgcggaactgtgagtcaattcaccctctt

SEQ ID NO: 524898 - DNA, 422 bp, Homo sapiens
ttgatgcctggctggagctggccctgggcaggaggagggaggaggagagcagcagggatctctggacaggacaagactccgaagctactcccccagcacacagcccgggacccacaaacccagctggcctggtataatacgcgtcactatacgggagcactccgtacgacagaaaagctggggtacgcgtaagcattgtgagacccatcgaaggggaactgctcataaagcgggcggcccataatgttggtagatgctaagtgggccacactagaaaacacacgatgagcgcgaaatttaaatgtaataaacaagcagaggaagacatacagggcacacacagctgacgaaagactgaacacctaggacaagccacagcacaagcccatactgccatgaggaacacggagaagacaggggaa

SEQ ID NO: 524899 - DNA, 100 bp, Homo sapiens
ctctagtaacccgcgaaatgatgggatagcgtgcaaatccttaaaagagtcttaacgaaatcctggctgacattgacttctccactgcaaccatcgagtt

SEQ ID NO: 524900 - DNA, 613 bp, Homo sapiens
taaagggaagtaagcctttatttccttgttttgcaaataaaactggctaagttggttgcttttgggtgattagtcaaagagaccaaactcccatatcctcgtccgacctccctccgactctttccttggcttcaacctttagctggggctgcagcagcagcaggagcagctgtggtggcagcagccacaggggcagcagccacaaaggcagatggatcagccaaaaaggccttgacctttttcacgcaagtctgggaaggtgtaactccgtcctccacagacaaggccaggacctcgtttgtccccgtgtgatgactaaaatggggctactgattgcacccagctgtgggtacgccaatctcttgcacgacagacacgtggcaacatttgcgggacaccctctccaggaagcgagaaactgcagagttccccctctggtgatataacagcacttcagggcttgtaagatgctgccattgtcgaacacctgctggatgaccagcccaagggagaaagggggcagcatgttgacgcttgttcagcagcgtggcttcgctggcccccctttgtctccccgtcttgatcagctgccatcactccggattccaatggc

SEQ ID NO: 524901 - DNA, 139 bp, Homo sapiens
  misc_feature (107)..(107): n is a, c, g, or t
gaacgtactatcctccttacttttgggtcgggccctccgggaagatggcggccgtgcaggcggccgaggtgaaagtggatgtctctgatccgaggctgtgcaagaangagctgaagagacgcctgttatctgagaagaa

SEQ ID NO: 524902 - DNA, 626 bp, Homo sapiens
  misc_feature (560)..(560): n is a, c, g, or t
  misc_feature (565)..(565): n is a, c, g, or t
  misc_feature (589)..(589): n is a, c, g, or t
gctcgtaacctgaacggtggcacctgccgtcctcggccgcagtcagaggcatcacgttgctgaagccgctatcctgcacgagtatccggcgcgcgtcttccaccgacaatgcctgggagcatagtgtggagatggtcgggaggaacaagccgcgggggcgggaagaaacgtccaggagatcagtatccagcgggtgtgtgccagcgtagcaacatacacgttggacttatagacgcactacaactgtacccaacaggataccctggcgaatgaaactgtgctgaacgaagagttccaccgcacaagagtgaggctttgtgtgcaacgggactaggatcacttggggctttggtagagcgcgaaatattcccctgacggcatggcatgcgtagatgccacaatcaaagatcagtgttgacaggacgtgggtatcgtgtgtgatgagacgaaggacgctgagatgtaacgctgaggatgtgtattgaaacgcaattgaccggatgtgtgacctctgtggttgtaactagattgcgagagtagccagctaaccataggttggnttctntccgacagggtatgcactttgganaccattacagaccattctagagctaccctccctgttg

SEQ ID NO: 524903 - DNA, 355 bp, Homo sapiens
  misc_feature (86)..(86): n is a, c, g, or t
ctcactcaggtgtgagtctctgagagagtctgaacacagtcagagcagggaagctcaccttggtcaagcatgtcacagatgctcgntaggctttcttgcattggttcctatgcctggggaggtggtgttaagggacaggtgttctgctgttggggaagtcccacctgctgcctccactggagaaagtgactcctctctgctgggtgacagtgagggggagcccctaagtcccaggcaatgtggcttgcagctcattcctgtccttagagacactgcctggggccttgctcagttgaactgtgcccctcgcctgctgcagagacaaggccaggcttctttttccctctggaacccc

SEQ ID NO: 524904 - DNA, 325 bp, Homo sapiens
caaaaatgtgcaaaggactacagaattgttcaagaagcagtgatccagtgcttggctagttaattcctgagtaagccactctgaaaactgattataatcctgtttcaaatggaggattggggagagggccaataaaggggtatattattgttatcttggtgaggagggaggaatcccgccagttattcactggagttatgggcgccagagccttccctctctaatgttattgtaaataattgttgagagtagagagccagctcagcaaagtgagactccagcattgcagttcctctccacgggggtcttatatacgagccctcca

SEQ ID NO: 524905 - DNA, 284 bp, Homo sapiens
  misc_feature (132)..(132): n is a, c, g, or t
aggagagctcctgatggtgatgaatctgtcttctgaaggcggagtgcacagggccttctctctggatgccaggtcacacagtcacttagacactgtctctggtggtcccagacagcgcacagtgcagtacgngcacgcagctacacaggtgtagggggatgcgaagcacagacagcacagaagtggcgctggggccgccgatgggggggtcccggcacatggccggtcaggtaagttagggccctcggccacactcaagttctgctcctccaacaagcgcctgg

SEQ ID NO: 524906 - DNA, 381 bp, Homo sapiens
gatccagcgcgagcatcatcaacagataagaaaaacatgtgtatcacaaatactattcagtcgtgaaaaagaatgaaatctgtgtcattggtagcaacatggatgaaactgggaacattatgttaagtgaaataagtcagacacagaaagataaatactgcatgttttcgttcatatgtgggagctaataaagttcatctcatacaagtagagagtagaagagtggttactataggtagggaagggtagaaaagaggggatagggagaggctggtaaatggagacaaaatcatagctagataggaggactaagttctagtgttctacagcactgtagagtgattaccgttaacaataattcttgatggaagcgtcgcgcat

SEQ ID NO: 524907 - DNA, 341 bp, Homo sapiens
ttcttcccccaacactttttggggcttttcggaatgccccgacgtttctcgggtttccccgtgcgattccccccctggaacctcctattatctggggggtcattcatttctctaacagccgtaatattaataattttcatggtttgagaagccttcgctttgaagcgaaaagtcctaatagtagaagggcccccccttaacctgggggggctatttgggtgccccccccccttccccccctttggaggacccggttacattaaattttggccaaaaagggagggatcggacccccccaaggtgggttccagccccccccctggcccccctggctttttcca

SEQ ID NO: 524908 - DNA, 250 bp, Homo sapiens
  misc_feature (70)..(70): n is a, c, g, or t
  misc_feature (79)..(79): n is a, c, g, or t
  misc_feature (152)..(152): n is a, c, g, or t
  misc_feature (160)..(160): n is a, c, g, or t
  misc_feature (178)..(178): n is a, c, g, or t
  misc_feature (188)..(188): n is a, c, g, or t
  misc_feature (219)..(219): n is a, c, g, or t
acgggcggagagggctaccatggggaaaatcgcgctgcaactcaaagccacgctggagaacatcaccaanctccgcccntgggcgaaggacttccggtggtacctgaagatgaaatgtggcaacggtggtgagatttcggacagttggcatnacatcctnctgatggacagtttgtcnctgaagtggngccggttgcattggcttccatggtccagatnttcaagctctttgcaagttaaattttccatt

SEQ ID NO: 524909 - DNA, 253 bp, Homo sapiens
ggttctagaagcggaaaagcaggaacactttaagtctccagaaggaatgcagccctgccgacacttgactttagccttaatagacctagtctgggtttctggcccctagaactgtaagatggtagatttgtggtgttttaagccactaaatatgggaaactgcaaactatattgcagcagcaagaagaaatgaacatgaagccaggcatgatggctcatgccagtaatcccagcactttaggaatttaggcag

SEQ ID NO: 524910 - DNA, 475 bp, Homo sapiens
  misc_feature (1)..(1): n is a, c, g, or t
ngccgtcataattgaattgtgagcatgtaacgtggctcatagtatctccaggtctgtagagtctctaggttgaagactcgcagcactgaaggtctctaggtcaagcacacgtgcgtcacagggaacatccagtggctatggaatcaagcgcaaatcacaacagaaggaatgctcaagaatggagtctaatcaggaggatgacactgggcctagactaggcgaaagcatgcaggttgctagcgggatcgggacgcgttccagaaccctcgtgctcaatgatgaactcggataacgataggtgctgaggcgtagcacaacacaaagccagcgcgagcggacagacactggtagtcgccgggatcagggaccgcgggcgctcacataatcacggcacctgagaacgtccttgtaacggtccttgacggcgtggtacatgtgcagtaactgcaggatctcgtacagccgcacgtggtcg

SEQ ID NO: 524911 - DNA, 112 bp, Homo sapiens
gggtgcatgcatgtgtgtcggtgtgtagtggtgtgttaccacatggagtcatcagagatttgttccacactttgtatcctggaaaaccgaaaggaattttcttttcttcgag

SEQ ID NO: 524912 - DNA, 190 bp, Homo sapiens
tcctcatgagcttcctaaagcccaggcgagggaagagacccatgcattctcgttctgtctcatattatcagtggtcactgtttagacagagaagtctcagacgcagcgaataaagtgcttactcatttggcaattgtcccagtgagttatataaataagtgaaaccatcagagcgttaacacatatggcg

SEQ ID NO: 524913 - DNA, 141 bp, Homo sapiens
ttatcactccgtccttttcacggttcactcctacttattacttttttatgcagcattttctattgtggtataatacacataaccaaaaaatttaccacctacaacttatacttttcttttttaccagtcagggtcttattc

SEQ ID NO: 524914 - DNA, 497 bp, Homo sapiens
gcggcctactactaccaaattcgcggccggtacgacaagagaagaagcaggaggttcctgcagggcgagaaacccttaccaaaaagcgaaggaatttccgcagagctgaagcactccagcgcctgacaaagaagtttgcccaaaagacgcttcgacaggcaaggagcaagcttatctctgaaaaagcaaagcaccatcacaaggaacccaggcagatgtacagaactcaaattcgaatgccgaggatcgccagaaaagctggcaacttctacgtacctgcagaacccaaattggcgtttgtcctcagaatcacaggtatcaatgcagtgagcccacaggttccaccggtgttgcagcttcttcgccttcgtcaaaccttcaatggaacctttctgcagctcaaccacgcttcgcttaacatgctgccgcttgtacagacatatatcgcatcggggtcccccaaatctgacgtcagtaaatggaactactctacaagc

SEQ ID NO: 524915 - DNA, 310 bp, Homo sapiens
  misc_feature (92)..(92): n is a, c, g, or t
ccctcccccaggttaaggcctttgggcccccaggaaaaaggaaaaaaaagccagccccttctgggtcaggggtgccgggaccccgtgatggnttttgggcctttcctaaggggcccgggaagaattaaaaattttggtccccggggccccagccccgtttgtttccaggggcaggggcagttttgttttttaaggggttttgggggccccccagcccaggttttgttttccctggaaagggttggtgccttttgccgggggctttttattttggggttttttttggggaattaaattttaaatccccgga

SEQ ID NO: 524916 - DNA, 476 bp, Homo sapiens
gtggtgcttgcaatgtacatagccccagatatatagaatcagaatctgtaagagtggggacttaggaatctatgttttaacaagctcctcagggaatttttataaacactgcaatttgaagatcacaggtaagaaataaaaacagttcaggggagaagtgcaatatacactatgaacaccagctgtcagtactctacaatttaaaaatgcccttgatggttaatagtgaaaagaattattacaagaacattttctaaatttgaaatgtaaagatctagggaacatgagctctaagttaaacagatttgaattatcctgtgattttatcaaagatctctagacatataaatagtttacagagagtagtggttggagatttagagattttgggtacgtgtgagtaagtccatgtcagaataatgtcttactatacttgggaaaataaagtgaatgcttttgtggttttaaaaccaaaa

SEQ ID NO: 524917 - DNA, 137 bp, Homo sapiens
  misc_feature (9)..(9): n is a, c, g, or t
  misc_feature (44)..(44): n is a, c, g, or t
  misc_feature (99)..(99): n is a, c, g, or t
  misc_feature (108)..(108): n is a, c, g, or t
atgtatctntggtcccagctacaggggagactgaggcaggaggntcccctgagcccaggaggttgaggctcactgaatcatgatggtgccactgcactnctgcctggntctcagagtgaggtgagaccctgtttcat

SEQ ID NO: 524918 - DNA, 953 bp, Homo sapiens
ggagcttccaggtctctgggtcgccagcgcgcgggcggcgcggtggagccggcgccgggcatggcatcgggggcctggagtgcgcggccggcagcaggccgcccatggagccaggcagcgtgcagaacctgtccatcgtgtaccggagccgcgattcctggtggtcaaacggaggcagctgggagcgttcgcatctgacgagcgaaggcgtggccgggagacttcttgacctcgtgcgagaaggcacgcgtgcgggtcccgggttttccccgaggctggccgacccttgacaccgtgcgtaccgggttcagggttcgtgccaaccaggcgtggatttctccacgcaggtggggcgcctgtgcggtgggccctaaaacgagggggccaggcgcctgggaaggggcgtacggggtggcttcagtggagcaggcgcggtgacccagaggctttacccctggcgatttgctgcgggggggccaccatcccaagggaagaagccgtggagtaaaccaatcaagccattgcctattgtcaagggaaccacgcagctgggaggtggcccggggccccaccgacccattgttgcttcggagggccttcggcaggggttgttagtgaaccccaaaaaggccaaggcctcaacgaagaatctcgggtgggttccgtggcacccccgggcttggtaccgcaaggcgatcttgtcttcgataggtcgttggttgaagccggttcacggggggggggacacaccatgttgcgcggtgcacttggagtgccctgggccacccggtggtgtgggcgacttgcctaaggggaaacattcgggctgggaagccggccgcagaatgagcgacggctctaacggcgttccaggggccgggtgttggggtagacctggacctctggccctggtctgtggcccccatttgtattgccctctgactttggcccaa

SEQ ID NO: 524919 - DNA, 185 bp, Homo sapiens
agggaaaaattaaaaatttcccccatttattttttggaactaaatcaagccttaactataaccttatgagaggaatgggaacccctgctggctttaagtaaataaaaggccttgttttccccaggggataaaaatcaaaggggaacccttttttttaataaaaattttcccttttattgcttcca

SEQ ID NO: 524920 - DNA, 225 bp, Homo sapiens
gggcgtcggccatgcggatgatggccgcggcaatggcggcattctcggcatcttccggcaagccgctgacaaaagatgcatcaagcttcagtagcccgacacgaatgtttttcaggctggcgagcgatgaatagcccgtgccgaaatcatcgattgccagatgaatgccagcatcggtgaaatcatgcagatgagttagggctggggccaaggtaccctggtcac

SEQ ID NO: 524921 - DNA, 378 bp, Homo sapiens
ctgccacagactcccaggctcctacgacagcacatcctcagatagtttgtatccaaggggcatccagttcaaacggccttgtgagtacaaggagggtcccctaccttgggtgccagggagagggtcccctggtgtgggagtgagcgtgaaccttcagacttcccctgccaccttggggctgcccacatgcccttgacctgagctgggagaggggagatggctcccccaggcctgtccagggtgtggggctttcaggggcttagtctgttctttgaggccttgacgatgtccggagtccttctttcaacttggttctgtgtcctcagacacggttgccccctggccacctgcctacccacctatcacaccccatcctga

SEQ ID NO: 524922 - DNA, 167 bp, Homo sapiens
  misc_feature (5)..(5): n is a, c, g, or t
acttntctggtctctgcgtccttggtaggtcttgatgatctcctccttcttggcctgtggcgctcttcacggtgctggcgtgcttccttggtcttagccctgcgggcctcagcctggtcggccaggcgcttcttgcgggccttctctgcggggttacggagctcgaa

SEQ ID NO: 524923 - DNA, 288 bp, Homo sapiens
gtcttcccttgagcacttgctcttcttccccagcctgtttatcttctactgccagctcttcaaagaacgttttactgatcttcttgtccttcttccctttcttcaccactttgctctgatgggctcgtgctctctccgctccccgtatcactcgcggctccgcgcggctcgctgcttggcgcgcctatcgtgcactcgcggtaggcagtgcacacgcttacctttaccgggagatcctactaggagtacgacctagcagcgcttagcaagcttgagcactaggccgta

SEQ ID NO: 524924 - DNA, 652 bp, Homo sapiens
ccgcgaattcggccattatggccgggagcagtgtctcacacctctaatcccagcactttgggaggccgaggtggacagataacctgaggtcaggagttcaagaccagcatggccaacatggtgaaaccccgtctctactaaaaatataaaaattagctacgcatgggccgggtgcggtggctcatgcctgtaatcccagcactttgggaggctgaggcgggcagatcatgaggtcaggagatcgagaccatcctggttaacatggtgaaaccccatctctactaaaaatataaaaaattagccaggcatggtggtgggcgcctgtagtcccagctactcgggaggctgaggtaggagaatggcatgaacccgggaggtagagcttgcagtgagctgagatagcaccactgcactccagcctgggtgacagagcgaaactccgtctcataaagaggcaggagaatcactagaagctgccaggcagaggtttgagtgagctgagattgtgccagcgccatcctgtgcaacaagagtgaaactctgcttaaacatataaggccaagccattttccccattaaacatgtatttaggacatacgtagcccatacttacattaagggttcttttgcttgatcgatgctctttcgtccg

SEQ ID NO: 524925 - DNA, 307 bp, Homo sapiens
  misc_feature (280)..(280): n is a, c, g, or t
  misc_feature (302)..(302): n is a, c, g, or t
ttcagtgtcatgatcatggctcactgcagcctcgacttcccagactgagatcatggctcacagcagcctcaacttcccagactcaggtctggtgatgataaactccctcagcttttgtttgtctgggaaagccattatctcttctttgtttctgaagcacagtttgccagggtacagtattcttgtttgggcaaatttttcacgttcagcactttaaatatatcatcccactctttcctggggcctgtaattgggaactccttatctgttatatggcttncttttctcttggcttttcaaanttctc

SEQ ID NO: 524926 - DNA, 835 bp, Homo sapiens
  misc_feature (24)..(24): n is a, c, g, or t
  misc_feature (132)..(132): n is a, c, g, or t
  misc_feature (284)..(284): n is a, c, g, or t
  misc_feature (345)..(345): n is a, c, g, or t
  misc_feature (354)..(354): n is a, c, g, or t
  misc_feature (356)..(356): n is a, c, g, or t
  misc_feature (367)..(367): n is a, c, g, or t
  misc_feature (373)..(373): n is a, c, g, or t
  misc_feature (388)..(388): n is a, c, g, or t
ggccccctgctgcaggaggacccnttggccctgccccctgctgaggtccttccctctcctccccatggagataggggccatccccaaattggataatgggggtatgtgtgtgcttcctgaggggcctggtgnccctggagaggaacgggggaaggaggaaggggcaaggagaccgacggggtgagaggtccacacagcacaagaacaggggacatggccagctagcagaaggcacagtctgtgccaagcctggagaggcaggtgcagtacatacaggcggaganactgagctctaggcccttaaatactcgcctgtgcccgccccctgcacacggcctggtacangcaggcgtngngtacatgggangcaaanacagacagggtgcgntcaggcagcagggccagggcggctgggttaactcagttgtgccacgggagaaaacggggtggtgggttcctcccctctcccggggacggggggcactgcagttttggggccctgagtaactacagcccagaagcgacctcccagttcctccgcatccccagagacggaacgatgcccccaaagaccagccccgccccccccacccccgccaaagcgtggccacagaaggccgagggacgcggcgggcgctgctcgaggagcctccgggctgagaggggcggggcgtgcgcgggggaggggccgggacgccgctataaaggcgcagctcggggccccgctccggcccgggacgcacatgtgcgcgcgacgcccggcagctgccaccgcggggcgcagccgagaccccgcgcctcgccccggccggcccgcgaggcccgcggcggccgc

SEQ ID NO: 524927 - DNA, 149 bp, Homo sapiens
  misc_feature (135)..(136): n is a, c, g, or t
ggctggcgcgcatcgctaggcacgaggcactcagaggaggcgcatgtcagaaccggctgggaattccgtcagaaccatgcggcagcaaggctgccgcgctcttcggcccagtggacagcgagcagctgagccgcnngactgtgactgcg

SEQ ID NO: 524928 - DNA, 216 bp, Homo sapiens
caccgattcctaattacgcaactcataacttaatggggcattaatcatgtcagtatttagaaacatatgcaggccttgttttgcttcttgaaatggcctcatccgcaccgatcccctccttctccaccacttgattagtatttagcgctttgctatacattcgagttgcattgttgcgcgccggaatctagggtgtcgtgtatccatcgtacatgg

SEQ ID NO: 524929 - DNA, 250 bp, Homo sapiens
tgacttagaggaccccacgcgcaccgggttcaaaacgaggcagctgtaacactgtaggtaagagatgataaaggcctgagctggggtgtgatggtgggatggagtttcggtgaggtaaattcagtaggacatagtaacttggctggctagctggagtgagagaaaatggttcaaattatattctctgagggatctcgcttggctgcactcgagattctataagcactaatattgagaatacatgaatgta

SEQ ID NO: 524930 - DNA, 234 bp, Homo sapiens
gcggcggaggtacttagctcactcgggccccaggcacctgggaggccggaggaggaaggcaggcattttaggccgcttgtttgttggaggacttgcttgaggattgcaggttggaatgaagcccctttccagggaggacaaaattggaccttaccaaagagagggcaaaagagccctcccacccccttttagggcacccccgagagaaaaaaggttcccctttcaaattcagag

SEQ ID NO: 524931 - DNA, 437 bp, Homo sapiens
tgtatttcaaaggttcattttacaattgtatccttactctttggatcttataagcagtccacttttccaacagtgtgaagccccaggtttctagcatctttctcttgctttgtcatttctctggcgaactggcccgttcatcctagggctcacctcttgtgataccttgccaaagacagctaatagcaattaaaacccacgattaaccttcagttttccagtctcctccccttgagcacaaatctctcaggtaatctaaagatctgcctctcaaatattttgtgatgatttgccatctatacaaaaagatcattttctttatcactcaccatgtaggaatattgttctaggtaggaatattgttgccagattattttttactttttttaacttttattttaggtttgggggacagtacccaaggtttgtcacatagg

SEQ ID NO: 524932 - DNA, 290 bp, Homo sapiens
gagatggagtttcactctgtcgcacaaggctggggtgcaatggtgcaatcttgcctcactgcaacctccacctcctggattgaagcaattctcctgcctcagcctcccgagtagctgggattacaggcatctgctgccatgcccagctaatttttgtatttttagtagagacaaagttttaccatgttggccaggctagtcttgaactcctgacctcaggtgagccacctcacctggcccaacctcacttcttgacccctcactccccgctacccttctgtcgtcttctc

SEQ ID NO: 524933 - DNA, 200 bp, Homo sapiens
  misc_feature (13)..(13): n is a, c, g, or t
gcgtcgacgtganagacagtctgttgtcaccagtggaatgaatcaaaagcatttcaggtttcttctagcaggtggcagaaactggtactacaacacctgtgtaaccagacactaaatctacatttttttcatttagcagacactcttatccagagctacttacaggagcaattagggttaagtgccttgctcgtcgacgc

SEQ ID NO: 524934 - DNA, 108 bp, Homo sapiens
ggtcctgcctggtggttgagtttgataagctgcctctctgctttgagaaggcagtagggcctcccctaactgcaaggggaatgtgcttggattagggagggttattgc

SEQ ID NO: 524935 - DNA, 506 bp, Homo sapiens
gagtgtgagtgtcaccgtagctgctgtcacttaagctctcatttgcccaccattgtgactgttaaaaacgaatgataaagttgttactgataggtttttcgctggttcggaggcgggtgtgtggctctccctcacttgcaaaatgaatgaatacttttcgggtcaaggttagagtgaacatgacagtccccttatgctgccccctttggcactgcgctctagggacacagggaactaacttccagcctgttatctgcctgttaaaaggttcttgcttgtgaatctcactttgatgtgtgtgtctgagccgggtgctccgtccggctattgtttgctgacatggagccagatctgccgatggattcttgtttattttcttctcctgatgctcatctcatcgatggagatttgagcttctcgcctggcctctggcatggagcctgtgttccccgttgcttgccaatgttcatgcttcaactggtcatttgcaagctgaagtgtgcaga

SEQ ID NO: 524936 - DNA, 266 bp, Homo sapiens
agctacagctcgcatgagcagtgctcctatgtgggggaagtagtccgggccatggataagaagaaagtgttggtcaaggctacatccttgaaggtaaatttgtctagtacagcgtggacaaaaaacattgacatcaattgatgtgacaccacaattgccggtattgctctaagtcaatgatagctaacactctgcacaatgatcctgtcccaatcaatggtatatcccatctttattagcgagctatgcttgagcttaatgcagaa

SEQ ID NO: 524937 - DNA, 707 bp, Homo sapiens
  misc_feature (20)..(20): n is a, c, g, or t
  misc_feature (82)..(82): n is a, c, g, or t
  misc_feature (93)..(93): n is a, c, g, or t
  misc_feature (301)..(302): n is a, c, g, or t
  misc_feature (339)..(339): n is a, c, g, or t
  misc_feature (392)..(392): n is a, c, g, or t
  misc_feature (401)..(401): n is a, c, g, or t
  misc_feature (635)..(635): n is a, c, g, or t
  misc_feature (649)..(649): n is a, c, g, or t
  misc_feature (704)..(704): n is a, c, g, or t
gcgcggccaggtagggcccnagcttcagctgccagcatgcttctctggaacctcaaggcaggcagcccaggccctgggcctnatctctaaccnccgtcatgctgctgctgaccacacccagccaacctgcccctccctgacccggggccccctttcctccagggcccagtctggctcccgagctcagacacagcccccaggagccgcccaccacggctgtgggaacttccaggcctcagcgcagagccctgcttggggccagcacggtgggcagcatgccggccgctggggactgggcccnnctcgcatgcctccccgccctccccccacctccacgantatttattgagcgcctgttgtgtgtcacggggctatgagggccgtggggtgtntgggtggantatccacacaggtcccggcccctgcccgggctggagttgccacagcctgtgctcctggtcctcacctggaggggccagcaggctgccgtcccaccacacgtggcctctgcgcccagcacggtgctcgccgacagtggtgtctgaacccttggggacgagggcctgggccgcggtgaggccaccagaggcaggagtggccctgggggtccccgggcactgtcgcgcttgctgcangcggcccagccgtntatttatttttcacctatctccttcctgtcaaggcaggccgggctccagggctcncct

SEQ ID NO: 524938 - DNA, 687 bp, Homo sapiens
  misc_feature (12)..(12): n is a, c, g, or t
  misc_feature (16)..(16): n is a, c, g, or t
  misc_feature (20)..(20): n is a, c, g, or t
  misc_feature (31)..(32): n is a, c, g, or t
  misc_feature (43)..(43): n is a, c, g, or t
  misc_feature (47)..(47): n is a, c, g, or t
  misc_feature (49)..(49): n is a, c, g, or t
  misc_feature (63)..(63): n is a, c, g, or t
  misc_feature (65)..(66): n is a, c, g, or t
  misc_feature (73)..(73): n is a, c, g, or t
  misc_feature (76)..(76): n is a, c, g, or t
  misc_feature (79)..(79): n is a, c, g, or t
  misc_feature (91)..(91): n is a, c, g, or t
  misc_feature (105)..(105): n is a, c, g, or t
  misc_feature (107)..(107): n is a, c, g, or t
  misc_feature (110)..(110): n is a, c, g, or t
  misc_feature (117)..(117): n is a, c, g, or t
  misc_feature (129)..(129): n is a, c, g, or t
  misc_feature (135)..(135): n is a, c, g, or t
  misc_feature (235)..(235): n is a, c, g, or t
  misc_feature (247)..(247): n is a, c, g, or t
  misc_feature (254)..(254): n is a, c, g, or t
  misc_feature (256)..(256): n is a, c, g, or t
  misc_feature (258)..(258): n is a, c, g, or t
  misc_feature (273)..(273): n is a, c, g, or t
  misc_feature (275)..(276): n is a, c, g, or t
  misc_feature (281)..(281): n is a, c, g, or t
  misc_feature (289)..(289): n is a, c, g, or t
  misc_feature (293)..(293): n is a, c, g, or t
  misc_feature (306)..(306): n is a, c, g, or t
  misc_feature (351)..(351): n is a, c, g, or t
  misc_feature (358)..(358): n is a, c, g, or t
  misc_feature (364)..(364): n is a, c, g, or t
  misc_feature (371)..(371): n is a, c, g, or t
  misc_feature (379)..(379): n is a, c, g, or t
  misc_feature (399)..(400): n is a, c, g, or t
  misc_feature (409)..(409): n is a, c, g, or t
  misc_feature (427)..(427): n is a, c, g, or t
  misc_feature (458)..(458): n is a, c, g, or t
  misc_feature (460)..(460): n is a, c, g, or t
  misc_feature (481)..(481): n is a, c, g, or t
  misc_feature (484)..(484): n is a, c, g, or t
  misc_feature (487)..(487): n is a, c, g, or t
  misc_feature (491)..(493): n is a, c, g, or t
  misc_feature (506)..(506): n is a, c, g, or t
  misc_feature (524)..(525): n is a, c, g, or t
  misc_feature (543)..(543): n is a, c, g, or t
  misc_feature (601)..(601): n is a, c, g, or t
  misc_feature (610)..(610): n is a, c, g, or t
  misc_feature (616)..(616): n is a, c, g, or t
  misc_feature (630)..(630): n is a, c, g, or t
  misc_feature (655)..(655): n is a, c, g, or t
tcgaggcttcanttcntatntaagctcatgnnacgaaagtagngtgnanaagacaggctctgnanntccctgncanacnagcagctctgcnatttacacgctgtnanacntcaattnagcgagtttctnaacctntgtgggcttcagtaaaagagcgataatccttcacatcagcacttaagagaatgcccggcatagtataaggtcatcatgtttgctttacaggtagcccttngcaaggatctcntaagggncncntgaatattcagtaancnnaaggnagctcagnactnagccttagctacnctcaagaccgtgacagttaagacacagaatggtcagcacatgtgnatgacantaacantggctgntagagacntctcggctggagccaaatgnnagactgganagcatgaatgaatgcggnagtaagatgaggcattgcagtgagagcaccngncacagcactgattacagcacntgnctngctnnngtcagtgtgatcntcacagcttatgccagcnntggaagagcttatccaanagaggggcctccccaaaccaggttgtacacggccaacgaaacccccttctgacagganatacatccngggtgnagggggctggtcanctgaatcccagcgacggtatggccnttgccctcacgagttactttacactaacccgt

SEQ ID NO: 524939 - DNA, 882 bp, Homo sapiens
  misc_feature (630)..(630): n is a, c, g, or t
  misc_feature (638)..(638): n is a, c, g, or t
aaccacccctattcctaatcccccgactacagatagaggagaaaacggcatctaatctggaggttggtatcccagaacactatattaaagatcccctacaggaacagatgggcactctggttttttaaaaatgataaaagcaaggattaacttggcaagcggatctgacggatgatctgcaagttagatactgtagaagatttttgggctcttgttacaatcgatatccagttgtctaggtaatgtaatgcgtggatgtgactactcactattatgtaaggatggttgattgagcctatgtgggaagatgagaaaaacaaacggagaggacgatggttaattatattgaagaaaagagagagacgaagtgagtctcgaatcgcttaggcgtagagacagtttcatgattagccgtctatgggagaatctatttgatgacctacagatgattgatgtatgtggagctagttgtaaatgttagagcctagaggtgataagatagcaatatggattacatgaagtgtgaagacagagaatgctgtaacacgtatagggagtggtatacaaggacaggttaggaatacctcgtgaagatagtagaattggtataactcatgtccggattgcagnacacctgnctaactataagatgcagggctcgagcacattagaagtaggtctgttggtttatgaagatcaccttctggagtattctccagtaggtggacttggcgttacagcaatcgaagaatttgggaagcttgaaacccaaagtcttttcataaaagcagaaggggcatgctcttcaggttttgaattccatccttaatggtctccgatttaaaacatctgccacgccttggactggtcccctggggtcca

SEQ ID NO: 524940 - DNA, 977 bp, Homo sapiens
agcgggagcagaccccgaccggcgaggaggagtggagggccgccagtggtcgacattgctgttggaggaggttcgcgccggcgaccggctgagctggggcgcgtgcgcccggggcgacgctgctcggatgcgtgcgtgccgccgttcgtgcgagccgggacgctggtgcttcccgatcgccctcaacccgcttcggctcagacggggctgcaggtcactgagtgtctggcagtctagccgccattcgccctgagatgcttgctgaagctggaggtgcgcatgccccgatagtgtcctacggtacacctccgcgtaccacgtccacgttccatagacgcacgacccgtcatctgtgattcctgagacatccctgcaaggtcctagtggacgcacggtggtctgatgtcaacgttgcctgactggcacacggggtcactttccacagtccatcgtggcaggttcagagaggtgtctactactgtctgtgtgtcagctttcatggtcagcgtgaatctgatctccagtctgcatgggacgccatgggtgtctcacatcccttgtgagctggcgactggagagaggggctcaggtacctcgctgtgacattcctgcatggccacgatgttggccccgctgtgatctggggtcagcctcttcaggcaatgagaaccccgttggggttctgtatcaggaatgagaggggaacgacatacactttactctatctcggtatctcctggccactgactgcagttaggggagggagcacagattgtggcttactggtgctgggttggggcctgtgagtgtggggggacgtttctccatgggtgattcctcactccttttggtgtgttcggacaagatgaaggggtcctgcaggacactagccactaaacgggtcggttctttctgcgcctaaggttgtggggcctggaagagaaccagggaaaacatttagagtgaatcagaactcc

SEQ ID NO: 524941 - DNA, 319 bp, Homo sapiens
gtcttctaaaaatggacagatgaagccagtgcaatggctcatacctgtaatcccagcactttgggaggcagaggcaggaggagcacttgacccccgaaatttgagactagcctgggcaacagggttagaaaccatttctacaaaagaaaaacaattagcctggtgtggtggtgcatacccttggccccagctacttgagaggccaaggtggaaggattgcttgagcctaggtggctgcacgtgcggctgtgatcacacaactgcactccagcctgggcaacagagccagatcctataaatgagaaaaagaaaagaaaag

SEQ ID NO: 524942 - DNA, 473 bp, Homo sapiens
  misc_feature (38)..(38): n is a, c, g, or t
  misc_feature (357)..(357): n is a, c, g, or t
  misc_feature (364)..(364): n is a, c, g, or t
  misc_feature (445)..(445): n is a, c, g, or t
tgcagctggatcagatgtaccgtaagcagctgtcgctnaggcacccgcgtgtggatggagggaatgtggtatcatctgaaagcttagaaatgccaggatctgcagagcccccaaaaagggtgttacagcgtgtcacagccctggcttgaggagccctgaggtctgggctcccagtagggccacagctcttctttctttctcgtcacctgcagtgtggcgagtgagggggtgagtttctggagggcagtttcagcccatttgtgttacagctctttcagtcctgccatcccgctccagctggcaactcctgggctggcccggccctgtttgctttttcccatcccatggggtggctanctgggtngaagggcaggagggctgtagtttttacggaagctctggcttttgggaaccccaaggttttggggcccccagaaaatttcancatttttcaattttcacaattttgggag

SEQ ID NO: 524943 - DNA, 389 bp, Homo sapiens
cttcaccatcatgtgatgcacgactgtgagtgtatgcactcgtttgtagctgtacgcgtctgtattatctgaacttaagattacaacccctgctttttcctgatttccattttcttcatagataagcctccatccctttatttcgagcctatgcgtgtcattgcatgtgagatgggtgtcttaaagacagcatactgtcgggttttgctgtattatctgcttgccactccatgccttttaaatggagcatttagcccatttacattcaaggttagtatggatatgtgtgaatttgatcatcgttagctggttatcatgctgacttgttcatgtagttactttatagtgtcactggtctatgtgtttacgtgtgtatcggtatcggctgg

SEQ ID NO: 524944 - DNA, 547 bp, Homo sapiens
  misc_feature (19)..(19): n is a, c, g, or t
aaggaaaagtttatttttnatttctcatattttgtttttttaagtacaatgtaaaaaagaatagtaatattagaataggaaggaggaatggttcgttggggagcttatttagcatactgggagcatatagagatttatctatgtttgttgaacttagagttattttcatgcttttctttataattcacacatatatgtagagaagatatgttcttgttaatattgtatataatatagttttaaatatagtaagatctatactagataatcttagatgaaatgttagagatgctatatgatataactgtggttatgactgaggaaaggagcttatgttagagactgggctgctcttttggaggttaaatttaagaaggtttggtaaagttaggcttagggagactctgtcttgctgtagactttggtgtggatatatgctgtatagagctttctttgaaaatagaggggttttaagacattctgcttacttattagcttttttttatttttttaactttttagggggaaataaaaagacaagcctcca

SEQ ID NO: 524945 - DNA, 164 bp, Homo sapiens
aggatacaaagaaagagaatgcctgaggatggagataaaaccccgaaagaagtaaaggaagaaaggagctctaggaaagaagagcatggagaagcacacatgcgctcccctgattgaaaaagggaactgaataacacatctgcgttgtgcgctcatgacatgtc

SEQ ID NO: 524946 - DNA, 240 bp, Homo sapiens
gggacgcttcgtcaccataatacatttggttttgtccaaaataagctgccaagccaattgccccaaggccaatggcatgccttttcttggttacccttggcaattgatgggaccacatcccaagtttgaacgtattcagaaaacaaacgtcaaggcacgtaccatcgtattcatacagatgtttccaaattcaggcgttgcatgcatgttcacaatgttgattggtcccaagttacagct

SEQ ID NO: 524947 - DNA, 602 bp, Homo sapiens
cccaaaaccatcttccccaatctttttggcaccagggactggtttcgtggaagacaatttttccacggacaggggaagatggttttgggatgaaactgttccacctcagatcatcaggcattagttagattctcataaggagcaggcaacctagatccctcacaagcgcagtttacaacagagtttgtgctcctatgcgaatccaacgctgctgctgttctgacagaaggcagagctcaggcagtaatgctcacctcctgctgtgccacccagttcctaacaggccccagataatactggtctgcagcccaggggttggggacgcctgctttaaaatactgtaagttactacagacgggatttcactaagaaataaaaaatatggaaaaaatataaaaagatgccaggcacagtggctcacgtctaatcccagcactttgggaggctgaggcaggcagatcacaaggtcaggagattgagaccatcctggctaacacagtgaaaccccatgtctactaaaaatacaaaaaattagctgggcatggtggcgggcgcctgtagtcccagctactcgggaggctgaggcaggacaatggtgtgaa

SEQ ID NO: 524948 - DNA, 343 bp, Homo sapiens
actacatacttccgtattagtaatgggatgtatccgtgttggtgcagggccttacttagtaacaatgtatctgtgttggtgcagggccttagttagtaacgatgtgtccgtgttggtgcagggccttagtaacaatgtacaatgtatccgttctggtgtagggccttagtaacaatgtatctgtgttggtgcaggggcttagttagtaacaatgtatctgtgttggtgcagggccttagttagtaacaatgtatctgtgttgctgtagggccttagttagtaacaatgtatctgtgttggtgcagggccttacttagtaacaatgtatccggaagtatgtagt

SEQ ID NO: 524949 - DNA, 954 bp, Homo sapiens
gaggatgacatactggcagctgttgtagaagaagatacacgtctgatttgaatacatgcttaccccaagaggcctgtactctgaggaatacacatgtggactaggatagatgcgtgggtgaccactcgttagttcccatgtgaagtacaatcgtacgtagtgcaatctacgaacatgagagcgctgatggcttaccgatttgtctacgtttcatatagctaaacagagactccactttcgctagaacttcattaagcctgtacgataaagacgtcatatactagcgacaagtcgtttaattggctgcatcactaggtattttgaagtggaagaggaaggtaaatttcgaatcaacataccgtgcaagattaatggggctgtgattagctgttgggacgaatgtatattgtagactaatggactggcatactaatagtattcgaagaatcgctagtagagaagataggctgtatagcccgaatgacacgtgggcgaccaaagaccttgtacaactcgcgcgtgcagcatggatatagccgtggcacatgagcgatggaaagatgccaacatcggcactatgcgtgggagctcggggccggacggctcacaacataatatccgaatgcttaagacctggtgggaatgtggtgagcgttgcggcatggttgaaccctcttggtttgtggacgttgttgttacctgatagtgtggctatttacacgggtgtacctgttacgagttgcttgaagggccagggccacgtgcgtctgtttggtggcttctccatcttccgtttccgggtaccgttaggatttgattacttctctttcctcccctaaggttaggaccctaagtgtgtcctataacttggaggggcgggagaaggttcccttagcctaggggggctgtcgtggattgcgggtaaaagcccgggggtttggccctcttcgttgg

SEQ ID NO: 524950 - DNA, 408 bp, Homo sapiens
gttacttaccctctctctatgccttagtttcttcatttgtaaaatgtggataatttacctgctccatagggcagttgtgaaagtgaaggcacttagaaaagtgcctggtagtaaagatgaagggaggctgggcgcggtggctcacacctgtaatcccagcactctgggaggtcaaggcgggcagatcacttgaggtcaggagttccagaccagcctggccaacatggcgaaaccccctctctactaaaaatataaaagttagccggtcacggtggtgcatgcctatagtcccggctatgctggaggctgagacaggagaattgcttgaacccaggagatggaggctgcagtgagctgagatcacactactgcactccagcctgggtgacagagcgagactccatctca

SEQ ID NO: 524951 - DNA, 386 bp, Homo sapiens
  misc_feature (26)..(26): n is a, c, g, or t
  misc_feature (28)..(29): n is a, c, g, or t
attgcaggtcagtaagaccaagaacncnnttttcagttatcggcagatgggatctattgatccagcagacaccagactggtcttgggtctctgttttagtgcagccctcacgggggcgggggagaagactgacttcggtatcttcaggatgtaactggaataaaggatgttttctgttggacatgtactgaaaattaacacatgtagtagccttaaaattttagacttctcgaacatgaggctgttacagtaatttttttaacactgtgcagtggggggttttctaccttaaaaaaatcactgaggatacttatttaatgaacatcaattccttttaaattgtcttagagaaatttctctgtggctcaggtgtaccacccataaac

SEQ ID NO: 524952 - DNA, 310 bp, Homo sapiens
gatctaaggattcccggcaggcaggctcgtcttggcttgttcactttgtatataaatataaaagactccagagtgcaaaacagtacagagagatctgtgtcctacctctccatcccaggcctcaagtactaggacatgagcaaacaggacactaaccaggcacactgctatgacctgggactagcaggcccttcagcacgctgcatcaatcttctacacacaccaacattcttacatgtcatgtgtagttacacacaaactgtgaagctttatcacacacacagacacatctccccaccactgtactcga

SEQ ID NO: 524953 - DNA, 288 bp, Homo sapiens
aagggggacaaaggtaacattaaacaaaaatcaggattgagaaaggatatgggtacatatgaagattgttttgttttgtttttgagactgagtctcgctgtgtcacccaagctggagtgcagtggcacaagtctcggctcaatgcaacctctgcctcctgggttcaagcgattcttgtgcttcagcctcctgagttagctgggattataggtgcccgccaccacgcccagctcatttttctatttttactagagacggtgtttcaccatgttggccaggctggtctgg

SEQ ID NO: 524954 - DNA, 350 bp, Homo sapiens
ttgggggagcaggcggcacaggaataatgatctacacagtgcagtgtaattgctgtaaaatatatttccggctgggcgcgttgactcacgtctgtaatcccagcactttgggaggccgaggcaggtggattacctgaggtcaggagttcgagaccagcctggccaacatggtgaaaccccgtttttattaaaaatcaggcgagtgtggtggtgcgtgcctgtaatcccagctactcaagaggctgaggcaggagaattgcatgaacccaggaggcggaagttggggtgagccgagatttcgccattgcccttcagcctaggtgacagagcgagactcagtctcaaaaaaa

SEQ ID NO: 524955 - DNA, 431 bp, Homo sapiens
  misc_feature (128)..(128): n is a, c, g, or t
aataactttatccccgaagggccaaagtcagtggaaggtggataaccccctcccatcggggtactccccggagggggtcccagagcggggcagcaagggcagccccttcagcccccgcagccccctgncgttgagcaaagcagatttcgagaaacccaaagttttcgcctgggaagtcccccctcaggggctggggtcgcccgtcccaaaaagcttcccccggggagagtgttaaagggggaagggcccccccctgctccccagttccagcctggcccccccccctcctttggcctttggccctttttccccagggggcccccccctattgggggcccccgggtcttttttccccccccccccccccccccccctggcttttattttggtaatgtggggggggaatgaataaataaaggggttctttccca

SEQ ID NO: 524956 - DNA, 252 bp, Homo sapiens
cccccccccggggggggggtttttgggggaaaccccccccccccccccggggaaaagggggttcccccggggggtatagggcccaaaacccctttttttccctttggggccttttttggggggcccgggggggggcccctaaaaaccggggtttttggccgggggggtttttttttgggcccccccccccgggccccccgggtttttttttttttttggggggttttttccctttttccccccccgggggga

SEQ ID NO: 524957 - DNA, 1160 bp, Homo sapiens
ggctgggctgtcggcctggaccttgcaggcgcaagggatacacatgttcgagatatggcaactttgaaagatatactacgcaggagaactaagagtccatcaaaaacatccagaaggattaccaaggtctatgaacaatggtagcggcagcaagagattatgcccgagcggagagagagctgaaagccagctcgaactatactggacttgggatcttctagctctcgtagtgacaatagaggctggatatcgaatggggcctagaagacaacgaacgaaagcacctgcacttaatccgtgtcgtggtaccatcgaggagtgcgatggcactggtgtaggtcgcgtgattgcattacctctgattgtctaatagcgaggatgcaacaaagcgaggtctgctacaactagagcagctagacttgtgcgaagaggaaagtctatagctctggtctggacatggtgggtgaacaagaagtcatgacggccagtactctatcattcacggaactcattactcgaacactagtttgtactgggttggctatatccgagagacgaaaagtggagagacgacaagccccgctcgcgacttgtgggggagaatggcggtcaatgttcgatgtgcgcctgtgaaattgactaacattcgtggaatagtggacattgtgagggaagggctcccatcaatcctttaagtagagattcagggtcggtcagtctcgctagtaagcaccagtaaagaacaagccgcatctttcttgcgccgttaagtaaccgttttgcaaaggtgtcatgtacgaggacaatgaggtaatcctaatggaccgaagactttgagtgcctgaacagtagccgagggaaaatttacccaaagaatacgaagtcctggccaaaggatcatctactaaattcctctggaaggagtccaccactagtgagcagagttgccaggaatgacgagcattggcaccaaatggccaggcaaagaaatggtttctgacgatgattggaccaaaattggacaatgggagcattccaaccggtgaccccgccaaaggtggtgcatcccaaaaagaagttgatggaaacttaatctctggtgctgcagctctggcgtaacgggacaaccagtccgtcctcagaaagaggaacgagggaaa

SEQ ID NO: 524958 - DNA, 366 bp, Homo sapiens
atcttcagagtgataacactcctacaggcacggctgtgacaaggacacaggaaggttactgtgcaaatggaaggtgaacacagaagttaagcatcacagtgaggaaagaggatattttatcacagtaaaaggaatcattcaccaggccaggcacggtggctcacgcctgtaatcctggcactttgggaggccgaggcaggtgggtcacctgaggtcaggagaccgagaccagcctggccaacatggcgaaaccccatctctactaaaaatacatcaaattacccaggcgtggtggcgggcgcctgtagtcccaggtactcgggaggctgaggcaagagaattgcttaaacctggggcggcagaggg

SEQ ID NO: 524959 - DNA, 453 bp, Homo sapiens
gtgtatctcgagctaatcccacacagcagagtaacgtattacgacaaattagcaggtcattcctctgcttcaatcctttcgattggccgagcacggtggctcacgcctgtaatcccagcactttgggaggccgaggcgggcggatgatgaggtcaggagatggagaccatcctggctaacacggtgaaaccccgtctctacgaaaaatacaaaaaattagccaggtgtggtggcgggtgcctgtagtcccagctacttgggaggctgaggcaggggaatggcatgaggcaggagaatggcatgaacctgggaggtggagtttgcagtgagccgagattgcgccactgcactccagcctgggcgacggagtgagactctgtctcaaaaaaaaaaccaaaaactagccaggcttggtggcacaggcacatgcctgtaatcccagctactagggag

SEQ ID NO: 524960 - DNA, 311 bp, Homo sapiens
cacccactttggggtaaaatattaatttattgggggaatgacagtgttaagggacccaagctcccttaacaaccaaaaaagggtttttgtgggcctggcaagaaagggcatttgccaaggaggagtcatatttgatccttcccatttttaaagaaaatcaggcttaccctcctgggactgggggaagcaaatgtgctgacctcccacatgggggggggaggggccctgggaccacaaccggaaattgcctttttggacctttccaggtcaaaaatttgccctggtaataaacggggctgcccacggcccca

SEQ ID NO: 524961 - DNA, 831 bp, Homo sapiens
  misc_feature (205)..(205): n is a, c, g, or t
  misc_feature (333)..(333): n is a, c, g, or t
  misc_feature (453)..(453): n is a, c, g, or t
ggtacgcggtggtgtatccgctctgcagttcacagcgccgtcctgatgacttcgacttgatataaagtacttgtgatcacgcacgtcatagtgtgctatgggtgaagtctaacgtaacctaacattatgcaataatgattgtgaaaatgtctcgtggagtatgccattcctgacgggtggcaaccaacatagtgccttttgcatngaaaatcggcagagtggcattgcgtggagtgacctcgtacttcagagctggctgcgtataatgtcctcatctaactcagtgactaaattgttgtagtgagactgtcaggggagtaagcaatatgactntccctgtgctcacagctaggagtggtcaacatgtgtctgatccttagcaaagtatgcgaagaagtttaacatcgaggcacatacatcgctgccatggcttagacagcgccgtgttcacgntgtgggagtggacttgggtgtcagtagatgcgtgtatctgataggagaatgttcgctgtcagtggttcacgtttggtgggcctgagcttcttgtgcacaaggtaatgtgggctcgtgtctatgagattgcacgtgattcgtacccagcctcaggctctgcttaccagccgcttcttgagatgggtgctgccttatactgcttccattgtgggagagcagctacgaaggtcgaaacactacagcgatgcagtgtgtgagacactgtctggtattagtaactgaagttcacttggcctttgatacataaccctcattaaatcacttctataggggttccattatcaactagggggacttgtaattggaaagtggtaaccc

SEQ ID NO: 524962 - DNA, 418 bp, Homo sapiens
  misc_feature (391)..(391): n is a, c, g, or t
agctgcgcgtgcgcgaacatgtaactgatgggatctgcgacggctcccagatgatgcacgcactactgggcgcgacgaccctagtgctcgtcgacgtggcgccatgggtgttgtccgtagtcgcaggtggaaaaaatctaaaatctcctcagaaagtagaggtcgacatcatagatgacaactttatcctgaggcggaacaggcgcgatgagtctggcggtaatgtgactttttcattcgagtatcaaaaaactgcgatggataattggataaaaacgtctgggcgtcagaatattactagtaccaaatgcaactttgtttgactgaagctgaatgttcatgaagaaatttggcgtataacagcggagatcacttcttcatggtatgaggntgactcatgtacaccatttcagatgct

SEQ ID NO: 524963 - DNA, 155 bp, Homo sapiens
ctatatatggagttctaagttgaggagggcatcttctcgtattggacagtatagagaacaaaagtgacatgagtttgaaaaatacatatcaatatgggattgctgtcttggttgcagtggtgatacagaattggtttcattaattcctacatggt

SEQ ID NO: 524964 - DNA, 720 bp, Homo sapiens
ggctccccgaatagctgggactacaagcttgtgccaccatgcctggctaattttttttttactattagtagagatggggtttcaccatgttgcccaggccagtcttgaactcctgagctcaagggatcctcctgccttggcctcccagaatgttgggattacaggcgtgagccactgcgcccagaatttttggtatgttggagcaacattgcattatgggcataaattccacttgtgtcattatgtagagtcctttttatatatttctggaatcagtttgctgtttgtggtgttgaaggtgctgttttaatatttataacagacttttgtatttagacttattttctgtgtggttagtttaatttttatattagggtaatactgggccttacagactgagtggggaagtttcgtatgtgtgtctttatttggcatttatctgaaaatattttctaattgtgtctgtgtgatttagtggttttacccatttacgtgcgttagtagcatgtggttcatcttccatatcttggtaaatttcttaacatttcgtgttattaatttctaattttattcctgtgcgcataaaacatacttcttatgatttcagttctttcaaatttatggatggtggtttaatgaagtagcatataatctatcctggataattttattagtggacgtgagaaagaatgtggttctgctatggtggggtgaagtgtc

SEQ ID NO: 524965 - DNA, 242 bp, Homo sapiens
ttccccggggtgaggaaggaaattttggggacccctgggcccgaattcccttttccctttggggccaaaaccccccaaaaggccggtccaaatttccccaaaccctttccgggcccctttttggttttgggggggccccccgggccccctttccccccccctttggggcccctgggtttttttgggggggggggaagggtgggaattgccacccctccccggggtttttcccccgggggggg

SEQ ID NO: 524966 - DNA, 252 bp, Homo sapiens
gataacctgcggtggaacacccaatgtccatcagtgcatacatgcaacaatagtggatgaaccttgaaaacattaagttaaatgaaagaagctgggtcatatggtaattctacattgagcttttagaggaactcccagactcttttccaaagcaggtgcactattttgcattcccaccagcagtgtacacgagttccagtttccctacattctcaccaacacttattattgtctgtcctcactacatgccat

SEQ ID NO: 524967 - DNA, 855 bp, Homo sapiens
ctagagtccggctgttggctagagtgggcgcgctctggtgtggggaaggcggcgggactcaggcctgcctgcgagatttgtcctacataatgtagaggacgaatggcacttttcgataaaggctataaatgaatttgggaataaattcaaagaggtacggacaccctctgtgtcagagtgggggactaagagatacctacaaggattccatcacgagcatttgtgagaaaagctgtcttgtgaaattaagtggaagaagaacgaagtggttgagatgtttctgcaatatcaaatcagatcagcaggcaaaataagctcattcaagaaaaacagggtgataccctgtgttacaatggatgtgctggaagtaaaagggcaaaacgcaggattgtgcaagtaacgtgactgcaaatatccaggatcttaagggaagaatattctaggaaggagaggaaactatttctagtgtaataaagcggatggcagagagttttgaaagtgttggcagaattctgaagaatttgtataaaggatcgattttggactaagaacttcgaacaattttgtggtgagaaatggcgtttaattttcactaatatcgaccctaagatcttgagagccatttatttttcctaacttcaatgacgcatgggatatggagtgtagatagtggcctatttgggggctagaaattcagggaatgtggagccacactttcgttttgcaatgtcggaagttatgaaggtaataatacataggttacaggatttccaaaaatatacgggaaataaagaggatgcagggtgaattatcatgtggcacatgtttttttccccccgaggtggtttaatgatg

SEQ ID NO: 524968 - DNA, 931 bp, Homo sapiens
  misc_feature (26)..(26): n is a, c, g, or t
  misc_feature (118)..(118): n is a, c, g, or t
  misc_feature (333)..(333): n is a, c, g, or t
  misc_feature (335)..(335): n is a, c, g, or t
  misc_feature (346)..(346): n is a, c, g, or t
  misc_feature (357)..(357): n is a, c, g, or t
  misc_feature (371)..(371): n is a, c, g, or t
  misc_feature (405)..(405): n is a, c, g, or t
  misc_feature (407)..(407): n is a, c, g, or t
  misc_feature (410)..(410): n is a, c, g, or t
  misc_feature (435)..(435): n is a, c, g, or t
  misc_feature (442)..(442): n is a, c, g, or t
  misc_feature (448)..(448): n is a, c, g, or t
  misc_feature (452)..(452): n is a, c, g, or t
  misc_feature (459)..(459): n is a, c, g, or t
  misc_feature (462)..(462): n is a, c, g, or t
  misc_feature (472)..(472): n is a, c, g, or t
  misc_feature (476)..(476): n is a, c, g, or t
  misc_feature (480)..(480): n is a, c, g, or t
  misc_feature (486)..(486): n is a, c, g, or t
  misc_feature (488)..(488): n is a, c, g, or t
  misc_feature (495)..(495): n is a, c, g, or t
  misc_feature (498)..(498): n is a, c, g, or t
  misc_feature (503)..(503): n is a, c, g, or t
  misc_feature (523)..(523): n is a, c, g, or t
  misc_feature (535)..(535): n is a, c, g, or t
  misc_feature (539)..(539): n is a, c, g, or t
  misc_feature (541)..(541): n is a, c, g, or t
  misc_feature (547)..(547): n is a, c, g, or t
  misc_feature (549)..(549): n is a, c, g, or t
  misc_feature (557)..(557): n is a, c, g, or t
  misc_feature (562)..(562): n is a, c, g, or t
  misc_feature (571)..(571): n is a, c, g, or t
  misc_feature (582)..(582): n is a, c, g, or t
  misc_feature (589)..(589): n is a, c, g, or t
  misc_feature (610)..(610): n is a, c, g, or t
  misc_feature (630)..(630): n is a, c, g, or t
  misc_feature (721)..(721): n is a, c, g, or t
  misc_feature (756)..(756): n is a, c, g, or t
  misc_feature (779)..(779): n is a, c, g, or t
  misc_feature (785)..(785): n is a, c, g, or t
  misc_feature (811)..(811): n is a, c, g, or t
  misc_feature (817)..(817): n is a, c, g, or t
  misc_feature (823)..(823): n is a, c, g, or t
  misc_feature (832)..(832): n is a, c, g, or t
  misc_feature (840)..(840): n is a, c, g, or t
  misc_feature (866)..(866): n is a, c, g, or t
gctggcgaacttggtgcacagcctcntggtgaaggtaaagatatgccagaagacggtgaagcgctacgatgtggtgccccatcctccatcaccatcagcctgccaggcacagaccctnaagacgccgagcggagaaggcaactggccctgaaggcactcaatgagcggctgaagagagtggaagaccagtccatctggcccagcatggatgatgatgaagaggagtctggggccaaggtggacagccccctgccctcagacaaagctcccacacccccagggaagggggctaccccagaatccaatctaatcaccttcgaagcaactcccccnangctgtaactcnaaaccaccttnaatatggcacctcncctaaaaaaccccccttaaaatcctatcagctantnaanaaaacctaactaatctaaaaaaaanaaaaaangcctgntggngctttcnatngccttcatgntgtntatnaccaanantacccanaantcttnctacctggttccaactccanacaaccactatnccananccggancntctgaggnatcgnccagtccangccctcatctnaggtaanaatgtacatcagctggcagcnccaagcaagtggctgcaggnacactgatgccacagctcctgggccggccctcacatctgaaactggttgccgagagccctgagccaaggcaaggatttgccaaaaatgttntgggggcccagcaaatgcaggagccgacctggggntgcacatccctgcccatccccanaaagantgttcctgtcaggatttgtttccctntgctgnggcggngactgcttntggaccanaacagctccagctcccaggtattttntacaggccccttgagtgggcagccaagcccaggcttccagtatcaataaagcagttttttgagga

SEQ ID NO: 524969 - DNA, 102 bp, Homo sapiens
gcattcttacattactaaaagaagaatagggtcttttctggaatcactttttttgtaagaatctccctgatgtcggtctacatgatgatcatgggtaacaga

SEQ ID NO: 524970 - DNA, 244 bp, Homo sapiens
cccccgggggtccccctgaagccccaaggggcccctgtcccccatggccccccccgggggggttaagggtttttttcccccccccgccccgggggggagggcagtaaaataagggggtcaacccccctcccccctttttttttgacagccgggtgggatgttggggtttgggggtttttttttttttttccttttgttttggaaataaaggaggcaaaaaaaagaaaagcccgtttttttccca

SEQ ID NO: 524971 - DNA, 762 bp, Homo sapiens
  misc_feature (113)..(113): n is a, c, g, or t
  misc_feature (223)..(223): n is a, c, g, or t
tggaaacagggtctcgctctgtcccccaggctggagtgccaggggtgtgatctcggcctctacaacctccgcctcccgcgcccaagcaatcctcccacctcaagccctctggnattagccaggactacgagggcttgccccaccacaacccgagcataattttgtgatattttgtgccagaagaacgagggtttgggctcaatgttgtgcgccaggctgtggncctcgaaaacctcctgtgagcctccaagcaagtgtgcccgcctatcggccttcccaaagtgtgcctacgatttacgaggcgaagaaggcaaccgaaaacccagcccatgtggtttccctaacgacgtgccctcacttgtgtgactcctgtggtggttgaaaccagtgtggtggacctcaggtgcgtgagccttatagaaccccaggaataaatgttttgagggggaattcacagaaaaaaaatttgcacctttctcgtgaaaacaggcctcaacactagtttctctaaaggggccaagattttttacctcccagccgaccttgttacgggggtgcacccatgaaggggtcacatctgtggtaaacctggcccctctaccagtaccccaaagcaacaagcgctgaggagaggagacccttttccccaccaacaggacaacacctatggctggggggggcccatggatggtggccccccaataggataagaagtctaggaggacaacttttttggagccctatttttcaatttaaagcaga

SEQ ID NO: 524972 - DNA, 128 bp, Homo sapiens
tcagcattaatatgcttgtatcattacgctgttatgatgatagcagtgatgatgccgggtgaaaaagctgtctttagcttcagaaaaggtagggagacaattgtagcaagcagaaaggcaacacagat

SEQ ID NO: 524973 - DNA, 117 bp, Homo sapiens
agacaactggcgagtaaagtcacctcgtggggcggccatattgcgcgtccctgagtcctctgggcagatgcagagccgtgtaagctcatagaagcaacgccagtggaacagtgggag

SEQ ID NO: 524974 - DNA, 242 bp, Homo sapiens
  misc_feature (1)..(1): n is a, c, g, or t
  misc_feature (187)..(187): n is a, c, g, or t
ntttccgggcgcatctcagggttatttttcgaacgtgtacatacaaatatgcacaaaaataatcataattattttctgagattgattatgatatgaacaccaatttcgtatagagtctcactatgtctcaaatttttgcttactgtcggatatcaacgctggatcagaccaccgaaaatcaacgccntggaaatcgaaagtgcaggttttaaaatcaaaccttatcaaataatcgaagaaca

SEQ ID NO: 524975 - DNA, 627 bp, Homo sapiens
  misc_feature (85)..(85): n is a, c, g, or t
  misc_feature (282)..(282): n is a, c, g, or t
tctgtggtagttgatactagcaagtatataattaaggctattgtgcccgatgtgagcaatagtgaggttatggagattattgagngtatttagatagaggtggatagctatattatgaaggtggtgtagtagattgtgtactaggtaagtgttggtttattagattattgtgtagaaggttattatggatgaggagatggtgttgggtttagaggtggttgcttgttgatactattaccattgccacctctgagagcttgatagagcaggtggccatgatgntggctttggccattagtgagggcactgtgtttgctgtccgggcagggacaagtggcattgaacaggtcactgtgaccatggtgtcattagaggacattgagattctggagcatgcaggtgagttggttattgccttgccggagggccagctggaggtgcagatggttattgtttagcatgaggtttgtggggttctggccgggcagggacagggcagaggactttgagcgccccacccatgcctgcctggcctggtagagaagatggcacaggatggaggcgccccaagacggacagtgtacataagagttttttgttgctttacaataaaacatgagaacctga

SEQ ID NO: 524976 - DNA, 270 bp, Homo sapiens
ggggggggggtttttttaaaaaatttgtttagccctccaattttccccctttttcccccattaaagggaggcggatttttggccccagggggccccttttttcaaataaggccttgggttttgcccgggccctttttttttttttccccggggccccccaaagttttgtttttgggggaaccaaaaaaattaaatgggccccttttgggtatgggggggggtttaaaaaaatggggaaaaaaaaaaaaaaaagcgggttgggttttccca

SEQ ID NO: 524977 - DNA, 579 bp, Homo sapiens
ggagagagagagaactagtctcgagtaattatctttctagtttaactttattaaaatactgagttaatacacatgtatattttggtctccccaccatttccatgttctgaccaccgctactactatgtcctatcataacatcccatacatacttaaaaccaagcaaagggtgagagtgccatctattaagaaactaagacgcggcatttgggatcaacacatatcttggcaatagaccctggcacaacattctatcaaacagctggtaggcgaaagtcctcactcgtgcatttactaaaagggacagccagattactcacacgtgttaccagaaagagtgacacatacgcacggaaaactatgtagaagcacactgggcctacgccaattttcctttaagagagacttccatccacgtgccaggagaattcttgtgaattaggccatttttggctcaagccaactccggaaagcaattcttcacaataagtggagtgaattggggcttccacttgtggaaaggagaaccaccatttctctatacttgctggaatattggcttaaatgtctcctacagaa

SEQ ID NO: 524978 - DNA, 126 bp, Homo sapiens
caatcagaaaatgacttccaatatttcttctgtcaccgtagtagccaagtttctcacaaacaaaactttaccttagccatgacttctggatctggttctgccattggaccagcgggtgccattggg

SEQ ID NO: 524979 - DNA, 507 bp, Homo sapiens
tggccgggcacgaggtcaggagattgagaccatcctggctaacacggtgaaaccctgtctctactaaaaatgcaaaaaattagccgggcatggtgggcgcctgtggtcccggctactcgggaggctgaggcaggagaatggtgtgaacccgggaggtggagcttgcggtgggcagagatcgcaccactgcactccagcctgggcgacagagcgacactctgtctcaaaaaaaaaaaaaaagatggccgaataggaagagctccagtctgcagctcccagcaagaccaacacagaaggcgggtgatttctgcatttccaactaaggtacccagttcatctcattgggactaattaggcagtggttgcagcccacagagggtgagcagaagcagggtggggtatcacctcacctgggaggtgcaaggagctgggggacctccttcccccagccaagggaagccatgagggactgtgctatctggcccagataccatgattttcctatgg

SEQ ID NO: 524980 - DNA, 139 bp, Homo sapiens
ctttttttttggggcaaattttgtgtgcccaaactccagtttaaatgttttttttaccaagggaaggtagcctttattcccatagctttttaatttaatacatcctttcatggatgtaacccttaaaggagtttatact

SEQ ID NO: 524981 - DNA, 1933 bp, Homo sapiens
taaagaaagctaaatattacattatgtaaatacttcttttcaccaacttctgtagtttcaccattgcatggtgtcatttcaggttatttaacagttatatccctctatgccaataattaaaagtgtacactaaacatgaagtttggcatatgttgcaaaatgtcattttatcttttctaaaggctttaagaagaatatactagaatctatatattgatgttaattttgattcagaaaaaaaatacaacccagtatctaaaaagtgttaactagtccaagatagtaatgcatatgccaaagaaatattacacctaatctcatgtttagaatttaaaatagaattggtcagctacttattcttaccaccctacttccagtattttagctctgtcattattaaattcagatcttcctgattattttttctgttgaaagttaaactactgctttcaagtaatttaaagttatcctaccttttattcatgggtagttttgcaaaattaacatggtagccattgtttgaatttaatcgggcatcataacttttcatttattgaggaactaatcattattactataaagcatacaaattagccagtcagcacactttggtcttctttacctaagggttaaacatcagaacatcaaatttaattatttgcatagaaatgtgtgggctctttaaaaaatgttacagtatataagttgactatcactaacaggtaatatttttctgtttgaagttgttacttttgtttacagcaaagtttgatgtagtgtgcagtagtgagctctagactgatctttttctaaatcagaaagtgattaaagtatgcacaaccaaaggcaggtttttctttttcatttattcagcaactatttattaagcatcaactctgtgccaggcacgttactagctgctacatactgtctgaacatgacatacggttaagtaactttacaattattatcaaatacttcaatgtagatatttcttaagttgaaatagcattaactaggataatgctttcatgttattttattgtcttgtgatagaaattcaacttgtaccatctaaaactaggttgctataaaaataggaggatgaagtcaataaagtttatgccagtttaaaaactggaaggaaaaggtaagagctctccattataaaatagttgcattcggttaatttttacacattagtgcattgcgtatatcaactggccctcaatgaagcatttaagtgcttggaattttactaaactgacttttttgcaactttgggagatttttgaggggagtgttgaaaattgccaaacactcacctcttactcaaaacttcaaataaaatacacattttcaagagggagcaccttttatatttgataagttttcattataaaccttataataccagtcacaaagaggttgtctgtctatggtttagcaaacatttgcttttctttttggaagtgtgattgcaattgcagaacagaaagtgagaaaacactgccagcggtgattgctacttgaggtagttttttacaactaccatttcccctccatgaaattatgtgaaatttattttatctttgggaaaagttgagaagatagtaaaagaattaggaatttaaaattacagggaaaaatatgtaagtgaaaagcaataaatattttgttcactttgctatcaagatgttcactatcagatatttattatatggcagcaatttatatttttaatcattgcccattaatagacgcagtaaaatatttttgaatcagacatttggggtttgtatgtgcattaaaattgtcttttgtactgtaagttactgttaatttgaatattttattgaactgtctccctgtgcctttataatataaagttgtttctacaacttttaatgatcttaataaagaatactttaag

SEQ ID NO: 524982 - DNA, 276 bp, Homo sapiens
tgtcttgcgcagtggctcacacctgtatcccagcgcttcgggaggccaaggtggagaggtatcgctatgagcccaggagttcgagatcatgcctaggcaacatggcgaaagcccgtctctacagcaaaatttttgaaatcaccgtggtttcggtggcactgtgcctggatttggtggtacaagccgattgtcccagctacccaggaggctgaggcaagaggatcgcttgaatccaggaggttgaggcttgcaatgagccatgattgcaccaactac

SEQ ID NO: 524983 - DNA, 117 bp, Homo sapiens
taggtgctcttggccaggctgctcttgacccgcgtgatctgcccgtctcggactcccaaagtgctgggattataggcatgagccacatgcccgtgcggcccggctatggtggcatat

SEQ ID NO: 524984 - DNA, 625 bp, Homo sapiens
taaacaaacccgggtcctggggtggggggggggtataatactaagtggagatgatatcatttacgggggaaggggcttggtgaagtaggccttatttctctggttcctttcgtacagggaggaattggaagtagatagaaaccgaccgtggattacctccggttctgaacctcagaatcacgtaggactttaatcgttgaacaaacgaacctttaatagcgggctgcaccatggggatgtcctgatccaacatcgaggtcgtaaaccctatggttggatatgggactctaaaataggatggcgctggttatccctagggtaactggtcccgtgggtcaagtttatgggatcaatggagtatagtagttcgcttggactgggtgaagtcttaagcatgtacggctcggaggtggggttcggctccgaggtcgccccaaccgaaatttttaatggcaggttgggaagtttaggaccgtgtgggttggtaaggtacgggtggcgttaataaattaaagccccatagggtcttctcgtctggcggggtcttgcccgcctcttcacgggcggtcaatttcctggttaaagtagagaccgtgaccctcgtggggccgacctttccagggtg

SEQ ID NO: 524985 - DNA, 424 bp, Homo sapiens
ggtcgactttttttttttaagagacaatgtctcgctctgtctctcaggctggagtgcagtggcgcaatcacagcttactgcagcctcgacctcttgggatcaagcagatcttcccacctcagtctcctgagtagctgggactccagacacacgctgccataccaacctaattttttaaattttgtgtagagatggggtctccctatgttgcacaggctggtctcaaactcctagactcaagcaattgatcctcccacctcagactcccaaagtgtcgggataacaggcataagtcactgcacctggatgaaaatgaatttaataccctgataaactcatcacagagctgaaaaagcataaattgagccatcatgaagtccagatgctcctcaacttacaatggggttatgtcccgtcgacgcgg

SEQ ID NO: 524986 - DNA, 1272 bp, Homo sapiens
agcggcgtctctgccggaggagccgcggggccgccacactcgccccccgacccccgcccgcgctcactcgcactcacacccggggcgcaggaggcagggcggcaccgggccccaccgagaacacaccaatgaacgcacccaagacacaggagagcgcatgagaacacacgcagatctagcatgcccaaagaaccagaataacaggggacagccacaagacaagaaaaggaatcatcatgcgacaaggagacacagtacatccggaaaagcgaaggccgcgagcaggcaacatcgaggccagggcgagcgagaccaaaaccaccagacgtggcaccacacaaggaagagaaaagacacagaacaagagagggagggcgaaaaaagaaccaacaaaaggggcagaaacccagccgaaaacaagagccccaacccacacggacacccgacgaaaccgcgccacaacagcagggtcacgaccacacgggcaccgcgcgagccgcgcgatcacgcgacacgcggcgcccccaagccagagcgagcgcagcggacggaggcgccagccaccccacagcgccacacagcgccacaaggccactccgaaggacaaacacccagcgcaaagcaccccgaagcacaaacgggcacccgaacacgccgcccggcgaccgaacacgcgcccgccgcgacaccacccagccccccccctcagccgccccagacgggagcccaccacccacgcacgaccacacacacgacggcagacaccgcaccccgcacccccgagcccccccgactggcgccacccccccgccaccaaccgcaccccccgcgcacgcccagccgccacaccaaccagcaagccgcaccgcgcagcgcaaccgccacgcacagaacagccacacagggcactacaagcgcccagaacgaagaagacacacatacacaagcaagcaagccaataccacacgcgaaaacagagtcgagcagagcacacggacgaccagaccggaagcggcgaagacggaggagcgaccaacacgtcaacgacaacggagggccgacgagaccagccgaggaaacgcacacgggacaccacccgacaccgacgccacaagagcgacgacgacgaccagcggacgcgaagagacgaccgacaaccacaagatgaacgagacagagctccgcacgaccgaccgacacaacagtcgacgcagacgctagcagccacgacgaccagcgagcgggcaacacggagatatcaccaaacaagag

SEQ ID NO: 524987 - DNA, 791 bp, Homo sapiens
catctttgcagatacacttactcttctgtttgaagggattgcccgcgattgtggagaaccatgcagccaatagtggagacctattatgggccaggcagactctataccctgatcaaatatctgcaggtggaatgtgacagacaggtggagaaggtggtagacatagttcatcaagcaaagggactaccatcagcagttccggcatgttcagaacaacctgatgagaaattctacagcagagaaattcgaaccaagagaactggaccccatcctgactgaggtcaccctgatgaattgcccgcagtgagctatacttacgcttcctcaagaagaggattaggctctgacttttgacagtgggacgactccattgtgcctcagaggaaggtaaatgcatagatgcaccagaatgtgtcttggtacaatactcactcaagtatactgccttattgacgcttgtaccaatgcatggatgctaacttggtcttatactgttaccattggacggatgtactttcatgatgggatgactgtcaattagatggtctgtggctctggacacctatgagaatgggccagtctgacatccagcatggtggatgatgtcttctacattgttaagaagtgcattgggcgggctctgtccagctccagcattgactgtctctgtgccatgatcaacctcgccaccacagagctggagtctgacttcagggatgttctgtgtcataagctgcggatgggctttcctgccaccaccttccaggacatccagcgcggggtgacaagtg

SEQ ID NO: 524988 - DNA, 980 bp, Homo sapiens
gaacatgtatggagacctggtcattggagacacagtccctgagaaaggtgcattcttcaatagtttcttctatgataaactccgtaccaagggttatgatggggtgaaaaggtggaccaaaaaccgtggacatcttcaataaggagctactgctaatccccatccacactggaggtgcataggtccctcatctctgatgatgtgagagcgacgcaacatcacctattttgactcaagcagcgtaccctaaaccgccgctgcctaagcatattgccaagtatctacaggcagaggcggtcaagaaagaccgactggatttccaccagggctggaaaggtaaattcaaaaatgaatgtggacaggcagaatagtagacagtgactgtgagatgatatcatgtgtagcagatcatgcagagcattctggacacctgtatcagacattccagacttcaacacagcaggacatgaccaatctatcgtcggaagagcagaacaagggagcatgagtcacatgcaaaacccaacagagatgaggcctcgaaaacccaagaaaccacaaagcccatacagtgggcagcgacacatagggagaaacaaacacaaaaacatcaaacacataaacaccacttgacaacccccacaccaaagaaccaaaagaaaacagatgaaaaagcaaaagaaacagaaaaacaccacaggaacaacaaaacagacaaggaggacaagggaagacaagaacacacaaccacaacggagggcaggaaaagcagacgagcacagagaagcacacgcccatacagcaggcgcagagcagggcagcagagggtgcaaaggacgccgaaagacaaacaaaaaaaagagcaggcaacgcacagagggagggacacaaagaagagagagacgaagaagaaaagaaaacaacacggagacgacagagggaggacgaagaccgagagtgaaagcgaagacagagagcag

SEQ ID NO: 524989 - DNA, 257 bp, Homo sapiens
tgaaacctgggacgtttattcggacgatattacagctgggtgacacagttctctaatttcctagctgaaactatcccgctattgcttgcctgatctccctcttgaaatggtcacctgaataactacctgctttcatttaatttccctaaagcctcttataagggtcagtcatgtgctggacaatagtaattcaattgacctttttctttcttctgaggtcgaaaacacccccatttcactaaccttcactatcagat

SEQ ID NO: 524990 - DNA, 400 bp, Homo sapiens
  misc_feature (296)..(296): n is a, c, g, or t
gcaggcctgaagaccaccctcccgagaggaaccagcccggtaaaagggcacacgatgatgcggcttcccggtccctccgcgtgtgccgattccagatgaccttacagtgtccccaaggttattccatcttatagactgtaaccctgcctccctgcttactggtccagagcctccctccagtgactgtggagcctaagaaggcccccgggccccagcatgggccccgagcttggaagtagacatggcagttggtggcagtgaaaaccaacccacccaccacaaaaagacacaaactntgggaaaacacaagtttctcgggggccaggggtcatcggtttgacccctgacctataagccaagaaaccccataaactcactcagaaagccgagcaaaagaaaa

SEQ ID NO: 524991 - DNA, 88 bp, Homo sapiens
gtgggttgacgtggcttgggcagagagagcctccatctgtggtggcatttgagagctgttgttctccaggatgcagtagctccacagc

SEQ ID NO: 524992 - DNA, 125 bp, Homo sapiens
gggtctgttcccctcaaagctacattctatccagtcttcacatttagctgattatcttgcctgtgtaatcgtggatagctcgaaagagaatccattcagggattaagccgtacctatcctatcca

SEQ ID NO: 524993 - DNA, 86 bp, Homo sapiens
tgaggcccagcctgcacctcctccacctcactggatgctgttaaccccctctgctcctcctccaggtacagggaagcacaaaaaaa

SEQ ID NO: 524994 - DNA, 982 bp, Homo sapiens
  misc_feature (89)..(89): n is a, c, g, or t
  misc_feature (108)..(108): n is a, c, g, or t
  misc_feature (172)..(172): n is a, c, g, or t
gagtccgcattcgctccagggttttgggacccataggttgctggagttccttaccgctacccgtggctcgtctctgagcagttgtcccncataactcgcgaatctatngagccgctgttgcgaggcagtgagcacgtggcaatcaagtacgcttcccatgtccctgaacgcncgccctgtccaccaccccggccggtggcccaactagcaatcgaaacctctgtgacaggttgcgagacggcggtaactggatggcacgtcccgcctgctggcagcccccgcctgttgtctacgtgggctttcaggaaaccaagtttgtatgtttacgtcagggagtagtgtacgaccttgtctttaacgggctgtccgccccggagacacggacgggacgtcaacacccggtgagtatcgacctgtaagcacgagtgtcacggactgtcgattttcagaaatgcgtggatgggtaccgtcgtgctttcattaaggcccccgtaggcaagactggccacacctaagactggatgccttatcagtccatcacccgtgtattccatactaagcgtccgtgtgtcacgtgagtttctaacaatggtctagccatatctggtaaagattggccttagacacacgaatcatgggagaagtatgtcaagactaccagaagattggagaaggttcattcgggccaacagccaattctgtgttacagatctaccagaaagatggcagcacagcatgttgatcgagggacattacgcatctcaaggaagtgtccagtcacggagagaggacgacatccaagggacgagacagtgggcacgtatgcggcaaacgattgaggccttccagttatgggcccaggtataagacgcaaatccttttggagacacatcgctgctctgcaccatagaactggattactggcgcggcacggggatctgtaaagacgaatgagtgcttccaaaggcggtggacacaagga

SEQ ID NO: 524995 - DNA, 316 bp, Homo sapiens
ttatacacaacctagggtcagttttgcaggtggtaagccatttaccaagatagttgtaggtaaagaagggcagatttattagagaaattgtgaaaatatgttgcagtgggcagctcagcagagaaggggctacctgcaaagaggcaagggctggaggaaagttttatagggtcctgctgaagggtgctacgtgtggaatgaggtcattgtgcccgcaggttgtttgtgattagctgtctctaacaattgttcatacaataattgttcattattgttctcaacttggggctctccccaacctggggacccttcctta

SEQ ID NO: 524996 - DNA, 195 bp, Homo sapiens
  misc_feature (184)..(184): n is a, c, g, or t
tgtaatcccagcacttcgggaggccgaggaagcagatcacctaaggccaagagttcaagaccagcctgaccaacatggtgaaacccatctctactaaaaatatttttaaaaattagctggggttacaggcacaccaccacgcccagatagcagaccccacgttagcgtgaaatgggaaaaaacnttgaaggaggc

SEQ ID NO: 524997 - DNA, 266 bp, Homo sapiens
gtgaactccacagtgtatcctttaacttacacgtgttggagttcctgtcgtggctcagtggttaacgaatccgactaggaactgtgaggttgcaggttggattcctggccttgctcagtgggttaaggatccggcgttgctgtgagctgtggtgtgggtcgaagacgtggctcggatctggtgttgccgtgactgtggtgtaggcgggcagctgtagctccaattagacccctagcctgggaacctccatatgccggggtgtggcc

SEQ ID NO: 524998 - DNA, 504 bp, Homo sapiens
  misc_feature (47)..(47): n is a, c, g, or t
  misc_feature (61)..(61): n is a, c, g, or t
  misc_feature (64)..(64): n is a, c, g, or t
  misc_feature (70)..(70): n is a, c, g, or t
  misc_feature (115)..(115): n is a, c, g, or t
  misc_feature (167)..(167): n is a, c, g, or t
  misc_feature (215)..(215): n is a, c, g, or t
  misc_feature (223)..(223): n is a, c, g, or t
  misc_feature (283)..(283): n is a, c, g, or t
  misc_feature (340)..(340): n is a, c, g, or t
  misc_feature (394)..(394): n is a, c, g, or t
  misc_feature (403)..(404): n is a, c, g, or t
  misc_feature (406)..(406): n is a, c, g, or t
  misc_feature (412)..(412): n is a, c, g, or t
  misc_feature (417)..(417): n is a, c, g, or t
  misc_feature (498)..(498): n is a, c, g, or t
ttccccaaggaaagtacctagggagcagaggcactccgttgcccccnacactgctcagaantantctcanacatggcaggaattcaaccagtatagattgaattcagagactcanaggaggagcctttacaacaaagtgcaaaggaaagggctgaggctatgtaggnggagcaggttcaaatcccagtctgttgggtataggccaagttttagtntctctgtnaaatggaaacttatcccgtcagaagactgtaaggattggtgatattacagaatgtacgtngaacatagaatgccctcaatacatgcgaactctgattcttttgggtaccattcagcncagtatctcattgtaaacatggggaaactgaggcccatacagggtgggtgaatnggccagggnngnagacanccaanatgatacataacatagggttgagattcttaactcctgacacaccgttctccagggcacacaccttaccgccactttgtgtngtaaaa

SEQ ID NO: 524999 - DNA, 111 bp, Homo sapiens
atacatatacgacttgagttggtacctgaacattcgtgtacgtccgtcagttgggcacgagtcttagccgggtattgctctccatcacttgtaggacacgaatgttcagga

SEQ ID NO: 525000 - DNA, 668 bp, Homo sapiens
  misc_feature (20)..(20): n is a, c, g, or t
gcacgggggcgcggggcgcnaagtgtctcaggcgccacaaagggcacagtgtgggctccgtcactctgtatgtccgaaggggtgtgtgccagtcaagtgtctgcacttcttgagatgcggtgacacagcccacaaaaacactctaggagcgagtttaaataatattattctcctgagtagttctctttctctcaaccacgcactcaagggcaagtatatgataaatatttaggtccacccctccccccaaagagattggggggtgaagatctgggcacgcatctgacatttcttcctctattcctataaaaataaaaggaaccagaattgtgcttcaatgagtaaccaagtcacccacactccaaaataacccatgcacactgtttctgggaaggaagatggccagcacagaagagttggcccacatgatgggggacattctctctgccacttgcagcacccctgttctgggaaggggtggccagtgccacagtggactctgagatgaaagggtgtttcttccactggcctttggcctgtcaccagcttcctccgcggtgacagcacagtacaagagtgatggcaatgtgactggcacagaaatagtttctcccaggcacacaagagctcgtgtaagccccgtagttccatcctgcaaagggcctcag

SEQ ID NO: 525001 - DNA, 959 bp, Homo sapiens
  misc_feature (956)..(956): n is a, c, g, or t
aagatttcatattacatgagaattcctaccaatgtaaagattgtggcaaaagccattcaactggttctctaacccttactacacacaggagaattcatactgcgagagaaaccatacaaatgtgaatgaatgtcggtgaaagcattgtaactgccgtgtcctcacacgcttactacacgataagataattcatactggagagaaagcatacagatgtgaagaatgtgggaaagcttttaaccggtcttcgacagcttactacagcataaatagaattattcatactgggagtgaaatcgtacaaatgtacagaatgtggaaagcttttaaccggtcgtcattaccttagtacatatgggataattcatactggagagaaaccctacaaatgtgaagaatgtggcaaagccgttttaaccagtcctcaaacaccttactaccagcataagataactcatgctggagagaaagcttacagaactgtgaagaatgtggggaaaggttgttttatacgatgactcataccttattaaatcataggacaagtcatacctggagagagaattctacagacatgtgaagaatgggcaaaggcttgaatggtcctcaggcctcactaacatatgagaattcatactggagagaaagcctacaatgtgaggaatgtgggcaagcttgtaatgagtccgtaaaacttataacataaggatgatcatatgggataacctacatggacagatgtggaagacgttaccggtgctcacattaatggactagatgttctatgcagaacttaaatggagattgggagttaaggatcagtttaattgaactatggagatgaatggaatgtgactaggctagactgaaaatatcggagaaaataatgcatgtgactttaaaaagggcgggaagtatacataacgcagtacttcttttggtaaatattcttaaangtg

SEQ ID NO: 525002 - DNA, 141 bp, Homo sapiens
gcacggcctgattacccaggaggatgagagtcgttacaatgagaaaacatatttaataaatcatgtcaatttttataatgtttcaagcccattcttggttgatagccagtgctaaaattcagatgctgttagtacctacat

SEQ ID NO: 525003 - DNA, 1423 bp, Homo sapiens
tatgtcgacccacgctgtcgccttacaactactttttccctcttttgctcacgcacctcgagggaactggtgctcccgcgggaagcgcacggggcggcgcaacgaagcgaaagggcgcggccccagaccgcgggatcccgactctacaggcagcggctccgccgacccgggccccgtcagacgaggcgggcgcacagcagctgggtgggcaactgcaatcacacccgggcgcttgtgcgggcgcagccatgatcggccaacgatccgcgagccgagccggacgtgacagtcacgcctcagattccgccgaccgatcagcgaggggctgcacgacagggggcctggatggcatccgagaactgcgagagaaacatatcgtgactggtacgatgccatcagcacgataaaacctactgacgtgaataatcagaaatccacaccaggaccgatccaacttgacacacggccctaacagcacatgactgcacgttgatcccaaacgaggacgcgagcacagagcggcctagaagggaccccacccaatggaagcctggacaacacacacacagacaacaaggaacaccgcgaaacaggtccacaaacccagcaggaccgtctgagcataccacaagaagacacacacgagttaaccaaaagcggcacgacaggaacaaccctccgatcaatgccaagaacagacaagcacgacaagcaacacatagtgactgcaacactgaacaaacataacaaacacaccaaagggaacccctgaaccccgaccgggagctcaccagacagaccaaaaagcaacacgggaagagcacaacaacgaacaactcacgccaacgacacctacacaaacaggaatggccacacaacagcgacaacaggacacccagcaagcccgaagcagtagagggacacgacgacaacccacaccgaggcaccagcgggcccgtcgccgagagggcactccacaacaaagaccccacagaccaggacagacatcgagaaaggcaccagaacagaccacacgcacagggccacgcaaggccccaacagggacaacaaaacagcacaagacccaccggaacaccaacaacacaaaagcacagcgaaccgacgagacgcaaaacacccaggaccaaccgcccccacaacagcccggagcgatgacagacacgcacacaccgcgaacacacaacgagagcacagcagacagcaagcagccacgcacgacaaacacaagcaccgaccaacatgacagagcgacagacaacagaaagaggaaagcaaaccacgaacaccacccaggaggcgccagcgcgagcgagaacacccaccacacagaaacccggacaccgcaagacaaggaagagaacgcagggacagagaaaggcgagagtcacagccgacgcccacc

SEQ ID NO: 525004 - DNA, 188 bp, Homo sapiens
gcggccgcctactactactactactgctcgaattcaagcttctaacgatgtacggggacatgcctgtggtcccagctactcaggaggctgagacaggagaaacgcttgaacctggaggcggaggttgtggtgagccgagattgaaccattgcactccagcctgggcaacaagagtgaaactccgactc

SEQ ID NO: 525005 - DNA, 892 bp, Homo sapiens
gctcatttttctcttggccgccaccacgaatgaagtgccttgttgcctcccgtcatgattgctgaggcctccccagaccatgtggaactgttgtgaggcacagcagctgtatatacaatgaacagtgatattgatcccattactaattatgacaacatacagtgatcttccactgtaaacaggtgtggaacgctccttatggtcctgatcctacagttcctgttccatgacgcaggggcagatcaccaaggagcggcaggcatgttcgtcgtcagtggcaggcaccattgcgagcactccggaggaaggcaagtacgtgggtgatatattcctgtattcttggacaagtacactgttgacatgtagctggattcgagagagatcacactaggcgggcgccgtacgatcggcttaatccatcattcactttccgatctggatcaactggtagtcaagtcaggtccactgtgcttccctgcgtggtgcgacgatggatgctcagactccatcctcgaaggctggtcaagaagacacgttgagacatgtgcctcctgatacgtgtgatggctgtggagcccataggactggagactctcgactgaggctggatggcgcggccattacggtactgtgcctggggggtcaacggcaagaaggctcatggagcaaaggacccaagttcccaactctaaagattgctcattcactgccgagacaagaaagtggtgtccaagaactggggtccccgcggcagggcggggccaccggggggggggaccgggaagacagcgcaaacgctggccaggggagggcctcccacaccgaagggtggcacaggtgacccaccaaaggcggccagacccagataagcccctacaggcagcgcccaggt

SEQ ID NO: 525006 - DNA, 203 bp, Homo sapiens
  misc_feature (32)..(32): n is a, c, g, or t
  misc_feature (47)..(47): n is a, c, g, or t
  misc_feature (55)..(55): n is a, c, g, or t
  misc_feature (77)..(77): n is a, c, g, or t
  misc_feature (110)..(110): n is a, c, g, or t
  misc_feature (145)..(145): n is a, c, g, or t
  misc_feature (169)..(169): n is a, c, g, or t
gatcgagctggtcccgccacagcacgcccagnagcgttggcgatccnggatacangattttcttatacacttccgcnggaccgtctacccagctgtagttctggctaccnggggtacgcccatgcgcgtcaccaatcgatgccanctcaacaccaagaagcttaagttnggtgctcatgtccgcgcccttaaagacggcgtcg

SEQ ID NO: 525007 - DNA, 272 bp, Homo sapiens
atctgatatactcgtcgggtacaataccagtggtggccaatttgatttgatggtaagggatggatcgatgacctcgtctgtcatgtaccggatgcgtaaggatgggagggcgatgaggactcaggatgatggcgggcaggatagttccaacacggtttttcatttcctgagcgtctgagcatgttcagtcatcgttcagttatgttgtgagtgtaaggcaaaagggcatacaggcactaggaagcagataaggaaaatgattaagaggggtc

SEQ ID NO: 525008 - DNA, 668 bp, Homo sapiens
  misc_feature (192)..(193): n is a, c, g, or t
  misc_feature (197)..(197): n is a, c, g, or t
  misc_feature (204)..(204): n is a, c, g, or t
  misc_feature (210)..(210): n is a, c, g, or t
  misc_feature (214)..(214): n is a, c, g, or t
  misc_feature (225)..(225): n is a, c, g, or t
  misc_feature (254)..(254): n is a, c, g, or t
  misc_feature (263)..(263): n is a, c, g, or t
aaattggctaggtagaggccggggtgttaatcggccgaggcttctccaccgacccagtggagaactgcagtgatgaagatctacacgtacgaacaatgaccagagacctgggtgaagctgggtgtggacaccattgccaagtacctggacaacatccacctgcaccccgaggaggagaagtaccggaagatnnagcngcagaanaaggtntttnaggagcgcatnaactgcctggaagggacccacgagttttntgaggccantgggttccagaaggtgtatgcttccctgcccaggatcaggagtgaccccgaggagatcatacgtgctgagacgagaccaccttggcccagccccagagcctggagaggcacaaggaacagctgcatggcttgcggagcaccgtgctgctgccaatgctggacaggcagcgccgatgtcttccagccctcgacccctggcctcgcagttcgaactgcctggggacttacttcaaactcacagcagaggagatcaagcgggagcagaggctcaggtccgaggcggtggagctggctgagctgtgctgctggaccaaggacatgcgtggataatggaggagcagctgggggcttgcgcaagtaaaactacacgcttgatgatgcgtgcagcctccccgatggcataca

SEQ ID NO: 525009 - DNA, 405 bp, Homo sapiens
  misc_feature (385)..(385): n is a, c, g, or t
gaagggtacaaggactttcttcacattgtggcaggtaagagaggggtagtggtaaatatttttaaacaagcagatctcgtgagaagtcactcttgaaacagcactagtgggatggtgctaaaccatcagaaactgcccccaggatccaatcatctcccacagggcccctccttcaacactttcggattacgatttcacatgagagttgggtggggacacaaagccaaaccctatcaggcagtaacactaacatttcaaatattaacctcaatatggttagaattgtatcatcatcaagtatcctaaaacatgggaaaatattctaaattctaaattttcaagaattaacttcaggaaatttatctattcctaactctggaaaagnccaaatctgaagagcaaaaa

SEQ ID NO: 525010 - DNA, 430 bp, Homo sapiens
  misc_feature (32)..(32): n is a, c, g, or t
  misc_feature (272)..(272): n is a, c, g, or t
  misc_feature (305)..(305): n is a, c, g, or t
  misc_feature (327)..(327): n is a, c, g, or t
  misc_feature (346)..(346): n is a, c, g, or t
  misc_feature (361)..(361): n is a, c, g, or t
  misc_feature (393)..(393): n is a, c, g, or t
  misc_feature (417)..(417): n is a, c, g, or t
  misc_feature (426)..(426): n is a, c, g, or t
tgagacagggcctcatcctgtcacccaggctngagtgcagtggcatgaacctggttcactgcagccttgacctcctgtgctcaagcagtcctcctgcctcggcctcctgagtagctgggaccataggtgcatgctgccacgcctggctaatttttaaatttttttgtagagacgagatctcactttgttgcccagcctggtctcaaactccaggtcttaagtgatcctccagcttggcctcccaaagtgctggggattacaggcatgagccnttgtgtctggctctaattttcttttgatcattnggaattcagggacttttttttncaaccagggatatgccttngtttgtgtttgtaanacatttaaccctgcctttttagtccatggccntttttcagtgttcaggttttaagnatttgcttncatt

SEQ ID NO: 525011 - DNA, 574 bp, Homo sapiens
aacgggtgatgcggttgtaggagcacactctggagcaacaggacatttctgctcatttagagcaaactgggaaaacggcaaagcatgaaagagcaaagataaaatctcactccgtcccaccacccaccacacgaaagggtgcccagcaccttccctggacaggcctctgcacggctaggactgtgtgcggagatcctcacatcgggaagagggatgctggcgggggtcgccagtgtgccgtcccaggatggacattgcacatttggtccctggcaagcccctgggtgggtcctgaggcccccaggctgccctgtgcactctgacctcccctagagccgcccaagcgatggtggggactggggtgtgggcctgacagcttgctggacagggcgagccagcggcccaggaagaagcaatcaggcaccaacctgcccgccgaggcctgggtctggcccacacctcaccttcccacgctgtccccagagtgccttgcagccctgggcttgccgccccaaaggtgacccgacactgtcccctgctgtgggactgtgagcctcttcagagagaagggagt

SEQ ID NO: 525012 - DNA, 176 bp, Homo sapiens
aattaattaacaatatattgtattcttgaaaaatgccaattaaagtaggatttgaagggttctcatcacaaaaatgacaactatgtgtggtaatgcatattgctaattaatttgatgcagcattccatgcaaatatatatttcaaacatcatgtttacaataataaatatatacac

SEQ ID NO: 525013 - DNA, 852 bp, Homo sapiens
ggcagacactgaccttcagcgcctcggtccagcgccatggcgccctccaggaagttctcgtagggggaaactggaaatgaacgggcggaagcaagagtctgggggagctcatcggcactctgaacgcggccaaggtgccggccgacaccgaggtggttgtgtgctcccccttattgccttatatcgatttcgccgcgggaagaagctagatcccaaagaatggctgtggttgcgcagaagtttgttacaagggtgactaatggggctttaactggggagaatcagcctgtggcattgatcaaagactgcggagccaactgtgtggttggctcctgggacactctcaggaagaagaaagggcaatgtgtctagggcggagaagtccagattgacgctggatgggccaaaaaagtgtgccaatgtgcttctgggccaagagggggaactcggagagataatttcggccttgatttgggggagaagaaacgcataagattgaacagggaaagagctgtggccattcatgttggaaaacagggtgtggtgcttcggacagccaagaccaaagggtctccactcgggcaagaattacaacggttgaaagggcaactggaaagggcaaggggtccggtccgtggccattaattgaagccctttggtgttggacccacatgtggttacgtgggccaaaggactgttgaaacaacccccaaaagaagggccacaggaagtgtacacaggagaaagctcccaagaggatggggtggaaggcacaagcgttctcatgatagcgaggaggatacagaaacaccccggtatcaatttagggaggggggctcttgataacttggc

SEQ ID NO: 525014 - DNA, 268 bp, Homo sapiens
gagatgggcctcactatatcgcccaggctggtctcaaactcctaggttcaaaggatcttctagcctcagtctcctgagtagctgggactacagtgcgtgccaccatgcctttttttttttttttaatgagacagggtctcactatgttacctaggctagtatcaagcaaccctcctgcctcagcctcccaagtagctgggactacaggcacaagccactgcacccagctccaactcctttctttatgcaaatacaaaaggcaaacctt

SEQ ID NO: 525015 - DNA, 257 bp, Homo sapiens
  misc_feature (217)..(217): n is a, c, g, or t
  misc_feature (237)..(237): n is a, c, g, or t
aacaatcagttctcactataactaatgaaacgagaactcattcattaccacaagggacagcaccaagccatgcatgagggatccgttcccatgacccaaacacctcccactctgctaagttgctaaatcctatcaataacatcagtacttcttatctgcactctcagatacatctgacacaacagaccagtccctaaaccttgaagtgctctattcnccttgacctatgaaacaccntactctgttttcctccgtga

SEQ ID NO: 525016 - DNA, 352 bp, Homo sapiens
  misc_feature (298)..(298): n is a, c, g, or t
  misc_feature (306)..(306): n is a, c, g, or t
cacgagagacaatccagatgatgcttctgctacagcgacatggcccagtcccaaggcgcaagggccacttgtgtcagcagtgtgcaccagcagcgtgcgccggcaagatagcagaagcatgaaaagggccggccagaagacacctactctggctggaagacacgtacccctgaagatcaagaaagaagctatctgggaacaatgtagcagttacgtcagaccaggacacttcctgtttacaggagactataaaacctttgtcctatcatcacttgatgtggacgcaatttaaggcttnagcccgcntggaacccagggcactgattaaaacagcatgttggttccaaaaaaa

SEQ ID NO: 525017 - DNA, 192 bp, Homo sapiens
tgatacgaatcgagtcgtgtacctgcagctctctctgatgtggtcaatcccctaatctgtataatgtgctgtttacctgtatttaaaatgccgtataaaacacatttccaggctgggcgtggtggctcacgcctgtaatcccaagcatacttgggaggctgaggcaggagaattctttgaacctgggaggcg

SEQ ID NO: 525018 - DNA, 84 bp, Homo sapiens
ctgccgtgcttctagaggatcccggcaccattgtgcggtaggacacttggtcactttgaagcatgttaataaatgtcactgatt

SEQ ID NO: 525019 - DNA, 115 bp, Homo sapiens
  misc_feature (37)..(37): n is a, c, g, or t
cttcagctaaatctttctttgctgtcctatgatccancactcgtgaacccattacttgttttctgaattcacaaaccttcttcctcatcttaaggcaaatttctacttatttttc

SEQ ID NO: 525020 - DNA, 149 bp, Homo sapiens
tttctgtagttgaatcttaggatctccccccggacagacattcttggcaatagaacccggacaacatttattatacacggtagggaaagttctcactctgcattataaagaggacagccagattcaactattacagaaattaaataaga

SEQ ID NO: 525021 - DNA, 86 bp, Homo sapiens
ggatttgctggtgcagtacaactaggcttaatagggacatggcaagccaacgccacttatccagtgaaccactatcccaaaaaaaa

SEQ ID NO: 525022 - DNA, 152 bp, Homo sapiens
gctaacaggagctttgtgtgctggtagaaactattctgtcagtcacatgcatcaactctgtactggctggccacgggaaggagctgggtgaccaggccaaagcgcagtggaagaaaaccctttcatctcagagtccacagtaagtggcggag

SEQ ID NO: 525023 - DNA, 700 bp, Homo sapiens
  misc_feature (552)..(552): n is a, c, g, or t
  misc_feature (586)..(586): n is a, c, g, or t
  misc_feature (615)..(615): n is a, c, g, or t
  misc_feature (622)..(622): n is a, c, g, or t
cagagagcagtgacttcaccagtgagcgccgaggggacaaagaggcacccccaccagtactgctgacacccaaggctgtgggaactcctgggggaggtggaggtggagccgtaccagtgtatttcagccatgtccctgctggatgatcttgagccatgagatgccaatggatttgatgtaaactggagcttctcaagtcagctgtgccagtgcatggaactggcagaatctgtgctgccctgtgcccagtggtgtgcaatggctggcatgcagtgtgcatgcatgcatgtggatgtgatgtgctggtgtgtgtggtcctggatggaagtgacctgggccagtgacgatggctgacaagaggagctggccctctcccaagaaccgaagtctgtcctccagaggagcgtcccccgtgggcttcccctgcctcccccacctcccagcagttctgctgtcttccgcctggaccaagttatccacagcaaccctgctggcatccaacaggctctggcccagcttagtagccgtcaagggagtgtaactgcaccaggnggtcatccaaggcacaagcctgggcctccccagnccctcagggcccctctcctaggccccaanccgatangagccccagagggtcacagcggcctcagttctgacgcccactttgaggagccgggccatggtgagaggggtgggtggg

SEQ ID NO: 525024 - DNA, 354 bp, Homo sapiens
tatttctatacgaacgactattccataggttgatatgaggataaccccctaggttttatgccaccttaacgtagcctagactgtcttggagggacagcaatacatacaactaatactactaggacaaagtaggctctattacctaaggccaagttggactacacatatatatagccacctaccagacacacacacacacacacacacacacaactacacagagtaagatatacacctacgaaagccctataaaagtagagaagggatagacagctacctactactagagccctagcgggaccactactacctgctaaatagggatagtacagtcctactttacataaatagggc

SEQ ID NO: 525025 - DNA, 285 bp, Homo sapiens
  misc_feature (18)..(18): n is a, c, g, or t
tctgggatacaggtgtanccactgtgcccagcccagtgtatcattttttaatggcctctaatgaaatcctagttttatcaactctaatttttgtcttttttgcatctctgaaccttctcttttttttaaaggattttgtttttactgtggtatattatacataacattttaccatttttaagtgtatggttcattggcaggaagtatattcacactgttgtgctgccatcaccaccatccatctccagacctttgttatccctaattaagacacccacctgatcg

SEQ ID NO: 525026 - DNA, 737 bp, Homo sapiens
agcgggttttcctctggctcctgcgagggctatggtttagggcttcagctctctgcgttctcggctccgggaggcctcggtgattcagccacagcctctgcctcccggtggctctgtgacctagagggtatcggacaattgagtagctaagactcccggataccctgaagtcagggaactggaactcgtaacattcagggcatgtggccatacgaattctcccctgaagagtggaaactgtctggacccgtgcccagcagaagttagtactagagatgtgatgttggagaatctacaggaagctggtctccctgggtttggtgatctctaagcccagacgctgtgtcacctgtctggagcgaagataaaagagccctgcgaatttgcaagatactatgagacagcagccaaacccccagctatatgtgctcctttcagccaagacctttcaccagtgcaggggatagaagatgcagttccagagaacttatactgggaatagatacgagaaattgtggacatgagaattgacaattacgaaaaggtggtaaacgtgtgaatgagtgtaaggtgcagacaaggagttaataatggacgttgaccagtgcttgtcggctacccagaagcaaaatatttcaatgtaatacatgtggtaaagttgaagtaaatgttcaaattcaaagcaacattagataggaccatactggagagaaacccttacatgtgcagaatgtggc

SEQ ID NO: 525027 - DNA, 228 bp, Homo sapiens
aggtcatgactttcatgaaggggttaaagctggtaagtggcaaatgggaacttcccattttggggaaaagggatttgtcagcaaatgctgttaattaaaaaagatccagattatgcatcccaaatcctaaaatccaaaatggaccaaaatttgaaactatttgagcccccacatgaccctcaaatgttcattggcccataagtataatgcaaatattcccaaatttga

SEQ ID NO: 525028 - DNA, 125 bp, Homo sapiens
tggtgtgtgcgtggtcccagctcccttggaggctgaggtgggagggatcgcttgatcctgggaggttgaggctgcagtgagcaagttaacattttttgttacaggtggatagatacttctcaaga

SEQ ID NO: 525029 - DNA, 158 bp, Homo sapiens
ccacagtaggcacagatacccacagtagggtcgtggatgcaggacgtttacgttgagtagatagaatgcggtagtagttacggatactatcaactgttaaattaagaatggttatgttagggttgtacggtagaactgctattcttcatcctactgtg

SEQ ID NO: 525030 - DNA, 88 bp, Homo sapiens
gatccagaggatccctttctctgatcgctcagtattgtccagagggagtgggtttatacttttaccaaaattataacacaagttcctt

SEQ ID NO: 525031 - DNA, 830 bp, Homo sapiens
  misc_feature (628)..(628): n is a, c, g, or t
  misc_feature (665)..(665): n is a, c, g, or t
gtcaactgtacctggacaccaagcttgggagtttttttcacaattgctagacagaaagttatatcaattacccagacaagctaggcatctcaccattcggtccaaagtatcttccaatcaaagagaattcttatttttcttattacaagagaaaataaaccagactagaaggtaggatagaagacaaatttgtcttttgacaaagtaccacataattcaaacaaaaatctattcagtgtaaatgacagtgagctgccccagtggcacgtctgtccatgctccgctgtgccatctccgtcatgtgtgaagcagcccgtgcttggggatttgtcctgttttttaatgtagaactgaacaaactatagcattttgtcctgtttctcttgtgactatggtcacatgagtttttgctggataagtgagaacctgtgaccacataataaggtttgaaccataatctaggtaacatttgtaccttgatctaaaccaaccataccctgtactctccattactactactgcataagcacataacatcagtggtaaccaattcgcttggaatgattacttacccaaggcaaatgcatgatcaattagttcaagtatcccaaaaccaaccattactcanaaggccaacaaaatttcagtgaccaacaaagcataanaaagggctagaaacaagtaacctctctacacctttttgagggagagaactacttgtccaaatgaatatcacacaggggatctctaacctatccccaaaccctgcaacacgaagtggatgacactcattgttaatactccatcacttttgaccaccacccaccccc

SEQ ID NO: 525032 - DNA, 420 bp, Homo sapiens
cggtctcgccacttcctatgagatcgacccaatatcacaggcacctgttccgcttatccagataaccctatcctataccctctgtctgtcccaaggaaaatgagcccaatcagtacaccaggagtggggctccatatcatcccctaaggtcatgcctgtgtccacggtggaaagtagttgatggaaatgagggaacactcaaagagtacatatgccattttccatgtctaattcaacctctatcacaggaaagaattggccagttttacagatcacccagcacacagcttatacaagcagtttgttacgttgactatgttcttcaaattgccacaattcacaaatattgtcatccgattgctgtgctgtgggaacaacaagtataggcacaagtgtgtggttacgccaatcaatgatgac

SEQ ID NO: 525033 - DNA, 639 bp, Homo sapiens
  misc_feature (280)..(280): n is a, c, g, or t
  misc_feature (565)..(565): n is a, c, g, or t
aaagcaaaagtttatgtttggatgtaaattgaaaatttagttggggattaaaacagaaagtgaggaaatttggggcaaatatttacttaaagtccgtggaagcctgtgggtacaaaaatggttaacggtagaaacggtcgaaaatggggaaggaggactctagtattttaaagggttttggggggggaaaaaaaaaccaatttatttgtataagcggtgcttaattatttggttagggtggtttttttttaactatggtgagtagggtgattgaaactcntgatgcgagtaatgggatgtgtttaggagtgggacttctaagggatttaaggggggtaatgcgtgttgggggctagtgccatcctagttggggggtaggggctaggctggagtggtaaaaggctcagaaaaatcttgcaaagaaaaaaacttctgaggtaataaataggattatcgggtatggaaggcatttttggaaacctggtgtctggtggccttggtatgtgctttctcgtgttacatcgcgccatcattggtatatggttcgtgtgttggttagtaggcntagtatgaggagcggtatggagtgaaagtaaaataacatcgtagcccggacggtcttagaaggctcgagactag

SEQ ID NO: 525034 - DNA, 662 bp, Homo sapiens
  misc_feature (40)..(40): n is a, c, g, or t
  misc_feature (42)..(42): n is a, c, g, or t
  misc_feature (121)..(121): n is a, c, g, or t
  misc_feature (236)..(237): n is a, c, g, or t
  misc_feature (245)..(245): n is a, c, g, or t
  misc_feature (252)..(252): n is a, c, g, or t
  misc_feature (254)..(254): n is a, c, g, or t
  misc_feature (270)..(270): n is a, c, g, or t
  misc_feature (300)..(300): n is a, c, g, or t
  misc_feature (302)..(302): n is a, c, g, or t
  misc_feature (329)..(329): n is a, c, g, or t
  misc_feature (389)..(389): n is a, c, g, or t
  misc_feature (392)..(392): n is a, c, g, or t
  misc_feature (417)..(417): n is a, c, g, or t
  misc_feature (427)..(427): n is a, c, g, or t
  misc_feature (436)..(436): n is a, c, g, or t
  misc_feature (446)..(446): n is a, c, g, or t
  misc_feature (464)..(464): n is a, c, g, or t
  misc_feature (478)..(479): n is a, c, g, or t
  misc_feature (486)..(487): n is a, c, g, or t
  misc_feature (496)..(496): n is a, c, g, or t
  misc_feature (498)..(498): n is a, c, g, or t
  misc_feature (510)..(510): n is a, c, g, or t
  misc_feature (513)..(513): n is a, c, g, or t
ccatttttcccccagcttggtggttccttgccttttatancnccctctccccaaaccccgaactctgtgaagtgcagttcttctccacctaggaccgccagcagagcggggggatctcccnggcccccaccccagttccccaacccactcccttccaacaacaaccagctccaactgactctggtcttgggaggtgaggcttcccaaccacggaagactactttaaatgaaacaannagaaatgnaataatnanatcaggagtcaaaatncatcgtcttcaagcccctctttctagcctntnctactactctctgcttggtcaaggttngtgccccactacagaacagggctaaattagccaccaccactgaaaactcagccgaatttnttnataccactctgatgtcagcatttcntccatctgtnggggctttncctcttttcnccattctccccaaatatnttatctggcttcannaattaannaggattatntnccagactgtccnatncagtgtggccgattcctcatctgattcaggctgtccagtcaggcccctcccataccaggagctggagccttcattatgaacagatactcatctatgaacatggatctcgtgtgtacatcttctattccattcacaaagctgtaacgact

SEQ ID NO: 525035 - DNA, 129 bp, Homo sapiens
gacgggagttcttcccgttctcgaagcaggtacgggagcgggcggaattatccgggaaaatacacagaagaaacgtgattattacagagatcagcgacgagagcgctcgaggtcgtatgaacgcactgg

SEQ ID NO: 525036 - DNA, 1086 bp, Homo sapiens
accatcaaagaccagctagaagcagcggacgcggatcctgcaggccatctatccggtggcaacagtgaagagctccatcaagatccaggagcagctctgcctggtccaggactccaatcgtccatgatgttcctgctatgactaggcagactgtatccctgagtcttcagcagcatccagcgacctgaggctcatgcagtcagttatcgagcaagaggtcaggctgcacgtgactcaagccccagctcggggcgggcccccaactttccagggcagatctcctcttgccctaggtctgcaagctcgagcaccgtgcgtctagagagatcatagtgatgagtatcgaacccgagggtccctaaatgccgatgcagaagcatcacattgctaaatgcgaggatgctcagctggtcctgactcgtggagatgcagacttaggtgtgccctcggttgctaggtcagcgaccagcagcaattgcagctccactgctcaaatgtccttggaattctagatcctacaaggcttgcattcacaccatcgccagtggatgcgcaggcgcagtagcctagacaccattgcccaagacgtttcatgccatcgattcggacacgtcctcgaaggcatgtttgccttgatgccagactccatcgcagcccaatgtatgccccggtgtcctagttgacggcaagtggctatgtcctacaggaaagtacacgcagggacgtggaccggcaaagtcgaagtacacgcccaatgagccagcatcgtgtttcaaacagtgcatgacgcacacctccggtgcaatcaggcatgacatgtgctccctgagtgccccgtccttgctgatgggggcagtgcggtggtgccatcccatggttcctcttgcatgcgaagcagtcgccccctgtttgcctgcaacagtggcccggccagtcagtccaaccgtcaggcgctatcctgcagggttcttgggcaccatcgtcttaggccgtactggacacggtgaccatgtgccccgcgtaggcttcgcggacgggttgccgttcgtgattggcgtttgttgatccccgggagtcacggctgtc

SEQ ID NO: 525037 - DNA, 166 bp, Homo sapiens
atatcccatcgaaagagcatgtacagaggctcccctacggagtccctcacgaaggtatacagacagatggacatccagatggtgagcagcttctccaccacagtctctgtcctgcgcagacatcagattggggttcttggccacatactgggcaaccaggtcactg

SEQ ID NO: 525038 - DNA, 748 bp, Homo sapiens
gctcgacgcttagctgtcggggacggtgatcccggggacccggtgtcggcagccaggtcgccgttgctggctgcctagactccgctagagcatctatgcgtgagtgcatctccatgacagggttggccaggctggtgtccagataggtgatgcctgctgggagctctagtgcctggaatcacggcatgcagcccggatggcctacatgctcaaagtggacaagcaacgatggggggcagagcagatgtatcgcgttcatgacttcttctgtgctgagtagggggcgggtgggaagctctcgtgccccagggccggggggtcctcgtcaagacgtccggaaacccaggaccattgcgatcgatgtaagttctgcctactggctccctgaccggcaggtccttcccacccgtgtagcaggatcttcaagaggcttaggtcgggatgctgcgcaaggtggagtaatggccgagggggctacaccatgggcgaggagatcattgaccttgtgttggaccgaattcgcaagatggcgtgaccagctgtgaccggtcttcagggcttcttggttcgcccacagcttgggcgggggaacacggttctgggttcggctcgcgctggtcatggaacgtctgctcagcgatgtatggcaggaaactgcaagctgacgttctccatttaccggagcccaggttaccacaggctggtgggtgagcccgtacagcttccatgctcagcaagcagagcaacc

SEQ ID NO: 525039 - DNA, 283 bp, Homo sapiens
  misc_feature (19)..(19): n is a, c, g, or t
  misc_feature (53)..(53): n is a, c, g, or t
  misc_feature (63)..(63): n is a, c, g, or t
  misc_feature (65)..(65): n is a, c, g, or t
  misc_feature (90)..(90): n is a, c, g, or t
  misc_feature (232)..(232): n is a, c, g, or t
  misc_feature (265)..(265): n is a, c, g, or t
ggtttcaaccgggaaggancctttgcaaccgagcagcggattgaccggatggncggacgtcancncgccggggcacaccgaacaggccangccggtgggggcaccgatgcgtaccccggctgaaccctggacaatctaccgccatactgcgtcatgtcgccctgacgcgccgccggttttccgctcatctgctcatccttgttttatcgggttatttgtctgctgacaagcnaaaccctaaaaaatttataaaaaaaccttaaantgaaatatctgtcatgcc

SEQ ID NO: 525040 - DNA, 346 bp, Homo sapiens
tcgcacttcagaaacagcgtgcaggggccaagcaatcagaagggtaacaaccttccaaatccacatgttaaaagaccaccctgctccccagatcaggtcccaaggataccgttaagcaccccaagccatatccactttgaatctgctccaacattgggtgtaattatttgacggagagttatattgttaaagtgtaaaaaaaattgtgttataagtgcctattttttttttttttgtagtactattttcatggaaattagtagataaaatttgcctctggtacctgtaaggatggggcccaaaataaatatttagaaaaacaagtaaaaggtcaagatcaatgtgt

SEQ ID NO: 525041 - DNA, 373 bp, Homo sapiens
ttgactgaaacgatgatctgtgatggctgagtttctggcattaatccaatactaaggtaaggtattaaaggcatgttcttagcatccatcctcctatgctttaggcagacccacttgcatcatccacgtgaacactggcctcaggtatggtgctgatttaagggaggttgccacttacagagctctgttgaaagatattcgtaggacaggtctgaagtcagcacaaatcaagtggcatcagtcattaactgtggcatgcactgtgtgacaggtagaagtggaatgagcactggactactttgaggggcagtgacatcatgtgcaaattgcttaagaaaggtgaccaatgtttaagttcaagtgtgtgtgtgag

SEQ ID NO: 525042 - DNA, 318 bp, Homo sapiens
  misc_feature (257)..(257): n is a, c, g, or t
aaccagtcacaaaaggccacattattgtatcattctgtttatataaaatgtccggatttagcgaaatctatgagagacagagggtagatttgtggttgggtaaggctggaagggttggtgggaaatggggagtggctgctaatgaggtatgagattttttgggaggtgatgaaatgttctaaaatagattgttgacctggctcactggctgttgcctgtaatcccaacactttgggaggtcaaagtgggagaatcancttgaggctagaagttcaagacccagcctgggcaataaagtgacaccttctggtctctaca

SEQ ID NO: 525043 - DNA, 370 bp, Homo sapiens
  misc_feature (31)..(31): n is a, c, g, or t
  misc_feature (53)..(53): n is a, c, g, or t
  misc_feature (232)..(232): n is a, c, g, or t
  misc_feature (240)..(240): n is a, c, g, or t
  misc_feature (278)..(278): n is a, c, g, or t
  misc_feature (342)..(342): n is a, c, g, or t
gggatgccgacgtcctccgcgccctcggagncgcactgagaataccgacgggnccttcgtacgtcgagcgctcgatgccgagctctgcgcgcacggccgccgactcgctggacgcgaacaccgagatcggccgggtgtgcgggacgtcggcgagcatcgcccgaggaagacgatcactccgatgtcttcggcgagggcggcatccatgatctctgcggtgaagctgcgccantgcgtggnacggctccgtgccgagcagtaggaagatattgcccgcnttgtcgccggtgatatcgagttcggcgtcgcgcgagcgcattccccgacgcgcccgggtcgcgngggacccattcattcacgggccgacgca

SEQ ID NO: 525044 - DNA, 136 bp, Homo sapiens
tgcacgcttactatcttcaataagcttgcagtgccagcagcatagacagcagtccaacatctgcaccaagcatgttgatgtgggataagagaattctctgctccccacctctaagtgcccgccaatcgaagggtca

SEQ ID NO: 525045 - DNA, 168 bp, Homo sapiens
ctccccgggaacacagttacatcacatcagactgcagtcacctgagctgctaaaccaggagaacactgtgcaacagggcctctccctctacacgtttcatagtccaaagccgtgggagaaaaataatgaagctttacgatatagagtgtctaccatattttaaaagtc

SEQ ID NO: 525046 - DNA, 225 bp, Homo sapiens
gatcctcaatacttgttggtcattgatacattaaatataacctgcttaatgataaaggtgtagctattgttttagaagttgctaaagacaatacagcaatagggttgagagactagtcagagattcttaaacaatagaattaattaaattatagtaatcgtaataataagattgtgttttattcgttcaaagttgaatagtttattaatttattgaatgaacccg

SEQ ID NO: 525047 - DNA, 838 bp, Homo sapiens
  misc_feature (123)..(123): n is a, c, g, or t
aggtgggtggatcacctgagttcaggagttcgagaccagcctggccaacatggtgaaaccctgtctctactaaaaaattacaaaaatttagccgggtgtggtggcaggtgccgttaatcccangctatttgggaggcagaggcaggacaatcgttctgaacccaggaggcagaggtttgcagtgagccgagatcaagccattgcacttcaaacctaggggacaagagcaagacttctctcaaaaaaaaaaaaagggtttacaaaagaaaaaaaaagttcccccgttaatttcccacattgagccaaaaatcctaccttcaagggcattttgcccaagagaattagaacccttttgttcaccacaaacctcttgtactgtgtacgtgttcacaggcaggctttttccatattaggccaaaaagttgggcaaaacaaagcaattatctggccacttggatggacctgggctaattaaaataccggctgggaagcaatgggatcaccgcctacaattcccagcattttgagaggccaaggtggatggctggcttgagggtcagagagtcagagaccagcctgaccaacattagaaaaacccctgtctttactaaaattccaacaatttacgctgggtgtcggtggcattgccccctgtagtccccagctactccgggaaggctggagaccagggagaaatcctctgaaccccgggaggccacaggtctgacttggagccaaagattcgcaccattggcaactcccaggccttggggcacatggagagaaacttctgtctccaagacattacattcaacgcttattcatattatggacactt

SEQ ID NO: 525048 - DNA, 620 bp, Homo sapiens
tcgaggatctctggcaggtggaaatcaggaacggactgctatatggggagcatgccaactttttctgtaaagggccagatagcaaatattataggcttggcaggccatgtggaatctgctgcaactactcaactctgccattataccttgagaacagcccttggataatacacaaatgaatggatgtcgctgtgtgtcaaaagaaaacttcattaacaaaaaaaaagcagcacgtagattgggctctctgccatagttggttgaccctgtacggggtccccaagtcaagccagggctttcatccaggtcgttgtcatttctccactaagttcctttgatatcgacagaaatgcactctatgtttctgtgggtgaactgttataactgtccttcattcatttctaggcacctttgtcaagtccaaatctggtcatgtcactcttagtttaaatttttagaatagctcctgaacaaaatccagactcctctgtgtgaagcacggtagacaaggtctccatgattgggcctctgcctatttgtccaacagcaagtcttacatacctcacccacctaataattgtaccaagctcttgccatctcctgatttccaccttgccagg

SEQ ID NO: 525049 - DNA, 163 bp, Homo sapiens
cgtggccagcgaggtctgttaagacgtctgtacttcatgaagcccataccccccatgattgggatgcattcactctgtcaccttccaggctgctcctagggacaaatgaacatgatgagactggtttctgggagctgagcacccacaactggactcccatccc

SEQ ID NO: 525050 - DNA, 195 bp, Homo sapiens
gaactaggatggacgatgacttgttgcacactgaagagcctcatcatcggtgagagtggggtgggcacgtacagcctgctcttgaagatcacagatgatacctctgatccacaacctgcagcaacaatagacaatgctggaatcacatgaacctgtacatccacagataaagtggtcaagaaactgccgtattag

SEQ ID NO: 525051 - DNA, 273 bp, Homo sapiens
tacatatacgacttcgagtctcggaccggaaggtagctgtactgccacgggatgccgaagcggcccaagcagcagcgcgacgccgagttgatcggggagggagagagccgaccccatcagacaaggtggtgaagaaggggaggagggccaggaggatcaaaaaacgtttcttggaggagctggcagaaaaagataaccgggctgggaaaaaagagaacgtgctcagggaggacgggagccggagcagaagaaacagtaccagcttaccttgcg

SEQ ID NO: 525052 - DNA, 1976 bp, Homo sapiens
gagcgctacgcgtacgcttcactagggcgcgagcaggctctgttatgtccacagctcagttcaaccgaatatcgtatacgggactaagggagatagcagagacgccggcgggccaggaaggaatagttggtaccagcaaaggggcagagacgatggaggatgaatatatagcctggccactgaaatactaggccaggcatgtatcgccctgatacctcgcgtggcgagtaaatgacacctcacgctagaacaagtatagcgtctcagcgaaagaggccgcaggccaagagaagacataagacggactcccccctgcataacccgaggcagcggaggtcgaaacgcataagacgcatacaatgccgtcataaacacgtaggccacgagcgcactgctgctgagtcggtcatgtcagaaagaatgaagtttgcgggacaggaatacttccatgaagaggttaccggaagggcgggaagccatatgaactttcctaatccgcggagtgaccactgtcgtgggtccgcactttatgcgcctaaggctgtggtttcgcgataggaaagtgaggaaagaattccttgtcagggcttatggcgacatctttttctcaaaaaaatcttctggacccgcctagcaaggcgattatctccccattgcaatgacaggactacgccccccatttcggtgaatagacttgctttagaccatgggtaatgagcttcaccgacagaagaaagggcggataaccaccgtcgtggcgttgtggtgggtgcatcgatcttcacggcagaaaggaaaataaaccaccaccatcatcgtttgattggattggaccggcaagtttccccaacacgaccattactatggaaaggcaaggcttccaattcaaggttccaaaggtgggcccttcaaaaaaacgggaacaccagtttcccaaacggcgcaaatggtgtacataccggaaacaccaggggcaagttataaccaagaagggggataccgaagagaaaaggaacggccatgtgtaaacggcttgaaaaatcgaggccaatgccccctaaataaatctagttgacttgaggtatcctttggatgaccggttcactatactatccaagtgcgccaacactaatggaggactcccaaaaggtgccttaaataccaatcgctcgtacagataacggacaacggacaactggaaaatggttaaaaagttgaagtacacagaggtgaaaaccaagtgggacaaacgaccacattttccggcacattcccgagcgaattaaaaggccccataggttggttctcaggaatctgacaacagagcagtcgtaggactagggtggagccaaagttaggacaccatgagctccgaacttgattagtaaccaaaagttcgaaacgctaggacagaaagtttcagatgtgagatctaacacccggtgagcaacgtggtacagagtgccgcgaaaagcaacaagtgggacaatcagcaccaggtacaaagcgggaagacacggcgtcatcaccacaaggagcagaccaacaccaagacatagccccaacgggacaaccacaaggcacactcggcaaaccccagcaccatcgccaacaggagacgacccaacgtgggcaggggacacacaagaagcacacgagaacgaccggagtggaccacgggagccgcacgcagaaacaccacaacacagggacccacaccacaccgacaccgcaccacgagacacacgacagccgacacgcacggcaacaaagagccaccagacagacatgaccgcagcgaccgacacaacaggggcccaccaaaccaaacgccgacaacgtgagacacaccaccgcgcgcaggacaacggtgcccgatgcaacaagcgcccaccacgcagaccacccggtggaacagcacaaccacacagtgacacacaacacgaacaaacgatacagacagacgaaacaaatcg

SEQ ID NO: 525053 - DNA, 357 bp, Homo sapiens
catgcaacgagacctcaataaatataagaaaattgatatatcatatgaaagcactttctcagaccacaatggcatatacactggaaatcaactccaacaaggaaccttcacatatcatgcaacatacatagtcaattacaataaccatgctcctagcatgagcattggagtcaaaaacaaacatcaagatagaaattattagaactgcaataacaataagtgacacaacctcatcaaaacctctgagggtacacgcaaaggccagtgctaaagaggcaaagttcaatagccctcaaatgccgtacatctacaaaagactgtcaagagcacacaattgacattactatggattgtcga

SEQ ID NO: 525054 - DNA, 128 bp, Homo sapiens
ctagaggagcgtggaagcatactgcacagagataccaattctttcaaagaaatggcatctataggtgggaacactccagtgtcacagagtccgttgtgtggcccagaactacgctggaatggaattgc

SEQ ID NO: 525055 - DNA, 390 bp, Homo sapiens
gttggcaacgggagtggctttagcaccccgaccaccctaacatcttgcactgtctgggggctccccgggctcagcaacacccacctctgtggctgggagctgggttcagccacatccctgcaacttctccgggacaccgccatccatgtacgccaagcgtgacggcggctccatgtttcctgccaatggcggtgctattaatttatacagaaagctcacatttgccatcactcccctttacgaatcgcttcaccctctgaccagatcccctcacagtcactttctagaactcattctggtgccagctatctttatggacagaaaactacattttgaaatcaaatcaagtgtgttctattttccatccaaataaatctggagcactttcaa

SEQ ID NO: 525056 - DNA, 493 bp, Homo sapiens
  misc_feature (150)..(150): n is a, c, g, or t
cttatctctgacctctgggcttgaaccaatgacgcaaaagagggtgtgtgcctgcagcatgttctccttttcggggtctcttgacgtggcttgatgtctctgagaccatttatgtgtggagccaggtgccccttccctgtctagtttctnccgggtcagagaaagttttctggggaaaaggactgggaaggagagggcacccaggtgaggaagagaaagctgttctgggtttgggagttgacccaggtggcactttctccttggactgattctgcaggtgcagtgggactacatgtcttctgagactgtaagatgttcttttggggactgggattgctgcctgccttccccgagacgtgtgtgtgtgtgtgtgtgtgtgtgtgtgtgtgtgtgtgtgtgtccaacatgtgtgcagctggggccttaacccccttctttcccatcctactgttctcccactgaaagaggcagctaggttctaaagtgatccatc

SEQ ID NO: 525057 - DNA, 174 bp, Homo sapiens
ttcatgaagtcggagagtgaagaaatatgaacaggattcatcaagaactgtttcctcagccccaaggatcgcgtggggatgtttgaggcaaggccggcatgtttctgtggtatcccaatcacagacacaggccggatggggagccgcttggtggagtggtatagggtggtatag

SEQ ID NO: 525058 - DNA, 1050 bp, Homo sapiens
gatgtaggatagaatattgacatcagcatattggagataacagatcaatcgttcatatgatccgtgagttcttgccctgcactggatagaatagtgattggcgatttgcacacggtaaaaggtcagataggatgtgaacagtgccagatgtctatgaatctccattgaaagcacgctagaagtacgtatgttgacaccgttagagagataggggcggtgaacatcagtaagtacaaaagaactcgaaggtgatgcagtatacagtaggaggagcaagtgacatgtgaggtgtccccctagctgtattcatagagacatctcggtagcctagtgtggagttccgagtgagattcacgagtcatacgtaactatccaagagtttccctgtgaacaacgccgcgtacttccttctctaagaaaatttagaacagtattgtggtgagctatttggaaggaggtatgtggggatggtgttaaatgtgggtgaagtgactctttatgggagaagaatgattggttgaaggtcggcgaacaatttagtggccgtgttctaaggatcgaggtgtacattgtaaggaaggaaagaaaaaaagcaaacagttaagcaaacggagatggaagaggcaatacggcctggacgggacctaagcgcaaaaaagaagaacagtggcgagcgaaaacccaagacggaaggacaagagcaagacaaccaagaaagggagcaaaacaagaggaaggaacggaaacacggaaggcgtccacctgaaggaccgcaccgagcgaacaaaagaaacggcccgagaaggcacgaagggcggacaaaaacgaaacgaggaggaagaaacacagaaggacagaaggaaagaataaagaaggaaagaacgcacgaagaaaagaaaaaggaggaagcagaagaaagaaggtaacaacagagcgaaagccagaaaacaagatggtaccagcagacacatgcgaacagggcggcagcagacgacaagagaggcaccggagaaaaaacgacaacggacagcaaaaaacgaggaggagaac

SEQ ID NO: 525059 - DNA, 117 bp, Homo sapiens
  misc_feature (11)..(11): n is a, c, g, or t
  misc_feature (21)..(21): n is a, c, g, or t
  misc_feature (73)..(73): n is a, c, g, or t
tggacaggagngaattattgntgagtattagaggggggcagcacatggagcctcatgagtgcaggccgcactntcagagccagcatggatgtcatacccagacactgatgagccgtt

SEQ ID NO: 525060 - DNA, 292 bp, Homo sapiens
gttccttcagagctgtccagttccaactgttagttggcataaagatggcaaagaagttaaagcaagtgatagattaacactgagatgatcacatctctgcacaccttgaggttccaagagtgtccgtgcagatgccggaatttataccattacactagagataagctcgctcagcacagcctcatcatgtcaagtcataggcctacctgaccatgcaagtattaagcagtacatacaggtctgtagtactgggactcagattgatgtgacccattctcatatgcctggccag

SEQ ID NO: 525061 - DNA, 1729 bp, Homo sapiens
  misc_feature (24)..(24): n is a, c, g, or t
aagcagtggtaatcaacgcagagntgccattacggccggggcaggcagactcatgacggtcaggggtccacagcaccatcctaggccaaccatggccagaaacacccaacccacctaccacaaaaccacacacacactacaagcccggcgcaagcagcccggccaacacacaccccggactcaccaacgcacacacccacaaaccacaccacgaggacaaacaagaacgaaacagcacacacagagaacacaacaacacccacaacgcacacccctgcgcaccataccacgactcaccggacgcacccaagagaacacacaaatgcgcaagaggcggactcgacaccaacagcgaaaggcacagcaaaagagcaggcaggaacgtgaccgacacgacagccaacaccagcccgaaaagacacaataagcgtcaccgagctgagcaccgcggcgacgcaggacaacacgagcgcgagcagagacgtaaccacagtagcacaacaagagacgccagcaagacacagaggctacacacgcagcggacagcaacagcagacgccccagcgagagaacaccgcgaagaagaaaggagaaagcgagaaaacacacaacgcagagaagaagcgcacggacagcgcacaagagacgactacaacaaaacgcgaaagggagcgcacgagtgcagcacagaggagcagcaaacaaaacaaggagtacagcgagcgaccaacaacgcgaacaaccaagcggcacgaacacacagcgcacagcgacagcagagagaggagcgaggcagggagacggaaggaggatgcgggcgaacgagagcgggcgggggacagagagagaatagggagagagagacgccggaccggggcgcgcgagccggggggaagggagagagggggagacagggggaaggggacgcggcgaggagagcaaggaggacagggcgcggcgcggaggcgggacgagggagagtcgaagggcaacagcgcggaggagggcacgcgggaggaggggaggggccacaccaaggaggaaacgggaagagacaagaggagaggacggagaaagacggaaggaaggggagaaaacagagacagaggagacagaggagaaacgagagaggcgacggcgagcagagagagagaaagcacacaacgagaggcacgaggacacagaagaacgaacaccggcacgccagaaggagacgcacagagaccagaggggcgacaagaagagcaggaagcacgaacgcggaggtgcaaacgggacggcgcagcgaggagaggcgacgaacagcgagagaggacagcagacgacgagggagcagcggccgcaggacagggagaggaggggaaagcggaggaaggcgcgaagacgggagcgggagcgaggaggcaggaacggccggcggggagacagcagccgaacagccgaacgcccgcgcgggcacaccgacgcacgcaagcgacaaggcaggccgcgccgccaaacaagtatcacacagcgccgaccagccgacccacgcacggcccggacgcacaccgacgagcacgggagcactcgccatgacgactgtgagaccgaccgacggcgaccgcaacgggagcccggaccggaacgggaagagagaagcagagaagcgacgcaggcaacacacaacgagacacaacgcacgatcgaaacaggaaagaacgaccaggacgacgacacacgacaagga

SEQ ID NO: 525062 - DNA, 104 bp, Homo sapiens
ggggggccccccccccccccccttttttaaccaggggttcttgggccggggaaattttgccggctttgggatttttaaccctttaaataaattgggaaagggga

SEQ ID NO: 525063 - DNA, 224 bp, Homo sapiens
taacaattattaatattttttattgtaaaagccatcagacttttaaatgaattttaaaatttttcaatattatttaatgaaaaagtctcacactgttatgttttggatttttcaacattttctacttatttggcatgttaggaaaaacattattttttcacgcttgggaaaatcttaaacccatttttagtggatgtccggcattaatttaaaggggtgttttt

SEQ ID NO: 525064 - DNA, 171 bp, Homo sapiens
tgcacacgccgaagtccatacgcacacgccgagtcttttactttttttaacctttccttatgtagcatgcctgtgtgggcgttcggcgtgtgctgtatggagcttcggcgtgtgcagcaacaacttcgtccatcgcgacatgaagaagtgtgtgggccctcggcgtgtgca

SEQ ID NO: 525065 - DNA, 1446 bp, Homo sapiens
  misc_feature (507)..(507): n is a, c, g, or t
aaggatccccgaatgaaccgggaagtacacgacacacaatgatcttgacgctgtgtgctgcgtttctcagttgctcgtgttgttgttcattggattacccgcaatcctgttggttccatcttggcctcacgaattctttacgcgggacaatgtaatggcaactcattgtagcacgactcctggatagaatacgtgctgactcgacggatatcaggtgagtgatcatggtcaagccgctgttctacagagtgtatggaaatgtgcaacctatcactctcccgtatctagtctcaactgacaaaagtatcttgatgacgcgcttctgtacatttgtacccctaattctcgaggtacctgtgtgcacacttgtaccctctctgtctctctgtgcatctatagaacttcgcggagacggggtggcatttacatggtgctactacaacctatactagagcacgtccacgacgggcacattacaaggcgcaggagtttctccctacatgggcnacgccagcaatagtagtctcataccgttagtgggttgagtgcccccagttgcacacagaccttagccatgtactcgggcgcactcttagggcgcgggtcgagaattttgtggtccccactgactgctgggcaggttgtgtacattactcaggaagcatactatcgtcgccataaagccctacggtcccgttcctgcgctcacacggtccaacgtattgcacgcacttaaccgttttattggccctccctttatttttgagcaccacagcgcaggaacgtgggcattggcggtttctaatgctctacatagtttcgcacagaaatggtccctcggttttaacccaaagtggacccatggatgattgtcccggtcgagatgggttacctgagttattttgagcttagattcacgcatggttccgtagtagttccacccttccttgttatactacgtggttcacgggagaatctcacgcggctgaggaaggcgctttaacgtcacgcagaccaaaggaccccttaagaagctttgctaaggacttatggactaacggggcccaacggcttctggaacaaacttcttttcactttgtgggcgtgacacgaagcattgtcgttcacagccattgctctaatggggagaagacacacacatattcggaggcacatttggacgatatatcctctaacgacgtctattagcgctttgagcgatcactcttacacggcgctcacttgtgatatgcagtcactttgcgcgatccgatactatgcgccctgtgtaacctcctagtgggcaaggattcgtataggttcatcctgatagctgtgctacagaacatgtgaagtgaacaccgaatatcggggtcgtaccgacatggtgaattcttcccgaacagagttaccccaaccctatggagtgtcgcatcacgagtgtac

SEQ ID NO: 525066 - DNA, 333 bp, Homo sapiens
ctatatactatgattccttttactcagcacatcatgttcagctatacaagagaaaacgacaaggcacactaaagggccaaacaacatagttggaagagacagcaagcatcagaaccagatttagatatggcaagaatgatggaattactagaccaggaatttaaaacaactatgattaatatgctaaggcctctaatggaaaaaacagacaacatgcaagaaatgagaggtaatgtaagaagagagatggaaattctaaaaagagaataaaaatgaaatgctagaaatcaaaaacagctgcaacaaaaataatgtctgggatgggcttagtag

SEQ ID NO: 525067 - DNA, 365 bp, Homo sapiens
cgaccccttccccacagtgagtatatggtacctgccccttccctgcagccacgcagatgtatatcagtgtatgtgtgcacttccttatgtgatgcacttaggcacgcatagctttcagcgttctctgcctgtctcgctctgcatgtgcttctcgcgctccatatcattaattgctccatatcatatcattgatttgatatggggggacaggagggctacctgatggaatagctgtctcttacagcagatccttgttgtagactattggggagagtctcataacagtgacctcatcgacttgcgtctcgggtggtattgtatcagcacgcgacttttatagaaagtataccccgttaaagcccctt

SEQ ID NO: 525068 - DNA, 283 bp, Homo sapiens
ccccggggacgcctttattggctttcggccttggcaacgcccgttttcatggttaatggcccctaggggccaaaggccgaggccgcgcctgccccccggggggggttcctggttggccgggcccaggcggggggggacccggaggccgggcatccttttccagctcccccccccccttgcctttgggggggcgacaaacaatcgctccggggtcaggggtgggcggcttttcccttcattccatgggcccttttttgggcccaaaaaagggttttacccctta

SEQ ID NO: 525069 - DNA, 868 bp, Homo sapiens
gtggaagagctgaacatggggcagcccctggcgaggttggggcaggacgggcagggactgagattgcagtctcatcttccctccccttctattgccccagtaatctccatgcaccccgagggaggcatgagccggtgatcagtgccccgatgggcagcatggctgtgggtgttccgttggattcagtggagatgcattccgttcctgcaatgtcctaatttgtgtgggtggaagagtggcaggcgggcatgaatggtgggcacagtcttgggcagtgcggttggtcttggcgttagactttgcctgggagttagcacccagggctctgctcctgttccccgcagaagggcctgtactcacttgtcctccagcctcctacggagacttgcagttagttgatgctgaaagttgcctcccctgtgagggctaggaatgaaaagctatagagcaccttgttctctgagatcttaggcaaagcccatggcgctttagaggaacgaccacttggcctggcgagtcttaacagacctgttccctagtcttggattactgcatgtcggctctactgtgtcaccttgggagcagagtctcgtcaatcctccggcatgtctcagcggatttgcttccattcgtgtcagacacagcggcaggcaccaaggaggactgggcaatggtccacggcctcccttccgacgcaggattggcatggctgcaagcgcatccgcagacatggtggggcattacgggaaagcaccatggcgacgaacacagcacgaggcacaaggggcccagacacatacaagggcgccagacagagtgaagcacaagagggcaccacgacgtggcacgccgggcgaagcacagcgcg

SEQ ID NO: 525070 - DNA, 837 bp, Homo sapiens
aatcatgtcttcactgtaactgaccccaggaagcattctgtattaaccaacgaaacactctcgagagtgcgagacaaaatagtagatgattacaggctaggaattgttcctcctggtcttacagaatatgaatcgtgtagagcagaggacatctatgattacagcttttcatcctgtacactggtgagaaagatgattttgataggaagaatgtcagcccccagagttaacccatgaacatgaccatacgagtaggttgtatgtatgacgtatatacaggactacagccggctgtgctgttctggcagctggattgaaccagtccttcaatgccgtcgtgcaattacggccaacagaagtggacgacagcacccctcactgtcaatgagttgggaacgagcttacgtttctgcaacaactggtgccgatagcaacagctctaggactcaatgcattgaccaagcatgtctcaccactgataggacgtctgttccctttgctgccgtagctgctgctaattgcattaatattccattaatgaggcaaagggaactcaaagttggcattcccgtcacggatgagaatgggaaccgcgttgggggagtcggcgaacgctgtgaaacaagccatgcacggccaagtcgtcgtgtccaggattctcatggcagccctggcatggcatccctccattcattatgacactttggaaagaaagccttttgaagaggtcccatggatgagtgcccatcagttggctaaacggccccgagggttcgcaaccccgtgttgtgcccgttccccaaaagtccgtctgtaccgttggagcgttgcagaaaa

SEQ ID NO: 525071 - DNA, 126 bp, Homo sapiens
catatttaccacacaactcacgccacacaccacacactacataccacatacatcacacacaccacatacaatacacacaagcattccaatttctctacatcctcagacaaggagatccctctatga

SEQ ID NO: 525072 - DNA, 3774 bp, Homo sapiens
ggggaagtgaaacaccaggataagattttttcacatcgttattcttcgttgaggaagtaggggcataaggccgggtgcggtggctcacacctgtaatcccagcactttgggaggccaaggtgggtggatcatttcagcccaggagtttgagatcaccctgcgcaatgtggcaaaaccctgtctctacaaaaactacaaaagttagctgggcgtgggggtgcgtgcctgtggtcccagccacttaggaggctgaggtggcaggatggcttgaacctgggaggtggaggttgcagtgagccaagatcatgctactgcactccagcctgggtgacagagtgagaccctgtctaaaaataaataaataaataaaaaatgggggcagcaaaccagagactagaaaccatttcatatttgactagaaatatgcagcgatggtcgctgaggaaggtctgatgatgctggtacttctgcctacgcacacaatacagagaactatattaatccacatgtaaaagtgaaccctgtaaatatctcttgtctgaagtcctaagccaaaaggaattttcttgtaaccactaaaggatttttcttgtaatcttttacattgacataattttctagtatttattaaatccccatctgccaatggcagatccacttttaaaggagaaaagtacaagaggaaaaatcttttcaggaaagttacattaggtagtaaaattaaagtattaaaaattatatataaattcttccagctcatcacatcccatatagatggcaatcacatagtgttcacattctatacgttgaccatagctaaagtaaactgcaggtgtcctctttttacaaagaaatgttcttcacagaagtgcaatgtacatatttgattttcctacaccattagaaatgattctgcaaagcattctcagaagaattctatgcatatggatgagacagaatgagaagagtataatatgggtaaaaagtcaattaaatatattgaacactgaaaccgtattaatagtttggggtcaaaatcggagcagctattgcgtggagtttataaggaaccgtcctgggtccaatctccctccatattttctattaatagctctgaggatcctatgacaaatgcactaatcaatccacagaaaatgcagctctgggaaacattgctaatgctttggatgacaatattaaaattcaggacgatcttgttaaattgaagaaatgagccaaaatcaatagagcagcacacgcagttctgccaggtgttccacattgcaggatacagggagccctcgaacggaaaggaagaccagcctggtaggcgaaactccagctggtaaagctatccaactcctgttctccctctccctccctgacagccacaaggatatccagacaggtgtttagggctgtcatctacacatgatttaactccactgcctacagcttctcaactctttcccccagagcccagcagtgagggaagagagatgatgaatttcctttaatataagttgtagggcccacactgatgaatttagactttagaacatcacattagaagcaaaaaaaaaaaaattaggaaacaactaaagatttctaagtaggagtataatgacctcttcctaaggagtgtcataatatcttcctgacatttaaaaacatggtctctattgagaaaggggtaaggggagatgaagatgagggttctttaacaactcatttagctacccaaactctgagaaacctgagactttaagaaacttaaattcatcttttctttcagctacaacccttatccagagtcatccttaattacacttactttcttgtccccagttagcaagtcaataaacaagccctgccgctttcaccttctaagcagttttctgacctgcactctcttctccatcctctcccccgctgtcctagctgaagtcttcatcattctttacccagactgatacagaagccttggggggcctctctgcttctctattcctttagagccctccttcacaatgttgccaatgtgatccagaatgaaaacacaaatctaaccttgagttttccctgtttaaacatttcaataccttcagtgctcacagaatggggtttaggttttccaaggtggcatgcaaatttctgtggtggttttctaccaggagcaccatgagcacgcagtatgcggggcatttcttcatgtctcattggtaagcactgtgtgggggcatttctagatgtctcagtgtctgggtggcgctactggcccttcatgcccagggcctagggatactaagcatcctgcagtaatcaagacaactcacacaatgaactgtcccacctgaatttccagaggtaacaccattgggaaagggtcctcaccgttcctgctcatttctatatccttctagctcacttttctgcactgcagctacataactcttcttccgcaacacaagccatgcttatttcttgcatttataccttaattcttgctctatgtgtctttattaattctgatacctggaaagactcatcactttactgattcatagtttaagcttctgctctggtgtcatttcccaagaagcatctaacgcacatggtctgacttagatgcttcttcctgataaggcagtagtgctttcttattgtgatatgctctgtgctcagcagtttgctttaaaaccattagtgttctcctttactaaggttcattgggcagaaactgtaggcacttagtaggccttatatagacctatgaatttaaagaatggaaggaaggatggatggatgcatggatggaaggaaggaaggaaggaaggaaggaaggaaggaaggaaggaaggaaggaaggtaggaaggtaggaaggatggaaggatggaagaatggatgggtggatgggtgggtgaatgaatggttgggtgagaggaaaaacttctctgaggctgttttagtccaggtgcccataaaataatacaagcattattttatagctcaggcaacagttgaggtcaaagtttcggatcaggtcatctgtctttagttccagcattctatgatgtacaagtcactctatatccctcatcttcagtcactaaatacctctataaaatgtgccaggcagcaccctgcaaagtaattcacttacccatgttgaggattgtgggccacaaacagcactttgacaggcacttctgtctggcgattctgtgttcagtttgctcaagaactcagcggttttgctaccagaaacacaaacaggtgttagtgccttcacaaaaatatgaacataattctttatttttcctttggatactaacctagacttatttgggtgatgattaaaattatcttcagcagaacagaaagttacgttgagaacaaggtgtagcagaaatcaaaacaaaatgctattgcaagattgcattcttcaagaacaatattacaaaattataaaactagctttatgaaatgtgagcttatgacctcattttttccactttatattactgacataaatacaagtcctctcccagagcacattccacagcatgcagccctaatttcctatctgaacatttaatgcttaacactcagacttcagggtggagctgtggaacattcacgccctacaacatcctgcttcacaccagttttacattaagccctttaccctctcatctgcctcatggctttgaccactgttaggacacagagaccctctaatccagtagctcttttccatttatggatcattc

SEQ ID NO: 525073 - DNA, 435 bp, Homo sapiens
gtggacgaggtgataatcagcaaggagtacgtagtgtaggatgaagctccgcttccaacactcagacaatgtcttcgaccttgccgccgagcgagaacgattccctgtaactatcctggatcctgagtgatgcggagcgcgctgactcaggaagagtgacggcagtggcagtaacgaggatgaggaggatagtcaggatgcagaggaggaggaggaggccgatgaggaagatgatcaggaggatgatgaaggtgaagggggagatgaagacgatgacgaaggatggctctgagatggaattggatgaggattatcctgatatgaacgcttctccctatgaaccgatttgagcgcatagaacggaaaaatgctctcatcattgagtaggacaaacaatgagctccagagaaacagacatccccccatccaccaagg

SEQ ID NO: 525074 - DNA, 685 bp, Homo sapiens
ggggagacaaagacagacgcccgtctgcttcgggcctctggaatttagtcgctcgcccagactagactcagcaggaaattgactgcatgtccatgcagtgcaaacagtaaacattcaagagtgggatcctagaaagtctagagatcaggtactctgagcagatatgatgagacatgttgggagcctcttgattacagcaggttacaacccttgtaagaacacctagattcagtccacacaggagccctcctcaattaagtcacagcagcaggtccgttcgtcatacgacaggccgcactgtgtttaggcttgcgtatcgtcgtttcgaaccacagcgaacgtgcagaatgttgctttgggcagaccggcgggactaaacatctggcggcaacggagcagcccacgtcttcgtcaacggtagggcagccttgtcgggcttgcggtgttcacgcaacaatgtacccgtgcgacgcacaggctggcacctcgactcgaacgtgctagcatcgaaagcgaagaagtcatcgacaaagagtgcaatacctctggctcgtccttgtcgaatggccgagaggcaacatatggcgttcggggggcaatgcatccgcacgacatttaggctccctcctggcttgtgaagccacgggtcggctgggcatcttgcggcattggacaattgggcgag

SEQ ID NO: 525075 - DNA, 677 bp, Homo sapiens
aacatctagtagtagagaatatctggaagagagtgagaaccatgcacaacgcatgaccagccacatgcgatgtccagggactgcgtccataactctggtggaacgaatggatgaagaattaccaaaataatgcaaaatactgaccctcacacccaagagtacgtggagcactatgaaggatgaggcccaggagtgtgccatcatcgagcgtgatgcagcgcataccatggaggagaagggcaactaccgaggaggctctgccgaaatcataccgtgacatgcgcagtcctgacacacacatacatacaagtagcatacaaggcccactcagcagacagcatgaccccgacctgagggctcctcaaagtctgagcaagaccaggcagaaaatgagggcgaggactcggctgagatgatggagagacatgtgcaagataacatctacaccaaggaccgcaaaagaccaggatccgaaaaatgtgccatacatcggaccacatcatacacaacatgacctgacacatcgcgctggtaccaggaccgcaaacatcatggctcatgagaccacatagacaggacaacaatcagcatgacagaaccgaacaaagcagatcctataaaaaccgcaaccatggtgcagaggggcaatcatgtgcacatcacgacagggcagaaca

SEQ ID NO: 525076 - DNA, 93 bp, Homo sapiens
  misc_feature (65)..(65): n is a, c, g, or t
gatcctctagagtcgaaggtctctggagggacaaactcactcagtaaaacataatgtatcatgangaaaactgattctttatgacatgaaatg

SEQ ID NO: 525077 - DNA, 151 bp, Homo sapiens
gcacttcaggttctagaccctttaagtcatcaaggtaaatatcatcaggtccctggtgttggcttcttttgtgaacacctttcttctttgacggcgagtctacttatagctgccggtttggatgtgcagagggcgcctccgctaaggctgc

SEQ ID NO: 525078 - DNA, 1100 bp, Homo sapiens
cgggagctgagccagtgcttgactcgggtacagaacgaggcaccagtccccttgctgaacctgaagtggcctcgcagtggatgtgagtgatggcccatgccctgagtgtcaactgccaaccacgtgctagcctggcactgtgtggcctacatgtggtgtgtgtatggctgtggctgttgccgcagcctgtccaaggtgccttccctcatgtgtccctgtgtgctgatgtgtgtgccatactagctgctgtgacctgtgcaagcaatggccctgacatctggaaccctcagtgtgaccaaagaagccccacacctgatctgagaatgctgtgatcactttaccatgtggcccataagtgccatgtagacatacgtgcctggggccattgggggccttcaccaatctggagagcctgtgacatacgtgactgatgtggccccctgcggtgatgtgacacccatagtgtacgtacacgatgaacacccatatattcctcaatgatgccaagagaccaaggcaccagacccaacggagcacacagggaattcgcccacagactagttaggcgcaccataggacgcaaaggtgagctggcccacatgcaccatacacaccctttattgtctggatgtgcccccattctcatgtggtggcccaatggccatggccacaagaacagagttggagacttggagctacgaacaatggagcactccagtaggagtaggttcggccgagcatggaggtcaaccataacgttcgccgacattcacgtaaacagccagtcgggacgttccatttccctctgttcatcaggacaccatgggttgtgcgaaccaaccagaactgagatgaacattggcccccttgggagcaagtggtagcagacagcagcccactggatgagccatatacagacagttcaagtattatacccccagttaccagctcaaaaagacaatcatacggatggctgatacgtcctttagagggacgagccacatttgagaatccacaagacacccaatttgcggcaggcacctttggaaatcaggtgcatcgccacgcgacagactaaggaatacgttgagggaggaacc

SEQ ID NO: 525079 - DNA, 1214 bp, Homo sapiens
gagaccagccctcgtggcttggagagtgaatctggtttacaccggctccgtgccgtgccgttcactcttctcccctgattcaagactcctctgctttggactgaagcactgcaggagttgttgaccaagaacttcaagagtcaagaccagaaggaagccaagggagcagtgcaatggcatttctcgagtaacaggtcagcacatcagcagcacaggcaggtgcaccttgccccaatctgcctggcagctcctgacagaacctctgagcctagattgtgggccaacagctttctgcccaagccttgcatcactgcaaagcatccacaggagtcagtgatcatctccaagaggggaccagcagcttgtcctgttgtgtcaggaccagattcccaagctgggaacctccgacctaaatcgggcatctgggcaacatcagttggacgagccgtcaaagacggtcaccgatgagcccaccaggagcgggcagacaggagcgcatgtctggtgagacaccaacgggaaaacaaaacttccaggatctttctggtaacaggacggatgggcaacaacggtccattttgcatgggggatagtcgaacggtggtggtccagggacacaacccaatggtcacccaaaactattcccgggatcaaacgaggtgggtacacacgggaagttggtccactggcaacaaccgcttggaagggtaaagccctggccaagacggccgtgacaaacagggacgacttcaaccgaaggggttggagaacagccttgcgccggcattgggcctcaagaaccacaggacgggaacacccggtcggtggacagaaaatgatattcgccacagctatcgacgaacaaccgactacgattctggcaccacggggtccacagcacacagcaccccaggacaccatggggaccaaaggtgaggggccacaaccagaggctgggcacaagccggaccggcaagcggcaagggcaagcgtagcagggaacacacggcgggcgcgcacacgaccaagggtcgacagggaagcagcacacaaagacaacacagcacaatctaaacagcaagcgacggaggagctgaaaacacacgggagacgaagacagcacacacagaaagagagcaagacaacacaaccaagcaaaccacgtgcacaaaccgcaccacgacaccaagagagacacacgcgacggcaaccac

SEQ ID NO: 525080 - DNA, 138 bp, Homo sapiens
gtgagctgtggttagacgtcgggagacaggttagcttataaccctactgatgatgtgttgttgccatgggtactccgtgctcagtacgagaggaaccgcaggttacagaccatttggtgtatctagctcggcgagcct

SEQ ID NO: 525081 - DNA, 1204 bp, Homo sapiens
tggctgcccggacgcggagcgaaaggctgaaaaagtcggaaacactatccgtttccatccgtcgcgcaaaccctgccggacccgctgccgctagtggatgactcgagaggatctgtgggtgtaccaggcgaagctgtggccgagcaggctgagcgattacgacgaaatgtgggtggagctcaagtgaagaaagtaccacgggatggcatgtgcgacctgcacagttgaagaaagaaacctcctatctgtgtgcatataagaatgtgatgggagctagaagagcctccgtggagaaataatcagcagctttgaccagaagcgaagaaaccagagggaggagaagacaacgctaaaaatgatccgggaatatcggcaaaatggttgagcactgagctaaagtaaacctggtggtagacattctgggatcgtcactgggacaaacacctcattccacgcgagctaaccacttggcagaagccccaagggtatcacatataatacaaatgacaagggggactaccacaggtatctcggcagaacttgggccacacggaaacacgacagggacaggagggctcgcggaaaaaccacgccataaggggcctatataaagcgctcgaagcagaatatggacatgtgcccagacacttcacaccagggcaatccatatccagacacaagagccaggcccatcaaacaacacccgaacaccacccacccaaacagactctataaactatcccctcttgaaacccgagcgccattgccactgtttggcacaaacaacgacaagcgattcagtgaatgaatagcaaatgccggccacaaacctgggcaacacccgacgaggaacgtggcaaccaacacagctaactaagggcgcctttctcaccactaataatccatatgcacagataaagactacccgtttataatataagccttgacccccaccatcatgcgccctcactccgcaaacctttacacccggtgcatagtccggcagtcacaacaacaacccactatataaacacacaaccgactcttctactgcgacacacctttcacaacaatcacccacaccagctcctagtccgacaaccacattacatgccacaaacagcaacacaacaccccatgctacttgtaacaccaccccacatctctaccaacatacaaccccctattggaacaacctccacat

SEQ ID NO: 525082 - DNA, 223 bp, Homo sapiens
tcgtctttaactgcggtgtgggtcatatcgacctgccgcgcgccaaaaagggcggacggcaggaggacgtgcgcgatttacgttccgacgccatcgccgcagaagaatgccaatggcgttacaacacgccggatatggaaagcgcgctcagtaccaccctggccatggccgcgcttctgacacggatcgaacgtcaggcggaggaccggctgcgcatttgccg

SEQ ID NO: 525083 - DNA, 169 bp, Homo sapiens
tactgctgtcagtgacaggctggttgagtgggctggtgtgtgacccagtgccatcatggagctgggatgccacctgagttctacaaagaccttgtacctgccctgtgccctatcctgtacctggccgtccagtggtggcaccatgatactccacgccatgtgctgtgac

SEQ ID NO: 525084 - DNA, 248 bp, Homo sapiens
ccacagtgctggctgcacatttgactgcatcgtccctatgatggaggctgtcccagaaggagattggtcctgtactgtctgtttggctcagcaggtggagggagaattcactcagaagccctggtttcccaaagcgtggccagagagcggaacaagtggttattacgctgaacttctcagcagggtgataggcctgccgaacgccgatctacttgttagagatggcctgagaaacgtcccagctagca

SEQ ID NO: 525085 - DNA, 682 bp, Homo sapiens
gaaatgtttttttaaggtcgttagattcgttagacatagtataactaaggtaggctagtgtcgcttttgaatactttcaggaattgtaatagccaggaacaagaaaaaagacatgcgcacactaataagctacaaaaaccaacatatttatagtatcaaccgagagaggggcagatatgattcacgataaaaagttaataaaaggataacagcggcgctctaattcgttaatgaaaaccatagtccggtatggacaaaaactatttccttctttttttttttttaggtttttttttaatttgcacttgcaataatctaattcactgtaggagtttaaaaaaaaacatctagaaggattggaggaggtaagccattattatggcggtgctcttttagcgggaaaaaaaaaaaatacacctacgacgttaaaacagatcgtgctgtcgtctcagcggcagtaaaagtactgtagtagttacggagcacgcagatgcaatgctaattaaataatcatgctcccatttttaagaagcagaaaaaggccgcagtaatttgagccgtgaaaagatttcggagggttgattcttaacattttccaaaaaaatgtcctttggtctgtttgcttgggtctgaaaagaaggactgcagcgccacctccgctggttaaggacaaaatccatac

SEQ ID NO: 525086 - DNA, 864 bp, Homo sapiens
gctagaggatcattactggattgcagtcaggccataaggccccagcatccctgtatgatatctacctcaggatgactggaagaggcccaatggatgatgcaaacaataactgccgctcgttccgacaaagtctcagtggtcgtggctctggaatatatgccacaagtcacattctctggtggttcttgggacacctcacgtggcatgagatgtcacaagattgtttacatcgacatccaaagctagaaccgcgtagagaggatgcacacagatctgtcagatcattgattgtgcccggcagacgtgagcattggggtccccaataatctaagacgaacatcactgcttgggcatctcacgagagtcacgatattgcaatcgacgaaggtggtttgggtcgtgcctgcgagtcagaaacacctaattcttgcttgcaaggattggcggtagactagtaacaggtctgttggcttttgcactttaccatagttcctggttcgaatacgcatcgagtcgtggccgccactctagccatagggaagggatacacaagaaactgggcataattacaaatactcgtgcgtacctaatgatgcgtagcaggtcttggtggtaagaccaaccttgattgtgagcgataagggtctcgaacgccagttgcgatggccacctcattagaggaagtgagctcgagcaagacgctagatgcgatgtccacgactattctcaagacccgatgctcattaacctagtggggttgactcttacacaatgttctagaccgactgaaacccctgttatcccttgtcactctgcgaaaactgtggtaaagagaattcaaaccaacaaaagatcggagttgag

SEQ ID NO: 525087 - DNA, 418 bp, Homo sapiens
gttaataaatcctcaagtctagctggtttctaggtttcttttttcctgagccaaatgtatttccttattatttaagatagtctgaatttttgttgctttgttattgttgttctcacttaaacaaaccacctctgatatggtttggatgttttgagccctccaaatctcatgttgaaatgtgattcccagtgttggagtgagttctcactctgagttcatccaagagctggttgttgaaaagatcctggcatctgttttgttccttctcttgccatgagacacactggctccttttcaaattttgctatgattgtaagcttcctgaggctgccaaccagaagctaagcagatgctgttactttgcttgtgaagtctgcagaatgatgagacaaataaacctcttttctttctgaaaaaa

SEQ ID NO: 525088 - DNA, 913 bp, Homo sapiens
  misc_feature (2)..(2): n is a, c, g, or t
  misc_feature (48)..(48): n is a, c, g, or t
  misc_feature (73)..(73): n is a, c, g, or t
  misc_feature (83)..(83): n is a, c, g, or t
  misc_feature (86)..(86): n is a, c, g, or t
  misc_feature (156)..(156): n is a, c, g, or t
  misc_feature (201)..(201): n is a, c, g, or t
  misc_feature (212)..(212): n is a, c, g, or t
  misc_feature (216)..(216): n is a, c, g, or t
  misc_feature (247)..(247): n is a, c, g, or t
  misc_feature (295)..(295): n is a, c, g, or t
  misc_feature (331)..(331): n is a, c, g, or t
  misc_feature (351)..(351): n is a, c, g, or t
  misc_feature (368)..(368): n is a, c, g, or t
  misc_feature (378)..(378): n is a, c, g, or t
  misc_feature (381)..(381): n is a, c, g, or t
  misc_feature (385)..(385): n is a, c, g, or t
  misc_feature (392)..(392): n is a, c, g, or t
  misc_feature (406)..(406): n is a, c, g, or t
  misc_feature (424)..(425): n is a, c, g, or t
  misc_feature (438)..(439): n is a, c, g, or t
  misc_feature (450)..(450): n is a, c, g, or t
  misc_feature (459)..(459): n is a, c, g, or t
  misc_feature (476)..(476): n is a, c, g, or t
  misc_feature (481)..(481): n is a, c, g, or t
  misc_feature (535)..(535): n is a, c, g, or t
  misc_feature (543)..(543): n is a, c, g, or t
  misc_feature (553)..(553): n is a, c, g, or t
  misc_feature (571)..(571): n is a, c, g, or t
  misc_feature (593)..(593): n is a, c, g, or t
  misc_feature (689)..(689): n is a, c, g, or t
  misc_feature (882)..(882): n is a, c, g, or t
tntttacaaagagcttttaatgatgtggaagatggtggttaataagtnggaaaaaactggttataaatgatancacaatatgntgncaacgatgaaaaaatgcacaaaaaaagacttttttaaaacgtcgaaacatcagagtggtctctagttggnggaataattttttttttaagacaaacttcttcatactttttgtanttttaaaatgntttnctatgtacatggattacttccataatcaagnaaaaaagtaaaaacttttaaaatgctgtgaacgtggtttccttttttnttttctctgttgggtgactgcacatcagcatcttgngttatgctaactacttaggntggtcacgacacacacncacatacagngangtcncacaggntgtaccggggtggntgttgcaaatgtacatgnnttacacgggttgnngttgtttggcngctagttancatatgccacccaatgncgggncacaatctggtcacacgctgcctctcctgcctgttgctgttctttacaaaggtncgtgtgtngggctggcanagtggcatcctgctggcntctctgtggtggccccggaatngtggagtgcccaggtcagcatctactctgggtcccattctcaactgctctggccttgacatcagagcttccggttccctgctggctcttctgcacnctggatccatgccagtccaggccccctccaggcacacacctgaggcagactgagagcacaatggacgctgtcctgatgtgaactgtgcccagacacaggatggggggaagcgggagatgtgaccacgacaccacacacaagctcgatctttacagatgggccctctgggactgctatatgggtggtgcccganagacacgggggccatgtggagccctccaggg

SEQ ID NO: 525089 - DNA, 294 bp, Homo sapiens
cggcggccacagcttctcagcaccacattacacttattccattatactgaccgacatagttgggagtatcgctctcttcaccaatctgtacaagatactatgagaatcacaagcagactgtctgctcagactacgatgctgtctgattagaactatgaatttagaaactcactctataccgcacaactacattgatactgagcaacctgttcctgaatgactattgggtgcattgcataatgaaggcagaaatgaagatgttctgttaaaccaattagagcaaagacgcgatat

SEQ ID NO: 525090 - DNA, 136 bp, Homo sapiens
gattgacagatggctaaggagctgatactttgacagtgtttttagacctgtgttactatgaaaaagatgaatgtcctgaaaagggtgtggggaggggggttcagaaagaaacaagatgtttggtgttagatttatg

SEQ ID NO: 525091 - DNA, 764 bp, Homo sapiens
aaatgaaccctcatgatcttccccaaagaaaccttagtttcccggtgggtaactcaccattcgggaattaaactaccaccattggtctggggggcgattcgtttcgaggccctttttcgtattattcaaggacatgttcagaaagaaattgatttaattatgggccctaatggaaagcctcttgggaccggcaatgcgaaaatcccttatactgaggcagtttgcaatgaatttttaagattctgtaaattagttccattaggcatttcccatcgaccctctcaagatacacctgtacgtggttattccttcacaaaaggcgccacagtaattccaaatctttattctgtacactttgataaaaagtactggagagacccaaaagtgttccatcctgagcgatttctggacagcagtggatattttgccaagaagaaaactttggttcctttttccctaggaagaagccattgtcttggagaacacttggctcggatggaaatgttcttgttttttacagcattgcttcaaaggtttcatttgcattttccacatgaactagttccagatctgaagcccaggttaggcataccattgcagccccaaccctacctcatctgtgctgaaaaacgctgaagctgcctggtatgttttcgggatcaagaatgtatatttgccttatccctgaacttggtttaatcaaatcaatgtgtgtattagaataaaagtcacagcatcagaaagccgaaaaaaaagaatcgccg

SEQ ID NO: 525092 - DNA, 1296 bp, Homo sapiens
tttttctctttttgcttgtggctcgccttttttgttgttgcttctgtctctgctttttctgtctcctttctgttttttctgtttgttttcttttctgtttcttcttcgtctcttttcctctgcttctgtttcgctgtgctgctgttttttcttttttgtttaggtcctgtttgtgccgtgttcttctctgtttcgtcttgttttgttttttttttttttttttttcgtgggggggggggggggggagaggggagggaaagaggagagaaaagaagaaaaaaataatatgtttttggtggttgtgtagcatctattgtgttgtgtatgttgttgggacacctttggtgcaccagtggtgtgggtgttctccagttggtcgcccctgttttatattggtgccgggttctccccttcagtttggggtcttttaatgttttttgggggccccaatttgtgaaatgtgggccccccgcggttaagtggttctccctttaagggttcccctccgggtgccacgaagaccctgtgtgcccaaaggtccttctcagggtaaaattgggggaaaactttgggcccccctctgggagaccccgcgtttcttttgaatctagaaattgtctgcccagtgggaaacccgattatatgtaggccctctggggaaaagtcataatctgggatcaaatggaatggaaatttgggatattccctggaggattcgggacctctggggtccccaaaccctcacattggattgagaggccttccctgcttgtatgggggggacccaactgccaccctcgcgatggggactctttttgagacccgagtacttcacaggacccgttcccacacccccgcgtcaatcactcaatcttctctttacacccccaaaggttttgccgcggtgtggtaaactgttttttttgcgccctctttggggtggagaaaggtggaatagtgatgagaagcccataaattcacggaacttattcctcttttgttttgtgttttttttttgcccttgcacccacgagtatgaaatagcttccacggagctccacgctataagcttggagagtgtctgtcgtgattgtaatcaccactggtgagccacacactccagagaatctaaaattggagcttctgttgtaattctcaccccctccatattgttttttacaccgtttaatggggaccttttagagtcttcccttttgttggaaatagatcctcccccttccaatgctgtaattaaccaccacctttaaaaacttggataaaatattggaacctcca

SEQ ID NO: 525093 - DNA, 1128 bp, Homo sapiens
agctcttcttcattctcaccctgatccctgggggactcaaagccaaaactgcccaaagaggaaagatttgaatcctaaaggtgtgatccttgcccccatgggatggccctcctacgtagaatgtgactgctgaaatgcatgcttttttgtgtggtgaacacttgatgtgcagctggtggaatgacagatgcacgaatgatgccctcaccctgtgctggtgtggtccatgcacatgtgctgtatcttgcatgatgtggtcccagaggaacgctggagccaagagaagccctgggaaggaggggtggggaacgacactgcactgctgacgggcatggcacactgatgtgttctatgcacctgtacacaggagcgcactggccatggccttcggaaacggcacgcacacggacacaatacgaagaacggtcggccgggcttggctggcttaagcctgtaaccccatgcacttatggcgaggccgagcgtggcgcggatcacctgaggtcagcgagttcgggaccagcctggcaaacaccccatctctactaagcgaaaacccatctctactaaaattacaaacacattagctgggcatgggttgcgcatgcctgtaatcccagctacttttggaggctgaggtgcggagaattgcttgaacctgcgacgtggaggttgccgtgagcccaaggtcgcgacactgcaactccagaccggcgtgacagcagtgagactccagtctcaaacacgaacgcgccacacacccggacacctacgcagcaccgtcggaaatgggctacccacgcacgaagaccccactaactgcatgaccaaccccacctaccggcgggcccccatggggcaaaatgaacaactctcaacaaacccaacggcaccaaccgtctgccaacgcgacgacacccacaccatcgaagaacgcggcatgcccaacccgagccccccaacggtgcccgttacgagccccccagaggcgaccactactaacactccgcagaccgtcgcaccccagcggggccacaccgcgcgacacaaggcggacaaagccactacgcacacaccaaaaccagacggcgcgccgcgcacaacacacgcgcaccagacctaccctca

SEQ ID NO: 525094 - DNA, 956 bp, Homo sapiens
  misc_feature (16)..(16): n is a, c, g, or t
  misc_feature (35)..(35): n is a, c, g, or t
  misc_feature (51)..(51): n is a, c, g, or t
  misc_feature (582)..(582): n is a, c, g, or t
  misc_feature (700)..(700): n is a, c, g, or t
  misc_feature (712)..(712): n is a, c, g, or t
  misc_feature (862)..(862): n is a, c, g, or t
  misc_feature (867)..(867): n is a, c, g, or t
  misc_feature (870)..(870): n is a, c, g, or t
  misc_feature (876)..(877): n is a, c, g, or t
  misc_feature (944)..(944): n is a, c, g, or t
tcatctgtcatacccngcttaattgtagcgaggcngggtggcgagcgcgtntgacctcgctgctccagcctctggggcgcattccaaccttccagcctgcgacctgcggagaaaaaaaattacttattttcttgccccatacataccttgaggcgagcaaaaaaattaaattttaaccatgagggaaatcgtgcacatccaggctggtcagtgtggcaaccagatcggtgccaagttctgggaggtgatcagtgatgaacatggcatcgaccccaccggcacctaccacggggacagcgacctgcagctggaccgcatctctgtgtactacaatgaagccacaggtggcaaatatgttcctcgtgccatcctggtggatctagaacctgggaccatggactctgttcgctcaggtcctttttggccagatctttagaccagacaactttgtatttggtcagtctggggcaggtaacaactgggccaaaggccactacacagagggcgccgagctggttgattctgtcctggatgtggtacggaaggaggcagagagctgtgactgcctgcagggcttccagnctgacccactcactgggcgggggcacaggctctggaatgggcactctccttatcagcaagatccgagaagaataccctgatcgcatcatgaataccttcagtgtggtgccttcacccnaagtgtctgacnccgtggtcgagccctacaatgcaccctctccgtccatcagttggtagagaatactgatgagacctattgcattgacaacgaggccctctatgatatctgcttccgccccctgaagctgaccaccccaacctacggggatctgaaccaccntgtcncanccaccnngagtggtgtcaccacctgcctccgtttccctggccagctcaatgctgacctccgcaagttggcagtnaacatggtcccc

SEQ ID NO: 525095 - DNA, 988 bp, Homo sapiens
  misc_feature (16)..(16): n is a, c, g, or t
  misc_feature (35)..(35): n is a, c, g, or t
  misc_feature (51)..(51): n is a, c, g, or t
  misc_feature (614)..(614): n is a, c, g, or t
  misc_feature (732)..(732): n is a, c, g, or t
  misc_feature (744)..(744): n is a, c, g, or t
  misc_feature (894)..(894): n is a, c, g, or t
  misc_feature (899)..(899): n is a, c, g, or t
  misc_feature (902)..(902): n is a, c, g, or t
  misc_feature (908)..(909): n is a, c, g, or t
  misc_feature (976)..(976): n is a, c, g, or t
tcatctgtcatacccngcttaattgtagcgaggcngggtggcgagcgcgtntgacctcgctgctccagcctctggggcgcattccaaccttccagcctgcgacctgcggagaaaaaaaattacttattttcttgccccatacataccttgaggcgagcaaaaaaattaaattttaaccatgagggaaatcgtgcacatccaggctggtcagtgtggcaaccagatcggtgccaagttctgggaggtgatcagtgatgaacatggcatcgaccccaccggcacctaccacggggacagcgacctgcagctggaccgcatctctgtgtactacaatgaagccacaggtggcaaatatgttcctcgtgccatcctggtggatctagaacctgggaccatggactctgttcgctcaggtcctttttgggcccccccaaaggggaaaaaatttttccccctccagatctttagaccagacaactttgtatttggtcagtctggggcaggtaacaactgggccaaaggccactacacagagggcgccgagctggttgattctgtcctggatgtggtacggaaggaggcagagagctgtgactgcctgcagggcttccagnctgacccactcactgggcgggggcacaggctctggaatgggcactctccttatcagcaagatccgagaagaataccctgatcgcatcatgaataccttcagtgtggtgccttcacccnaagtgtctgacnccgtggtcgagccctacaatgcaccctctccgtccatcagttggtagagaatactgatgagacctattgcattgacaacgaggccctctatgatatctgcttccgccccctgaagctgaccaccccaacctacggggatctgaaccaccntgtcncanccaccnngagtggtgtcaccacctgcctccgtttccctggccagctcaatgctgacctccgcaagttggcagtnaacatggtcccc

SEQ ID NO: 525096 - DNA, 334 bp, Homo sapiens
  misc_feature (38)..(38): n is a, c, g, or t
accagactgatgcaatggcatggtctcggctcactgcnaaaccccgccccccgggctcaagcgattctcctgcctcagcctcttgaatagctgggactacaggcacgcaccaccacagtcggccaatccttgcatctttagtagacacagggtttcaccatgttggccaggctggtctcaaactcctgacctcaagtgatccatccgccttggcttcccaaagtgctgggattacaggcatgagccaccgtgcctagcgtgtggaggcttttaaagggcaacagtatttattcctatgatgttaccatttttttttttttggaaaatggattct

SEQ ID NO: 525097 - DNA, 139 bp, Homo sapiens
ccgagattgtgccactgcactccagcctgggagacagagcatcgactccgtctcaaaaacgaaacaaaacaaaaaattttaaaactcaaccatcctagaactgaagtttcttctgcaccttctccgcgatcgaagtgtg

SEQ ID NO: 525098 - DNA, 399 bp, Homo sapiens
  misc_feature (16)..(16): n is a, c, g, or t
  misc_feature (326)..(326): n is a, c, g, or t
  misc_feature (357)..(357): n is a, c, g, or t
  misc_feature (393)..(393): n is a, c, g, or t
gtcatttctttggtancgttatctgattataagctgttagaagccactaggcacttcttgaatgtcttactgcttagaaatttcttctgccagataccctaggtcatcactctgaagtgcaaacttccacacatccctagggcataaacacagtacagccaagttcttcgccagggtgtaacaggggtgaccattactctagttcccaataacttccttatttccatctgagatctcagtctggacttcactttccatatttctatcagcgttttggtcacaaccatttaaccagtctctaaggaagttccaaactttccctcatnttcctgtcttcttctttggacctccaaactncttccaacctttgggccattaaccaggttccaaagntggttt

SEQ ID NO: 525099 - DNA, 414 bp, Homo sapiens
atgatgacgacaacactggttactttcgtgactccgcccagtgccctgtccgtccgcctgcagtgacatactgcggctgatcaacggagctggctaaactatgactacatggaacgaacacgtaatcttaactgaaaaagatctgctagaagatggttttggagagcaccccttttaccactgcctggttgcaaagatgtgtcactagcgcaggatgccggactgggtaggcaaaagggggtgagggcatgcctctatagtacgcaatgaaccgttgatagctaggtactggtctctcgaggacatcttacgtgatgagtgattatagaggctttggcataggctcagaaattctgcagcatctaagccaggtcgccaggaggtgtcgctgcagcagcagtgcaacttcttgga

SEQ ID NO: 525100 - DNA, 715 bp, Homo sapiens
  misc_feature (478)..(478): n is a, c, g, or t
  misc_feature (592)..(592): n is a, c, g, or t
  misc_feature (608)..(608): n is a, c, g, or t
cttcattagtcttgctagtggcctatcaattttgttgatcttttcaaaaaaccagctcctggattcatttttttttttgaaagtttttttatgtctctatctccttcagttctgctctgattttagttatttcttgccttctgctagcttttgaatgtgtttgctcttgcttttctagttcttttaattgtgatgttagggtgtcaattttggatctttcctgctttctcttgtgggcatttagtgctatacatttccctcgacacactgctttgaatgcatcctagagattctggtatgttgtgtctttgttctcgttggtttcaaagaacatctttatttctgccttcatttcattatgtacccagtagtcattcaggagcaggttgttcagtttccatgtagttgagcggttttgagtgagattcttaatcctgagttctagtttgactgcactgtggtctgagagataagttgntataaattctgttcttttacatttgctaaggagatctttacttccaagtatgtggtcaattttggaataggttgtgtgtggtgcctgaaaaaatgtatttctgttgattttggngtggagaggtctgtanatgtctattaggtcccggttgtggcgctgagtccattccttggatatccttgtgactttctgcctcggtgtccggttcatatttgccggtgggttgtgcctccattt

SEQ ID NO: 525101 - DNA, 240 bp, Homo sapiens
ttgctgaatcctcctaagctctcaggcaggagtgacgtgttctgattgctaggctagtccaagccactctgagcctagtgtcctgcagactatgactgaggaacatggtgatgttcccaaaagaaactgggagtcttgcagaaaaaaggtgcatgatctagcagacggggcgaagtgccactcagagagaaggagagcttgtctttggatttctgtacacatgcatgcacccaggtggta

SEQ ID NO: 525102 - DNA, 298 bp, Homo sapiens
gcagctagaacagcctggtcaggagcgtaacggaggtgcgccaaccgtgagaggaaacccgctgcgcggctgctttttcctgtccccaagccgttctagacgcggccaggagtaggatcaccatcaggaagagttctgacacatatgccataattgagcaaagaaacatgtgaattcatgtattggccagacataatgaaaactgcgtgacatgaaatacaaaatcctatataaattattctgagagtgcacctgacatttttttttttttttttttttttttttttttttttttttt

SEQ ID NO: 525103 - DNA, 421 bp, Homo sapiens
  misc_feature (421)..(421): n is a, c, g, or t
agactgttgattatgatctacaatccacagggacattgcaacactgtgcctattatagagggccagatctgtaaggctatgcacagctgtaaagctccgtaagagaaccgagccggacccttcaggcagccttgctgggcacaatcacatctacaacgttcatgcgaccagcaaggcatatgtgctgatgaagttcgtgaatctgctcaatcatgtcgtacgcatgagctactggatacatgccgcagtaaacgtcgtacccgctatggagtctacccgtgtacacaacacacgctgctgactatcacagtggtaacggctgcatctggtggcatgacgctatagtggaagacgctgcaggaacaagttgcacatggattacctaccctagcctggctactgccgtctaggctgcagagcn

SEQ ID NO: 525104 - DNA, 420 bp, Homo sapiens
accaagaatatccaaagcaacattgaaaagaacaaagttgaagaatcgatagtagctgaatttaagaatcaatctaaagctacagaagccagacagcagggactgcaacagcagtcaataaacggatcaatgagcagaactgacaattcaggaacagacacacacttacatgacgatttgtttttcaacagaagtgtcaatgcaatccaatggtgaatcttccaaccaatgacacaggcacaactgggtatctgtacaccccagactcagtcacgatgaaccacagacctaaaggctaaaccgatcatgcttaaaagaaagaaatttagatgaatatcttcacagctttgggattggagaaagtatcttaggacatgaaaagcaagaacatatgagaaaaatattcataagttagatttc

SEQ ID NO: 525105 - DNA, 313 bp, Homo sapiens
agagttctagcagatcacacgcctatatcagttcctcaaatatctttaacatttggtggaaagaaaagcatctatactggcacctgcgtacacagaccctttcttatcttccctttacagatctcagaagttggttgacacaaaaacagttcatacagcatggtaggcagaattctcaaatgatcccaatgactcactcccttgcataatccccttgagtgtgggtggaacctataacttgcttctagccaacagaatatgacaagggtgatgaaatgtcactcttgggattgctacattatgtaagactcta

SEQ ID NO: 525106 - DNA, 905 bp, Homo sapiens
  misc_feature (21)..(21): n is a, c, g, or t
  misc_feature (905)..(905): n is a, c, g, or t
ctttgactactgattattgangtccgtcttagacattatagggccgattttgttgctaacagcacacccgtatttcagcctgctcagacagtggttctctgtgtaggttgttcaacagagttgagccaacctacaggaggaaaggccagactcacagaagggtgtccatttacaagagagcgcactaatgatcaaaacagctcgctgaatgtccaccgttagtgtcgtctcacagatcgccttcccatctatgccataatgtctattagagtaccagcccccctcacgtccgattatgttcagtcaggcctatcacccgaaacccctacgaccgagacaaactccccacaatgttgtcgacggtggtctaatacagtccttcatggaccgagttagcgtctgggggaggaatatcacacacccgacactccagcgcacgcgccgcacctcacccttcgcttacgccacagcaacaccaataacgacccaaatctgcagccgccatgaactgactatctatgaaacaaaaacccgactcacagttgaccctcaatcaagcatcacataaatatcaggtgtatcgaacactacggcgcgccggctaagtccacaccacccacgacactaacaccccccactctatcaaatcgcgttgcctccgccggacctgcttactaagaacatcagcaaaaacgctatcccggcgggccggttagatgcggtaagagtgtcggaggtattagaacaggacctatcacagcaacacaaaccccgccgcctcgacggtacacgcaactcactccaggtaatgtcagtaggacgccacgttatctcttgttccagatcccgtgtcccgcgtccatcccactccaacgcttacgacagccacatcgacgcccactacn

SEQ ID NO: 525107 - DNA, 235 bp, Homo sapiens
ccggcacgctaccttcgcatcgcagaggaggaggacttgcacggacgtcactgtggcagcctggtcctcaacgcaatattcgagacacacagaacctcatgccaccctctttctagtggtgcagaaccctggccccacaactccacagcccacactctccgtcatcagggactacctcggttccaaaaactacagaaacagagcccagcagatttgcacaggatgagctgcgggt

SEQ ID NO: 525108 - DNA, 895 bp, Homo sapiens
ccacgtgttacaatagccatgtactatgctactattccttgattgtccccattctaatcactatgtcattcctatgtgtttaccgaacgacatacaatgctaagtgatatacacttacgtctaagggcccgaatcgtttgatagagctcccgtacgggtgcgtactatcacacccatatcggcgtgacagccagtaaaaacttgttcatcaaagatcccctaatgggccgtcacaatctactcggtgggtttgcagtctactgagggttggtttcctctaaacctacgatagaaggaaaacaccatgaattcttatagagaataggtaccagctcgtagaatgggttgcatgtgatccatgtatgtagtccctagatctcctggcagaaccaagggactatgttgtccccactatgtaataaggtgaccggtgttgtcagctgctggaaccaaatgctaaacatgacctatgagattccacggcgatggaaagtcacccgataaggatggaaatgccaggtgggaaccacgctgcttgaggctcatggactgcatcctaaccacaagctcgtccaactgacaagacccttgcgcctgccctctccaggatgtctacacacaattggtggtatagcgtactagtcctgcttggcccgagtgcgacgaacctgcgtgttcctcaaaaccccggtatggaacggtcaaccctttggctccagtcaacgcttacaacccggcagctacacatcctgtacgaaattgccccattgacgcctttgagtcgacactccttcctggcgaaccattgtgcgccccaactgtcccagcaatgtgtctcgcacagatgtcccacacgccaagttcgacgccgacttaaacgccccccatctgaacc

SEQ ID NO: 525109 - DNA, 259 bp, Homo sapiens
  misc_feature (58)..(58): n is a, c, g, or t
gggggatgtcacgttgacagagacactaatgcttgtagtgtcaaggctttcagtaaantctcctgcagtctcttcactctcagttctagtttcctggattcagagggaggcttgccatctttaacatttccagctctgcttcagtttttattcagccaagtagtgatggcgctgattcagagttcagctgtagcaaatttgtttattttgagcttattgtgaagctcctgtgcgtgaaccatctccggcttacgggtac

SEQ ID NO: 525110 - DNA, 437 bp, Homo sapiens
  misc_feature (351)..(351): n is a, c, g, or t
aagtgctattgtcaaaaaaaaaaaaaaaaaaaaaaaaaaaaaaagtgtgtgtgggccgcgcccgcgcggccccgcgcgaagaagcgcttttataaacacccattgcgcgtgtggggcgcggcgggggccccggggggtaagggaaacagtgggccatagaggtggttctccacataggagagaatcgcggggccaagggacacatgaggggcggggacttcccaaaccaaaataaagaaaagcgccgcgggggggaacaaacgcgaggcgttctcgtgaaacaaaaatctcaagagagggaagtatcaagagggaggcgacaatatagacggggagagctcatatcacaancgaggagagtgtccaaaacggagaggcgcgcgcgagatatatctcaaatattcacgcgccccgggcccggggggcggaaaaaccag

SEQ ID NO: 525111 - DNA, 904 bp, Homo sapiens
aaacacaaaggacttattttccattccaagtagaacgcgttttctccctcatttacccccgccacacgacgatggtttcctattttatacaacgggttattctccccctgctcgtgcgccgatatgtatgttattagcaactagtccccgccgcccccttctttggacaacatttttctgttgagcgcccccctagtgcttcaccccaaacacaattaatggatgtccactcgtcaacacactccttcaggctgtctagctagtaagaaatagtcccactcacacatctctatccccccccccccctatacgaaggtattgtctgcatcactcacccccgggagggaaaaaccccagcttatttgtaaccttttctactaggccccccctcctcagctagctttcccttagtatttctgtagggcgactcttgcggaattgtccgcgggttgttacatacaccaccccgcctgttgctcagaccctggccgtatattatcttattggttctcacatctgcgcactccgcaccgcccctggttgctaacccatcaccgttgctactgcccccgcacacaccttgtgtgggcagagggacgcagggggaggaggtaggaaacaaccagaaggctccaggaggtgcaggaacaccgccctcgcgcacacacacacgcaggcaaacaccgcactctgtacgtatacagagaaccccacaatgtacccccgcggcatgcagggaggtcagcacccactgatgcccccaagacccaccgcgaggcggtaggaggctccaaaaaagtcaaaatggcgaaccccggggggccacgaggggccccctaaccccggggcaccccccctcacccccccccggggcccgggtcgggactccttcccccacataaca

SEQ ID NO: 525112 - DNA, 478 bp, Homo sapiens
tttaatttagcaattgaaagaagataattcagtgcagattctgaagaaatcactgattttatcccagtggtagcttgaagatttcatgcaattaatatttacacactatcaacaaaaggttcattaattttaattgaaggttatttatcatcaggtagatatcaaaaagatgatggaacaaatgtctttactttagatgttgttgtagattcttttagatctttagaaacaaaagaacaattagaacaaagaaaaaagaaaaatgtttctgatacagcaaaaccttctttgaaaaacacttcagaaacagttaatgaacccacttttatcaatgcaaatacttcaaaagctgaaacaatttctgacaatctagcaccaactaatgaatttgaagatgaaactgaggaagatgatgacgatatattcattgattgaaattttagtcctatggaaaaataaaaaggaattattatgaaca

SEQ ID NO: 525113 - DNA, 1011 bp, Homo sapiens
aactcacaagagcattagttcgcctatcgcgcccagtccgttacatgggaggctaggtgacattagtgactgaccttacctagaagcagatcaccgtcgtactgcaatcattgttcggacactctcgtccagcagtggaagaagaaccgccaggcgtgatacagagccgtactgtcgtagattttccgagtatggcagtgcatagtggatattcattgatcacttgaactcagagcctgcgagaactaagtcgtacccactaattgtcaacattaactactccggcacggaaatagaacgcactttgtgactatcagtacggtataggtgctgacgctagtgagtattcaagttgtgcattcctagggttggatcctgtgatgcacgatcgcatgatatttacaggtagagaactaagacgtacgacagctacgacgcgatagtttcataactccggctatccataactgcatcggctaatcccgcactcgggcgtcgaacgtatttagctgagttcgccacactcgcacgggaagcaattatggaaactggatctgagctgcaagatgcatctggaagccctagggatatcatctgtcttttcaccgtaggtgggctgacttggcgatggtattagcaaactcagtcagtaggacatcgtactacagcgacacgtactacgtggtagggtcacttgccactatgtcctattcagtaggagctgtatttgccattcataggagggcttcattcacttgatttcccctattctcaggctacaaccctagaaccaaacctaagccaaaatcccatttcactatcatattcatcgcgcgtaaatctaaacgtttcttcccaaaaacagtttcttcgggcctattccggaaatgcccagagtaaataactaacgggatatgggccacaataagttaccccagtaatcgttaaactaattccttaatacccaataaaaatttgtagagcgcaaaagtacgaccgtaactcccatac

SEQ ID NO: 525114 - DNA, 400 bp, Homo sapiens
gtcgacggggatataggtagttgtatacctttaaagaaacagaagtatacagtttgcctatttggtcaagacgaatactccacataaatttataccataactaaaataatcctgaaagaaacacttggttcacattatgaacctttaagggtctaaaaaaatggaccaagaagaagaaaccaagaaataccagagaaagagggaggaaggaatggggagaaaaacacccagggagacaggcagagaagataagggggattgccgaggcagagacttaagtgctagaggttcctttcaattctggtgaacagttaccaagccatctatgtgcccagcagggtgtgtgaatatgacacaatttccgccttcaaaaaaaacttatgttctggccaggggtgca

SEQ ID NO: 525115 - DNA, 147 bp, Homo sapiens
tagtcccgatctgcgagatttcttaggttgtaaaagtgtacatggtgcaaattcccagagagcactacaatattcaaaagaaaaaaaaaacctgctaaaaatactaaatgtctgtgctgtgaccaaactaccatgaccaaattacca

SEQ ID NO: 525116 - DNA, 143 bp, Homo sapiens
agaagcaaagcaccccatctctgggaggcattataatggacggtcttcagagttcggggaccacgtctagcagattctcagcaatgctgatggccacaattcaagagcaggggcccggcctcctgggttctttgctgaaatta

SEQ ID NO: 525117 - DNA, 396 bp, Homo sapiens
  misc_feature (50)..(50): n is a, c, g, or t
  misc_feature (388)..(388): n is a, c, g, or t
gaaacgatactgatacatttttatattaatactaaaatacatagtttgcnttagggttcatactttgtggtgtacattctgcgggttttgacgaaggtatggtggcatatattcattgttactgtatcatgtagaatagttttagtgccctaaaaatcccctttgcgtcacctctttcattttcccctctccctgaacaccaggcaatcactaatctttttctgtgtccacatttttgccttttccagaatgtcatgtagttagaatcatctagtgtgcggtcttttcagagtggcttctttcacttagtaatatccttttaagattcctcaagtctttccatggcttgatagctaatttcctttttattactgaatgatattccccntgtatgac

SEQ ID NO: 525118 - DNA, 184 bp, Homo sapiens
tcatgatagaatcgagctggtaccgccaacatggtgaagcctcccgagtgggtgggactgcaggcgcccgccaccaagcccggctagtttttgtatttttagtggagacggggggcttcaccatgttggccaggatggtctcgatctcctgacctcacgatccactttcttggcccttatcgag

SEQ ID NO: 525119 - DNA, 140 bp, Homo sapiens
acggcttacgcggctgactgagggtatgcttgtttcaccttctgtggacaaggagctgcacaggaagccgtgaaattgtgtgacagctatcacattcgccctggtacacaccttggagtgtgcatttctgtggcaaacaa

SEQ ID NO: 525120 - DNA, 409 bp, Homo sapiens
  misc_feature (94)..(94): n is a, c, g, or t
agcatttgctctatgcttgttcaagtgctaatcccaggcttttttttttagttaaaaaaatttttttgtaagccccctcccccctgacatgganatattttttgtaagagacagggtctcagctgggcgcagtggctcatgcctgtaatcccagcactttgggaggctgaggtgggcagatcacgaggtcaggagatcaagaccagcctggccaatatggtgaaaccccatctctgctgaaaatacaaaaattagctgggcatggtggtacatgcctgtattaccagctacttgggaggctgaggcgggagaatcacttgagcccgggaggtggaggttgcagtgagccgatatcgtgccactgcactccagcttgggcaagagtgagacttcatctcagagaaaaaaa

SEQ ID NO: 525121 - DNA, 339 bp, Homo sapiens
cgtcgaccagaccctggtcaactaagtaggctacgagagcctcggttgccgaccagtaatcggttcctgctggcatggccatgaaacggtcgggggagagcatcgacataagtaacgacgagttggccccggtgagctgaaggtcgacgtgaccacgcaggtttaaccttgacatccggctgatgagttcggcgggatcaaagacctggccgagctgaatgactggaacgtcgccgaaggcaagggccgtgatgtcgacatcgggggtggcgacgacgagatccgttctggccagcgtcgactcgtctgcctcgtcgccggtcagcatgaggtacttgg

SEQ ID NO: 525122 - DNA, 522 bp, Homo sapiens
cccatctattgctgcaattgttggtactgtaagattagcaatatcgttaatcactgctcttattttggagacaaaaggaccacacctattggaactcattttggctctttccttaaggtcagcaccagcacagaatatccctgggacttcactcctgattattatggtccgtactttcttatcagatttcaaagcatccacagcttttgatagcattttgataagatttttactgagtgaatttttgccataagctctgtttattccaagcaccacaattcctcggttctcctcctccaggtgccgcacctgcagctcgtcctcagtattcatctcagagtctgtagcccttttcggggcgggtacccccgcacgcaggtgacccagtcctgggtcccagttacgccgggcgccgctcgcccggtcctgcacagacgaagccagggtcaagccctacaaacccacgggacagtagcccacgctactgcatagcggcactaccaggccgggcgaccgccacag

SEQ ID NO: 525123 - DNA, 230 bp, Homo sapiens
gagcggtccagaatagctcctagtgctgtgtattggagaggagaagacagagacttgactttgaggcctacctgtaccaccagtgcggacttgaccccaggtttgtgttcctggacagcgtcgtttttcctgtttcgaaatcagtattacaattatgtcactgtttgaggccccagggagggattcatcaaattgatatgcaatggaggctgttaaacaagggttcagcc

SEQ ID NO: 525124 - DNA, 324 bp, Homo sapiens
ttaatagaaatcccaagcaaagtgctaaatgtgatgaggagtgctcagaggaaaggctttaaaagcagatactggagagtagctactgctgcaggatagggtaggcttcatgggaggaagtgccatatgaaattgaccttagaggatgtctaggattaaactaactgaaccagggcaggcgcttgtaaagattaaatgcaacataagcaaattcctggggtccatagtgggtgtttttaaaaaggcagttaataataataacgctctagtatccaaataactatgacagttgttagtacttccctttttatttcttttcctggc

SEQ ID NO: 525125 - DNA, 142 bp, Homo sapiens
ttcgtcttgcgatctgagcgcgccgtcgtctcctgttctatgtgctgccctggtgtgctggcgatcacgctcgtgctggccgtgttcgtggccagcctggcttcgctgcccttgcggggcatgctgtccgaagccatggcga

SEQ ID NO: 525126 - DNA, 258 bp, Homo sapiens
accggatagagcggctcatggatgtttctctacattctaggatggagactaagaaattagttttgactttgtggcatacctagatagaaaaagttaatgagggccacaataaaaacataacgcaaacaaacagaaacaaaaaccagcaacaacttatgaaaccttctgacatccagaggaaccctcatccccttctcggaggagaggaactcaaggtgctcacagtttctccgggattgggtcctcttcctcttcctg

SEQ ID NO: 525127 - DNA, 246 bp, Homo sapiens
acccacagccaatttctcaatgcccgagagccgatccggtgggcagcctgcaccacgatggccgtcacggcgggcttgatcccataaaagagaccggctaccacggcgtacttcaccgatatgcgatgcacatccacgacagcacgatcagaatgaacagtgaaggcagcacaaaaagcaccccggcgataacgcctccccaagttcgatgcatcagccagccaatgtaagttgccaactgctgcg

SEQ ID NO: 525128 - DNA, 636 bp, Homo sapiens
  misc_feature (87)..(87): n is a, c, g, or t
  misc_feature (169)..(169): n is a, c, g, or t
  misc_feature (389)..(389): n is a, c, g, or t
  misc_feature (444)..(444): n is a, c, g, or t
  misc_feature (517)..(517): n is a, c, g, or t
  misc_feature (530)..(530): n is a, c, g, or t
  misc_feature (617)..(617): n is a, c, g, or t
tcctccccgccctggtgctgctccaggtcacacactcgtcctgagccggcttcagctctccgcacagaagtctcccggagccatggnctagtactcttatgtgaagtctaccaagcttgtgctcaagggaaccaaggcgaagagctgggtcctgcagctccagcggganctcctcagttcttttcggatgcactccacccccgcgaatccggtggaagccgtggtgcggagagcaggcttcgtggcctcccaggtttcgcggcctcccaggtttcgccctgaccctgtctgggctggacggaggctggaccgcggttcctggcgcctgtgcagagaggggcagcctcccgcgcggacgaccctgttaacaggatagatgggcgggtgancgtggccccgtacccacgagtttgggtccgctgaggcatctctcccggcctctgnctgggtgggtctgcgtttgtctgatcttgtagttcatgataataacttcctttactagggattattctttctncattgtctcttcntggaaaaattattgattattttttctaagctagtatgtagagtgaaccaggatgaatcaacagtggttaagtgtataaagctttganaggatatgggctggaactg

SEQ ID NO: 525129 - DNA, 260 bp, Homo sapiens
  misc_feature (20)..(20): n is a, c, g, or t
  misc_feature (138)..(138): n is a, c, g, or t
  misc_feature (166)..(166): n is a, c, g, or t
aagccgcaagcgggacccgnccgcccccgtgccccacctcgggggacgtcagagggccccaacccgcccggatctgcgggcgtccagtctcacggcccgggcgacggtccccagcggtgaccccgcgccaggacccgncctccctggccccaggccgctgtgggcncggggctggcctccgtccctcaggtctccgggaaactgaacccgggcgcgcgcagataagagcgctgacggcgctgccgctcccgggcgacgta

SEQ ID NO: 525130 - DNA, 335 bp, Homo sapiens
actgcggtggtcctaactgtcattgagaccacttgtcatgtgttaactgacacaatgctttgatttgattgtttcacagtacaatataagtaaaactatcaccagagtaactgtaatccatacagaattcttttacctgtaaatgcctttcccaatggaggggcaacagattgagtgattgtagagtctggtcaggaagactcatgtcttctagaggaatggatgcctctatcaccctttgtgcccaagctgctgctgtcagagaatgacacagcacctgcacagtcgctgtccacttcctgccactgctgtcggttgtgtgactggagcaaagt

SEQ ID NO: 525131 - DNA, 300 bp, Homo sapiens
cctacgcacacgagaacatgcctctcgcaaaggatctccttcatccctctcagaggaggagaggaggaacacacgagaacgtctggtgcagagccccaatttcctaattcatggatgtgaaatgcccaggatgttataaatcaccacggtctttagccatgcacaaacggtagttttgtgtgttggctgctccactgtccttgccagcctacaggaggaaagcaggcttacagaggatgttcctcagaggagcagcataaagcactttagtcagatgagtggaaccattaataaccattt

SEQ ID NO: 525132 - DNA, 325 bp, Homo sapiens
ccactgatgagggttggtgcagccccggagcatattgcagcggacatcccagaagtgggtgtttcccttgtcagtgggacgaaagcttggctccaaacgcatccgggctcagggaaaaacatggcctgctattgcagaataccagcgtgcattgcgagagaacgtcgctatgggaacctgtatctaccagggaagactctgggtattgtggtgctgagcttgcagaaaaagaaatatgagctcaaaatgcgctgtgagagctacagggaatcgctattactcctgtcccttctgctcaatttccttccctcatcagggggggggt

SEQ ID NO: 525133 - DNA, 884 bp, Homo sapiens
  misc_feature (38)..(38): n is a, c, g, or t
  misc_feature (64)..(65): n is a, c, g, or t
  misc_feature (70)..(74): n is a, c, g, or t
  misc_feature (149)..(150): n is a, c, g, or t
  misc_feature (154)..(154): n is a, c, g, or t
  misc_feature (159)..(159): n is a, c, g, or t
  misc_feature (161)..(161): n is a, c, g, or t
  misc_feature (168)..(168): n is a, c, g, or t
  misc_feature (170)..(170): n is a, c, g, or t
  misc_feature (178)..(178): n is a, c, g, or t
  misc_feature (180)..(180): n is a, c, g, or t
  misc_feature (185)..(185): n is a, c, g, or t
  misc_feature (203)..(203): n is a, c, g, or t
  misc_feature (207)..(207): n is a, c, g, or t
  misc_feature (222)..(222): n is a, c, g, or t
  misc_feature (226)..(226): n is a, c, g, or t
  misc_feature (267)..(270): n is a, c, g, or t
  misc_feature (275)..(275): n is a, c, g, or t
  misc_feature (284)..(284): n is a, c, g, or t
  misc_feature (286)..(287): n is a, c, g, or t
  misc_feature (289)..(289): n is a, c, g, or t
  misc_feature (303)..(303): n is a, c, g, or t
  misc_feature (322)..(322): n is a, c, g, or t
  misc_feature (340)..(340): n is a, c, g, or t
  misc_feature (355)..(355): n is a, c, g, or t
  misc_feature (361)..(361): n is a, c, g, or t
  misc_feature (372)..(372): n is a, c, g, or t
  misc_feature (377)..(377): n is a, c, g, or t
  misc_feature (382)..(382): n is a, c, g, or t
  misc_feature (384)..(384): n is a, c, g, or t
  misc_feature (421)..(421): n is a, c, g, or t
  misc_feature (425)..(425): n is a, c, g, or t
  misc_feature (435)..(435): n is a, c, g, or t
  misc_feature (470)..(470): n is a, c, g, or t
  misc_feature (486)..(486): n is a, c, g, or t
  misc_feature (503)..(503): n is a, c, g, or t
  misc_feature (539)..(539): n is a, c, g, or t
  misc_feature (544)..(544): n is a, c, g, or t
  misc_feature (558)..(558): n is a, c, g, or t
  misc_feature (633)..(633): n is a, c, g, or t
  misc_feature (646)..(646): n is a, c, g, or t
  misc_feature (679)..(679): n is a, c, g, or t
  misc_feature (692)..(692): n is a, c, g, or t
  misc_feature (700)..(700): n is a, c, g, or t
  misc_feature (714)..(714): n is a, c, g, or t
  misc_feature (716)..(716): n is a, c, g, or t
  misc_feature (729)..(729): n is a, c, g, or t
  misc_feature (736)..(736): n is a, c, g, or t
  misc_feature (741)..(741): n is a, c, g, or t
  misc_feature (753)..(753): n is a, c, g, or t
  misc_feature (760)..(760): n is a, c, g, or t
  misc_feature (766)..(766): n is a, c, g, or t
  misc_feature (771)..(771): n is a, c, g, or t
  misc_feature (775)..(775): n is a, c, g, or t
  misc_feature (782)..(782): n is a, c, g, or t
aaaaaaaaaaaaaaaaaataaaaaaaaaaaaaaaattnaaaaaaaaaaaaaaaaaaaaaaaaannaaaannnnnttttttggaaacaaaaaatagaaaaaaaaataaataacaaaaaaaaaaaaaaattttcaaacacccaaaccccannatcnaatcnanacccagnanacccttangnatgcngccctctaccaggaagcnagangcctaggagcttgcnatcnatatttatttgaaaaggtcaaaaggagcatctatgaaattnnnnagggntgcaggttntnntngcgcctcaacagcnagggaaatgtaggcaacangagcaggcacagcgcggncaccactgtccacangctcanacaagctaggnccgcnggttncnggagagctagcaggttacattcaggcagatggccctnttcncacccaaacncatagaaccccaaacaaggcatcaccaggaaaganacgggaaagccaaatnaaagtttaaccaggganagagaacccttggccccactgatgtccaaagccacnagcanctgcttccaaaatncctatgctattaaagtgggaattacatcatttaaaaagcctgattattccaggcttctaatctttcatataaaantgcctttgttttnctgctttgttcaattgagaggcccaggaaattngggagggtccctnattagggnaggaggccacctcngnagcccaggcccancagtacnaaagnaaatgttagggntcagaanaaggcntcaancaanagggttnatggcctccagtcaagaaactgtggctcatgccagcagagctctctcctcctccagcaggcgccatgcaagggcaggctaaaagacctccagtgcatcaaca

SEQ ID NO: 525134 - DNA, 702 bp, Homo sapiens
tgctatacgtaaaggatatatagctctgattcagcagttgtaaaaagtgctgaacataggggccaggtcactggtcagttcatagtatggaatgggagaagtgaaagttcagatatagaactttccatacttccaagtttactgcaagtattatgctatgcagagagatagctattctaatataagactgatgtgtgattttactcgacttgtactgtacatctattaaagccttagattattacattacgggtaggaacccataccaatgtcaattctcaatcgtgttaagaaagtaatggtgacttcacatgtattagtagttagttacattatacgaatattactgtactttacttgttaaaatgtagtaaaatcatatcctacatttattagatattttcattaatctattaacaattgaataccattttcagtttatagacttgtacacattagattgaacccaatgaattaatcaaaatacaaaaaaaagtagttatttccttcatcacatactcagtattgaattacatgtagtgtcaatgaatattcgtatagttaactaaatgattatatatatatgataaaatatacacagtgtaagaatgtcagtccattgtagttctagtctagtatacattaaaagaaaaaaaatctaaaaatggatatctataaaatatataaatcattgtaggaaaa

SEQ ID NO: 525135 - DNA, 3903 bp, Homo sapiens
gtcctacgactatctggaggtgcgcgacgggcacagtgagagcagcaccctcatcgggcgctactgtggctatgagaacctgatgcataagagcacgtcagccactctgctcaagttcgtctctgacgaggacagctatattgtgttcacctatcgaccttgcggctcgggaccgcccccctgagctggccccgccctccaggtgctgctcctacgtgggtcgccgcggcgggggcccccaggccatctccatcggcaagaactgtgacaagttcggcattgtggtccacgagctgggccacgtcgtcggcttctggcacgaacacactcggccagaccgggaccgccacgtttccatcgttcgtgagaacatccagccagggcaggagtataacttcctgaagatggagcctcaggaggtggagtccctgggggagacctatgacttcgacagcatcatgcattacgctcggaacacattctccaggggcatcttcctggataccattgtccccaagtatgaggtgaacggggtgaaacctcccattggccaaaggacacggctcagcaagggggacattgcccaagcccgcaagctttacaagtgcccagcctgtggagagaccctgcaagacagcacaggcaacttctcctcccctgaataccccaatggctactctgctcacatgcactgcgtgtggcgcatctctgtcacacccggggagaagatcatcctgaacttcacgtccctggacctgtaccgcagccgcctgtgctggtacgactatgtggaggtccgagatggcttctggaggaaggcgcccctccgaggccgcttctgcgggtccaaactccctgagcctatcgtctccactgacagccgcctctgggttgaattccgcagcagcagcaattgggttggaaagggcttctttgcagtctacgaagccatctgcgggggtgatgtgaaaaaggactatggccacattcaatcgcccaactacccagacgattaccggcccagcaaagtctgcatctggcggatccaggtgtctgagggcttccacgtgggcctcacattccagtcctttgagattgagcgccacgacagctgtgcctacgactatctggaggtgcgcgacgggcacagtgagagcagcaccctcatcgggcgctactgtggctatgagaagcctgatgacatcaagagcacgtccagccgcctctggctcaagttcgtctctgacgggtccattaacaaagcgggctttgccgtcaactttttcaaagaggtggacgagtgctctcggcccaaccgcgggggctgtgagcagcggtgcctcaacaccctgggcagctacaagtgcagctgtgaccccgggtacgagctggccccagacaagcgccgctgtgaggctgcttgtggcggattcctcaccaagctcaacggctccatcaccagcccgggctggcccaaggagtacccccccaacaagaactgcatctggcagctggtggcccccacccagtaccgcatctccctgcagtttgacttctttgagacagagggcaatgatgtgtgcaagtacgacttcgtggaggtgcgcagtggactcacagctgactccaagctgcatggcaagttctgtggttctgagaagcccgaggtcatcacctcccagtacaacaacatgcgcgtggagttcaagtccgacaacaccgtgtccaaaaagggcttcaaggcccacttcttctcagaaaagaggccagctctgcagccccctcggggacgcccccaccagctcaaattccgagtgcagaaaagaaaccggaccccccagtgaggcctgccaggcctcccggaccccttgttactcaggaacctcaccttggacggaatgggatgggggcttcggtgcccaccaaccccccacctccactctgccattccggcccacctccctctggccggacagaactggtgctctcttctccccactgtgcccgtccgcggaccggggacccttccccgtgccctaccccctcccattttgatggtgtctgtgacatttcctgttgtgaagtaaaagagggacccctgcgtcctgctcctttctcttgcagtctgcttgtccatgtgtctatttttccacttgtccatctgtccagtaagcaggtaatggtgacccatgctggtccgctcggacccccatcctcctctccccacagctgggccctgctcagctggtcctgctggatgcagtgcccctttggacccccttgtcgcctggcctcccactcccggccacctggcctggccagctctgccagctgttgctctgtcccggtgggagaaagtccagccaggcctccacttcccctggggcatcccaacctcagccctgcacagacccagcgtctgcccttatttgctcccctgcagacaaggacgagtgctccaaggataacggcggctgccagcaggactgcgtcaacacgttcggcagttatgagtgccaatgccgcagtggcttcgtcctccatgacaacaagcacgactgcaaagaagccggctgtgaccacaaggtgacatccaccagtggtaccatcaccagccccaactggcctgacaagtatcccagcaagaaggagtgcacgtgggccatctccagcacccccgggcaccgggtcaagctgaccttcatggagatggacatcgagtcccagcctgagtgtgcctacgaccacctagaggtgttcgacgggcgagacgccaaggcccccgtcctcggccgcttctgtgggagcaagaagcccgagcccgtcctggccacaggcagccgcatgttcctgcgcttctactcagataactcggtccagcgaaagggcttccaggcctcccacgccacagagtgcgggggccaggtacgggcagacgtgaagaccaaggacctttactcccacgcccagtttggcgacaacaactaccctgggggtgtggactgtgagtgggtcattgtggccgaggaaggctacggcgtggagctcgtgttccagacctttgaggtggaggaggagaccgactgcggctatgactacatggagctcttcgacggctacgacagcacagcccccaggctggggcgctactgtggctcagggcctcctgaggaggtgtactcggcgggagattctgtcctggtgaagttccactcggatgacaccatcaccaaaaaaggtttccacctgcgatacaccagcaccaagttccaggacacactccacagcaggaagtgaccactgcctgagcaggggcggggactggagcctgctgcccttggtcgcctagactggatagtgggggtgggcggaaggcaacgcaccatccctctcccccaggccccaggacctgcagggccaatggcctggtgagactgtccataggaggtgggggaactggactccggcataagccacttccccacaaacccccaccagcaaggggctggggccagggagcagagcttccacaagacatttcgaagtcatcattcctctcttagggggccctgcctggtggcaagagggaatgtcagcaggaccccatcgccatccctgtgtctctacacgctgtattgtgtatcaccgggggcattattttcattgtaatgttcatttcccacccctgctccagcctcgatttggttttattttgagcccccattccaccaccccagtttcctggggcacaagtgtctgtgcatgtcccccaggagccaccgtggggagccgatggggaggggatggagaaacaagacagggcttctctcaggcccagtggccggtcagccacaccagggcaccgcagccaataaaccgaaagtgttacagccaaaaaaaaaa

SEQ ID NO: 525136 - DNA, 3117 bp, Homo sapiens
ggagatctccccttctttgtgaatcactcagcccttcaccctggggtgaggctgtaaggtagctggtggtctccagaggtaacaggacccaggcccatgcagtgaagggcaggagtggagttgagcaggggagacagggaggtcagagtctggctggagcaggcccatggatcctcactcccggcctgcctgctgggccggacaggggataggcaggaaggcaggatgcccacggccgagtccatgctgccttccttctcccctccttcgcccagggtcctgcatcctcaagccccctctgtggctgccctgcacccctgcctgacccccggatgccatgcacctgcccctgcactggctccctgcttggcactgccagccaccctgctctgcttacagtggcccgttgacctcctgcccccaacccccgcttgctgagaccctccccatgccaggccaatttcttccttccctgtgcccacctgggactcctaagaggtgctcaccagagggttgagaggatgtaacacccactcggggcaggctctgccccgggaaaccattacctgcttactctcgtctcttcctgcccttctgttgctccagtcttggagggggcaggggaccgacactcacatctatcaggcctggagttactgctctgcccccatgccctggtcgacactgtgcccgccccaccctcagccctgcacggagacacacacgcccacacgcacacacatgtgcacacacattgccccatcgcacaagaaacctgcagaggacccccactgggggcatcgaggctcagccctcagggcccggggcatctgactctggccccccaggaggggagctatttggacttttgggacacccaccgaggagaccctaagccaagaaggagaagaaagagcctgaagaccttcagtctgacccctgccaccttccggggcatttgggcactgtaggaaaagaggccagctctgcagccccctcggggacgcccccaccagctcaaattccgagtgcagaaaagaaaccggaccccccagtgaggcctgccaggcctcccggaccccttgttactcaggaacctcaccttggacggaatgggatgggggcttcggtgcccaccaaccccccacctccactctgccattccggcccacctccctctggccggacagaactggtgctctcttctccccactgtgcccgtccgcggaccggggacccttccccgtgccctaccccctcccattttgatggtgtctgtgacatttcctgttgtgaagtaaaagagggacccctgcgtcctgctcctttctcttgcagtctgcttgtccatgtgtctatttttccacttgtccatctgtccagtaagcaggtaatggtgacccatgctggtccgctcggacccccatcctcctctccccacagctgggccctgctcagctggtcctgctggatgcagtgcccctttggacccccttgtcgcctggcctcccactcccggccacctggcctggccagctctgccagctgttgctctgtcccggtgggagaaagtccagccaggcctccacttcccctggggcatcccaacctcagccctgcacagacccagcgtctgcccttatttgctcccctgcagacaaggacgagtgctccaaggataacggcggctgccagcaggactgcgtcaacacgttcggcagttatgagtgccaatgccgcagtggcttcgtcctccatgacaacaagcacgactgcaaagaagccggctgtgaccacaaggtgacatccaccagtggtaccatcaccagccccaactggcctgacaagtatcccagcaagaaggagtgcacgtgggccatctccagcacccccgggcaccgggtcaagctgaccttcatggagatggacatcgagtcccagcctgagtgtgcctacgaccacctagaggtgttcgacgggcgagacgccaaggcccccgtcctcggccgcttctgtgggagcaagaagcccgagcccgtcctggccacaggcagccgcatgttcctgcgcttctactcagataactcggtccagcgaaagggcttccaggcctcccacgccacagagtgcgggggccaggtacgggcagacgtgaagaccaaggacctttactcccacgcccagtttggcgacaacaactaccctgggggtgtggactgtgagtgggtcattgtggccgaggaaggctacggcgtggagctcgtgttccagacctttgaggtggaggaggagaccgactgcggctatgactacatggagctcttcgacggctacgacagcacagcccccaggctggggcgctactgtggctcagggcctcctgaggaggtgtactcggcgggagattctgtcctggtgaagttccactcggatgacaccatcaccaaaaaaggtttccacctgcgatacaccagcaccaagttccaggacacactccacagcaggaagtgaccactgcctgagcaggggcggggactggagcctgctgcccttggtcgcctagactggatagtgggggtgggcggaaggcaacgcaccatccctctcccccaggccccaggacctgcagggccaatggcctggtgagactgtccataggaggtgggggaactggactccggcataagccacttccccacaaacccccaccagcaaggggctggggccagggagcagagcttccacaagacatttcgaagtcatcattcctctcttagggggccctgcctggtggcaagagggaatgtcagcaggaccccatcgccatccctgtgtctctacacgctgtattgtgtatcaccgggggcattattttcattgtaatgttcatttcccacccctgctccagcctcgatttggttttattttgagcccccattccaccaccccagtttcctggggcacaagtgtctgtgcatgtcccccaggagccaccgtggggagccgatggggaggggatggagaaacaagacagggcttctctcaggcccagtggccggtcagccacaccagggcaccgcagccaataaaccgaaagtgttacagccaaaaaaaaaa

SEQ ID NO: 525137 - DNA, 4316 bp, Homo sapiens
  misc_feature (4153)..(4153): n is a, c, g, or t
  misc_feature (4156)..(4156): n is a, c, g, or t
  misc_feature (4162)..(4163): n is a, c, g, or t
  misc_feature (4174)..(4174): n is a, c, g, or t
  misc_feature (4176)..(4176): n is a, c, g, or t
  misc_feature (4219)..(4219): n is a, c, g, or t
  misc_feature (4311)..(4311): n is a, c, g, or t
gaaaaagaaggaaagggagagggagacggctggagcccgaggacgagcgcggagccgcgggccgagcggggggcgggagacaggaaggagggaggcgagcagagggaaggggaagaggtcggggagcgagggcgggagcggtcgcggtcgcgatcgagcaagcaagcgggcgagaggacgccctcccctggcctccagtgcgccgcttccctcgccgccgccccgccagcatgcccggcgtggcccgcctgccgctgctgctcgggctgctgctgctcccgcgtcccggccggccgctggacttggccgactacacctatgacctggcggaggaggacgactcggagcccctcaactacaaagacccctgcaaggcggctgcctttcttggggacattgccctggacgaagaggacctgagggccttccaggtacagcaggctgtggatctcagacggcacacagctcgtaagtcctccatcaaagctgcagttccaggaaacacttctacccccagctgccagagcaccaacgggcagcctcagaggggagcctgtgggagatggagaggtagatcccgtagccggcgggcggcgacgtcccgaccagagcgtgtgtggcccgatggggtcatcccctttgtcattgggggaaacttcactggtagccagagggcagtcttccggcaggccatgaggcactgggagaagcacacctgtgtcaccttcctggagcgcactgacgaggacagctatattgtgttcacctatcgaccttgcgggtgctgctcctacgtgggtcgccgcggcgggggcccccaggccatctccatcggcaagaactgtgacaagttcggcattgtggtccacgagctgggccacgtcgtcggcttctggcacgaacacactcggccagaccgggaccgccacgtttccatcgttcgtgagaacatccagccagggcaggagtataacttcctgaagatggagcctcaggaggtggagtccctgggggagacctatgacttcgacagcatcatgcattacgctcggaacacattctccaggggcatcttcctggataccattgtccccaagtatgaggtgaacggggtgaaacctcccattggccaaaggacacggctcagcaagggggacattgcccaagcccgcaagctttacaagtgcccagcctgtggagagaccctgcaagacagcacaggcaacttctcctcccctgaataccccaatggctactctgctcacatgcactgcgtgtggcgcatctctgtcacacccggggagaagatcatcctgaacttcacgtccctggacctgtaccgcagccgcctgtgctggtacgactatgtggaggtccgagatggcttctggaggaaggcgcccctccgaggccgcttctgcgggtccaaactccctgagcctatcgtctccactgacagccgcctctgggttgaattccgcagcagcagcaattgggttggaaagggcttctttgcagtctacgaagccatctgcgggggtgatgtgaaaaaggactatggccacattcaatcgcccaactacccagacgattaccggcccagcaaagtctgcatctggcggatccaggtgtctgagggcttccacgtgggcctcacattccagtcctttgagattgagcgccacgacagctgtgcctacgactatctggaggtgcgcgacgggcacagtgagagcagcaccctcatcgggcgctactgtggctatgagaagcctgatgacatcaagagcacgtccagccgcctctggctcaagttcgtctctgacgggtccattaacaaagcgggctttgccgtcaactttttcaaagaggtggacgagtgctctcggcccaaccgcgggggctgtgagcagcggtgcctcaacaccctgggcagctacaagtgcagctgtgaccccgggtacgagctggccccagacaagcgccgctgtgaggctgcttgtggcggattcctcaccaagctcaacggctccatcaccagcccgggctggcccaaggagtacccccccaacaagaactgcatctggcagctggtggcccccacccagtaccgcatctccctgcagtttgacttctttgagacagagggcaatgatgtgtgcaagtacgacttcgtggaggtgcgcagtggactcacagctgactccaagctgcatggcaagttctgtggttctgagaagcccgaggtcatcacctcccagtacaacaacatgcgcgtggagttcaagtccgacaacaccgtgtccaaaaagggcttcaaggcccacttcttctcagaaaagaggccagctctgcagccccctcggggacgcccccaccagctcaaattccgagtgcagaaaagaaaccggaccccccagtgaggcctgccaggcctcccggaccccttgttactcaggaacctcaccttggacggaatgggatgggggcttcggtgcccaccaaccccccacctccactctgccattccggcccacctccctctggccggacagaactggtgctctcttctccccactgtgcccgtccgcggaccggggacccttccccgtgccctaccccctcccattttgatggtgtctgtgacatttcctgttgtgaagtaaaagagggacccctgcgtcctgctcctttctcttgcagtctgcttgtccatgtgtctatttttccacttgtccatctgtccagtaagcaggtaatggtgacccatgctggtccgctcggacccccatcctcctctccccacagctgggccctgctcagctggtcctgctggatgcagtgcccctttggacccccttgtcgcctggcctcccactcccggccacctggcctggccagctctgccagctgttgctctgtcccggtgggagaaagtccagccaggcctccacttcccctggggcatcccaacctcagccctgcacagacccagcgtctgcccttatttgctcccctgcagacaaggacgagtgctccaaggataacggcggctgccagcaggactgcgtcaacacgttcggcagttatgagtgccaatgccgcagtggcttcgtcctccatgacaacaagcacgactgcaaagaagccggctgtgaccacaaggtgacatccaccagtggtaccatcaccagccccaactggcctgacaagtatcccagcaagaaggagtgcacgtgggccatctccagcacccccgggcaccgggtcaagctgaccttcatggagatggacatcgagtcccagcctgagtgtgcctacgaccacctagaggtgttcgacgggcgagacgccaaggcccccgtcctcggccgcttctgtgggagcaagaagcccgagcccgtcctggccacaggcagccgcatgttcctgcgcttctactcagataactcggtccagcgaaagggcttccaggcctcccacgccacagagtgcgggggccaggtacgggcagacgtgaagaccaaggacctttactcccacgcccagtttggcgacaacaactaccctgggggtgtggactgtgagtgggtcattgtggccgaggaaggctacggcgtggagctcgtgttccagacctttgaggtggaggaggagaccgactgcggctatgactacatggagctcttcgacggctacgacagcacagcccccaggctggggcgctactgtggctcagggcctcctgaggaggtgtactcggcgggagattctgtcctggtgaagttccactcggatgacaccatcaccaaaaaaggtttccacctgcgatacaccagcaccaagttccaggacacactccacagcaggaagtgaccactgcctgagcaggggcggggactggagcctgctgcccttggtcgcctagactggatagtgggggtgggcggaaggcaacgcaccatccctctcccccaggccccaggacctgcagggccaatggcctggtgagactgtccataggaggtgggggaactggactccggcataagccacttccccacaaacccccaccagcaaggggctggggccagggagcagagcttccacaagacatttcgaagtcatcattcctctctttaggggggccctnctnggttgnnaaggaggggantntcagcagggaccccccattcgccattccctgtgttcttcttanaaaggttgttattttgtgttatttcacccgggggggcatttatttttttcaattgttaaatgttttccatttttcccccacccccttgcttnccagg

SEQ ID NO: 525138 - DNA, 472 bp, Homo sapiens
  misc_feature (33)..(33): n is a, c, g, or t
  misc_feature (39)..(39): n is a, c, g, or t
  misc_feature (66)..(66): n is a, c, g, or t
  misc_feature (73)..(73): n is a, c, g, or t
  misc_feature (145)..(145): n is a, c, g, or t
  misc_feature (459)..(459): n is a, c, g, or t
cccctttaagggaatcaaacctggaacttgcanggcccnaaaaaaaagggagaaactggccctcanaccctgnccctacaaagcccctgtaacagggctcccctaccctgtgatgagtaaaggaatgtcacctttcctaacaggncccaggagcccccaagttatccttgggaccctcaagaagagaggaatttacccaactcataggtattggagggtacaaacccattgctgggcttgactttaaaaagtcttttctgatattccttatggaacagaattccatcagagccaattttaaaagcatatgtgaaaaataattattcttgctgtactttatgcaaataatcaggccaagtataagactaaagtttattttgcaaacaatcctattatgatttgtttttaacaaaaatgaagactggagagtttcaaaacttatcacacttgtcattaaantctagttttatta

SEQ ID NO: 525139 - DNA, 3103 bp, Homo sapiens
gaaaaagaaggaaagggagagggagacggctggagcccgaggacgagcgcggagccgcgggccgagcggggggcgggagacaggaaggagggaggcgagcagagggaaggggaagaggtcggggagcgagggcgggagcggtcgcggtcgcgatcgagcaagcaagcgggcgagaggacgccctcccctggcctccagtgcgccgcttccctcgccgccgccccgccagcatgcccggcgtggcccgcctgccgctgctgctcgggctgctgctgctcccgcgtcccggccggccgctggacttggccgactacacctatgacctggcggaggaggacgactcggagcccctcaactacaaagacccctgcaaggcggctgcctttcttggggacattgccctggacgaagaggacctgagggccttccaggtacagcaggctgtggatctcagacggcacacagctcgtaagtcctccatcaaagctgcagttccaggaaacacttctacccccagctgccagagcaccaacgggcagcctcagaggggagcctgtgggagatggagaggtagatcccgtagccggcgggcggcgacgtcccgaccagagcgtgtgtggcccgatggggtcatcccctttgtcattgggggaaacttcactggtagccagagggcagtcttccggcaggccatgaggcactgggagaagcacacctgtgtcaccttcctggagcgcactgacgaggacagctatattgtgttcacctatcgaccttgcgggtgctgctcctacgtgggtcgccgcggcgggggcccccaggccatctccatcggcaagaactgtgacaagttcggcattgtggtccacgagctgggccacgtcgtcggcttctggcacgaacacactcggccagaccgggaccgccacgtttccatcgttcgtgagaacatccagccagggcaggagtataacttcctgaagatggagcctcaggaggtggagtccctgggggagacctatgacttcgacagcatcatgcattacgctcggaacacattctccaggggcatcttcctggataccattgtccccaagtatgaggtgaacggggtgaaacctcccattggccaaaggacacggctcagcaagggggacattgcccaagcccgcaagctttacaagtgcccagcctgtggagagaccctgcaagacagcacaggcaacttctcctcccctgaataccccaatggctactctgctcacatgcactgcgtgtggcgcatctctgtcacacccggggagaagatcatcctgaacttcacgtccctggacctgtaccgcagccgcctgtgctggtacgactatgtggaggtccgagatggcttctggaggaaggcgcccctccgaggccgcttctgcgggtccaaactccctgagcctatcgtctccactgacagccgcctctgggttgaattccgcagcagcagcaattgggttggaaagggcttctttgcagtctacgaagccatctgcgggggtgatgtgaaaaaggactatggccacattcaatcgcccaactacccagacgattaccggcccagcaaagtctgcatctggcggatccaggtgtctgagggcttccacgtgggcctcacattccagtcctttgagattgagcgccacgacagctgtgcctacgactatctggaggtgcgcgacgggcacagtgagagcagcaccctcatcgggcgctactgtggctatgagaagcctgatgacatcaagagcacgtccagccgcctctggctcaagttcgtctctgacgggtccattaacaaagcgggctttgccgtcaactttttcaaagaggtggacgagtgctctcggcccaaccgcgggggctgtgagcagcggtgcctcaacaccctgggcagctacaagtgcagctgtgaccccgggtacgagctggccccagacaagcgccgctgtgaggctgcttgtggcggattcctcaccaagctcaacggctccatcaccagcccgggctggcccaaggagtacccccccaacaagaactgcatctggcagctggtggcccccacccagtaccgcatctccctgcagtttgacttctttgagacagagggcaatgatgtgtgcaagtacgacttcgtggaggtgcgcagtggactcacagctgactccaagctgcatggcaagttctgtggttctgagaagcccgaggtcatcacctcccagtacaacaacatgcgcgtggagttcaagtccgacaacaccgtgtccaaaaagggcttcaaggcccacttcttctcagaaaagaggccagctctgcagccccctcggggacgcccccaccagctcaaattccgagtgcagaaaagaaaccggaccccccagtgaggcctgccaggcctcccggaccccttgttactcaggaacctcaccttggacggaatgggatgggggcttcggtgcccaccaaccccccacctccactctgccattccggcccacctccctctggccggacagaactggtgctctcttctccccactgtgcccgtccgcggaccggggacccttccccgtgccctaccccctcccattttgatggtgtctgtgacatttcctgttgtgaagtaaaagagggacccctgcgtcctgctcctttctcttgcaaaaaaaaaaaaaaaaaaaaaaaaagaaaaaaaaaaaaaaaaaaaaaaaaaacaaaaaaacaaacaaacgaaaaaaaagaaaagatagaaaaaaaaaagaggagaaaaccaagaagagaagacacaggcagaaaaccaagggcgcgcgcgaaacgaaacagccgaggagagacgagaaaacaagagcggaacacgcagagaaaagagaaaaaacggagaagcaaagagacgagcagggaggaaagacaacaggacgaaaagaggaggcgcgaagaaaaagagcagcacggagaagaaaaaaacaagacaaaaaagaaaaagaagagaaaggaaaagagaacgaggaaggaaagcaaagaaaaacagaaaccaacagagaaaaaaagaagcagcgaggaagaa

SEQ ID NO: 525140 - DNA, 1523 bp, Homo sapiens
cgggcagctagattttccccagacgcagtaacctcatgagaaagaaacgatgccggcctgccatccagttcataagtgggacaagagatggaagaaaggagggggggcaggagggaagggccttccccacaggaggcatcggagcttggggtccctctctatccccttccgtcactcgcttccctgcagccggctgtgaccacaaggtgacatccaccagtggtaccatcaccagccccaactggcctgacaagtatcccagcaagaaggagtgcacgtgggccatctccagcacccccgggcaccgggtcaagctgaccttcatggagatggacatcgagtcccagcctgagtgtgcctacgaccacctagaggtgttcgacgggcgagacgccaaggcccccgtcctcggccgcttctgtgggagcaagaagcccgagcccgtcctggccacaggcagccgcatgttcctgcgcttctactcagataactcggtccagcgaaagggcttccaggcctcccacgccacagagtgcgggggccaggtacgggcagacgtgaagaccaaggacctttactcccacgcccagtttggcgacaacaactaccctgggggtgtggactgtgagtgggtcattgtggccgaggaaggctacggcgtggagctcgtgttccagacctttgaggtggaggaggagaccgactgcggctatgactacatggagctcttcgacggctacgacagcacagcccccaggctggggcgctactgtggctcagggcctcctgaggaggtgtactcggcgggagattctgtcctggtgaagttccactcggatgacaccatcaccaaaaaaggtttccacctgcgatacaccagcaccaagttccaggacacactccacagcaggaagtgaccactgcctgagcaggggcggggactggagcctgctgcccttggtcgcctagactggatagtgggggtgggcggaaggcaacgcaccatccctctcccccaggccccaggacctgcagggccaatggcctggtgagactgtccataggaggtgggggaactggactccggcataagccacttccccacaaacccccaccagcaaggggctggggccagggagcagagcttccacaagacatttcgaagtcatcattcctctcttagggggccctgcctggtggcaagagggaatgtcagcaggaccccatcgccatccctgtgtctctacacgctgtattgtgtatcaccgggggcattattttcattgtaatgttcatttcccacccctgctccagcctcgatttggttttattttgagcccccattccaccaccccagtttcctggggcacaagtgtctgtgcatgtcccccaggagccaccgtggggagccgatggggaggggatggagaaacaagacagggcttctctcaggcccagtggccggtcagccacaccagggcaccgcagccaataaaccgaaagtgttacagccaaaaaaaaaa

SEQ ID NO: 525141 - DNA, 297 bp, Homo sapiens
  misc_feature (103)..(103): n is a, c, g, or t
  misc_feature (244)..(244): n is a, c, g, or t
ggaggcacatgtgcagctttgtttcatgggtaaattgcatgtttctggggctaatgtggtttcttttacagaaaaaagtatcagaaataatcggttaactttnctcacatggtcttaactcttcttcaggaaatatctaacttgtaagtgcaatccttcttgtatagctgccagaccagacccagatagaccataataaaataaaatacacagtcagtttttaatgcaagccagaatgactctnctgtatctttagcctttccagggggatacagtgaactcagatatccctgctta

SEQ ID NO: 525142 - DNA, 191 bp, Homo sapiens
attatatgtgattcacaccatttgaaaagagagcgacatgaaaaggatgggagccagaatctggaaggcatagacgcagagacagaagcccagaccaggaccgagaccgaaaaaggcgggaaggaagggcaccaaggattaagacagagggccgggtaatccacattgtgatcgaagaaccagcatggaaa

SEQ ID NO: 525143 - DNA, 221 bp, Homo sapiens
tctagcacgcggcacgtgtaacagcctttgtaaggactcccttgatgagagggccaccttgccctctcggctcaggtgcctaaccattccccgtactctcggatcgcgaaactggcggaaggtgtctcagccacttggtagaagaggcgcagcagcacagggttccccatctggtcacatgataacccatttaggaaggccatcatggcttcactgtgttg

SEQ ID NO: 525144 - DNA, 2546 bp, Homo sapiens
gaaaaagaaggaaagggagagggagacggctggagcccgaggacgagcgcggagccgcgggccgagcggggggcgggagacaggaaggagggaggcgagcagagggaaggggaagaggtcggggagcgagggcgggagcggtcgcggtcgcgatcgagcaagcaagcgggcgagaggacgccctcccctggcctccagtgcgccgcttccctcgccgccgccccgccagcatgcccggcgtggcccgcctgccgctgctgctcgggctgctgctgctcccgcgtcccggccggccgctggacttggccgactacacctatgacctggcggaggaggacgactcggagcccctcaactacaaagacccctgcaaggcggctgcctttcttggggacattgccctggacgaagaggacctgagggccttccaggtacagcaggctgtggatctcagacggcacacagctcgtaagtcctccatcaaagctgcagttccaggaaacacttctacccccagctgccagagcaccaacgggcagcctcagaggggagcctgtgggagatggagaggtagatcccgtagccggcgggcggcgacgtcccgaccagagcgtgtgtggcccgatggggtcatcccctttgtcattgggggaaacttcactggtagccagagggcagtcttccggcaggccatgaggcactgggagaagcacacctgtgtcaccttcctggagcgcactgacgaggacagctatattgtgttcacctatcgaccttgcgggtgctgctcctacgtgggtcgccgcggcgggggcccccaggccatctccatcggcaagaactgtgacaagttcggcattgtggtccacgagctgggccacgtcgtcggcttctggcacgaacacactcggccagaccgggaccgccacgtttccatcgttcgtgagaacatccagccagggcaggagtataacttcctgaagatggagcctcaggaggtggagtccctgggggagacctatgacttcgacagcatcatgcattacgctcggaacacattctccaggggcatcttcctggataccattgtccccaagtatgaggtgaacggggtgaaacctcccattggccaaaggacacggctcagcaagggggacattgcccaagcccgcaagctttacaagtgcccagcctgtggagagaccctgcaagacagcacaggcaacttctcctcccctgaataccccaatggctactctgctcacatgcactgcgtgtggcgcatctctgtcacacccggggagaagatcatcctgaacttcacgtccctggacctgtaccgcagccgcctgtgctggtacgactatgtggaggtccgagatggcttctggaggaaggcgcccctccgaggccgcttctgcgggtccaaactccctgagcctatcgtctccactgacagccgcctctgggttgaattccgcagcagcagcaattgggttggaaagggcttctttgcagtctacgaagccatctgcgggggtgatgtgaaaaaggactatggccacattcaatcgcccaactacccagacgattaccggcccagcaaagtctgcatctggcggatccaggtgtctgagggcttccacgtgggcctcacattccagtcctttgagattgagcgccacgacagctgtgcctacgactatctggaggtgcgcgacgggcacagtgagagcagcaccctcatcgggcgctactgtggctatgagaagcctgatgacatcaagagcacgtccagccgcctctggctcaagttcgtctctgacgggtccattaacaaagcgggctttgccgtcaactttttcaaagaggtggacgagtgctctcggcccaaccgcgggggctgtgagcagcggtgcctcaacaccctgggcagctacaagtgcagctgtgaccccgggtacgagctggccccagacaagcgccgctgtgaggggtgttatgatctacaggttgggaaacccctgttgtgggacagacactgtttccgcctctccacgcatggtcccgagatgctggggacagcactccgaggctaatggctccagctcactaggccgatcctgctgtgcccccgagctgctccctttcctgcacctcccaggaccgcccctccctgaactgctttccctgagccccttattcccgctcactccctcttggaggaccttggcctgttcatttgcagagaagatagaaatggccacacttatgaccccttagctcccccactcctccctacaggcccacccctgaggacacccaggccaccctgcctcctgtgggagatggagaggtagatcccgtagccggcgggcggcgacgtcccgaccagagcgtgtgtggcccgatggggtcatcccctttgtcattgggggaaacttcactggtagccagagggcagtcttctctcaggcccagtggccggtcagccacaccagggcaccgcagccaataaaccgaaagtgttacagccaaaaaaaaaa

SEQ ID NO: 525145 - DNA, 2256 bp, Homo sapiens
gaaaaagaaggaaagggagagggagacggctggagcccgaggacgagcgcggagccgcgggccgagcggggggcgggagacaggaaggagggaggcgagcagagggaaggggaagaggtcggggagcgagggcgggagcggtcgcggtcgcgatcgagcaagcaagcgggcgagaggacgccctcccctggcctccagtgcgccgcttccctcgccgccgccccgccagcatgcccggcgtggcccgcctgccgctgctgctcgggctgctgctgctcccgcgtcccggccggccgctggacttggccgactacacctatgacctggcggaggaggacgactcggagcccctcaactacaaagacccctgcaaggcggctgcctttcttggggacattgccctggacgaagaggacctgagggccttccaggtacagcaggctgtggatctcagacggcacacagctcgtaagtcctccatcaaagctgcagttccaggaaacacttctacccccagctgccagagcaccaacgggcagcctcagaggggagcctgtgggagatggagaggtagatcccgtagccggcgggcggcgacgtcccgaccagagcgtgtgtggcccgatggggtcatcccctttgtcattgggggaaacttcactggtagccagagggcagtcttccggcaggccatgaggcactgggagaagcacacctgtgtcaccttcctggagcgcactgacgaggacagctatattgtgttcacctatcgaccttgcgggtgctgctcctacgtgggtcgccgcggcgggggcccccaggccatctccatcggcaagaactgtgacaagttcggcattgtggtccacgagctgggccacgtcgtcggcttctggcacgaacacactcggccagaccgggaccgccacgtttccatcgttcgtgagaacatccagccagggcaggagtataacttcctgaagatggagcctcaggaggtggagtccctgggggagacctatgacttcgacagcatcatgcattacgctcggaacacattctccaggggcatcttcctggataccattgtccccaagtatgaggtgaacggggtgaaacctcccattggccaaaggacacggctcagcaagggggacattgcccaagcccgcaagctttacaagtgcccagcctgtggagagaccctgcaagacagcacaggcaacttctcctcccctgaataccccaatggctactctgctcacatgcactgcgtgtggcgcatctctgtcacacccggggagaagatcatcctgaacttcacgtccctggacctgtaccgcagccgcctgtgctggtacgactatgtggaggtccgagatggcttctggaggaaggcgcccctccgaggccgcttctgcgggtccaaactccctgagcctatcgtctccactgacagccgcctctgggttgaattccgcagcagcagcaattgggttggaaagggcttctttgcagtctacgaagccatctgcgggggtgatgtgaaaaaggactatggccacattcaatcgcccaactacccagacgattaccggcccagcaaagtctgcatctggcggatccaggtgtctgagggcttccacgtgggcctcacattccagtcctttgagattgagcgccacgacagctgtgcctacgactatctggaggtgcgcgacgggcacagtgagagcagcaccctcatcgggcgctactgtggctatgagaagcctgatgacatcaagagcacgtccagccgcctctggctcaagttcgtctctgacgggtccattaacaaagcgggctttgccgtcaactttttcaaagaggtggacgagtgctctcggcccaaccgcgggggctgtgagcagcggtgcctcaacaccctgggcagctacaagtgcagctgtgaccccgggtacgagctggccccagacaagcgccgctgtgaggctgcttgtggcggattcctcaccaagctcaacggctccatcaccacatccgtactggcccgtgggccagtgttaaaattctaattgcttggccaggcacggtggctcatgccagtaatcctagaactttgggaggctgtggaggtggatcacgaggtcaggagatcgagacatcctggctaacatggtgaaaccctgtctctagtaaaaatacaaaaaaaattaggcaggcgtggtggtgggtgcttgtagtcccagctac

SEQ ID NO: 525146 - DNA, 1319 bp, Homo sapiens
  misc_feature (1045)..(1045): n is a, c, g, or t
  misc_feature (1097)..(1097): n is a, c, g, or t
tctcggcaatagaaggttgttattattaatctcgccctcattttgccataggagggtcttttattttcggggatgaattatatatctcccccccttccggggggggcgttgtgtgtgtgttcggccgacaacaatgattactgccccgcgacggtcgtggtcgcgcccccctcgcgggaatgatttgtaatgaagaaggtgtccccacgagcttctctatcaggtaggtaggtttgtcggcgcttgtatgtgtttcttatgtggagtgggtgtatccctgcctccgttttgtcttttgtctgtcccgttccctctatcactacgtgcagccgctaggtcgactaactgcgccgccttcgatggtggtcgatgatgtgtcgctgtgtgccttcgtcctccgctcggtctgggggggcgcctatggtgggggaagcaacaccaaccgaagtgctgcggtggggtgatcacgcaaaagggggtggatatgtggggagacccccccgtgacgggcgttatagtctctcttgcccaccagaagtccttcgttatatggagtgctccccacatggctccacgcacacttttggggggtcccaacacaacaacaacggggtgttatatttgtcttgtagacaacacccgcggggtctgtagacctctgttttctctctctcccacagagggggggagatctctccctctttgtgtggcgttgtctttgtgagaggcacacaccagagaaattggtgtcacacagggcgcccacactggtttgtatattgtgggagattctctctcacgccgagagtagggcactacttgacacacgcggctggtgtgacgacacgcgcgtataagattggtgtgcggcgagacactctcacatgcacacacgcgcactctcgttggggcgtgttcacagcactcactcatagactcgcgctatatctcgggccgtcggttgtgggctcgggccacacacggggacctcgcacgcgcactctcacagaattctcgcggagatgtatatagagagaggagaganagagtcacttgttatagagatgagaactgagaagcacaagagaagttatatncacgtgatgccccgcacgccacaggcacagagaaccacaccccacgggcacaccttccctcggactcggttctgcttagatggccacgagcttctcgtttgctggcgtaacaccggagcacacacctcggtgcgagagtgtcggcacaggtgaaccacttggcacacacacgctatgaaatttatggcacgagcctttaccaaatataaaaaaaaactggca

SEQ ID NO: 525147 - DNA, 686 bp, Homo sapiens
gaaacaaaattttgctttggtacccaggctggagtgcaaggatgcaatctcggctcactggaacctttgcctcccaggttaaagggatcctcctgcctaagcctcccaagggggtggactacaggcacatgccaccacgcctagctaattttttggatttttaggaaaaagggggcttcactgttaggcatgaggggctccatttcctgacctaatgatttgcccacctcggcctcccaaagggctgagattacaggcgtgagccacggggcccagtctgttgaatttatttataagcacaacatgtttttagatgttactttaaaggaaaagggattcttatttcattttccaaatgctctttgctcattttccgaaattcacaagaccccttatattgggagcctacattttggaacactaccaaacctcactgatagttttgggaagattttggagatttctagcccttgtaacaaaccccagctttttctgggaaaaaggccgggctaaattttttttttcaaaacttaattaaattttcttactttattggcatgggtaagagccttaaaataaaggcggaataaaaagaggacaaccaggggttccccctttttctctgggttaaaaagaaaaagaatctcacctttggccacttaaattaaaggtacccggggggtttt

SEQ ID NO: 525148 - DNA, 1256 bp, Homo sapiens
gaaaaagaaggaaagggagagggagacggctggagcccgaggacgagcgcggagccgcgggccgagcggggggcgggagacaggaaggagggaggcgagcagagggaaggggaagaggtcggggagcgagggcgggagcggtcgcggtcgcgatcgagcaagcaagcgggcgagaggacgccctcccctggcctccagtgcgccgcttccctcgccgccgccccgccagcatgcccggcgtggcccgcctgccgctgctgctcgggctgctgctgctcccgcgtcccggccggccgctggacttggccgactacacctatgacctggcggaggaggacgactcggagcccctcaactacaaagacccctgcaaggcggctgcctttcttggggacattgccctggacgaagaggacctgagggccttccaggtacagcaggctgtggatctcagacggcacacagctcgtaagtcctccatcaaagctgcagttccaggaaacacttctacccccagctgccagagcaccaacgggcagcctcagaggggagcctgtgggagatggagaggtagatcccgtagccggcgggcggcgacgtcccgaccagagcgtgtgtggcccgatggggtcatcccctttgtcattgggggaaacttcactggtagccagagggcagtcttccggcaggccatgaggcactgggagaagcacacctgtgtcaccttcctggagcgcactgacgaggacagctatattgtgttcacctatcgaccttgcgggtgctgctcctacgtgggtcgccgcggcgggggcccccaggccatctccatcggcaagaactgtgacaagttcggcattgtggtccacgagctgggccacgtcgtcggcttctggcacgaacacactcggccagaccgggaccgccacgtttccatcgttcgtgagaacatccagccagggcaggagtataacttcctgaagatggagcctcaggaggtggagtccctgggggagacctatgacttcgacagcatcatgcattacgctcggaacacattctccaggggcatcttcctggataccattgtccccaagtatgaggtgaacggggtgaaacctcccattggccaaaggacacggctcagcaagggggacattgcccaagcccgcaagctttacaagtgcccagtggccggtcagccacaccagggcaccgcagccaataaaccgaaagtgttacagccaaaaaaaaaa

SEQ ID NO: 525149 - DNA, 351 bp, Homo sapiens
  misc_feature (3)..(3): n is a, c, g, or t
  misc_feature (18)..(18): n is a, c, g, or t
tgntggccagctttaaangagtaagaaagtgtaaggctctgtcccccagggtctctgcccaggaaaggatggggacccctgtggaagctggtgagaggctccgctcaggggcctatgtgtttcctggcatttggtttttaatgtttgcttgtttgtttttcccttattttcctcactatataccctctgatttttacacttgacttttacagttgggtgatatgtgacaactttccgtttcttcagtctgcctgactactttgcttatccaattcatttggtatttattatgcaaatactttcagaatacacagctccaagcctgggacagtgcttgggtgagagctggag

SEQ ID NO: 525150 - DNA, 434 bp, Homo sapiens
ctctgaggcaagaataaaagggacgagttcccgtgcccccttttaaccgtctggatcagcttctacgacttggtcaaactatctttctttctgtctgccatgccaggaaatccagtgacagcaagacccagagctcaggcacatttgcgagggcaggtccatcgcgccactcctctacttctagtgggctccagatgccgagcagcagccaccatgatgcggctgcgtacctcgttgcctgtaggcagctttcttctcggcctcacccaccgcaaccatgggcttgatggctgcgcggaaggaggatcacgcacagggtgctgttgccaggggccctggtgttgctggcactgctctcaaaggaagagtgaccgttgtgaatggtttcctgtaacatttgtctctcgcgtcccttgccttagttcagagccagg

SEQ ID NO: 525151 - DNA, 414 bp, Homo sapiens
ggaagaccggggcggtcaaggcatgacaaagtcggctattgacgtccgaatgcctatactttgaatacgcgatctttgcccgcctcctattgacagctataaggggctgggatatctacaaagcaggatttaacaacccaagcgatagaggaaatcgacgatgagtattaaacctggccctaagagaatgaacgaggatggcaccccggacaagaggcagagagtcacgcctgaaaagcaaaaggatcatcaaaactgaaacctcataagcataaacagggggagtaggatcaaaagcagctcccgagcctgaagtggcccgataatctggctgacttcagccttcttcaattttgaaagcggcccgttgatcaaaatcgacctgatcgcccactcaacctacgtacgccatct

SEQ ID NO: 525152 - DNA, 1362 bp, Homo sapiens
taaaacaatggatttaaatccagtgtcatttaatctttatatgtgacctgggttcttctcattctggacttaagggcgttttctgggggggctggtgataaaggttcttacatcaagatgtcctccagttactctccaaccatacatcccttcttccgcgtggcctcaaacacctctgtgggacaagagggtgcgaaaggtctccgtggtagtgcgagatagacactcttcgtggagagagatttataatctttacaagagataaccaagtgcccacacgtggcatttcccgctgtggccgtgagaggccataacatctcgtgaaaatctcagggcttctacatttataaaaccctttttatacaaacgaagggtctcttgtgagaccagaaatttcaaacagccgcgagaccaatcttcgtgcccccaacccaacaaaatgttctccatattcgccgcgggacaaacatatgctgcggcatcacgggtggtgttgagggcggaaaaatgtggcgtctgatgctcattgctgtggcaacacgcctcatctcgttttgttatactacaacgcgggagtgcggcatatataaatctccaccaatttcgggcggatcattctctctcgtataaactaaaaattttctcataatataagcgcataagcgatttccggggggtaatctcccacgaaaacagaccagcagagacaaccaagaggggcgtacccggtggggcacatttctccagatattcacctcttaattaacagattatcccaattgggggggcaacataattactaagaacatcgtaggttaaaacacgcaggcgacgtagaacactacgacgcacgtgctaccaccacacacattttttactgccccaatgttagggggggggactccccacaacccgcggaggagggcggcgcttattaacaagcctcctcctccttgttggacgcctgccccacaacgacgtatatatttacatcccccccccccttgcttattctctttaataaaagcatataaaaatagggggtctgttggcgccaaacacacacatgttagtgtaattgatacgaacacaccgacgcactgtctgtcccgaagttattatgtgtttcttccgaacacagctcactttgttctcccgcttggggggggcgccttgattatgttgtattaccgagctccaacagagcagtgatttacaacgctgcaccgatcctactgcagttaacgacccataacaaggaaatcaatggatgtgggtggtagggaccgccaacaatataaacgattactccaccacaagcagtgtgcttttctccgccccgccgcaacaccatgcttgtgt

SEQ ID NO: 525153 - DNA, 461 bp, Homo sapiens
  misc_feature (3)..(3): n is a, c, g, or t
  misc_feature (5)..(5): n is a, c, g, or t
  misc_feature (315)..(315): n is a, c, g, or t
ttnanttactgctgaacgagagcttttggtgcgacagctcagaaattgttgaccagctggaggtggtgataagaaatataactctcttgcgtacagacgcttgacacactagtactaaaacaatgtcgtgactaggcagccgccctagtcgtgctctgaagaccaagctgaaagagtgtgaggcctctaaagatcaaaacacccctgtcgtccaccctcctcccactccagggagctgtggtcatggtggtgtggtgaacatcagcaaaccgtctgtggttcagctcaactggagagggttttcttatctatatngtgcttggggtagggattactctccccagcatccaaacaaaggactgtattgggtggcgccattgaatacagatgggagactgttggagtattatagactgtacaacacactggatgatttgctattgtatataaatgctcgagag

SEQ ID NO: 525154 - DNA, 455 bp, Homo sapiens
  misc_feature (84)..(84): n is a, c, g, or t
  misc_feature (87)..(87): n is a, c, g, or t
ggggggtgtctttttaggttcagggggggccaggagggtgggctccctttctataactactaccacagggggggcatccggggnttnaacagggttttttccggtttcctgtttttccccaattaggggggggaaagggggttgggccccaggggcttttcccctcccttggtttttgggaggggcccccctttgtggccggttgggatccttgcaaagccctttttcccccccagaggggtttttcttccggggggccccccttgacccccccccaggggcccccccccccaggggttttttccttcctttgaaattttttaggggacccgggttggggggtttctgggccccttacccaagccctttgggggccccccttttttttttttttttttttcagggtttgggggggggggggggatatttaaattttttttgaattccatccttta

SEQ ID NO: 525155 - DNA, 687 bp, Homo sapiens
  misc_feature (300)..(300): n is a, c, g, or t
ccactgcactccagactgagctggagtcttgctctgtcgcccagtctggagtgcagtggcgcaatctcggctcactgcaagctccacttcccaagttcaagcgattctcctgctcaaaaaaaaaaaaaaaaaaagttaatcttatttggctgagcggctcgccagcagacggagattagttagtccttatttggaagggactcaactcccgttgggtctccagccaagtttagtggcggtgacaaacgacaggcaacggagtttgcaagataactatactggaccctgtgagaatgtcancttcacggttaccaaagggtaccaaaacagtgccccttaacaaacgggctactcaggaatggcattgctttcagggtggaaagggggaccaaggagcaaagttgagttgtggcttgccgtgccatttggccaagagtccatccttattattgcagctgctccttattcctttctgaagaagcacttaacccgtggtggatccctttcaagagtaacgggtaggggttataacagggaagtctgcagaatggtggactctgataaaaattcttgggagcaggatatgtgtgtgtaaagtctgactaagttaccaggcactaaatacaatcgacttttaagaacacgggccataccacagctggcttaaaatcctattagcagagagac

SEQ ID NO: 525156 - DNA, 838 bp, Homo sapiens
cttcttgggggggtcccctgtcagctctgcgtctttgtcgtgtctatatgttttggtcgccacctgttcatgggcggcgcccccgtggtcccctccttgtgtgtgtcgcgcccggtatccctttgggtattctccgcccgggagggcttccgtggtatccctccccctaccggctctgggtgacacggccgcacttccgcatggtttacccgcgctgtccttacacctgggcactcccgcgggctttaatgcttgttatgtttcctcacgcaacttgtggcaacccccacgcatttggtcctccgctcaaccaaggggcgcccaatgtaaggtcttcatacaagaatgaatgtccccccacgctgctggtacgaggacggttcaccactgatatatggcaaattcacggtgggtcccctcaagaatgtcgtcatgggtggtggcatggatccatgcgcccccggtagacaactcgggcgtaatggttctccgtactaggcccgtgttacaacggagtcatctttccttcgctccctcaacacacgccggggcccccccattcctcccttctggtaagggggcgatgcttccaagagaatgctgcacgaccgcctcgggggccccattcgcacgcgcccccactctttgtgagccacttgatactccctctgaagtcttgtcacacgcaggtcattatggtctggccgcggccgtgctgtgatcccctgccacggaccccccttggtatacaggtgcttttctcacactccctcttccccgtgccctgcctgtgacatattatctatcccccgattcccggggaaaatgtccacccgga

SEQ ID NO: 525157 - DNA, 659 bp, Homo sapiens
gcttcctccatcctcctccagctccggctttggggggatcactgtcctctctcgagcagctagaatgagaccggaacaggatggtcctgcgtccgagcaaagttcctgcggcacgtgatatggacagccggccaaggccggactcagtgctatgaagatgtgctgcgtcgtcacagacgcaccatggagtacaggtggcttctgtgctgtcaacacctaagtttgatggccctgatctgtgaggccagctgggggaggggccttcctggtgcatgcccactgggcaagactggcatcggtgtggatcgaagacatgcgcccacgggtactgtggcacacacaagccccacatgatgactagaacatcgcactggtgaccccgcaacaagggacaatcgttacacttggccagatggagctcacgaagagaaatgaacagttcaatgggtgtggggagaatccccaagactgggggagacctgagagcatggccccttagcgtgaacgccccgagtccaacaaacctaggaaagggccaagaccaaaagcgggtgaagacaaatgatgggcctggacgagaacaaaacggccagaacagagaggctcagtgcaaggtagtagaccaacgggatcgatggtgagagacgggagacaatgag

SEQ ID NO: 525158 - DNA, 206 bp, Homo sapiens
aggtgtgagcagaaatatgctatggggagaggtgtagggaatgagagagaagtaaacctcgatggatagagtcctgagtccgtaaaaagaaacaggaatgtgggaggtagggaccaatagggagagagtcagtcttaatagtaacaaacagcactaaccagctagcgaggtgcttagccactgcacaagtctgttctggctgagac

SEQ ID NO: 525159 - DNA, 457 bp, Homo sapiens
  misc_feature (6)..(6): n is a, c, g, or t
  misc_feature (43)..(43): n is a, c, g, or t
  misc_feature (64)..(64): n is a, c, g, or t
  misc_feature (66)..(66): n is a, c, g, or t
  misc_feature (91)..(91): n is a, c, g, or t
  misc_feature (129)..(129): n is a, c, g, or t
  misc_feature (237)..(237): n is a, c, g, or t
  misc_feature (267)..(267): n is a, c, g, or t
  misc_feature (281)..(281): n is a, c, g, or t
  misc_feature (318)..(318): n is a, c, g, or t
  misc_feature (390)..(390): n is a, c, g, or t
  misc_feature (417)..(417): n is a, c, g, or t
  misc_feature (455)..(455): n is a, c, g, or t
tcattnttgggtgataaaggaaaagtttgtggagtttgttaangctcatgtgtcccaggggcananaaggatgtgttggctcttaatctanctgctgcagcttcgtgtaacctctttgcatataaggancccttacatttgaataggacctttgcttttaaaagtgccctgactggctaggtgcagtggctcatgcctgtaaccccagcactttgggaggccgaggcaggtggatcncctgaggtcaggaattcgagaccagcctgnccaatttgatgatnccccatctttactaaaaatccaaaaattatccggacncggtggcgggcacctgtaatcccagctactcaggaggctaaggcaggagaatcgcttgaacccaggaggcanaggttgcagtgagccgagatcgtcccnctgcactccagcctggggcaatagagctagactctgtntc

SEQ ID NO: 525160 - DNA, 133 bp, Homo sapiens
cacccctggaactatttggtacaatatttggtgcaaagacaggcatgaggagtgctattccatgcttgccttttgcaattacctgcatccccagcactggtcctgggcacttccccacccgcagccaggctgt

SEQ ID NO: 525161 - DNA, 469 bp, Homo sapiens
taacctggcactctttaaaaaagagtcgtctttcttctttcttctcctcggttctctcttcactaataggtaattgcgactccatactatgggacacccccctcagctgcatcctccaaactagaaagagttaatttcccaaaccttaaactacttggcttgggattggattcagaggaagggagctcagaagcccaacatgcctgcaaaagggtaaagtatttttgccagtcaggcttgtcgcctccccttccctgtgcaaactggtaaaaggccttggaattttttgagctgtccttacccctccccttatttggtttggacacatgttttctaataacctggtttgtctgttcttgtcttcaggccatcagactccaaacagttatgcaactggagcctcctgaggatgaccccttctgcctgggacccttagatcagcctctagagaagctttgactgctgtttc

SEQ ID NO: 525162 - DNA, 133 bp, Homo sapiens
tatatggtagtcatcacctgaggtctggagtacaagactagcctggccaacatggtgaacccgtctctactaaaaatacaaaaattgtggctgggcacggtgtgctcactgcctgtaatcccacacactttgg

SEQ ID NO: 525163 - DNA, 659 bp, Homo sapiens
tacagacagaggtacaattcctcttcttaacaacatacccatggacaacctcctactcctcattgtacccattcataatcgcaatggcattcctcaagcttaccgaacgaaaaattctaggctatatacaacatacgcaaaggccccaacgttgtaggccccatacgggcatactacaacccatatcgctgacgccataaaacatcttcaccaaggagccccgtaaaaaccgacacatctaccatcaccctctacatcacacgcccacgaccatatagtcatctcaccgatcagcatcatatctactagtgaaccacaccacgtcacccagtaccacaaaaccaccagggatacaacccatcacaccgtagagaacgatacctattatattcatagaacaacatcatagaccactaaacacgatttacatcaaatacctactgcatcacgaggtgcagcacttcacaacatcaatcaataacagcacagaaaccggaggacacatggagaaagacagactaaactaagaaaacacttaataaataatgaaggtccaaccactagcaacaaccattcacgtaacataatcacaaaaataaactcacaacacgtgggactaccatatacaaccagcaccaacacctaaagcaaaaacaaaa

SEQ ID NO: 525164 - DNA, 187 bp, Homo sapiens
gactgtggggaccttggacctagggggagcccacaagaagccagagagactggcccagcctcctaaggatctggaagcccgaactggggccggacctctcgcacgtggagagcggctgaggagagtagatgagagctcgaccccaggagccaataacgtgcaggttaatgccctagtgcatagcatg

SEQ ID NO: 525165 - DNA, 328 bp, Homo sapiens
  misc_feature (19)..(19): n is a, c, g, or t
  misc_feature (161)..(161): n is a, c, g, or t
  misc_feature (317)..(317): n is a, c, g, or t
aattacccacttttccagncggtcatatgataggtcttgccaaatgaagaaaccgccactgcccctcacgcagctgcggatgcgccagcacactgcatggccctgttgtgaaaagttgatgtgctcgtagacttcatcgctaatgacaaaaatctcgtgcncgcgatcgcctgccacaaagcggcgaaatcagcctgctgccagacagttgcactggggttatgcggagtgttgaggatcaccagtctggtgcgctcgcttaataatgcggcaaattcctgccagtcaacgcgaaaatgcggtggttgcagtgccanaacgcttcact

SEQ ID NO: 525166 - DNA, 1913 bp, Homo sapiens
tcgcagtctcggtcgtacctcccctagttgcaaccttagctgttggcagggtgaagagatggcttccccgtctagacagcccccgccaggggggtcaggactgcttcaagggagccgggctcgttcatatggaagcctggtgcaatcggcctgctccccagtgagggaaagacgcctggagcatcagttggagcccggagacaccctggctggactagcactcaaatatggggtgacgatggaacagattaaacgtgcaaaccgcctttatactaatgactccatcttcctgaagaaaaccctctacatccccatcctgacagagcccagagacctgttcaatggtttggactctgaggaagagaaagatggagaggaaaaagtacacccaagtaacagtgaagtttggccacactcaactgagaggaagaaacaagagacaggagcaggacgtgccaatggtgaagtcctccccacacctggccaggaaacccccacgcccatccatgacctctctgcctctgatttccttaagaagcttgattcacagatcagcctgtccaagaaggctgctgctcagaagctgaaaaaaggggaaaatggggtacctggggaggatgcaggtctccacctgagctccccttggatgcagcaacgagcagtcctaggtcctgtgccgctgacccgtacctctcggacccggacactacgggaccaggaggatgaaatcttcaaactctgatgtccccagaactgactgagagaagcaagatgttgaaagagaaacttcagggggagaggagcctgaggtgaggctcaagaacatggcttatgagcctgcctccctccactccagccatcctccccagcctccttgtctgccaaaaattccttggcctggggcagttttattggcaagattagggaatgggaactggaccttacccagggcttgggctgaatctagagttgagtccattacactacaaaaggcggcaatttatatcgcgagcgtgccatttacatatactttctttttatatccttgttgcctttcctatcctttttacctttccctggccttagaacagggaagcagagactccccctcagcttcttcctcatctccaactatgtgacataatttatttggtgctaatattgaagtaatatttatttgctatattttatttcttcccactcttagctgaaaaatggaatttctatagccctggggtgaggagaacccgggaacagtgagccagtgactgctggttctccactttccccaccttgttagccaaacatgttattgaggatgaggcaatcggtgatatagcccaccacagagaatggatgactgttggccttttctccaatctcaaagtgacagatttgggctgattcttttttttttttttttggtaccccattcctgttgaatgggctcagtcttgacaaaccaattccctgtaactttttcacaattcttgactctgagaaaaagcagcactgtagggacctgaactctccattctaccagttcacccttctgacctgttctgctcagcctgtggtgaggggaacagatggaagaaggctttccttggggtttgaagaggaagccagttgtgggagtctctttgttacaccccctcccctccagaccctctctctctatgccttcctcctcactgcatatttatttgcgatttgtagcactgatctatggtacagttgttttgtttcttaaacagaagtaggtaagggaacctcagtaataatggaaatctgcctcagtctcctgtttggaaatgatgagaggtgagataagtaatgtttatatacctcctttcttctgtgatgattataaggtatacgaagctggacagattaaacattgagccctgtgc

SEQ ID NO: 525167 - DNA, 98 bp, Homo sapiens
gcacgcaagcagcacattgtcaaacccggtttaacgacggcatactatacggttctacggtagcgaaggctgggtttgcgaattccttacctagtttc

SEQ ID NO: 525168 - DNA, 204 bp, Homo sapiens
tctcacaacatcaaatcagtatacataccatctgataggtgtatcaccgagacattgagaccaaggataatgtggtgaactcattatctatagcatctagtagtttatggctcgatgtcacgtacacataggctattattatactcagtcatgttctacgtggcctagctttggaagccactgttcgtggaggtagcactgggt

SEQ ID NO: 525169 - DNA, 790 bp, Homo sapiens
tgcgtcaggctgagcgccgagactcgtgcgggaaggcgtctggcctcggttgacgggctcggcgcggggtccctggtccttcttcttcgcggtgcagctcgggcattcggccttgtacccagcccccacatgtttcagcaagagctcccagcaacgatctagacagaggtaaaggttggttggctggcaaacggttactagggacaccaaagagtcacggttgattggcccttaaccagcttgacaaacatttcccacagcattggacgaacagacccatcactgaccacagcttgcacgcgaaccttccacaggcacgcaacgccagaaacttcctttgcccattcgaacaacccagcttgcgtggtggttgcttcccccatttcaccaagggggcctattaccgtgtgaacaacattccagtcacctcactggatggggctcacgtccagaatcacagtttggtggcaaacactctaaagcatttactttaacctggaacggtcaatcaaagttccccactggagcattggtggccagcgtgcgtttttccaccacgcagtcgcgctccatttgcgactcctttgtggggtcaaccgaattcttacacttggggacagtagtttacttccccatggatcttgtgcacaccaatctcttctttggaaacgcactttcgtgtggcacgcgcaggttccaacacacacggtccagagtggctacacagtccttatactgcgtgtagacacacgaccttgggaacacccaccccgcttggccattaccttgg

SEQ ID NO: 525170 - DNA, 567 bp, Homo sapiens
ataccgtccaatccagtagtcccactcctgggtgtgtatccagagggaaataaatcattctcttgaagtcatacctgcgctcgcatgtttactgcaacacagttcacaacagcaaagacacggaatcaacctaagtgcccatcaacagacagttggataagaagatgtggtgcatatatacacaatggaatactgtccagccataaaaaagaatgaaactgtcctttgcagcaacatggatgcaaacagaggccatcatcctaagcgaaacaactcggacacagaaagacaaacaccgcacattctcacccgtaagcgggagctaactcacacgtccacacagatgtgtggaatgagagacactggaaacttggaagggtacagggtgaggggagggtagatgctcagtgggtgtgattacattattcccataacggctgcactgaaagcccagactttgccaccacgaagtatgtccatgcaacaaaactgctcctgtaccccataagtttatagcgaaaaagttggatatgttaaaaaaaattaaagcttgccattaaatctaaa

SEQ ID NO: 525171 - DNA, 420 bp, Homo sapiens
  misc_feature (13)..(13): n is a, c, g, or t
  misc_feature (20)..(20): n is a, c, g, or t
  misc_feature (39)..(39): n is a, c, g, or t
  misc_feature (171)..(171): n is a, c, g, or t
  misc_feature (419)..(420): n is a, c, g, or t
gtaaaagctgtgntcaacancccacagtgtaagctgtgnaaaggtttggatgtttgtccccctcccaaatctcatgttgaaaatgtgatcccccagcattggaggtggggcctgaatgggaggtgattgggtgatgggggaaagttgccctcatgaatgacttggtgcccnccctggaagtgatgagtgagttctctctgagctcactcaagatgtggttgtttaaaagagtgtggcacgtccctcccccaactctccctctcactcccgctctcaccatgtgacacacctgctcccccttcgccttccaccatgattggaagcttcctgaagcccttaccagaagcagatgccagccccacacttcctgtaccacctgcagaaccataaaccaaaataaagctcttttctttatcaann

SEQ ID NO: 525172 - DNA, 376 bp, Homo sapiens
aggatccccaacgctcatataagcggtagccagatgcagtggcttatacctgtaattccatcactttggaaggccgaggcgggtggggcacccaaggtcaggagcttgagaccagcctggcaaacgtggcaaaaccccatctctacaaaatacaaaaattagctgagcatggtggcaggtgcctgtagtcccagctactccggaggctgaggcaggagaattgcttgaacccaggaggtggaggttgcagtgagttgagattgtcccactgcactccagcctgggtgacagagtgagactgtctcaaaaacaaaacaaaacatatgaatgtaaaacatttagtgaagtgactggtagctagtgaggggtcattaag

SEQ ID NO: 525173 - DNA, 484 bp, Homo sapiens
tggaagacaggtggaaggaatggaggattggaaagcaggacagcccaacttcaagaaggccccgggagggacatctttaatggagacccctgaaaagacatccgtggaagtattaacaaacgacaagtaacgttcccccaggaagaagcttagcccccaggaaaaacaaagacccagttggaccccagagatgccctgagttggagatgaactttggccaactttcctcatcacccatacttaaaatcctgtccaaggaggagcttattcaccattttctatacatgtgacatatgtagcagcataaccgacaactgggactcgctgccttgactccacctctacatacaatgactcagctaaccagactaataaaagccatgtttgcaccattgctcagggaggcattgctttggggaattattcccagtgtcctccttacttatcgcaagtaataaaaatcccctgggaaatcctcaaaaaa

SEQ ID NO: 525174 - DNA, 194 bp, Homo sapiens
ctggtccgccatcctcttttcttcatggtgctgggtgctagggcgtgatctccttctgcattcggtcggctcctgccaggatacattgtggtgccccctgataggacattgttagcattgaggtccttcctgatgtctatatcacacttcttgatgctgttgtaggtggtttcatggatgccagcagactccat

SEQ ID NO: 525175 - DNA, 566 bp, Homo sapiens
gacatcatcatatgccaaacaatgatgccccattcacatcttcctcatacctcttccatgtcctagagctcagaggagctatagcagctccacggaatgcccagttaatctgccctttccctgcactatgcattctgaatggctgctcatctgcctcctatccgtggtggtcctcgatccaaacatgtatctgtccgttctagctgatattatatcgttgcaccctggtaactggttagggaccaggccaatccacttcatcgcgacttactataatggttggaactaaaacgttcaccaaggtggcttctccttggctgagagatggtaatggccgtggctggggatttgctcctggcgttcccataggctcctagtggagtggcacgaagagaaaccatcctctccctatcttacatccgtgaggtcaagatcccctcagaaggcaggagtgctagcccatctcccatggtgcccgtgcctctgtgctgtgtatgtgaaccacccatgtgagggaataaacctggcactaggacaccatcacaatcatggcaagccaacggggg

SEQ ID NO: 525176 - DNA, 626 bp, Homo sapiens
gccctgcagccgcgtagatgttgatgcctaagaagaacctggattgtccatttatgaagctcctttttttaggcccggacgtcatggtgcgctcgaagaacggatgtccacatggcctaagtccacccggacggctggtggacaagaatgtgcccaaccttcatgtcatgaaggccatgtcggtctctcaagtcccgaggctcacgtgaacgggcaacagttcgcctggagaccatttctactggtaccttaccaatgaccggttatccagtatctccgtgattaccttcatctgtccccggaggatagtgcctgccaccctacgccgtatccgtccacagactggcaggcctcgcggctaaaggtctggagggtgtagcgaactgtggagcactcacgagagaggggaacgctgagcagcagatacctacgagactggagtgcttgttgcctacctgtctgcccgagctaggaagaagccgtaaggctgtcgcgctgggtcagcaacgcgaattccacttcagaggcggatatggtcggggcacgtggtcagtcacctcagtacaatcggagaggattcttttgcattggataaacttacagtcaaatgacttattaatcaacgc

SEQ ID NO: 525177 - DNA, 1144 bp, Homo sapiens
gatgaaagtccaaaaccaggaaaattccaaagaactcgtgtccctcgagctgaatctggtgatagccttggttctgaagatcgtgatcttctttacagccattgatgcatatagatctcaaagcattcaaagaaacagaacgtcacatcaataaagcaggtgattgttcggaaggcacagcatgttacttcaaacactggcatgcaaacaaacataatgccttatcctatgtcaagttaatcatcaaacagcaaaatgccaggaactccaataacgcaaatcaaatatgcaaccagaccagtgcatctatcaaagctagccaggctctataaacatgctagtgttgcatgcaagaacatggaaacagggtcccatagcaagcaagcatagacagccagaaagacttcttctcaattgccaactgggcaagagcaacacttttgcattgcatgcaattgcaatcacaatatgacagcaacgcaagggcacctaaagcagcgcaagaatcaaggctcagtaccccaaaaagtagaatttaatagcacaatcccaaaggatcagattactatagtcagaacatccgctatgcctctaaacagcagattgagtctgcagtacggttcagaaagcagatgcagacaaattactattacttaattatacataaaagcaaagagcctgaaaaatatggtagcacacaaccatacacaatacattcaaaaatctctttaccgaagaatagactcctgaccattcacctacataacatatacatactgcaaaatgtttccaaatgacttttgaaaataacatataacaaaattaccacgattgagagaaaaaagaaaaatacactcaaagacaagaaaaaagaacaagaccacatgcagaacagaggacatatctacaaaggagaacaagaaatattaaagcagaagaaaggaaaatgaaagcataaaaataaggacgaaactaagaaggagataaagaacagagtgagaaagaaataaatgatccaatattatgctaaaaaaataatatgagtgagaaagcaaaaaaagagtgtagaaaagaccaataatacgatacgacgagaaaatatacagaaagaaagatgaagatagagatagtcatatatagaata

SEQ ID NO: 525178 - DNA, 362 bp, Homo sapiens
aaaagacacacaggaccacgttgattcaccgccacctccagtggacaatgcacgaccagtttttccctgctaccaaggtcaggatgtcactgtttcagggtatacctgttgtgtgcactccatggtgttactggatgcactgttcagggtacgacgtgttgtgttagcgcagggtgttactggacgtaactggagtcaggttcttgcagtgtcagcccccctttccgattcactgggacggtgtgtggacgtcacccggaggggtacattggtccgcgaagtcagtccgtaagtacgcgctgttggcgtgtcaaaggtcggagtgtgtgtataaggtttatagatttatatcaatctgccta

SEQ ID NO: 525179 - DNA, 204 bp, Homo sapiens
cggcctgaataaaacttctaaagtcttcagatgtttcatgttgatgacctacccctttccttgaggctctcctctgtcataaatgcacttccaagaactctatttatctcctactccccgagccaccattctcatgattctcatcaagtgaaatgtatttacacaaatgatcagctccttggttttcagacctgctcttaccgt

SEQ ID NO: 525180 - DNA, 351 bp, Homo sapiens
tcgcgccgaattcggcccgagagcaaagcccctgcccaggggcgctggggtaaatccctcctcctttacaaagggaggaggggagagaaatttggccgggccctccatccagcctagaccaacaaccaggaagaccgactgtgccccagcttctattgaagaggaggctgtgctcaccactggacaggacctgagtgttcaacatcactaaaaaaactggactggagcccctgctcccctatgcacactctgaactgctcggttgctctttctggctctctggagaactcatggagccgctggctgaggacgccccacccccaagcagaaataagaatgaagtgcctgacc

SEQ ID NO: 525181 - DNA, 1787 bp, Homo sapiens
  misc_feature (889)..(889): n is a, c, g, or t
tcgctgtttctaagacctgttttctccgctgctttatgtctgctcttatggcgcgcgcttgtgtgattccgccagctgacagagtgatgtgcatcgttttgggggctgttgtgatgtattatctggtgagacggatgacttttttttgtgggtgccacaacgagtggaccatttgggggaaccaacacgcagtgggtggagcacacccatggtgtgggccttttatatagaacgccgggggtttttaagcacccctttgttgtctcccaccacagcgcttgctgtggccgccaagaccgcgccaacccgccgcggtggagttcgcatcctacaaccctggccgcgcttgtgaccctgcgccgcccctcatggttcctcgggtcgttttttttttttttgggtccgacagaaatgttgtgaaaaaccatctttgttgttggtgaggaaaaaaaatgcgccgccccaaggttgttgggaagtgcattttaaaaaagagtgttgttgcctccaagaggggatgccccccccccccttgttttaatagggcgcccacccccccctcccgggggtttaagggaagataaaagagggttgtattcatcaacgcgggtgtaatataagatgatactcctcatgatggtagccccctcccccgagcctttgtaatctcgcgtgaaaagtagggagagggaaggaaaaaaaagcgcccgcgcttcgggccccccctcgtggctcccccctccggaaagggaagagaagagatatggattaggagaaataggggagcgcccacggccgcgcctctggcgtctccttgagggccccccacaacaggggcccaccacagggagcccccccctctttcgcgcgtgtcacaacacccgtggcnccccaccacagaaggtggacccccctctttgtttgttttgggataagaatattttttaacgccgccccacagttgtactcccccccccatatggaggggcacacacacactctctctctctgtgtgcgccacagctgcgcccatagatattttctctggggggcgccacatcttttggatataaggagtcgccgcggctgtgggggccccccctgttggggaaacactcacaagagagtattttctgccgcgtttctccccctgtgagagagatactttctctcttctctcagagcgccttcctacatagaggagcgctcgcgacacatctgtctacactctacacctgtgagaatagtgtgtctcacacgcgcgacactctggtgaggcacacagcgctgagagagagagagagaaattgcccctcttgcgcccacagcgggtcacatcacctctcttgttggagacaccacaccacacagatagcacagctccccacatctgttctcggagagattctcgcggtgtctcttccgagaggccacagcgagagacttctcctctttcccgctcgagaggctccacagcagattgggccacgcgtggagctatacgagagttcacaaacacacactcggcgcgagataactgtgagttcctcggccacagccgagaggagagagacccacagagacgcctggtgtttcgaggagagtaactcttgttcctcgggagagggggcctctccacagccacaagtggcgccaaagcctctcacatcacgggcccagagtttttacacatgacacttttttgccctcaccctatagctgcccgcaccccgccccttacagggagagaatgggggtccattaaagggaactggaacccttgtgaa

SEQ ID NO: 525182 - DNA, 172 bp, Homo sapiens
cctgaaaagagcataagcttctccagtgcttcctcaaaggtattttctcacaaacagttccaagctttttcaaactagttcctaacgtcacgccgtctcttcactcctcaaaacgtatgaccaacttgcatgtgctctggaggagtgctgaacactgttcaacaattcacca

SEQ ID NO: 525183 - DNA, 1188 bp, Homo sapiens
  misc_feature (1188)..(1188): n is a, c, g, or t
gaaggctctatcagcatgaggatgaggatgaggagggtagctcaggtgctgcatacttgttcttgaaaggaaaggagatcagaagctccttctgtgcggaagagtctgcgaagtttcctctagaaagagagtggatgagtgaagatgacggcacgtcagaaagattccggaaggagtgtaatgaatgagctgggacacaggttccacattcttccgtattccgactcagaaggaggaagtaagggataacaagagcgcgctggccttcataggatttcttaagaaaggtcgagcccaccagaggatgaggacaagaagggcaggcgtagaagaaatcgggagtgacaagagctaagaacgaagtcgagcgagcaggaaactaccaaggcgcctggtatgaggaggaggaggagaatgaagggggggcagtggtgaataggggatccaggggcggagatgccggttaggttaatggagaaggccaagagaatgtgtgtgccaggggaactgatatcagacatggtgttgttatcaagaaacgtagaatgagaatggtacaggcagagaggcgaagaagggaactgatcggtgactgccctagatggagctggtgcaagtgctggttcagatgggtagcggtagaagaacctgggagacgggcgtcattgtcaagatcaagttcaatatcgatcgcctctctctatgagtataacccgaacgtggtaacgtacatgaggccagagatgtgggggaagtgcctggactgatccatgatgctgatggatatccgggaaggaaagtccaacatttgtgtaggagagaatattcttggaagagagtgagaaccggggcaggctgacaggcaagggggtccgaggatgttcttaatctggtggaagaatgggtaaaaattgccaaaaagagcaagagacgagacgcaaaccaagggtagggaagccgaagaaagggcacagttttgcccacatccaaggggggagggcccggggaaaaggcaaccaagagcaagcagataacaagggaagtgggggaaaaaaagaggaaaaacaaagggagaccagagggaaaatggtaaagcggaaagaaagaacagagagaagagagactagaaagaaggaagaaacaggatagacgaaagacgaacgaagcgggggacaataagaagacgcn

SEQ ID NO: 525184 - DNA, 170 bp, Homo sapiens
aaccccgctggcaggccactgcgtccaccttggacagcaatcttaccccattcccaggatgaccctcgcagacctcccagtggggcccctgtgtacacctatcaattcttcaatgcccattccccaactcagcagccatggtacaagtatacaactgggtcacatcgcat

SEQ ID NO: 525185 - DNA, 246 bp, Homo sapiens
agctggtgggctgggagattattagacgggaatccccttgtccccaagagagcctaaggttggttcaagttctacacgttcgatagatagtctacgggagaggaggaggagtagggccgcctcggggctgggcatccggcccctggggccaccccttgtcagccgggtgggtaggaaccgtagactcgctcatctcgcctgggttggtccgattttggtaatcgtaaaaataaacgctcactccga

SEQ ID NO: 525186 - DNA, 89 bp, Homo sapiens
  misc_feature (11)..(11): n is a, c, g, or t
  misc_feature (45)..(45): n is a, c, g, or t
gatccgtcagncgactctaaagctaattgtttgtattggcatggnttttgccaggcatccaaaattcagattaaacaaccaatgcaatc

SEQ ID NO: 525187 - DNA, 355 bp, Homo sapiens
cttcagctgtcaggctcaggtatcctccctcctcagtctcctgagtagctcgtgcctacagaaacatgccaccacgcccggtctaatttttgtatttctggtagagattgggtgttgtctgtgttgcccaggttggtctcgaactcctgggctcaagcaagtctgcccaccgtggtctcccaaagtgctgggattacaggcatgagctgccataccttaccagaccaagagagtttaaaactactggaggtcatatagaattcaagagaattgacgactagatcacgaattatatcttatcaacattggatgccagaaaaggacagaataatgtcttatagaacctccttgtccc

SEQ ID NO: 525188 - DNA, 327 bp, Homo sapiens
ctggcaaccccaggcccagcctcaggcctgcccccctttcctcctttctggagtggtgggtacaaaaagtttggggccaccccgggtccttttttcccaagttttgtttttttcccttgtttttccccccccccccccaattaagggggcccccaggcctggtgctgccttggagggcttggggaaagagtgttttgaggaaggaggagggttaaaacttagggttggtgcccgaatgggctggagtgaaggggtgtttaaagtgtgggctggctgttttgctggaaaactgggggccggtttatggttattaactgctccattgcc

SEQ ID NO: 525189 - DNA, 139 bp, Homo sapiens
tactattatcccctatgggtttctgtcatactgagacaggctgtttttattacctggtttttcatagggaagaagaaaattaaggctaaagtttgtaatgatcaatggctcataattcctttaatctttcatacaagga

SEQ ID NO: 525190 - DNA, 149 bp, Homo sapiens
ataacatactgtcctcggtggaggcccagtacatccaggcccaagccaggtagcccccgtgatcccccagaacaccctgaagaagagagagcggaagcagagccctaagaggactaggacatccagactaccctaacagtaccggcaac

SEQ ID NO: 525191 - DNA, 464 bp, Homo sapiens
gcgtgtacttgctctttgtccttggcaggttacctaaactttctctcccagcgtggatttccttgcatataaagtggaactcctaatcgctgccacttgagcggttatagagaggttgcctcttagaggtttactgatctttaagtcctcattttcccacctcctcagggtcagtgctttccatgttagtaactcctgcaaatatgaggggagcgcacagctttgccacttgtgcattggtgattgtgccacggttttataactggggtttaaaaagtgatacatgctcaattaagacaatttttaggaaatacagaaaacaaagctgaaattatctatagtcttacaacttaaagacaactcttaactctttgcatatttccatgcagacctttattatttttctccatttttataattatcttgcaaatgggaattttttatcttactttcttgtaagataa

SEQ ID NO: 525192 - DNA, 1532 bp, Homo sapiens
  misc_feature (311)..(311): n is a, c, g, or t
gaacgaacagaagtagtgatctggtgctaaatagatgcctactacacttcggttgatgactacgagtgacttagcctggcatgtgggggctagcgaatagtagcccaaagaaccaagagaactaggacttgagatgtctcgaacggccatactttcgagtagactctaataggcctgtcaacatgtgcatgcatagtgatccagcagtgcgcacgatggaaggcccagtcacgtactgtgacagtgctcgtgacgacggatgagtcaaatgttccgcttctggggtctaggatacatagtcatcgggtccnttaggacatgaatttgagatgcaaaaatgtccttcaccttcatcgtagattgtgcttatgaacaccatgtacccttagcgtagagcactaaacaaggactgatatgtcgcagcataggagcagagctcccatcgtggagctcatagcagattcacctcatccgatcgacactctgcggaagtgcccataagggctagctgagtgaggaatgagaagcgaaagcgcaatggatagataagttctgcccctcgacgtagattataactttgagctagaaaatgcgcttcgaacagatcattatcgcaacgatcgcacttgccggttgggacccttgtttagccactcgaaattcaatgggctctacctttgtaggagtcgcttctaggcgaaacaagtaggcaagaaggccctttttcagggtcaataactcgtcctctgttggaggtagcacggaagccccttggtcgagtggcctctgacaagttgaacccttggagacgaacacccggattgtgcccttcactgtcggcgtaggggcccactcctaaaaattgcctccggttcgcaaatcgggcttgaaaaagtctaaggtccagggcgagttaaacaaggtgggacccataggtgggggccaatacgctggcgccctggcgtggcgtcaccgacgcctaagctaaggccccataggatagcgcgaaactacaggcgtatggaaacccatcttgaggacgcgtacacgcccatgatttcacagtgccccgtggggcggtgaaaattccaccgccggaagtaataggcacataaattgtatttgggcgcagatacgtaatgagccatccaagtattccccacaggcactatctcaacgccccatttatcacagcccccattttcatcactcagtagggaagcccccaacagcagggtcagggcccgcatttttcttcatgttacccccaggggctgaaacacgccacagctttgcgtatacccccattaatgcatatctacgcccggagggagtcccccgttttggctgagactttggcgggacactcgagagcgaaacatactccaccatttgctcgaagcctatattctcatccgttcggatagacgcacaaacaacgtcttcacacatgcacctcgtccctgtctgcaaacaccctttttcatagggctcactgtccacgatacagcgactgctcctcaactttgtga

SEQ ID NO: 525193 - DNA, 805 bp, Homo sapiens
agcgggtctcgccgtggagacccggcagttgggggatgccgacgcccgggccttgaggatgttgcggaagctcaccatcgagcagatcaacgactggttcaccatcggcaagacggtgaccaatgtggagctgctgggcgcgccgcccgacattcccggaaggggcaggcaggtatggaggtgcagaagccaggacgatggaccccggcgctaggtcccgcggaaccaggctccggctctggaccaagctccggaccgagcggacgctgcgtacgaaaggtcacgtcagccaaaggagctcagaagtacgagtatattaacaaatacagacagcatcgaagcacaagaagcttgatgtgtgtcgcaagtgtccaaccaaccagctgggccaggtccaaggccatctctggctaaattacgcagtgtgaccgtgcatcccagggacaccttataaatatcctgaatttgcctataacgtcgatacaaggaagaggtagagtcttctgatacagaaagtaattccgctggtagattatccgtggggaccacgggaagcggctaaaaagcactcagatcccgcagaatatctgggaccactacgtacagagcatccgactactgcagacaagaggaacacccagacccggacagacaggcggcaagcagcatcggacaggcggatcagaaaaagagcgtgcctggacccctgggcaggagcgactgagacaccaggcagggctcaagaaacaagcaacagaggaaccaagcgaaacatcctaacacagaagtcctggtgcgaaaacag

SEQ ID NO: 525194 - DNA, 117 bp, Homo sapiens
cccccccgcccccccccgggggtttttctttttttgggggtgggttaagggccccccccggtttggggttttttttgggggcaaaaaaaacggcccaataaaacccagcctttggga

SEQ ID NO: 525195 - DNA, 80 bp, Homo sapiens
tcaagcatctaacgatgtacggggacatgatcacgattatgccctgcacttcagcctgagtgagaccctgtctcaaaaaa

SEQ ID NO: 525196 - DNA, 205 bp, Homo sapiens
ggccccggggccccccctttgggccccccccccttaaggttggggcccggtcccccccagacccccttttttcggggggcctttttttggcccgggggggggaaaaaaggatgggggggcccgcccctgggttttccccttggggcccccccccccgccccgtttcccccccccccccgccccctttaaggggttttttttggga

SEQ ID NO: 525197 - DNA, 773 bp, Homo sapiens
tggttccgtccaagtgcatcttcccattacacttaccatgttacaatcttgtctcctctattataaatgcttaggggtttaagttaaatgtcctttgaagttatactttgaggagggttgacgggcggttgttgtatacgcgctttcaggggccccttgtttcaacttaagcacttcttacctcttcagttatacttgcttaaatctccacctttcgaccctttaagttttcataagggctattcgtagttttacgtggggtataacaaaatgtttaacgcccattttctgttgccacctctcatgtggggcttacccccctgttgactctttaacggttcttttatacgtgtgggatatacttatgcgcgcttatacttttatgatacgccttatcaatcccaggggtttagtgcttagacaaaaagtgcgcggggtattaattaggcttagaccgcaaagaggtctggtgtgaacggtttgaactccgggggttttaaatcggattttcacagaaaacgagggcctcccttctttagaaggggaattaatgaaaaggcaacccgcccgagggctccctttagaagtttatataacctggtgggctccgtaagttgtctctagcgcagaccctgttttgtctgtattatacatctgtcagagtgtttaagggctaaagcttagttggggtaatctaatccccaggtatgggtgttcttaacctatttgtgtggtcccgattttttaagggcattttcgtagtctaactgggc

SEQ ID NO: 525198 - DNA, 279 bp, Homo sapiens
caggttgaatcctgttccctgaaaaagagtattcggatcctaacccccaggacctgtggctgtgaccttatttggaaatagagtattttcagatgtgactgagttaagatgagggcatactggagtagagcgtgccctaatccaacaactgtgtcctgataagaggaaatgagcaccgggcacagtggctcacgcctgtaatcctagcactttgggaggctgaggcaggcagattacttgagcccagcagtttgagtgggcaacagatcatgactccct

SEQ ID NO: 525199 - DNA, 432 bp, Homo sapiens
tgtaattagacctccactgtgtacttagctggaagaacatgttaattctgcaatatgttgcgtggttaaacattgcgacagttcttacctcgtgtctgtaaataaagttttgtgaatctgttttgtattgtgacaaattcatgagataacattgatattttgatttgtaatatttctaatgggtagatttgattgaaaagtgaagatgagatgtatttttatatgttcaggggaattttaaagtcaaatcttgtgtagatgatttggaaaatcagtgtggtttattttacggatttaacccactggttgttattctgtaacaggttggataaatggtaaatttggaatgtgttgttattttacctagatgtagaattccacatgtagtaaaatgtacaaaatgttttgttaataaaatggaataatgtttat

SEQ ID NO: 525200 - DNA, 175 bp, Homo sapiens
  misc_feature (175)..(175): n is a, c, g, or t
caaacccactccaccttaccaccagacaaccttagccaaaccatttaccgaattaaagtattaggcgttagaacttgaaacctggcgcattagatattagtaccgcaggggaaaggaatgaaaaatttattacccaggcattattttggcagggactaacccctattacctcctn

SEQ ID NO: 525201 - DNA, 985 bp, Homo sapiens
  misc_feature (705)..(705): n is a, c, g, or t
ggggtgcttagcatatgaggagggggagatactaataatgcatttctaagttgaatagtatttgtgagaaagggcactgagtctctcactctttgctgtgttctagagcattgcatctctgtgcaaccactcactttcattgctttattcatttaccagtgttctatttgtggtttgttcgaaatgggtctctggtctctggattcaccgcaggggtgtccggtgccgcgcggcgggtgacttctgcggactgcctttgctaacactcatggctgttccgagggtcggcagaggggactgctccagtgcccgttgaaacctcggccattagcttgagggtattacggggcatccctgcgcaccactagagcttatgggctaagtattgcgtccattctaataggtaaaacgtggggttctccccacttttgcggttcctggctgggcctccagatgtccgttactgtattagtcagttactggcatcttactttgtctccacgtacgatggccgaggactgacagtgcctagttatcgccggcgattccgggcttaccccatatttggtttcacgggtcctccgggcatgcgggattggaccctctctatatttcagggagactggtaaaaccttcttgaggggccggcaggggaattaacccttttcttctcttgggggagggagcccacgccattaaagggtnatgggggcatgacactcttggcaatccggtcaaaatttggttaccatttcccagggttacgctattggttgttccctgggaaaacatctggctctactggcccccagccagttggtgttcgtgaggtgcattattaccaacggtattggtacttcccagagtctgaactgtgtcaactgccttcccgcgggtgttaaatccctgaacgccaccccagcggacacgtcactcatgctaacaaatagtcacgtgtgagccaggaaactggttcccggctact

SEQ ID NO: 525202 - DNA, 718 bp, Homo sapiens
ggagtggcaatttcatatggttcaataaaataaaattgagaccgggcacagtggcttatgcctgtaatcccaacactttgggaggctgaggcaggaggatcacttgagctcaggagttcaagaccagactgggcaacatggcaaaaccctgtctctacagaaatgcaaaaatgggccaggcgtgatggcgcatgcctgtggttctagctacttgggaggctgaggtgggaggatgcttgggcccaggaggcggaggttgcgatgagctgagatcgtgccactgcaatccagtctgggcaacagaatgagaccctgcctcaacaaaaaaaaaaaaaaattacggtggaatggactttatatatttctccttctttccctttttaattcttaccaatataaggtccatttgggatttaaggggccattccatggggctttgggaagttggaaaactggttaaagaagccttattcaaaagccaattgatgcccttaaaagggttcaacctataggagcttatgttgaaggggatttaaagaattaaggatccttagaacccaaaggacagagaaaggagctttaataggcccgtgaggggaagttctaattatacggggggggaggttgagaacggaggttacaggggctggagaggctgtatatattgtggcgggagtccagaccaagaccggatttttattaggcaagtatctcagac

SEQ ID NO: 525203 - DNA, 194 bp, Homo sapiens
agaggaaagcctttacaaattactctcagttctttaggggcagaaggcttgtaagaagaggtcagacagaagaaaggaatatatgaacgcaatgagatgtcgacatggtaacaggtctaaaaatgagggcaaaacactaaggctctagcagtgactggttcactaaaaagagagagtcctggccccagaggtgt

SEQ ID NO: 525204 - DNA, 161 bp, Homo sapiens
tacggtaccgtgatgcatgtagaactgtctcctactttgaaaactgaatgtcagagctgagtgaatcaaagtgtctagacatatttgcatagaggcaagtattctattctaataactgcttactcacactaccaccttttccttatactgtatatgattat

SEQ ID NO: 525205 - DNA, 394 bp, Homo sapiens
  misc_feature (17)..(17): n is a, c, g, or t
  misc_feature (108)..(108): n is a, c, g, or t
  misc_feature (187)..(187): n is a, c, g, or t
  misc_feature (211)..(211): n is a, c, g, or t
  misc_feature (393)..(393): n is a, c, g, or t
cagagtgcggcactcantgccatgtaatcccagcacttagggaggccgaggagggcagatcacgaggtcaggagatcgaaaccatcctggctaacacggtgaaacccngtctctactaaaaaatacaaaaaattagcctgggcgcagaggcacgggcctgtagtcccagctactcaggaggcggagnaggagaatggcgtcaacccgggangcggaggttgcagtgagccaggattgtgcgacttgactccagcctgggtgacaagggtgaaacgccatctcaaaaaataaaaattgaaaaataaaaaaaagaacctggatctcaatttaattttttcatattctttgcaatgaaatggacttgaggaagctaagattcatagctagaaatang

SEQ ID NO: 525206 - DNA, 474 bp, Homo sapiens
  misc_feature (422)..(422): n is a, c, g, or t
cacgaggtacgaagccttcttcaccgagctcaaggtggcgatgttcgcggccttcttcgtcgccttcccgatcatcgccaaccaggtgtgggccttcatcgcgccgggcttgtacaggcaggagaagcgcgccttcctgccgttcctgatcgcgaccccggtgctgttcacgctcggcgcggcgctcgcctactatatcgtcatgccgatcgcgttccgtttcctgctcggctatcaggtgtcgagcggcgacctgcagatcgacgcgctgccgtcgatcgccgaatatctctcaacggtcatgcagttcatcttcgccttcggagtcgccttcctgctgccgatcctgctgatgattctcgagcgcgccggcatcctgtcgctgcagcagctgatggccggacgtcgctatgccatcgtcnccgctttcgtcatcgccgcggtctttgaccccgcccgatgtcatttcgcagc

SEQ ID NO: 525207 - DNA, 616 bp, Homo sapiens
atgccaataacctcctactgcatctacgtcattgccgtgggcattttaaaaactgatgttgctccaggttggatcagtctctcattgcaacaatctggcatgttctttctcatctctctggtgttgttggtgtagggtgaatacattctaaacatggcaagcctgtcgaacgaggggccgctttatcatgttgcgcaagagtttcacccagtgcgcggatgacccgttgtgaaaagttgaatgttgaagagtgggcatcagagtcggcggataaggaaattccgaccagtgaccgtgcctgatgtcggggcttaacaaaggcgaaatatgccacgatgcggtagtcatcggggggtgggttctacggcgctgctatcggtatttatctggccagacaacggggattcaagcgtattttactaattgagcgcgaatcggcgttattgatgcgtgcgtcttataataaccaggcacgcgtccataacggctaccattaacccgcgcagttttaccacttgctatcgcagtcgagtaaacttgccgaaattgttcgggattggcgccgccataaagcagattcaccaagctcatgctatgccgggcaatccaagtacgg

SEQ ID NO: 525208 - DNA, 264 bp, Homo sapiens
ccatccaaccagtcactaagtctctctccaagctgttccttcttgataacttcacattatttttgcctatcaaatacctttagaaagagtagtagcagctgagcacggtggttaacacttgtaatctcagcgcttagggaggccgaggcaggcaggagtttgcgaccagtttggccaacacggtgaaaccctgtctctactagaaatacaaaaaattagctgggcgtggaggcaggagaatcgcttgaatctgggaggcagaga

SEQ ID NO: 525209 - DNA, 1493 bp, Homo sapiens
  misc_feature (460)..(460): n is a, c, g, or t
  misc_feature (602)..(602): n is a, c, g, or t
  misc_feature (1163)..(1163): n is a, c, g, or t
tggaaagggagtcttgatctggtcactgagggcgggaaggagtgcaggggtggcgatctcggcctcacgggtaattctctcgcggccctcccgaggtgttcaaggcgattcctccagccctcagcttctcccgagtataagcgtgggattatacggggcggtgactccaccagtgcccagacctgcgggtctctcttttcgtggtcagagggcaagtgagtgagaggcgtagagggaggggtgcacaagagagaggagccccctgggagccccagaggccgagtggggtgggcgtggtggcacccaacacaccaccagagcttctccgtgccctcacacgtggaggccaccagaggggggaaaaaacccgcgtgatatattcacagtatattatagcacaaccccccaacgagccacgagtgtaaatatagtctcagagtgtctccgcgtggcgctcttntctcacatatgtgcgccccacgcgaggaaacaccctgcgtggggtctcacccctcaagagaaagaagcgcgctgcggggtgtgggccacacaccgcatgtgggcacacaaacaccccgtgagagcagccacatgctgcgaanctgcgtggggtgctcgcgtggggggagaggaaacacatgtgtgtgcgagacgttcacacaagaccgcgcgcggggtgggtgcacccccgcggcgggggaggcgcgccatctaattagaggcgccaagcacgcgtgaggtgggcactaataaaaggtgtagctgcggggcgaggaaaaagaggccacaatatttacagaggcgctctcaaccacattataagcgctgtgtgttaaaaacggagggctctctctccacagagagggcaatctcctccaaataatagaagggggggccgccgagagagaaaagactactccgcgagagaaaagagcgctcccctacactctccccactacgcggcgaggtggtgtggggggagcaccatgtggttgttgtcgccccaaagggcgggggggggggggagctaataagacgcgcgcagatatactatttaaacagcgggtgggcgaacaaaaccaaccgcagggagtattattcccccgacggccccccgcggtgggcaccgttggacgccattactcctcaacagggtgtcaacngatggtgttgttggaagatgcccccccggtgtcttttgtggtgggcgcccccctgcgcggcgccacatggtcatgggcccgcctgtgtggtcccgctattccccactcgttattggcccccccttccttatcatttagtcacaccgatgtgtggctgctttctttgtagagccccatttctcacaccagatggggggggaggccatcaatatacttagcagtcccctctggggggggaggactaattatacccccccaaaagtgccctttgtgaggcaatgaagggcgtgccgccactttgtgcttgatcccgatctcgtgagcattcgg

SEQ ID NO: 525210 - DNA, 424 bp, Homo sapiens
  misc_feature (1)..(1): n is a, c, g, or t
ncagcacacatatggagccatcctctgcaactctgtagcacacttcataggggtcagcccagagtgtgagttcacttgggaacagcttgaacagctcctgactgctcagtccaatccgctgtgctgcctgtccaatcacaggatccatcttatggttgatgcgaacacaacgataacccgtgtccctcgcatggcttctctggcaaccagtaatgtttataatgttcagccactcagctcctgcagactctgcctgaaggtctgcagctgtcgctcgctcgtgagctccttggtgcggagaaacttggagatgaaggtctcgacgtcgcgcgatctcgcctatcatggtggcggcccgtgtgtagaagggatgcatggggcctgcgttcggtctcggcccggcgcgaccggcactcggccgcgc

SEQ ID NO: 525211 - DNA, 147 bp, Homo sapiens
  misc_feature (1)..(1): n is a, c, g, or t
  misc_feature (67)..(67): n is a, c, g, or t
  misc_feature (125)..(125): n is a, c, g, or t
ncgtgggcccaggagccagctcaggtgctcccccaccatgggcaggctgtgtaaaaagccaccggcntcagcagctgctgggcctctcctgggactacccagtgtggctcttacgtgttttcttngctaaaataaaccctagttctt

SEQ ID NO: 525212 - DNA, 840 bp, Homo sapiens
  misc_feature (462)..(462): n is a, c, g, or t
  misc_feature (567)..(567): n is a, c, g, or t
  misc_feature (571)..(571): n is a, c, g, or t
  misc_feature (577)..(577): n is a, c, g, or t
  misc_feature (580)..(580): n is a, c, g, or t
  misc_feature (608)..(608): n is a, c, g, or t
  misc_feature (628)..(628): n is a, c, g, or t
  misc_feature (641)..(641): n is a, c, g, or t
  misc_feature (677)..(677): n is a, c, g, or t
  misc_feature (691)..(691): n is a, c, g, or t
  misc_feature (704)..(705): n is a, c, g, or t
  misc_feature (719)..(720): n is a, c, g, or t
  misc_feature (757)..(757): n is a, c, g, or t
  misc_feature (838)..(838): n is a, c, g, or t
agtaaggcatcgtcgaccaggcctccggcggagctgacggtggaggttcgcggctctaacggggctttctacaagggatttatcaaagatgttcatgaagactcccttacagttgtttttgaaaataattggcaaccagaacgccaggttccatttaatgaagttagattaccaccaccacctgatataaaaaaagaaattagtgaaggagatgaagtagaggtatattcaagagcaaatgaccaagagccatgtgggtggtggttggctaaagttcggatgatgaaaggagaattttatgtcattgaatatgctgcttgtgacgctacttacaatgaaatagtcacatttgaacgacttcggcctgtcaatcaaaataaaactgtcaaaaaaaataccttctttaaatgcacagtggatgttcctgaggatttgagagaggcgtgtgctaatgaaaatgcncataaagattttaagaaagcagtaggagcatgcagaattttttaccatccagaaacaacaccgctaatgatactgtctgccagtgaagcaactgtgaagagagtnaacntcttangtnacatgcatttgcgaagtattcgtacgangttgatgcttatgtcagacntgaagaggcactnagcatttagaatgcacaaaacaacttgcagcagctnttcatgaggaattngtgtgagagaagnnttaatgggcctggnnataggaacacatggtagtaacatccagcaagctaggnaggttcctggagttaccgccattgagctagatgaagatactggaacattcagactctacggagagagtgctgatgctgtanaa

SEQ ID NO: 525213 - DNA, 704 bp, Homo sapiens
gcagctgcttggtgactgtttctgtggtgttgaatccccacggtataaaggtaatctacaacgaggtgaacaataaatcctggatggacagacccgtgcaccttcatattacgtgtttgaaatcctggatggacagacccgtccaccttcatgtcacgtgtttgaaattctggatggacagacccatgcaccttcatgttacgtgtttaaaattctggatggacagacccgtgcaccttcctgtcacatgtttgaaatcctggatggacagacctgtgcaccttcacgtcacgtgtttgaaattctggatggacagagccatgcaccttcatgttacgtgtttgttgtggagaggagtgggttgtgccatgtttctcttgtgggattgagtgtggctatttagctcatctgttgccacctttaattgttggcattgacactaaaggtcatcagattagcgggaaccagcttgtggggttgtagcggctcctggactggtctcaggtgacatcctgattggctgaaataagtcctgcaggtctctgctagaactgactcacagttgcctgagtccagaacttgtgggtcacaggtgacgccaggactgcatcatcctggtgctcggactcctagtgacagcatcctgagcaggcggtagcccagacaccaccctgcctgatatgcccactgttggtggagacatc

SEQ ID NO: 525214 - DNA, 275 bp, Homo sapiens
  misc_feature (1)..(1): n is a, c, g, or t
  misc_feature (32)..(32): n is a, c, g, or t
naagactctgtctctacaaaaagtttaagaantgagccagacatggtggtgtatgcctgtagtcccagccactcagaaggctgaggcaggaggatcgcttgagaccaagagtttgagcctgcgttgagctgtgaatgcaccacggcactcaagcctgggcaatgtagcaagatcctgtctctacaagaaattttttaaaaatgagccaagtgtggtggtgcatgcctgtaagttccagctactcaggacactgacgtaggagggtttgcttgaag

SEQ ID NO: 525215 - DNA, 164 bp, Homo sapiens
tgtcacaggactgtagtccgcgacggaaaaatgtttacaggttcggtgccagccagcgttccacgtcttctttggccacgccgcggcgcggcagccatgtcgctgacctggtcatccccgattttacctgacgctgaagtatttggacgccggatgagcaaagt

SEQ ID NO: 525216 - DNA, 383 bp, Homo sapiens
  misc_feature (36)..(36): n is a, c, g, or t
gcgtcgaccaactcctcaaaaagaaaaccagcctgnagcgtggtgcggtggctcacgcctgtaatcccagcactttggaaggccgaggcaggtggatcacttgaggtcagtagttgggagacgagcctggccaacatggtgaaacccatttctgctgaaaatgcaaaaattagccaggcatggtggcacatgcccgtaatcccagctacttgggaggttgaggcaggagaattgcttgaatctgggaggcggagattgcagtgagctgagaccatgccatcacactccagcctgggtggcagagcgagactgtctcaagaaaaagagagagagagagagagagagagactgtctcaagaaaaagagagagagagagaaaaaaa

SEQ ID NO: 525217 - DNA, 338 bp, Homo sapiens
taaccgtgattggtggcgactttttagctgaaattattaaaactatcacggcacggtcaacgtctaacccatcaactcggtaccaggataccgggcctgtcatttcccaggtggtgcataccttatcagccgttttgctcgtgttgtgagtgctctcatttataaccaaggagactaagaagtttatggtcgcgtagtgtattgggggtcattgggattttcttagtggcgttgtctctgtctactgacgggatcatttcccaaccatacatcgctgctgttttctgggcctctttgggggccactacgcaatactttccacaaaccttattgcgagc

SEQ ID NO: 525218 - DNA, 181 bp, Homo sapiens
  misc_feature (155)..(155): n is a, c, g, or t
tatagttgccggggattacccgtgtccctttttgaggatcccctggctgagtagtccttctctgaagcaccgactgttgcgaccgttcaaaactgtccacacttccaagccgggctctcattctgttagctccccttgagaagatattttccagngcagctagttacaggatctcgttagc

SEQ ID NO: 525219 - DNA, 119 bp, Homo sapiens
tccaaagtgcgggaataacaggtgtgagccactgtacctggctgtgatctcatttttaaagcagaaaactcaggctcagaggcttagattagggcaagtagtgtctggccagattgaat

SEQ ID NO: 525220 - DNA, 245 bp, Homo sapiens
ttgaacaagtcgcaggataggccttctgcgagtcgcagagcaaggtcgcccatgctggattcagtcccaggtccctcacatgcctcatcagtagtacgtgcagccgtgcgtgcatgcttctgtccgtggccaaaggcccgagagccctcgtggcaaatcactggtgtaagtctaaaagtccaaaagctgaagaacttggagtctgatgttcaagggcaggaagcatccagcacaggagaaagatg

SEQ ID NO: 525221 - DNA, 354 bp, Homo sapiens
  misc_feature (38)..(38): n is a, c, g, or t
gggaaggaaaaaggttggaagaacccaccagcccaagnttgtccggggggggaaccttggcaagcaagtgcaaccccaaccccaaaagggttgggaaagccgggccgaccaacaaaaggaaaagttggcgttaattgcctttcaagccggcagggttttccggccttttcttccgttctcagaggtcagtccccccgccggggacgtcccgcgccactccgcgcctttggccctggctcaaggtcttgtgatgtgattagcaaagccagcgccttgtcctcagacactcagccctgcccggcaggccccggcgctcaagccctgtttactgagcctgggcggggagggggcgga

SEQ ID NO: 525222 - DNA, 141 bp, Homo sapiens
cgttcttatgtgaatggacttagtgactgcttgtaacaatacaacacaggtaagtgatgctggtaaattatttatttatttatttattttttgagacagagtctgctctgtcgccaggctggagtgcagtggcatgatctc

SEQ ID NO: 525223 - DNA, 1217 bp, Homo sapiens
tgagacagagccgtgggttgacggggcgagacccgtgcctcaaaaaaaaaaaaaaaaaattgagggaggggcttgacccagggttggcttgaccctgtgttaactcccagctatacttgtgggaggattgaggcgggagaggttttgctttgaagccccgagggattctcaaccaccgaccttgtgggcaccattgaggtgaagccctttgttcttcaaaaaaacacggtagaaagggacaaccgggaacccaggggaaacagacatttggaaagtgtggaacaacgaaagggagggaaaaaaaaccgagggcaagaaattgcggagggggttcaagagaggacaaaaaatgtgatatgtgttgacctctcgaggaaatatcccaacgagcttgtttgggtcccggcgcggggcaagatctctgtgggcctattctcttagtctccacctctgggggaggctcccccggggtgttccccccaaaaatttgcgccctttattacaaagaggggggtcttatattgagaacgccccccagagatagtgcttaatagcccccctttcattatagcacaaacgtttggggccccgctatagcctttcccctttaccaaggtttctcccagcccacataatagtggtggcagtttcccaaacatttagtgggggggcaccgtgcacagtgggtgggcgtctccccaaaacattaaggcggggcacacactctcagagggtctctgtgcggggcacaacaggatcttacggaggtgggttcgatccctactctaatatacctatcactcaccatcgcacagtgaccatttttcacctatatattccggagagcgttccactcacaagcggatatgcgaccctactggggactactggggcaatatttcaccccaagggtggacataactcgtggaagacgaaatgtttttgacaggggcccacagaaggcgggctgaccccaacgtggtgcgtccctggcggcgtcactatgtatgtgtatcacaacgaccatgaggaagaacgagccctattataaggaagaaaaccgtctgtcgccccgtgacagtatgtgttatgaggcgccctttggtgcggggctttatttttatgtgcccccccccaggagaattccaccataataataacccccaagggattccactattactctcaggaggaacgactatcgccctatttgtgaa

SEQ ID NO: 525224 - DNA, 406 bp, Homo sapiens
tctcttctagaagaggcaagaagaagcgggggtgggggtgcaggccgaattgcctggaggttagggggaccctcagcgcgtgagtcagggctctgtgagaccccatggttcttcgctcactgtgggctgagacgcaagctgagtcgtccacaggaagataccctcttactctgaacaaccactctttcaaagaggacactgaggttcagagaggctccccaaagcaatggccagccaccatgggcaggacgtggactccggcccaggaagcctggctccagaatcatgctccaggcctttaagctgtaatttgtgtcctccagggttcacaatatttaagatttaatgtggaaaaatggtgctattctgtctcaccccatgccccaaaatgaacttaaaggcaaaa

SEQ ID NO: 525225 - DNA, 315 bp, Homo sapiens
tgaggtggtactagctcggatggtgcatgggtagacccgtagggcagcagggagaggtgtctcgcccggagtaaggtgcaccgtgatgttgttagctctccactgtgtgcattcaggggccatgtgtgaatggttagtcgctgcacaaacagaagacttgctgacaagtagagagcaggaggggaggtcgggggtaacgctgcgtcactcccagggtgagctggtttatagtctactgcagccagtaggcgagggcctctccaccccacccccatccccggcccccaaagctcaatgtggagtcttctaggggac

SEQ ID NO: 525226 - DNA, 273 bp, Homo sapiens
gactctagtaggatccccctcattctaaccagcgggcggtccccccgccgggtccgaccctcggggtccgcggttccgcgcggtgccatcgactcgagccggcgcctactcatgacacgtatttattaacaggtgcggaccaggggaatccgactgtttagtgcaaacaaagactatcgcgaaggcccgcgtagggtgtagaggcgatgtgatatctggccagagcactggaagtcaaagtgcaaaaattcaatgaagcgcgagtaagggtga

SEQ ID NO: 525227 - DNA, 728 bp, Homo sapiens
gctgggccgggttttgacacaatctttgtggggcgcccccccggtggccgcggtgttctcgcctcgcgcgggtgggttgtcccccccctcgtttcttatggcgggttgtgccctcccccccgcggggttggggctcacacgaggggccccatgcaggcgtgtttcatagggccctctctggggtgtctgtatacccgcgggggggcgtttgcagcgcagtgccaatccgcggagtgtgtcctgggcccccaccggggagaccccctggggtggggcgccgccgtgcggccccggcggcgggggagccctgtacaattgatggtccctctcctccccccccccccgagggatgggttttttccccctcgttctctggcgccgagtgcccccttcgtaggggaggtggctgtggggaaaatatattggccgccccccatagtatgtttttgcgggggggtgtgctacaccccctgtgtggggggcgtgactctcgtgtctccctgtgcaccccctcactgtgtctcggccacaggttttctggaggacgacaacactacactcgtctttcacagaagagggcgcccggggcgctaggtgtgtcgaccaggcgcccttcctcctcctccccccacacccgcccgaggggggggggtttttttccccccccccccccccttttccccaacaccccttccccttttttttttccccgggggggggttttttca

SEQ ID NO: 525228 - DNA, 1211 bp, Homo sapiens
  misc_feature (1)..(1): n is a, c, g, or t
nattgtttttcttggcgtggccaccacggggggggcgcatttttctcaccgccgtcctaattattcctaggaaccgccctttggtgtgtttatataatttttctctggcggcactaatttctgctgtcccgctgaatatgtccagtaggagggggcgcgcccttcaatatgtatgtgggccccgccacaaaattgttgtggagccgccctccttattgtggggtttgtttgtatcccgccacagaagtagccacaccacacccagcgcgttgtgtggcgcggttgttagggctccccctctcgagggtggatcccgccggcggttacactaatatttgtgggcgcaggacgtacagcgtggtggtggggccgcccacggtttctctacccgtgattgcgcccatagttgactacattgttggaacagagttatatttgtcccgctgggccacacacaccacgactggggttgtgattgtgagagagagggttaaaaaccacacatggggcgcaaccttttcatatagtgtagaaccggggtgtgtctcacaacacctgctgtgtgtggtttcgaggcgcaacaccacgcaagatacaatgtggggttcaaacaccctgctctggggaaaatagttggtgcccaacgcaacccactctatgtgtgagacatctgtggggaacggagagaaatattttcccacggaagaagatgttttcaaatacatcatttttgtaggaggcgtgttgtctccccacacagagaaaaccacgggggacaatcccccgccctcaagataaggccccggtgcgcccagatatataccttcctctggttggagccacccccctcctggcgccactgtcgccgccgtcacaaaaccctttgttgggcgccctctgcaaccaccctggatgctttgccactttttcctcacaacgcgaagtctgggctttggggggggctttacctcggcttttcgtgtgccccccagagggttctttcacggcgtgaggatctttttctcggagaggcctcggagacctaggctccgctgtttcctccctctccttcttcttccccaaccttgatcaccccgaagttctcccaaaaatttttttttttttttctccttttttttttttttttgttttttagaaaaaaattttggggaaaaaaatgaaaaatttttattaaaaaagaaaaatggtta

SEQ ID NO: 525229 - DNA, 315 bp, Homo sapiens
  misc_feature (21)..(21): n is a, c, g, or t
  misc_feature (72)..(72): n is a, c, g, or t
  misc_feature (124)..(124): n is a, c, g, or t
  misc_feature (219)..(219): n is a, c, g, or t
ttttagcctttctgcttcccngggaggctgagaacagggagccttctggggaccgctgggctcgggagctcnggttgctgggctcctggatggtgactgtgaggcccgagactgggcatcgttngcggggctgtcctgcggcgggcgggagtcgtggaggccttttcagcccctcttctctcctaggctcctacaaccccctgaccctcggcctgttcncgctggtctacttcttcctggcctgctcggcctacgggctcacggtgtctgccggggtcttcctcccgtccctgcttttcggggctggctggggcc

SEQ ID NO: 525230 - DNA, 581 bp, Homo sapiens
taccgagatgcatacacaagcaaatataacccagtatctctgcggccattactaagctaaggcagcaggacctggagcctcctgctttggagtggttcttcaatactgctgctgcttacgcgccgggaaactgggaaggctggtgagcgagaaggcaaggtaaggtctctgatttacgggggcatgccagttaatcctcctgaatgaggaagaaatgaaaggaagaggagcttgagagtcccttggctttgtcttctgagatgaggcttttaaaatgaaccaggagtctggctggccagttttgcaaacttcttgttcagaagaaccccttagaggcagctgaacatatagggcacattttcaaaagctgggaaagacagacccctttcacctatccctagagaaagatggtatggagcaaggcaggaggagttaaaaccagcttcctggcccagagaggtggcttacacctgtaatcccaacactttgggaagccagggcatgaggattgtttgagcccaggagtttgtaacttgtgaccatcctgggcaacatagtgagaccctgtctctacgaaaaaa

SEQ ID NO: 525231 - DNA, 147 bp, Homo sapiens
gaacaaaagcacataactaaaaggaagacaggaaggaaagaaggcaggaagagaaggctgcaaaacaaattagaaaacaagtaacaaaacgacaggagtccctacattatcaactaatcaacatagaactgtaaataggactacaac

SEQ ID NO: 525232 - DNA, 526 bp, Homo sapiens
  misc_feature (62)..(62): n is a, c, g, or t
ccctttttgtgatggtgatgctaatcccttcctggtttggtaagttttccttctaacaagtnagccccctctgctggaaaatctgctgcaagttttgctgggtggtcccacttgaagaccctgtcttgtctggtattaccccgtggagtctgcagaacagcaaagattgctacctgttcccttccctctgggagctttgtcccagaggggcacccgccagatgccagctggagctctcttgtatgaggtgcctgttgacttctgctgggaaatgtctcccagtcaggtggcatgggggtcggtgacccacttgaggagtcagtctttcccttagcaaagctcaagcgctttgctgggatatctcttcagagcaggcaggcaggaacatttaagtctgctcaaacttcacccacagcctacccttcccccaggtgttctgtcccagggagatgggagttttatctataagcccctgactggggctgctgcctttctctcagagatgccctgcccaagaggaggaatc

SEQ ID NO: 525233 - DNA, 516 bp, Homo sapiens
tttcattctgctgctgcaggttggagaacagcgatgcgatctcagcttactgcaatctctgcctcgcaggtataaagtgattctcctgccttggcttcctgagtagctgggactacaggcacgtgccaccatgcccagctaatattggtatttttagtagagatggggtttcacctatgctggccaagatggtcttgatctcttgacctcgtgatccacccgcctcggcctcccaaagtgctggggttacaggcatgagacaccatgccctgcctaggaatttgcatttctaacacattcccaggtgatactgctgctgctgctcctgctgctgctgctgctgctcttcctgctgctgctgctgctcctgttgttatttggcccaagagcactgctaatagcgtggcttcattgatcagttcccagccctgtcccttggttcaactgacttgtggccatcctggtcacgtgttcttctctggtccattcattcatggccagtgtttcgagttcatc

SEQ ID NO: 525234 - DNA, 339 bp, Homo sapiens
ctacctggagaggcaggcgcaaaggcgtgtcagttggacgagtaaggtaggtaggatagcagtccatgagcctacaagacagcgtaggtatccactaggtcataagccatacctatatcgggtagactattccataccctatagaaccaaggtcatagtatagcacttaggctacccagcatagtatagtacaccatataccaaaccaagaaatataggcacaaaatagctaaactagtagtaccgggagtatagtaaagcccaatatttactataaatagtaaagtagctagactatacctataaacaatattcctacataatactactatactaggc

SEQ ID NO: 525235 - DNA, 714 bp, Homo sapiens
ggcaaatgtacctcacctgacgctcctgctctcttttccacgtgcgaaagccccggactctttcagttgtgaacgccgcggactccgtgtagccgactcaaaccaggactcgccatgaggccgaggaattcagtccccgctgggggtggctttgtgacgggccgaaggcgcgcgcttttgtgtgaccgctcgcgtgggttgtggctggccggactggcgcgctttggcggggggccagcccgtcgaagggcgggacggctcccacaggtcgtgcttacgactgaggagtgtggccggcgggcgccgcgcggtgtccgagcgccctggagccgtggctggctgcttcccctttcctgttggaccattctgctagctctgtgaagatccgatttacccgcaggaggcacaacagctcgcgctaggcacattgtggtgctgttgacccagcctttggggtctaggtttgatcgggccatacgtggtgcgagggaaaccgaacgattgccacctcgccctgcaggcaaggaaccctgggcccccgtggggcgagaatcacgccagggtgggaggaggagcggacgacgtcctcggatcttcgcccaacgcgagtaatcaccagccacttgaggtaccctgaagccctggaaacccctttttctgtacgatacgctacgtagaaggtaactcctgggtgtggtgtggaagcattattct

SEQ ID NO: 525236 - DNA, 242 bp, Homo sapiens
cgtggcgtcttggtgttgtccacgctggttcgcaggtgacgagatggcctttgtgaaaagtggctgattgctagtacagagtactatttggaagcgctggaagaagaactggtttgatctgaggtcggatggtcacctgatctattatgatgaccagactcaggagaatatccaggataaggtccacatgccaatggactgcatcaacattcgtacggggcaggaatgtcgggatactcagt

SEQ ID NO: 525237 - DNA, 421 bp, Homo sapiens
aatgggctaatccatcttggtgaccgtgagcttttggctcagccttcttcacggaagttttgtgtctccttttcccatgggagctgccctcacttcctgttcttagtggagtccatcatctggtcaattttgtattggaagtcactgggcaaatggcgtgtttggacgagtgcagatccagcagttgcagtagcacccagtgagactggaacacctagtctgcagtgtagagggatgaagatctctcattttctttggtctcctcccagccgttaaataagctcctcaatctcatagagagaaacctggggaataattaccacaggagtacagaaaccttgaaaagaggctttgatgcaggacctgatagtgtttggcacaacagaagtgtacgagggttagcacatactggcgtcgacgc

SEQ ID NO: 525238 - DNA, 116 bp, Homo sapiens
cttgcggtctcatacacagaataggataggggatcagcatctggtggccggctcctcaagggcatggatgtggaccacattacttctgcttggtcttctgctggtgctggtgctgg

SEQ ID NO: 525239 - DNA, 135 bp, Homo sapiens
  misc_feature (67)..(67): n is a, c, g, or t
gatctatctctgtgtccaagtctcctctttttataaggaaaccagtcataatggacccacctgaatnacctcattttaacttgattacctctgtaaaaaatgtatttccaaataaagtgaccttatgaggtattg

SEQ ID NO: 525240 - DNA, 401 bp, Homo sapiens
gatgtacctctcggagaattcatcatagaagtcgaacggcatagccattccagcatataagtgtgcgctcagtgtactaccatgtcttgacagcaaaaaccctggcgacaaaagccaaaattgacaaatgggatctgattaaactaaagagcttctgcacagcaaaagaaactaccatcagagtgaacaggcaacctacagaatggaagaaaatttttgcaatctatccatcttacaaagagctaatatccagaatttaaaggaacttaaacaaatttacaaaaaaaaaaaatcaaacaaccccatcaaaaagtgggcgaaggatatgaacacacacttctcaaaaaaaataagatatttatgctcccatttctttacaggtgagtgaccaaggtttggga

SEQ ID NO: 525241 - DNA, 121 bp, Homo sapiens
  misc_feature (25)..(25): n is a, c, g, or t
caaaaacacttattcccactctcgntcttttccactgtgtgaagtttatatttaaggcctgcagacagctgattcagcttcgaacagatcagttccctgaaatcagccaacatctgtcttg

SEQ ID NO: 525242 - DNA, 341 bp, Homo sapiens
gtcgacttttttttttttgagacagagtctcgctttgttgcctaggctggagtgcaatgatgggatgtcggctcactgcaacctccagctcccgggttcaagcaattctcctcctatttcaacctcccaggtagctgggattacaggcgcccaccaccacacttggctaatttttgtatttgtagtagaagtggggtttcaccatgttggtcaggctggtctcgaactcctgacctcaggtgatccacccgccttggcctcccaaagtgctgggattacaggtgtgagccactgtgcccagcccaaactgtacacttttaaatggtgagttgtatgatatg

SEQ ID NO: 525243 - DNA, 497 bp, Homo sapiens
  misc_feature (497)..(497): n is a, c, g, or t
aaacggctttttgtattgcatgtggataatactctcattacgcactcaacctcgtgttggagggtttaacatggggtcttttgctcttacaatgaaaagtagcttctcaggtgcatcgtccaataggacacttattatatcactatgatcagataaggtccttataaacagggaatgctttttgcaacggccttttaaacgtaacccgtcaggtaggctacccccaggaggaggggatgaccttatccaatagggaggctggagtaggggatgatgtctataagggctctgtttatggaatacctccgggccatgccagtgtcccaaagaatgccaccttcatagccattccgagcagaggctctagagttgtgccagcttgggcctaactctatgagtatggtcacgatgacactggtttatgcaccaagccggaccgtcctggacagttcaggtgactgcaaacttatgattgtcattgacccaggcactgaacn

SEQ ID NO: 525244 - DNA, 938 bp, Homo sapiens
aagcagtggtatcaacgcaagcgccactactgccgggctaattttttttgtatttatagtagagaccgggtttcaccgtgttggccaggctgatcttaaactcctgacctcaaatgatccaccaacctcagcctcccaaagtgttaggattacaggcgtgagccaccgctaaagatgcttttaactgtgtgtttatcatgccttgctgacattggtgcactcatatcttctatttaacatttgtccttatcttatctctacttatgtatcgatttaagggttcagcctgtcaatgggtcctaatcatagcaagtaatctgagctgatatgctgtaaacagacattatacttatgatgctgtgccgtgatatttagacagcctgcaaggcttgggtaatagatcagccaactctgtgctgaaatgcacggtatgatgcctgcttggggctcattatgctgccagagcgtgcctgcataagcccttgtgatcgtgtctggtgcttcaggcaggtcaccaggcagtttcctggttaaaacctgcattctgacaacaaacagaacaggctgaaactgcctggaacatcatttaacaaacctgaatttccacataaggatgagctttgcataaatgacggagtctgaactagcgtacgacaggggtctcgtgacaaggtactaactggtgacctgacaattcttacattgactccacgatattgacacaaaaatgcttgaacaggtctgtaggtggggacctgagggaaacgtggcctaagcccagttgcatggctacattaagcgtagcccacactgggggacgactacagtggcgaaacactgtgcccacaaccccgtaatcatggggaaaggtaagtcctgggtcacgttggcctacggagccgtccaagagcacacaaacacacgcgtctgggaacccc

SEQ ID NO: 525245 - DNA, 273 bp, Homo sapiens
cgtcatgcgatagatatacacaggactgaaatctaaggtgtcagcagggctgtgtaacttcttgagggactactaggaggcaagtccatttaacttgactttgctagtatctagaggctatcctgtcatactttggctcatggacctcttcaaccatgcgatatgtaaacctgcagtatcgcatcttcaaattctctttgactctgatctttttgcctccattttccatgtcaaaaggacacatgtactgggccaacagagggtaccgagctc

SEQ ID NO: 525246 - DNA, 249 bp, Homo sapiens
ttaaaccagtgtcagtgggtcatagggtccttttttaaaaaatttgagacagagtctcattgtgtcacccaggctggagtgcagtggcacaatcacggctcactgcagcctcgacctccctgggctcaggtgattctcccacctcagcctcctgaatagctgggaccacaggcatgcgccactacacctggctaatttttgtatttcttatagagatgaggtttctccatgttgtcccggatggtctaa

SEQ ID NO: 525247 - DNA, 179 bp, Homo sapiens
gcccaggctgcacacagctcatttttaacagttttctttctgcttcattcacacactcttcgccccagcgttcccatgtctttggcaatctgctgggctgtttagtcttgggtttctccttcttctctttcccctcttttgcaggcggcaggcccgactggtgctgggacgaagactgg

SEQ ID NO: 525248 - DNA, 106 bp, Homo sapiens
ggaggtgataataaggaaccatgtcagttcggatgacggcctgcatggccggctgcacctgctgcacctatggacagacacctacctagacagtgcgcctgaggtg

SEQ ID NO: 525249 - DNA, 369 bp, Homo sapiens
  misc_feature (138)..(138): n is a, c, g, or t
  misc_feature (211)..(211): n is a, c, g, or t
gcctccctaggagatgcccggtggctgacacccagaggaagcacagcctcccctctgaagcttcctctactgcagtctctgtgctcatcgcaaggatctctccatattgacttatatttgtttctggtcttatatttntctctatggacagacttctattttcagaagatagatatttaagtcacaatattctggactctggcttagttangaccaaccggtctcttgatcgtctgtggaaactgaatcaggaacaccccagagagctggctctggatgtaattcacagcttcatttaattattatcatcaaagttaatgaaggccataaactgtttcataacataccaatgggaagtgtgattggagg

SEQ ID NO: 525250 - DNA, 283 bp, Homo sapiens
tctccagtcgcaacgtctcctccaaacaaaaccatcaacttattttgtatttctataagcatacaaggactgttaaagatgtgacagtgtacattatatgacaatgcacatttagcctgcaagtcttttatagcgtcgtttcagcagactacgatgaataatgcagatttcagctccagcactttagtttcaatagaaatttcctgcctccctccaagatgcagggtgaggaggatgcttggggttgcgactggagtgagacgggtaccgagactcggaaatc

SEQ ID NO: 525251 - DNA, 429 bp, Homo sapiens
gtacgaccacgcgtcggcagaggggtcatacggggttgtctggattccgtcgtaacttaagggaaatttcacaatgtcggagccttgatgtctgcaatgaaggaggggatgtcttagtcttgcagaggaaccacaaggtgcacatcttgatcagatggacagacatctatacaggacaagtgtgggctctatatcataaatctcaagaggacctgggagaagcttctgtggaagctcgtgcaattgttgccattgaaaacctgtgatgtcagtgttatatactccaggaatactgtgcagagggctgtgcttgaaagtttgcttgctggcacttggagccactccaaattgctgggcgcttcacgtccttgtggaacctttcactaaaccaagatccaggcaagcttcctgggagccacgggttcttgt

SEQ ID NO: 525252 - DNA, 202 bp, Homo sapiens
ttttttttttcaaggtttttggcttctttgccatgggttcgaacttcctcctttagctcagggtagtttgatcgtctgaagccttcttctctcaactcgtcaaagtcattctccgtccagctttgttccgttgctggtgaggagctgcgtaatcattctgtttttaatttacaagtccatgaaacaggatccaaagtcgacg

SEQ ID NO: 525253 - DNA, 110 bp, Homo sapiens
ctacacgcacggggaacctacacacgggggaacctacacgcacaggggaacctacacgcacaggggaacctacacacaggggaacctacacacacaggggaacctgcaca

SEQ ID NO: 525254 - DNA, 1043 bp, Homo sapiens
agaggtgccgcccttagaatcagagaaagatgctgcattttattaatctaaagtcccaaactccttttcttatcttgatccatactaataaatatcctctccataagcattgccattggaaggcgtgtgaattgactgcaagagtgtgactttaacatgggggaaatcgtcgtatatcactaaaagcatgaattggaactgcaagtgagagagtcaaatttactttaaaagagaacattaatatggcttcaccaagaagcaaagttcaacttatttcataacttgcctacatttatcatggtcctgaatgtagcgtgtaagcttgtgtttcttgggcagtctttcttgaaattggaagaggtgacacatgggggtggggagtgggaggaagaggtgacttcctctggtgttattataaagcttaaatttgatatcattttaaaatgtcttggtcttctactggcttgaaaaatgacaattgtgaacatgatagttaagaggtaccacgtttttttaaccattgatgatgcaaaatttagaagaacaagttattggcatggttgtagcatatagttaaacctgagagtaattcatctgtgaatctggtttaattagctggtgagtaacttagaacagtggtgtaaacttgtaccatggaattcttgaatatggcttaatttagaaactggacaaatattccggtcatattcactcggggagggtacataatggacccaaggggaccggatgacccatggtgtctggtgagacacatatcttggcgggcacagtttgggagtgaaacactttgggaaagaaagttccgcgcaagtgggcgccaattaaatgtgtgcccacatatccgtgttatagaaataaagcaccgaatctcgtcggggggtcatcaaaaagtgaaccatatcaaagaggggcgatcattacagaaactctatgagaaatacaagatgattaagaaccccctgagaatgttcgcacccagtcaggccagcggcgtacacggacagcaaatacatacaaggcga

SEQ ID NO: 525255 - DNA, 83 bp, Homo sapiens
gccctgtacttctgtgccagcagggtttggacaggggagggtcagccccagcattttggtgatgggactcgactctccatcct

SEQ ID NO: 525256 - DNA, 598 bp, Homo sapiens
tctcaaaattcaaaaaccttcattatgaaggcagaagtggggggagggccattgacaggggaaaacaaatgattgatttggggggtgacagcgagcaagtttgggactacaaaccccaagtagatttcgatcactgtgggcccgtgaacaccccgttctgggccccctggggacagccccccgcactcgtggagtcgtggcaagggagctcacactctcttgggtcgtgcgggaacgcacccatcaaggtgaggggggcaccgtgggaaggcttggaaaagtgtggggcacttccttttgccgtcgtggtcacgacccagtccgtggagggaaaaggggcccttcacccttgggtcgtggagtttcccccggagggtggcgtgagggggatgaattttgtcccgtgtccatattatagtgggcgagaatacccgcgcaaaatcgcgtggtccgtcctcgcgagaatgtgggccaaacttccctgtaacacgccacaaggggctctcaaagagtgtgccaagtcacagagcggggggccacgaggggccgtggagaggcccctctgtggtgaaggtcccgacaattcgtggccccggga

SEQ ID NO: 525257 - DNA, 298 bp, Homo sapiens
tcgtgccgaattcggtacgagcgggacgagagacaatggaaaatctgggacttgctcaaaattgtactatctctattcatgattatgaagtttttcgatccgaagatctactggatgaaagacagataaaaggggtcattgagcttaggaagagcttactgtctgacttgagaacttatgaaccatatggatccctggttcaacaaatactaattctgctgctgggtccatatggagttgggaaggtcagctgtgttaatttactgaggtttattgtccaagggcatgcaacgcatca

SEQ ID NO: 525258 - DNA, 308 bp, Homo sapiens
  misc_feature (119)..(119): n is a, c, g, or t
  misc_feature (134)..(134): n is a, c, g, or t
  misc_feature (151)..(151): n is a, c, g, or t
  misc_feature (175)..(175): n is a, c, g, or t
  misc_feature (185)..(185): n is a, c, g, or t
  misc_feature (282)..(282): n is a, c, g, or t
  misc_feature (291)..(291): n is a, c, g, or t
gaaaaagccaaaattgtcatactgttgttaagcaacagtatgacaactatttacatagcattaaggttggtgcaaaaatgcaaaaataataaaaaagcaattatttttaaaccaacctnatatattgtattagntattaaagtcatctggncatgatttaaagtatatgatgccngcctggacanaaggcgaaaccctgtctctacaaaaaatgcaaaaattggctgggcatggtggtgtgtgcctgtagtcccagctactagagcgactgaggcaggaganttgcttgancctgggaggcggaggtt

SEQ ID NO: 525259 - DNA, 349 bp, Homo sapiens
  misc_feature (27)..(27): n is a, c, g, or t
aataccggattcccagctgatgtaganccttctcaccattacttcatccctgtcatctgatggggtcctcactgtgaatggaccaaggaaacaggtctctggccctgagcgcaccattcccatcacccgtgaagagaagcctgctgtcaccgcagcccccaagaaatagatgccctttcttggagctgctgtcaccgcagcccccaagaaatagatgccctttcttgaattgcattttttaaaacaagaaagtttccccaccagtgaatgaaagtcttgtgactagtgctgaagcttattaatgctaaggcaggccaaattatcaagctaataaatatcattcagcaac

SEQ ID NO: 525260 - DNA, 1590 bp, Homo sapiens
atccacgcgtccgggagagctggtggacagggttggcaattcaggaggcatgcaaagctggtcgtgaggagaaaattcatgcatgcaatgggaaagtcacacttttggaacatatttcagttcataaattttttcgtgacgctttcgtcagatgtgttctacatacttcaagttagcctatgattctaccagctaattcattacagtcaaaccacatcgtcaagtgtgtctccctgtatgggcagcagagagcgatctgggcaaaaactcattgtctcatacacatctaggctagtgtgagcaggtgagatccaagggctgcagcatgtaggccagcaacgatgcatctctggtaccgctcgtctctaccttcatcttcttgcacggacaatatagatcgctagcaatagacgcacacagccaagcatcggtctggaggcgtaaattgcgcccaaaggacctgggctctagcacgagcacaaggggcatttcccacacgtgtgccgatgctagaactcgccatggttcttgaattcacccaagaggacaccaccttcccatgtaccaccactacccatacgacaagagaacatatgacgacgcaacatttacacgaatacccgaaggtttcacacactgctccacacactcgtagactcaccgctgagcgtaaactgggcacgctatacgcgtacaaacccagaaccaacaccccgaaggccagccacaggtacccgcgcaacgtactccccgaacgccacacaatccccgatggggcgcccacggaccagcggcccacgccaccaggacggcacaacaacaacgtagggaatatccccaagcaagcctaggactatgagaatctccccaaccacatcatacccctccaaatgagccaccaaacacaggacacggcgacaccctccacatgggcctacacagacaaccgatctcccttggcccacaggccagcagaacaggaacacgtgccatggccgaccgacacccgatatgaccaagacatggatccacacaattgcacgaccacgcaccggggactgacacacaagactatctcataaaacgacacaccagccacgcacaatcatcatacacgaccacaaaagaggacccgcacccccggcaagcaccgcagcccaagaccgcggcaccacactgcaagagcccgtagacaacgcaccccccggcagcacctaacgccgcacccacagccgagcgcaaccaacatcaggaccacagaaatacccgacttgagaccgggaccccagcaacacacagaccacacaagagaccacaccaggcgaacagagaaaacactccacgatccgagaaggacacaaaccacaccccacacgaacgactcaacgagaccacaggacatgcaccgaacgaagacgaagagacgccacaccacgacacctagcagacaataagcccacacaacagacacaccacgagacccacaatcaaaacagagcacaacggaccaccgaagaaggagcagacacacacaaagataacagaagaaacaaacaacgcagacaacaaccaacacaaagcaaacaaaaa

SEQ ID NO: 525261 - DNA, 374 bp, Homo sapiens
  misc_feature (61)..(61): n is a, c, g, or t
  misc_feature (64)..(64): n is a, c, g, or t
  misc_feature (291)..(291): n is a, c, g, or t
actcctggactcaagcgatccgccacctcggcctcccaaagtgctaggattacaggcgtgnacncacaccggccttctatttttcttaccagcatgaattaaatcctttttgtctttttcttttttttgagacagagtcttgctctgttgcccaggctagagtgcagtggcaccatcttggctcactgcaacatcggactcccagggttcaaacgattctcctgcctcagtctcccgagtagggtggggactacagggcatgtgccacaacacctgggctaattttttgtnattttttagtaggagacgggggttttcaccatgtttggtcaggctgggtctttgaactcctggaccttgtggatcttgccccg

SEQ ID NO: 525262 - DNA, 335 bp, Homo sapiens
gagacatcgcttttcgctctgtgggaatgcctgacgcaccgtcgcgaagctcacagaagacagggcgacccggatgaccaactacttccttaggatgatccacctatcggatgacaatacgaagtgttatattgtgggagcagacaatgtgggctgcaagcacacgcagcagatgcccatgtaccttcgcgggaagggtgcgcggctgaagggcaacaacaccatgaagcgcaagggcatccgagggcacctggttgtggtcaccaatgaggacctcactgagatcagcgacatgtgggtggccaatggcgccagctgctgaccgtgctggtgcc

SEQ ID NO: 525263 - DNA, 155 bp, Homo sapiens
tactgcatctatctataatgcgtgcatcgcaaagaccattgaaaatttagaaggggctctagatgggaaggctcctcaagatgcctggcttgggtaactgaagctaaggtgaaccggggatacattggatctcctttgggaattgaggcccgcag

SEQ ID NO: 525264 - DNA, 459 bp, Homo sapiens
tgctgttgttcattgacatgtcatgactgcgggagcagtgcatgccctccagcgggcagcatgcttgctgcagcaggcggcgcggctgggctgccggcagtttgtcacagccacagatgttgtccgagggcaaccccaagttgaacttggcttttcttagccaccctctttaacagcataccctgccctgcacaacccagagaaccaggacattgactggggggctcttgaaggtgagacgagagaagagcgtacatataggaactggatgaactccctgggtgtaaaccctcaagtcaatcattagtacagtgacttatcagatgccctggtcatctaccagctctatgaaaagatcaaagtacctgttgactgcaacaaagtaaacaaacccgccataccccaaagtgggaagcattatgacgaagctagagaattgacactacgcgatagcattgg

SEQ ID NO: 525265 - DNA, 160 bp, Homo sapiens
tgccaatgatttccctcatgagaataattctgagtcacatcgctggggtgccatgttgggcttcagcaaggtgcttccaggtagatgtggtggtcactcagagccttgtagacagcagacatgaacttctcggtcacatactggcagcgcttcaagtcat

SEQ ID NO: 525266 - DNA, 302 bp, Homo sapiens
aagacggatcatgatataacagacacaggaaactacgatactctgactacacaacatagtaggaactaaagactatcttttccaggtacaggttgcagattccgccagacagcacagcaagctctacagatgagtggctcttaggcatttggtgctgtggcagatttgcaaacaagactttcccagcagactgaagcttcagactttaactgcagctgcctctgtacagccacttgcaccacaatgtatccaactctctaacatgtttaaccctcaaacagcagaagaagttggatgggata

SEQ ID NO: 525267 - DNA, 198 bp, Homo sapiens
tcctcaacgcttatacttctcaagcttatacttcctcaagctttatacttactcaacgctttatacttcctcaagagctatatacttctcaagcgctttatacttcctcaacgctttatactttctcaacgctttatacttctcatttcatttcccggtatgaagtataaagcgttgaggaagtataaagcgtttgag

SEQ ID NO: 525268 - DNA, 1234 bp, Homo sapiens
tacagctaaaaaaaatttttaattggaaggggggagtctcgggattctggttggcagttacaacgggatctcagggaacgcccgctatctaccaccagtattcacctggtactggcgttggaactgggctctctctacgaggctcgatcatatatcctcctctggaagctctgtgaaccggtctcgaaggatgtggccctgcgggctaacagggtccgaggagggatgtatctgagtgcagttccccgaagtcccagttggcactgtacaattgtacgaggtgagcctcgggtacatctagtggacctctgtccacagctcttggcggggtctgtggtccaagctctacagactctcccacggcgccggcgctctagacgcagaccgctctacgcgaccgaccagatagcacagttatcacggcacaaggctctacaggggcacaccacgaggggcctaagagatactccgggggcaccatgccgggagaacaggctacccaagggatggccccgagagaagcaccgggggcgagcgcccagacacaagagcgagggcctaggggtaaggaaaccccacagaaagccttggtgtggcacaacaagagcgtctatacataacccccagccacgagcaacaggctaagcatgagccaccacgggaaactacaactaacacatcacctgagggggggaggcagccacaaggggagtaggagcaagagcagccagtgtgaaggcgaaacaaaagaacctcttacggggggataatacccccacaaaggactcatgcccgggggcctcctctcacgggccctcctggggggaccttggagggatccaccccctcatacaaacatacatcccaagaagtaggccttacacacaacgagagaagggccactcataacggacacaaaagaaggatctaaccccgagggaaaacgcggtgcgggacacctacccccgtgggagatgagggaagggatccacgtggatcaccacccgataagggtcgcgggagacaagggcggcccccaggactattggcagcggatataccacacgaagtatacgctaccccgagcactcacctttaaactaggacccagtattgaaacaaagctaccacacaccttacgtgagggggcccgcttctgaaaaacaagcacagggacccaaggggggaggggacacttatcaccacacgagggcgaatggagtccacttcgtca

SEQ ID NO: 525269 - DNA, 139 bp, Homo sapiens
agtgctcaaaattcaaggcctgaacgtttaatttttttcccattaattccttaaatccggttacttatttaggattaacataatgaaaacaggccatggttttgcagcctgtattctatataggaggcattgtgtagga

SEQ ID NO: 525270 - DNA, 1379 bp, Homo sapiens
  misc_feature (12)..(12): n is a, c, g, or t
  misc_feature (14)..(14): n is a, c, g, or t
  misc_feature (16)..(16): n is a, c, g, or t
  misc_feature (18)..(20): n is a, c, g, or t
ggctggtacggncngnannntaggatcgcccctcgccctctagccccctcccgcgggagtcgcggcgctgcgggtaggagccgggttgcgggagaccccaggttcggttgggattcccagccagaacggagcttaagccgggcaggcgagcgaatgacggagtagcgagctgcacggcggcgtgctgcgctgttgaggacgctgtcccgcgcgctcccaggccgccccgaggcttggggtcttcgaaggataatcggcgcccggggccgaacagcgggggcacacggggcgctgccgaagtgcaaggccacggccagagctcgagcccgacgcgctgtctggagtcgtaggaccctgacgtggctgaagcggccccgggagcatgagcgggcagcgcgtggacgtcaaggtggtgatgctgggcaaggagtacgtgggcaagactagcctggtggagcgctacgtgcacgaccgctttctggtggggccttatcagaacgtgagtgcatccggaggggccaggcacggtgggcgggggagtggggggccggtaatctgcacctatggccccgatctcttccctctcgttgcagaccatcggggccgccttcgtggccaaggtgatgtcggtcggagaccggactgtgacattaggtatttgggacacagcaggctctgagcgctatgaggccatgagtagaatctactatcggggtgccaaggctgccatcgtctgctatgacctcacagacagcagcagctttgagcgagcaaagttctgggtgaaggaactgcgcagcctagaggagggctgccaaatctacttatgtggcaccaagagtgacctgctggaagaagaccggaggcgtcgacgtgtggacttccacgacgtccaggactatgcagacaatatcaaagctcagctctttgaaacatccagcaagacaggccagagtgtggacgagctcttccagaaagtggcagaggattacgtcagtgtggctgccttccaggtgatgacagaggacaagggcgtggatctgggccagaagccaaacccctacttctacagctgttgtcatcactgagtcagcactcacctggcctgggggaattaaaggaattccccgtaagggctggacccagctcctttctgggcttgggtagtcaaatgtctgagctaccccaggtcctcatgtcagcagagtggcgcctgcctgtgctggcccatggaacggagacagcattgggctgactgtgggcatgaggagggataaggctgatttggaccccaggcttctgccctggacagcacttgtgtctgcagattatttaagtggcttttgatctgtaaataaaatcagtgcactgtgaatcac

SEQ ID NO: 525271 - DNA, 981 bp, Homo sapiens
  misc_feature (12)..(12): n is a, c, g, or t
  misc_feature (14)..(14): n is a, c, g, or t
  misc_feature (16)..(16): n is a, c, g, or t
  misc_feature (18)..(20): n is a, c, g, or t
  misc_feature (926)..(926): n is a, c, g, or t
ggctggtacggncngnannntaggatcgcccctcgccctctagccccctcccgcgggagtcgcggcgctgcgggtaggagccgggttgcgggagaccccaggttcggttgggattcccagccagaacggagcttaagccgggcaggcgagcgaatgacggagtagcgagctgcacggcggcgtgctgcgctgttgaggacgctgtcccgcgcgctcccaggccgccccgaggcttggggtcttcgaaggataatcggcgcccggggccgaacagcgggggcacacggggcgctgccgaagtgcaaggccacggccagagctcgagcccgacgcgctgtctggagtcgtaggttggcgccgtttggggtcggggtctgaggcttgggcgctgcctgggccgagcggagatcggggtttgcctcccgtccccgctcaggaccctgacgtggctgaagcggccccgggagcatgagcgggcagcgcgtggacgtcaaggtggtgatgctgggcaaggagtacgtgggcaagactagcctggtggagcgctacgtgcacgaccgctttctggtggggccttatcagaacaccatcggggccgccttcgtggccaaggtgatgtcggtcggagaccggactgtgacattaggtatttgggacacagcaggctctgagcgctatgaggccatgagtagaatctactatcggggtgccaaggctgccatcgtctgctatgacctcacagacagcagcagctttgagcgagcaaagttctgggtgaaggaactgcgcagcctagaggagggctgccaaatctacttatgtggcaccaagagtgacctgctggaagaagaccggaggcgtcgacgtgtggacttccacgacgtccaggactatgcagacagtagctgtcctcagccttggggggngggggtgttttcttttcttgtttttttctcttccctgtttgccttttatatttgg

SEQ ID NO: 525272 - DNA, 144 bp, Homo sapiens
aaaatatgaattaaaaaacagagacatacaggatatggtgactcacacctataatcccagcactttgggggcttaggcaagaggatcagttgagtccaggaattcaagaccagcctgggaaatatagcaagactcccttctcca

SEQ ID NO: 525273 - DNA, 1510 bp, Homo sapiens
  misc_feature (12)..(12): n is a, c, g, or t
  misc_feature (14)..(14): n is a, c, g, or t
  misc_feature (16)..(16): n is a, c, g, or t
  misc_feature (18)..(20): n is a, c, g, or t
ggctggtacggncngnannntaggatcgcccctcgccctctagccccctcccgcgggagtcgcggcgctgcgggtaggagccgggttgcgggagaccccaggttcggttgggattcccagccagaacggagcttaagccgggcaggcgagcgaatgacggagtagcgagctgcacggcggcgtgctgcgctgttgaggacgctgtcccgcgcgctcccaggccgccccgaggcttggggtcttcgaaggataatcggcgcccggggccgaacagcgggggcacacggggcgctgccgaagtgcaaggccacggccagagctcgagcccgacgcgctgtctggagtcgtaggttggcgccgtttggggtcggggtctgaggcttgggcgctgcctgggccgagcggagatcggggtttgcctcccgtccccgctcaggaccctgacgtggctgaagcggccccgggagcatgagcgggcagcgcgtggacgtcaaggtggtgatgctgggcaaggagtacgtgggcaagactagcctggtggagcgctacgtgcacgaccgctttctggtggggccttatcagaacaccatcggggccgccttcgtggccaaggtgatgtcggtcggagaccggactgtgacattaggtatttggacctcacagacagcagcagctttgagcgagcaaagttctgggtgaaggaactgcgcagcctagaggagggctgccaaatctacttatgtggcaccaagagtgacctgctggaagaagaccggaggcgtcgacgtgtggacttccacgacgtccaggactatgcagacagtagctgctcctcagccctttggggggtgggggtgtgtggctgtctgggtggatcaaagaaaatagggactgccttggctgccagggcaaggtgctctaggaggtcttcctggcctccttgaactgtggggtccaggagactccctgaactgctagccctcccttttgtctgtttatctaattctcaggtatgaggctttagtcacttctctttacagatatcaaagctcagctctttgaaacatccagcaagacaggccagagtgtggacgagctcttccagaaagtggcagaggattacgtcagtgtggctgccttccaggtgatgacagaggacaagggcgtggatctgggccagaagccaaacccctacttctacagctgttgtcatcactgagtcagcactcacctggcctgggggaattaaaggaattccccgtaagggctggacccagctcctttctgggcttgggtagtcaaatgtctgagctaccccaggtcctcatgtcagcagagtggcgcctgcctgtgctggcccatggaacggagacagcattgggctgactgtgggcatgaggagggataaggctgatttggaccccaggcttctgccctggacagcacttgtgtctgcagattatttaagtggcttttgatctgtaaataaaatcagtgcactgtgaatcac

SEQ ID NO: 525274 - DNA, 160 bp, Homo sapiens
ttagagttgtgagttgtgtagcgagttgtttagagatgtttagagttgtgtcacggaatatgaccgccagcactaaaataagagtacgagcacgcaaaggccaccccgattatagcgcatcgttactgcctgactggctaacctgtcaaccttctatcaa

SEQ ID NO: 525275 - DNA, 1604 bp, Homo sapiens
  misc_feature (12)..(12): n is a, c, g, or t
  misc_feature (14)..(14): n is a, c, g, or t
  misc_feature (16)..(16): n is a, c, g, or t
  misc_feature (18)..(20): n is a, c, g, or t
ggctggtacggncngnannntaggatcgcccctcgccctctagccccctcccgcgggagtcgcggcgctgcgggtaggagccgggttgcgggagaccccaggttcggttgggattcccagccagaacggagcttaagccgggcaggcgagcgaatgacggagtagcgagctgcacggcggcgtgctgcgctgttgaggacgctgtcccgcgcgctcccaggccgccccgaggcttggggtcttcgaaggataatcggcgcccggggccgaacagcgggggcacacggggcgctgccgaagtgcaaggccacggccagagctcgagcccgacgcgctgtctggagtcgtaggttggcgccgtttggggtcggggtctgaggcttgggcgctgcctgggccgagcggagatcggggtttgcctcccgtccccgctcaggaccctgacgtggctgaagcggccccgggagcatgagcgggcagcgcgtggacgtcaaggtggtgatgctgggcaaggagtacgtgggcaagactagcctggtggagcgctacgtgcacgaccgctttctggtggggccttatcagaacgtgagtgcatccggaggggccaggcacggtgggcgggggagtggggggccggtaatctgcacctatggccccgatctcttccctctcgttgcagaccatcggggccgccttcgtggccaaggtgatgtcggtcggagaccggactgtgacattaggtatttggacctcacagacagcagcagctttgagcgagcaaagttctgggtgaaggaactgcgcagcctagaggagggctgccaaatctacttatgtggcaccaagagtgacctgctggaagaagaccggaggcgtcgacgtgtggacttccacgacgtccaggactatgcagacagtagctgctcctcagccctttggggggtgggggtgtgtggctgtctgggtggatcaaagaaaatagggactgccttggctgccagggcaaggtgctctaggaggtcttcctggcctccttgaactgtggggtccaggagactccctgaactgctagccctcccttttgtctgtttatctaattctcaggtatgaggctttagtcacttctctttacagatatcaaagctcagctctttgaaacatccagcaagacaggccagagtgtggacgagctcttccagaaagtggcagaggattacgtcagtgtggctgccttccaggtgatgacagaggacaagggcgtggatctgggccagaagccaaacccctacttctacagctgttgtcatcactgagtcagcactcacctggcctgggggaattaaaggaattccccgtaagggctggacccagctcctttctgggcttgggtagtcaaatgtctgagctaccccaggtcctcatgtcagcagagtggcgcctgcctgtgctggcccatggaacggagacagcattgggctgactgtgggcatgaggagggataaggctgatttggaccccaggcttctgccctggacagcacttgtgtctgcagattatttaagtggcttttgatctgtaaataaaatcagtgcactgtgaatcac

SEQ ID NO: 525276 - DNA, 1650 bp, Homo sapiens
  misc_feature (12)..(12): n is a, c, g, or t
  misc_feature (14)..(14): n is a, c, g, or t
  misc_feature (16)..(16): n is a, c, g, or t
  misc_feature (18)..(20): n is a, c, g, or t
ggctggtacggncngnannntaggatcgcccctcgccctctagccccctcccgcgggagtcgcggcgctgcgggtaggagccgggttgcgggagaccccaggttcggttgggattcccagccagaacggagcttaagccgggcaggcgagcgaatgacggagtagcgagctgcacggcggcgtgctgcgctgttgaggacgctgtcccgcgcgctcccaggccgccccgaggcttggggtcttcgaaggataatcggcgcccggggccgaacagcgggggcacacggggcgctgccgaagtgcaaggccacggccagagctcgagcccgacgcgctgtctggagtcgtaggttggcgccgtttggggtcggggtctgaggcttgggcgctgcctgggccgagcggagatcggggtttgcctcccgtccccgctcaggaccctgacgtggctgaagcggccccgggagcatgagcgggcagcgcgtggacgtcaaggtggtgatgctgggcaaggagtacgtgggcaagactagcctggtggagcgctacgtgcacgaccgctttctggtggggccttatcagaacaccatcggggccgccttcgtggccaaggtgatgtcggtcggagaccggactgtgacattaggtatttggacctcacagacagcagcagctttgagcgagcaaagttctgggtgaaggaactgcgcagcctagaggagggctgccaaatctacttatgtggcaccaagagtgacctgctggaagaagaccggaggcgtcgacgtgtggacttccacgacgtccaggactatgcagacagtagctgctcctcagccctttggggggtgggggtgtgtggctgtctgggtggatcaaagaaaatagggactgccttggctgccagggcaaggtgctctaggaggtcttcctggcctccttgaactgtggggtccaggagactccctgaactgctagccctcccttttgtctgtttatctaattctcaggtatgaggctttagtcacttctctttacagatatcaaagctcagctctttgaaacatccagcaagacaggccagagtgtgggtgagtgctgtgctggagcctcacagcaggaacatgcaggggcaccagaggaagctgaatagggcacagagggctgggtcactgggagatcccagggctactggcattgggccctcgctgatcatcatttttcctgccagacgagctcttccagaaagtggcagaggattacgtcagtgtggctgccttccaggtgatgacagaggacaagggcgtggatctgggccagaagccaaacccctacttctacagctgttgtcatcactgagtcagcactcacctggcctgggggaattaaaggaattccccgtaagggctggacccagctcctttctgggcttgggtagtcaaatgtctgagctaccccaggtcctcatgtcagcagagtggcgcctgcctgtgctggcccatggaacggagacagcattgggctgactgtgggcatgaggagggataaggctgatttggaccccaggcttctgccctggacagcacttgtgtctgcagattatttaagtggcttttgatctgtaaataaaatcagtgcactgtgaatcac

SEQ ID NO: 525277 - DNA, 280 bp, Homo sapiens
tcctatcactgctacggtccctgtagaagtctccaggaagatccctaatatttatgagaccgtggcggagaatacgctgcaggtaatccgcaaaaagcaccgggaggagtgagatgtggattttgcttttgcacctacgggggcatctgagtccagctccccccaagatgagctgctgcccccctgagagagctctgcacgtcaccattgtaccaggccccagcctccaggccccctactccgcccagtctctctccccgctctggatcctgcactctaa

SEQ ID NO: 525278 - DNA, 732 bp, Homo sapiens
  misc_feature (12)..(12): n is a, c, g, or t
  misc_feature (14)..(14): n is a, c, g, or t
  misc_feature (16)..(16): n is a, c, g, or t
  misc_feature (18)..(20): n is a, c, g, or t
ggctggtacggncngnannntaggatcgcccctcgccctctagccccctcccgcgggagtcgcggcgctgcgggtaggagccgggttgcgggagaccccaggttcggttgggattcccagccagaacggagcttaagccgggcaggcgagcgaatgacggagtagcgagctgcacggcggcgtgctgcgctgttgaggacgctgtcccgcgcgctcccaggccgccccgaggcttggggtcttcgaaggataatcggcgcccggggccgaacagcgggggcacacggggcgctgccgaagtgcaaggccacggccagagctcgagcccgacgcgctgtctggagtcgtaggttggcgccgtttggggtcggggtctgaggcttgggcgctgcctgggccgagcggagatcggggtttgcctcccgtccccgctcaggaccctgacgtggctgaagcggccccgggagcatgagcgggcagcgcgtggacgtcaaggtggtgatgctgggcaaggagtacgtgggcaagactagcctggtggagcgctacgtgcacgaccgctttctggtggggccttatcagaacaccatcggggccgccttcgtggccaaggtgatgtcggtcggagaccggactgtgacattaggtatttgggacacagcaggctctgagcgctatgaggccatgagtagaatctactatcggggccgcgtagcaggtaccgagctcgat

SEQ ID NO: 525279 - DNA, 788 bp, Homo sapiens
gtcacgattcttgaagggaaagaggccttgaagaagctttgttctgaatggaaaagaggtgaggtgaggggaaaaccacgggaggcccatcctcatatgagagattgaaatttgtcgcgaaaagaaggtttctttcccttcggaaggtccctcgcaaggagggaaaaaattgtggggaaatcgaccacccccctcaagcccgctttatttacaaaggccccctgggaaatgagggaaagagtttcgtcccccaaataatcacggaaagttttttctaaggagcccaaaagccccatacgcccccacaaaaagtttttttttcacgccaccgctccacgagattaactccccaatgggggaggcttgagggttgaaagaaagagatattttttgcccacaaagcgctgagacggtacccacataagtgttacaaacccacccctcggagaagagagatcgtaagatcgtacccacgagcaccctctccccaaaaagggagaagaaagcggagaggcacccaaagggaagatggaaccacgggaccacttccaaatataagctcccccgggcgcttaccatccaaaagaacggaggcgagcacgtacgaccacagcccaccggccgacaaaaagcttggtgtgcgctagctaatgagaacacaccacgtgaaaataggacaggaccaaaagaagacccatgactcagagggaccagaaaccccaacgccaaaattcaagaccaaagcaagtaatgtttaaaaggtttttatttaattataccaaaaccca

SEQ ID NO: 525280 - DNA, 896 bp, Homo sapiens
  misc_feature (896)..(896): n is a, c, g, or t
ggcaggaccccgtcgcccggatccccgtgagtctgcccgccatcccacgtgaccgcgcccgcccccctcgagttccaccgtgagccctgcttcgcctatggcccttcttcgggggccctctttcctagctgctgcttggcatggctgcactttgccaggaggttcccagggctgcaaagattccggggttcacctccaaatggccgcttggacgcctgggtggacagccacggagggggcttggcggctttttctggggagccaaagcaagcctgggaacgaactttatacgaaccaattttcccgggcaccccttgccggtgtgcgccaaacacacgaaacaggccacacgcttttctttagcttaaccaaagtaatctttctggcaggttgacacagcgttcaaccagaaagcttggcaaactgtgaagcctttcccttcgcgggagacttcgaaaattttctcccgaggcccaaccaggccaggggacacggtctggatttggctcttccacgaattttcaaggcccaaatgttggactcttcccctttgtgagggaggactatagccgacattatcccggagggaagacacacaaggtgcgtggcccatcataaacgtgtgggtatccacttctacatacattgaaacgtggcggccggcggagccataaccagtttcaaacacgcgccccctactacagagcacatgtagacaggcgactgatgcttggtccacccactctccaccggcgacgcatgtgaggactctatggacgaagcgcactatctaccgccaggagaggcaatcccacacgactcgcgaaccccggcgtatatcgaccagatggttggctcccccgacaaggttgcattactatccagtttggcacgan

SEQ ID NO: 525281 - DNA, 107 bp, Homo sapiens
ggatgacaatggtcctctgcatcttcatcttggtcaccacgccatagaggatccgacctcgaatggacacatgtgcggagattgtgcatttcttgtcaatgtaggtg

SEQ ID NO: 525282 - DNA, 776 bp, Homo sapiens
cacgcgtcgcccacgcgttcgctctttctttctttctctctctttctctctctctttctttctctctcttgctctttccctgccttcttccctccctcccttcctcccttccttcctttcttttttcctttttttgttttttttttggacagaaactcactctgtggcccaggggggagtgcaggggctacggaatctcatctcactacaacgctccgccatccaggggtctcgagcaattctcgtgcctcagctttttcaagtagctgcaaattacaggtgagcgccaccaattgcccgggctgatgatggtatttgtgggtggaggtggggtttcaccaattgttggccaggagtggtctcaaactcctgttggcctcaagtgatgccatccgctaatgggccccccgaatgtgctggggtttcgcaggtgtgagccaccaggcccagccccgggaaattcattctctaaatcttcctaatattatatccgaatagtattctaaccttgttttcggaaaattatcacatgatattcgagaacattggatatcatcttgcatcttaatcggctcataggtcaccttaaaggaacaataatagtatttcgcagtaaacgtggtcagacaacctctgaaggatcacatccctttaaaacaccctaaagaagtctatatagcacccaaataagcggatgccacggaaaaggttttaacctcgactccaggtgaaaggaccccaaaaagtggtgcagagagccagagacgaaagacgag

SEQ ID NO: 525283 - DNA, 347 bp, Homo sapiens
acccctagcgactcttgcaagcaacatgccgcacagcttgcgacacggcgcccagtccggcgttggccaggttgaccttattgccgttctctttggcgtacttgatgaagcccgccatgccgtcggcgggcaggtccttgcggcccagcagcgtcatgggcacgtccgccacctggccgacatacgcaaagtccgtcagcggattgaacgacagcttgcggtacagcgccggcgccgtggccatgccgttgtggtggatcaaggaaggtatagccgtcaggcgccgcgcccgcaacgtgctgggatgccaacgtgccgcccgcgccggtgcggtttccaatggggta

SEQ ID NO: 525284 - DNA, 1285 bp, Homo sapiens
  misc_feature (438)..(438): n is a, c, g, or t
  misc_feature (651)..(651): n is a, c, g, or t
  misc_feature (660)..(660): n is a, c, g, or t
  misc_feature (995)..(995): n is a, c, g, or t
catggtggctcacacctataatcccagcactttgggaggccgaggtgggtggatcatgaagtcaggagttcaagaccagcctgaccaatatggtgaaaccccgtctctactaaaaatacaaaaatcagctgggcatggtggcacgcgtctgtagtcccagctattcgggaggctgaggcaggagaatcgccagaacatgggaggcggaggttgcagtgagccgagatcacgccactgcactccagcctcggcgatgcagtaagattacatcataaaaaagaatgaggtcacattttaaatagagtataaacaaaaaacttttggaggctgaggtgggagattgcttgagcccaggagttaagagaccagactggccaacaacgtaagcaggaccttatctccaccaaaattaaaaataaaataacgcccaggtaactntgttgtacttttagtacagacggggttttgccatgttgcccaaactgctctcaaatgcctggtttcaagtatctccccatctcagcctccaaaatttgggattagaggcgtgagcccctgcaaccagcctagacacatgtgtttcaagatcaacaactttgctagtggcatgcactttcttttgggaagccaatctctttgaaaatcaggttncttatctgnacaatgagtatcattgataggtattggctcacacgtataggaatgaagcataaatgaaacaaggtacacaaaaacacttggaaaggaggtaacttgcacttaaccaagtgcccgttgtgctactggtatcaataactggtattggaacatcccaaccaaaaatggcccaaggcaccaaaccggtgctatacaatcctaaggtttttggaggtaaaagggttaccctttcagggaatttaaattacacaaggccctggtccacttccaacaggcaatccattttaattacgggctactgaagcactgtcaaaataaaggcccttgaaccctacggntttccaagaacggatccctcactacaagtttcccgcgtgtttggactacaattaaatcttggaattctttgaagaaacatgtgtggccatatcacggtaaaggggaacacacgcccacaggaggtggtcccaatttttggtggctcctcaccggggcccttaataccctcgcattgccgggtgggaaccaaatgtcacctttttgaatactctacggggccctatatgatgatctgggttctgctctatatctcacctccaaatacgcttgttatcttcttctgaggcct

SEQ ID NO: 525285 - DNA, 1208 bp, Homo sapiens
gactagcaggaggcagaggcatcatggagggtccccggggatggctggtgctctgtgtgctaggccatattgctggcctctatggtgaccgaggacttgtgccgagcaccagacgggacgaaaggggaggcatggaagacctggtcgagacgtgggtgcggacaggcctcgaaggggcgagccaaggggatcctggggtgccccttgtgcatccggacagtgcatccgaaggcgcttaaaggagacctagtggggatacctgggccctcatggaaaccgccctggctaatggtggtgcatactcgcatgggtcctaaggtggtaccccgtctgtgaggcccagtggcatctcctgggatattatggatggctaccaaagggtgcagcgccaggtagaacattcagagggaaccagtcccgagtgctcatggcgattcttcgcgacccaaacttcagcgcagggagaccgcgcgcccaacatggcgcgggggcacccgtggatgggctcaagtcgtttcggatacctgggactccatcaacccaatacctaggggaattgagaccctgttacacattgaattccgaccgtaccgggacccgaaatctcggcttcatggccaagcttgttaaccccagggacctacctaaccgtaccattatcaaacccctttctccacgggttgacctaggtacacccaaagatgggggtcatacactttcttggacccatgggtacccaagtcgggtatcattccgtcaccttcgacacaggcggggcacaacgggcttcccaggaacggcaccatcacaccgttgggtggccaatatccataggctcgacacaacgtcaaccgccgaatcacacaaccgggcgcaggccctccttattccgcagacgggataggcgactaggatcaccgactatcgcgccaattttcgcatcggcgcgtataccgaccgcattaggcacaacgccaaatgaggggcggttgtaccacacaagaggctaccgcagaggacgcttacgcaacgaccagctaggaacagcgcccggaaacacaagaacgggctgttccaccacatattgtgtcccaaggggggacctctctttgatgtggcctggatctaggcgcggttcttgcacagtactcggcctatccacgtacgcatatcttatccaccaagttgatggccattgaacccccaag

SEQ ID NO: 525286 - DNA, 436 bp, Homo sapiens
ttgcggggtcggtctagaggatccctcggatctgatggtgataacacttgactaagacggaaattcttaggacatttcggtgttcagtcatttggtgtgaccgatgaatatgtgcaaaccaactctctagccagtaggcctttacaagactataactcactggccgtcgtggtacacctgtaatcccaacactttgagaggccgaggcgggcggatcacgtaaggtcgggagttcaagaccagcctgaccaacatggacaaagcccgtctctactaaaaatacaaaattagccggggtggtggcgcatgcctgtaatcccagctactcaggaggctgaggcaggagaatcgcttgaaaccgggaggtggagattgcggtgagctgagatcgcgccattgcactacagccggggtaaaaagagcagaactccatctc

SEQ ID NO: 525287 - DNA, 129 bp, Homo sapiens
gccttgggatgcttccgtcccgtctattatcccgctgtcggaaccatgctggggccccgagaattgtcccgtcgacaccgatgtcgccaatgcgctgggagttgtcgtcggacaaggtgcgcgtgtcgg

SEQ ID NO: 525288 - DNA, 246 bp, Homo sapiens
ttaagaggaaatccccatcatgtgacgtgattcccttaagtgtacaggggctggtgacctgtccttcatgataggaaactcaccttacaacaaagtggggagaaaactggctgcctgtggtagacacctgcacgcataggattgaagacagtacaggctgctgtacagagaagcgcctctcacatctgaactgcatattgagcgggcaagtcgtttgtaagttcaataaaaccctgtgatgatgca

SEQ ID NO: 525289 - DNA, 867 bp, Homo sapiens
aggatccatctgggttcaggtccaccggctgttacctccatgccccattacagttgatctccaacttaggagtagaacatgcccgacttgtggagctacttgaggttgcatacggatctgcgcacatgctatgcagcaagcggcatatggtgatcaatgagaggcaagctactgggcagggtgtatccagtaccatcacgaagttccctcctcaggcctaggatcaagacagccagcatttccatcgcagaccccttcttcagggagcgcccagaggtggatcgccgccatggcagggaccctgcctgtcttgctgctgctgtcattagggggagaccggttacattcactgtggcaacagcaggaggcaaaaataagactcagcttcagaaagaaaaagtagagagcaagagttgagagaaatggctatggagcacaatgaatgcaagaacaaagcacaagacgtgaagctccctggaggaactcagatggagaagtatccagtatgcatctcggggagggagacattcagcctataatgaatggaaaaaggccctcttcaagcctgggcctcaccattggccaaacccaacagcaaaccagaggagcaacgggagccacagtcggcactgtactcaggaatcatgcccagacggacagattctgtggggcccagaagagggtggagaaagctgaagggtggagagtgaatctagggcatataaggcatccacatagagcccagcacagagacggccttgcagctaatcaggcaagaatgaggagcttccttacactggcctgctgtgggtcatgagtaaataacatgattgccttcatacagcgctagagattcatttgtttatt

SEQ ID NO: 525290 - DNA, 1457 bp, Homo sapiens
  misc_feature (2)..(2): n is a, c, g, or t
  misc_feature (115)..(115): n is a, c, g, or t
  misc_feature (117)..(117): n is a, c, g, or t
  misc_feature (119)..(120): n is a, c, g, or t
  misc_feature (122)..(122): n is a, c, g, or t
  misc_feature (138)..(138): n is a, c, g, or t
  misc_feature (156)..(156): n is a, c, g, or t
  misc_feature (219)..(219): n is a, c, g, or t
  misc_feature (244)..(244): n is a, c, g, or t
  misc_feature (310)..(310): n is a, c, g, or t
  misc_feature (356)..(356): n is a, c, g, or t
  misc_feature (364)..(364): n is a, c, g, or t
  misc_feature (386)..(386): n is a, c, g, or t
  misc_feature (519)..(519): n is a, c, g, or t
  misc_feature (528)..(528): n is a, c, g, or t
  misc_feature (532)..(532): n is a, c, g, or t
  misc_feature (540)..(540): n is a, c, g, or t
  misc_feature (548)..(548): n is a, c, g, or t
  misc_feature (563)..(563): n is a, c, g, or t
  misc_feature (1161)..(1161): n is a, c, g, or t
  misc_feature (1286)..(1287): n is a, c, g, or t
  misc_feature (1302)..(1302): n is a, c, g, or t
  misc_feature (1309)..(1309): n is a, c, g, or t
  misc_feature (1313)..(1313): n is a, c, g, or t
tntttgggaagatgatggactacctgcagggctctgggagaccccacagacagatgttcgctggatgtcagagactggcatcattgacgtcttcctgctgctggggccctccatntntnntnttttccggcaatatgntagtctcacaggaacccnagcgttgcccccactcttctccctcggctaccaccagagccgttggaactaccgggacgaggntgatgtgctggaagtggatcagggntttgatgatcacaacctgccctgtgatgtcatctggctagacattgaacatgctgatggcaagcgntatttcacctgggaccccagtcgcttccctcagccccgcaccatgnttgagcgnttggcttctaagaggcggaagntggtggccatcgtagacccccacatcaaggtggactccggctaccgagttcacgaggagctgcggaacctggggctgtatgttaaaacccgggatggctctgactatgagggctggtgctggccaggctcagntggttaccntganttcactantcccacgntgagggcctggtganataacatgttcagctatgacaattatgagggctcagctcccaacctctttgtctggaatgacatgaacgaaccatctgtgttcaatggtcctgaggtcaccatgctcaaggatgcccagcattatgggggctgggagcaccgggatgtgcataacatctatggcctttatgtgcacatggcgactgctgatgggctgagacagcgctctgggggcatggaacgcccctttgtcctggccagggccttcttcgctggctcccagcgctttggagccgtgtggacaggggacaacactgccgagtgggaccatttgaagatctctattcctatgtgtctcagcttggggctggtgggactttccttctgtggggcggatgtgggtggcttcttcaaaaacccagagccagagctgcttgtgcgctggtaccagatgggtgcttaccagccattcttccgggcacatgcccacttggacactgggcgacgagagccatggctgttaccatctcagcacaatgatataatccgagatgccttgggccagcgatattctttgctgcccttctggtacaccctcttatatcaggcccatcgggnaaggcattcctgtcatgaggccctgtgggtgcagtaccctcaggatgtgactaccttcaatatagatgatcagtacttgcttgggatgcgttgctggttcacctgtatcagaatctggagccagnngtccaggtcaactgnctgccangggngggtgggttcgaactttcaggctaccaaaagattatggtcccaaaaccgtacgggcggaaatcaaaaaggatccgggttcacgcgggcgcaacgcgccaagaagagacgggctccaagtaagagggccaccacccttgtggaac

SEQ ID NO: 525291 - DNA, 144 bp, Homo sapiens
ttctggacacggtgcgtgcggagctgtacgtgtgggcgctctgccgagaccaggacgagcttaacccctacgcggcctcgccggctcctggacatctcggcctccagtaccgagcacattctctgagtgtggtgccggagccag

SEQ ID NO: 525292 - DNA, 589 bp, Homo sapiens
  misc_feature (418)..(419): n is a, c, g, or t
  misc_feature (434)..(434): n is a, c, g, or t
  misc_feature (441)..(441): n is a, c, g, or t
  misc_feature (445)..(445): n is a, c, g, or t
cgcctcccgggttcaagtgattctcctgcctcagcctcccgagtagctgggattacagttgtgcaccaccatgcccagctaattttttgcgttttagtagagacggggtttcaccatgttgcccaggctggtttcaaactcctgagcttagacaatccacccgcctcggcctcccaaagtgctaggattacaggtgtgaatcaccacacccggcctatgctgttcttttcttattgccagttcctggaggagcatttctgacttgtgccaaaattgaaaagttttcctttattgtctttcttccttcctaggcccctgtgggtgcagtaccctcaggatgtgactaccttcaatatagatgatcagtacttgcttgggatgcgttgctggttcacctgtatcagaatctggagccagnngtccaggtcaactgnctgccangggngggtgggttcgaactttcaggctaccaaaagattatggtcccaaaaccgtacgggcggaaatcaaaaaggatccgggttcacgcgggcgcaacgcgccaagaagagacgggctccaagtaagagggccaccacccttgtggaac

SEQ ID NO: 525293 - DNA, 834 bp, Homo sapiens
gctagttcccctccctccatggtggccattctcgccaatatcgtccccctgggccccttttttaaaggggtctccccgttaggagctcccctcagggtgttcgtgtcctaccagtcgaagtaattgtgtggccagttcatcacccttgacagaatgaatggcaaggacgtggagtcacctcgattgctaatggtccacgccacctaggggatgtgcagactccccccgtatttgtcgcgcggcgaacgaccgcttgggtaggaatcgcctagagcaactccgcgggctctcaccacggggcgaggtgtcgcacacacacataggggtggtgcccacaacacaccacaaccgccgcgtgaaacacagaagggcgtggtcatggtacgcaccccacggtgtgccccgctacaagcagacgcacgcgcgttggccccacccgcacggtcatgggcccgcacacgcacacagaggtggggggcacgcccttttgggtaacatacaaaggggggcccccgcgagacattctaccacacatgagcgccccactcttgtatgacaccgtggtgaccccctccgccacgccccacagaattcaccgggcctattcctccccggggagcaccaaaccgtggtcccaccaggatatcaggagataaatgttagcaaaaaaaaacacacactggggtgcatgtattccctccaaacactattgacttcgcacgcagccgctcctcctacatcaaacagtttctaccctcttctctctcgtactagaaaagtatggctctccaccatcacccgccacgacagcaggataatttttatataatatga

SEQ ID NO: 525294 - DNA, 191 bp, Homo sapiens
attcgtggtcggcaccctacttgctcctccttgccttccaccatgattgtgaggcctccccagccatgtggaactgtaagtccattaaacctctttcttttgtaaatttcccagtcttaagtatgtctttatcagcagtgtgaaaatggactaatacgccctgctcttctgcagaccctcctccaaagccc

SEQ ID NO: 525295 - DNA, 405 bp, Homo sapiens
ttcgattggcgggcacttaggtcaggagttcgagaccagcctggccaacatggtgaacacccaatctctactaagaaacacaaaaattatctggtcatggtggcgtgtgcctgtaatcccagctactctggaggctgagtcaggataatcacttgagccccggagccagaggtcgcagtgagccaagatcgtgccattacactccagtctgggtaacaagagcgagactccgtcgaaccaaaaaaaggaaaaaaaaatcctgcctgtaatccaagtaacatgtcaggctgacacaggaggatcacttgagcctgggaggttaaggctgcagtgagccatgattgctccaatgcactccaggctgtgacaaggcgagaccttaactcacaaaaaaaaaaacccaaa

SEQ ID NO: 525296 - DNA, 147 bp, Homo sapiens
cctgctttgtaggtctgcgggagaaggatgacatccatgagggcacgaatgcatgctgcagcaggcggagaggctggcgctgccggcagttatgtcacatgccacagatgttgtccgatgggaaccccttagttgaacattggtttt

SEQ ID NO: 525297 - DNA, 1236 bp, Homo sapiens
agcggggggtggtgccgtgtccccgggtggcgccggtccgatcctttcctggtcctgcgggtccacgatgtgtccgtcggggttgcagtggacaggtggccgtgtcccggttgctcatgactcagtgtgactacgcaggacctagaggctctcttgagacgccctgagatcctacgtgattgcctgcttccgtctcctcgcgtggctagctggaagcactccaacgcccgctgggggtcctgggatgttcctgataacgtagaggtgacggcggactagtctcgtcctctcgttctctctaacactagtccttgcggttgtagctctctcgagggaggagccagggcgagtacgacacgaacagggagggtcggaacttgcactaagctgaagagggctacgtgggctcttagcagagatgactttctccgataaaggcggttctgttatgcgtagaagaccttgctatgagtatagtgccagtggcgtatcaaacttgaacttgagtggtaaagcatagaagagctcatgattaccgttacgtctcagacatctgtactaggggcacctggaaagattggactggaaaggaggggctcaccaaacagagagtggaacgcaaactaagaaacggagcgtataaccgagagtctcctgtggaaataccctcgaagtaatgataacctcgcaacgactaattgacacttagtaagggaatggccaggaagagacatttgtcaattcgtgggtcaaccttcgtacctagtttgggtaaaccacctccttggggcgtcgtaaaattggactccgtgggtgggcactttgattttaatcacgtcacgtagtggctagtgtcccccagccatcttcgttacgttgtctaacacctcactgtgggcctaggctcgcacagggagttcgcgggtgttaacccaattggcgtggaggtaagttatttcataacggacgtaagaaaacggggaacgaaatggagctacttgcaagtcccacgaggagacttggaataaccgggtgtaaaccttttcctttgggcgtcggattgagattcatgtcgccatataaaattagacgaggcttgcctccctctacgattaagatccatagcgcacatttggtggaccctggtgggatgcgtaggtaccccacatacttgcggacgttgaacaattacaacacataagtttgtatacgttaaagaatttgggacaaacccgg

SEQ ID NO: 525298 - DNA, 654 bp, Homo sapiens
  misc_feature (6)..(6): n is a, c, g, or t
atgaanactcgatttccaaccacgccgaatacggcgaggtacgtgcccgcccctgaagtcatcaacgccgaatccgcccaagccatgcgcacggtctgcaggcgcatccaggacggcgaatacgcgaagatgttcatcagcgaaggtgctaccggctacccatcgatgaccgccaagcgtcgtaacaacgctgctcacggcatcgagatcatcggcgagcaactgcgctcgatgatgccgtggatcggcgcgaacaagatcgtcgacaaagccaagaactgagtcgacgctcaaccggctgcctggcccctcggggctgagcgccggtacaggctgcacccaaacgccccgacttgtcggggcgttttgttttgtcacataaagctttcatgtcagatgttgaacattccaggtaaaggacgtaatttacttacatgtaagatttttcggaggacagatgccccgtaaaaaaacagcggatgacaagcccctcacgggcgagaaagcgtcatcaccggccaagaccaagactaccgccgactacgttcgcgatatgcgcacgcggctgcgcgacgccgggctggtgaagcgggaattctggattcttcccgagaatgcgacggccctgcggggtatcgaaaaggcggtcgacgc

SEQ ID NO: 525299 - DNA, 356 bp, Homo sapiens
ctgcgtcaggcgaaagcagtgacgagaactacgtgaagatccacattgtaaatatttaaaaattagagccaggaccaggcacagtggctcacgccgtgtaatcccagcactttaagaggctgaggcgggtagatcacctgaggtcaggagctcaaggccagcctggccaatgtggtgaaacctgtctctactgaaaatacaaaaattagcaaggtgtggcggtgcacacctgtagtcccagctactcgggaggctgaggcaggagaatggcgtgaacccaggaggcagaggttgcagtaagtcgagatcacaccactgcactccagcctgatgacagagcaagactccatctaaaa

SEQ ID NO: 525300 - DNA, 403 bp, Homo sapiens
tccctggtcgatctgtgtgaaaacagaaagaagatagaacacatatcaaattgtatgtacgcagagctctcatcatggataactgtgcaggagctaatccctgaatatctgaccttcattcagaggggtggtagactcggaggatctccctctaaacatatcccgctgcacatgttgctacaaagcatatttttgaaagttatcaggaagaatttggtctaaacctgcttagaactctttactgaaccggcggaagatttatagaactacaagaaattctatgagctgttccctaaaaacataatgcttggaatacaccaagactctcattaatcggaagaagctctcagaagctgtctaggtctacccatctgccctctggtgatcagatggtatctctcaa

SEQ ID NO: 525301 - DNA, 219 bp, Homo sapiens
tggagagacaggggtcttgctttgttgctcagtctggtcctgaactcctggcctcaagtgatcctcccacctcagcctctgaaagtcttttaagatatcatattacggaaactttaattaagctcttgctacatataagacactttgcttaggattcaatgtatatctttcatttaaccttcacaacaactctaggaggtaggcacaattatgtcgacg

SEQ ID NO: 525302 - DNA, 108 bp, Homo sapiens
tgcacagaatcgtcacgaggggcgtgagttgatttcggcaagggccgcgctgtcgttgccggtactgaaggccatggtcgggtactcctgctgcgtgagaggccacgc

SEQ ID NO: 525303 - DNA, 132 bp, Homo sapiens
cctgctgtcatgagtattgatcagatcaggcgtttggtcgagtggacctggcactcatgataggagacaggtcatgcctttcaagtgcatgcagctgcgctgatcgcatccgtcaacatttccgcacagtgc

SEQ ID NO: 525304 - DNA, 483 bp, Homo sapiens
gggggaaggggccccaattcccaacccccttttcccggggggggggcggtttcttaaaaccagggggccccccggttttcccgctggaaaaggggccggggggccccccccaattaaggggggtgggcccccccatggggccccccgggttttcccttttatgtttccggttggtatttgggggggaattggggggggaaaccattttcccccgggaaccagttttgcccatgtttcccccaggctcaaatttcccccccccaaaagggaccaaaagggggggccccccccggggggggccccttttaaaaaaaggggtccccccggggcccgggatttgggcccgaaaaaaagaaaggggaatgttaaaacttttttttaaaccaaaagttccaggccctttttttttttttagcccgggttggttttttccaaaaaaaaaaggttttttagatggaaaaaaccaaaatccccggggggcca

SEQ ID NO: 525305 - DNA, 1235 bp, Homo sapiens
  misc_feature (1151)..(1151): n is a, c, g, or t
tgtgaaccgagaccctggagctggctgaagctcaagcgctccgctaggggcagagggtctgcggtggctgggaactgctgctccccgacgcacctggcctgccccagctgcagcgcgctccgcggggtgcttgatctgcctcttctccaatgaaactcaaccactagtgacaatgacgcagcctcctgagctactccttctccaagagaagaactgattgaccaaccccaattatttacatgcccaactgaagtgccctgatccccaggaacgatggccgccagtgcagcagacactcagttgcaggtttgttatcaccggttgtcttccattaaccctggctcgtcggtcggtgactcttgactcgttcgtttaaaccttgtacaatgaacaaaggctgctatcgtcacctatgaaccctacagaaggtgagcccaagtgccgatcgtccagatggagagtgactgtggccgaggggcacagcgagacaatgaggaatattctcatctaatgactcccaggccccaatggagcttcattcctgggctccatcgctaacacgttggactgcttcattattgggaacagtaatactctgaagccagggatgaagccttgattgatgtgggcaaatccagagctccagccgaggtcgcagtcccaaaatgcctgacgtcactgactccagggcacccagggacattggcgcaccgctgtctattgctgtctttcaaccagtgcgctcttacgtagacgctggtggtcgggacttggccatccatgactgtggctttgccctggggacctctgcgctctgtgaccagccactccttttctcgcctgcgttgactgggacgagaaaacgaacaatggagtcaacggccaacgggctgtctacacctgtcccctacctgggtacccacgttacaagcccccggtgtgagacaatcctggttccaatcaaagggggtttccccccgaccaggcgtcgggatacaccgcgcggctaaaaggcgcacgccagggtggtggcctgtagacactatggggcacttaccaccctgagcataaggtgtcataccccccataatttgaggtccctccgtatccagtgtctccccaagagccactatgacacgtctactactcantccagaattattgtgaccaagcagacaagcggcagtcttgctatcgcgacacgatgcacagtacgcgtaagttgccgcccgctt

SEQ ID NO: 525306 - DNA, 192 bp, Homo sapiens
  misc_feature (145)..(145): n is a, c, g, or t
agaccagcctggccaacgtggtgaaaccccatctctgctaaaaatacaaaaattagccagactattagcgggggcttgtaatcccagctactaggagatgagcagagaatcattgaacctgggagtggagatgcatgagctgagntcgcaccgctgctacactccagcccagtgacagattaagactgtctc

SEQ ID NO: 525307 - DNA, 289 bp, Homo sapiens
caggcacatcccccttatcatttcagagtggctgcacagcaaaagaaactatcaagcaaagtgaaccgaactacagaagggaagaaaatttttacaaactatgcagtctgataaggaagttaatgtccagcaatatatagaggaactccatacatctcagacaacaagtaaacaaccccaagttaaacaaaatatgacaacagtttctgtgtatacgtgaagacaagtatactagaagacaagtatacaggccaagtaagcacatgtgaaagattctcaggtcattagt

SEQ ID NO: 525308 - DNA, 733 bp, Homo sapiens
  misc_feature (73)..(73): n is a, c, g, or t
  misc_feature (109)..(109): n is a, c, g, or t
  misc_feature (152)..(153): n is a, c, g, or t
  misc_feature (165)..(165): n is a, c, g, or t
  misc_feature (171)..(171): n is a, c, g, or t
  misc_feature (242)..(242): n is a, c, g, or t
  misc_feature (255)..(255): n is a, c, g, or t
  misc_feature (262)..(262): n is a, c, g, or t
  misc_feature (315)..(315): n is a, c, g, or t
  misc_feature (330)..(330): n is a, c, g, or t
  misc_feature (343)..(343): n is a, c, g, or t
  misc_feature (348)..(348): n is a, c, g, or t
  misc_feature (395)..(395): n is a, c, g, or t
  misc_feature (405)..(405): n is a, c, g, or t
  misc_feature (410)..(411): n is a, c, g, or t
  misc_feature (418)..(418): n is a, c, g, or t
  misc_feature (429)..(429): n is a, c, g, or t
  misc_feature (439)..(439): n is a, c, g, or t
  misc_feature (533)..(533): n is a, c, g, or t
  misc_feature (541)..(541): n is a, c, g, or t
  misc_feature (549)..(549): n is a, c, g, or t
  misc_feature (630)..(630): n is a, c, g, or t
  misc_feature (669)..(669): n is a, c, g, or t
  misc_feature (731)..(731): n is a, c, g, or t
gagtggtggtgatgcaaagatggaagccatggtggtgggggctgttaggggtgggggcagttgtgtttccttnacccccactcctggtgtcctctcctgaaggacaganggtcacattccaaaatgggcgagtttcctaccgtgtcttttcnntgttggaggagntgtctntcttatcaggcagcccactaatattgacctcaaagcgatcctgcacatcattgaggatcttggcatcattntcatcggacacanatgtganagccatagcccttggttgccaaaccggcctgtccctggccacccgatgcaggnaggtgtcagaatccncaggtcatgtganaattnaaagcaatgttcacccgctcgaggttcatgccttggccaaatagggnggttgccacnagaanncgtcgtngaaaatctttnaactgctganaccgagaaagcctctcctcctggggcatcccacggtggatggcaattgtgctgggaagttctcgccccactagtagctgggccaaggcaatgcnccgctgcncaaacttnacaaagatcaccacctggttgaactcaaggacatccagaaggtcaaagagctttcggttcttctcgttgtccttcagtttnacgtagtactgctgccacccatgcagcgtcaacttcgtntcatcatccacgaagatctccattggatctagcatgaacttgcggcagaatagacggatctntt

SEQ ID NO: 525309 - DNA, 650 bp, Homo sapiens
cttccggctgagccccggaagggtgatgtggctgcggacatcgctcggcctcgctatgtctgccattttcaatttccagagtctatgggactgtaatcttgctgcttatatgtacctgtgcttatattcgatccttggcacccagcctccatggacagacaatccaaacgtggattgtggggtatagtttgggaatgtgtgccagaatgggtgaacggaagagtccttatgttgcagtatgctgtctagtaatggccgttcagctatcctcttcatacagtagctggggaaaatgccagaatgtagttgccatcagacttcgagtgtgaacaaggtagcgtgacgtgcagaaagactaaatggacaacggatgtttaagctctttgatctccgaacattgaatgagataaatttccagatgctgttctctattttagtgttattggaccaatgttctgtataaagcaattaagactgtagaccatttatctagtctgtaacaagtcaacctcagtactgtcactacagtattacatttctgcaaatgttattctgttgtatcagatacgaaattttcagcgaggtatctctaaggcacatagtagaagaccaccaatggttacttcactcaagttcctttcactggtgct

SEQ ID NO: 525310 - DNA, 269 bp, Homo sapiens
gtagaagacgcagaagggcggctactgcagcttgtacgaggattggcccccggataaaagcatcatcatgcacagaccctagtgcagacctgcccactcattcctccttcgtgagttccttgacataatcttccagatatgacataatagtgctgtttcttgcaatttagcacttggaacatttaaagaaaggtctattctgtcatatggggttattgggaactattctccctgtgcccaccctggcccttgcccttctgtcgtcttct

SEQ ID NO: 525311 - DNA, 367 bp, Homo sapiens
gctgatcctggaatctgccgctaattctcactcagattttgagattttctctgcggctgcaggagccaacagagtcctttgtgcggcctcaggactcggctttcagaggccctggagccagtggtgttggattcagccgtaattcttcattctttggctcaagggaaaaccttgattctgcacaggattgcaaaagccgaggcactccagctaggacacggcgtcattggagtgcgctgggaggagtgacaccctcctcctgggctggcgcggggaagagaagctcccgcgtgtgaaacagctccaccaccaagcgcctgcagacgagcggtgtgttccgcctggaacctgccgagggaacgtgtgg

SEQ ID NO: 525312 - DNA, 114 bp, Homo sapiens
  misc_feature (86)..(86): n is a, c, g, or t
  misc_feature (112)..(112): n is a, c, g, or t
agtgctcatgctcgctgcaggggtatgaggtcagggcgagcgtctcgcaggccgtagaaggaagatggcggtggagtcgcgcgttncccaggaggaaattaagaaggagccnga

SEQ ID NO: 525313 - DNA, 363 bp, Homo sapiens
cgcgggcggtagcctactttctgctcggcggtcagcaatgcaaacaaccggtataactaccgtcagcctgggagccgccgataatcagttgggactgcgtaggcgctccctcttccgtgccggcagcagcaacgcgcaccacaatgactcgcgtgcttacctggtcggaaatagcctttagtgatttgtacagggagccggttttgcccgctttgccaagtacgctgataacccgcgtaatcaaaaccggagtgtttaaggggaaagtggtagcgtcagcatcgtccgccaccgcaaccagaccgatgaccgttgagtcaacgtcgttgatcgcggtttgcgtcgacgcggccgccgaattta

SEQ ID NO: 525314 - DNA, 967 bp, Homo sapiens
gactctgaactggcatcctagcaccaatttgtcgaactggccagccctgggcctggctctccatgatgtctaaatatcgtgggtctggcaacggtccctgtggccgacgtcgagagacttgtgtagtctcgcaaagccaggtatgatgggtcagcttagcgtccagtcaagggtaccaaccgcctctaccttgccgccgaaagggcaccatgaaggcttgaagtagagtgctcttcctgggagactggtgtgggcttcacttgttaaaagaatggtgtctgtcgaaggcttgtccgtgcgtgtcatcgtcgctggtgtccaggaaatatgatccttcaattgcctgcagctgggttcatattgctccatgcgtgatgtgatccttgctcctagtccaggacaatataaagctgacggatatgcccccatggtaatttgatatctgtccgcccgttgtcacatggcatgcaggtctaggtgagcagaaaggccttgattgatcgcggactgggtatgaaagctggatgattggccaatcttcttggaacgcctggggatgctgccagttagtcgcaatgggtcctaggcatgcccatgatgcagttggagagctactcaagaccttattccaacctttgtgttcgctttgggtgttccgttgactagggcgaccggcccagttgtcgttgggttgttgtccacgcgccgtgccacgcacaggtggtgagtgtgtgggaggtcgccccaggtctggcgcggaacggcagaaggcaatggaatttatcccaatgaaatggcaccccaacttatcagtgtggggagacacgttccgaccggggatcgatggcacaactttcacaagtgggtccccgccccactttggggagcagttggccacgcccgcgggggctaccacccacacacgcccttctttgccaattgaacaaacgccgccgggggccatgcc

SEQ ID NO: 525315 - DNA, 110 bp, Homo sapiens
ggggggaaattttttttttcccgtttttccggggggttggcccggggggggggttaaaaaacttttttgtttttttacccgggggggggggggggttttttttaacccca

SEQ ID NO: 525316 - DNA, 346 bp, Homo sapiens
  misc_feature (56)..(56): n is a, c, g, or t
  misc_feature (94)..(94): n is a, c, g, or t
  misc_feature (96)..(96): n is a, c, g, or t
  misc_feature (112)..(112): n is a, c, g, or t
  misc_feature (118)..(118): n is a, c, g, or t
  misc_feature (176)..(176): n is a, c, g, or t
  misc_feature (180)..(180): n is a, c, g, or t
  misc_feature (203)..(203): n is a, c, g, or t
  misc_feature (288)..(288): n is a, c, g, or t
  misc_feature (315)..(315): n is a, c, g, or t
aaacaccagccccctagtgcccccagattggcccatcctttttataaggatcccanccagggctggttatgggagtttgagtgtgcccaaccantnaaaaaggatccagccntgagcntcccccaagtgctttatgcctcaggtgacaaaaggcaggaggttccattccgaggttncccnctcccccaaaagtttgagcccancctcaggaggggccaaaaaccagggggccatcaaaagcatcgggttttggcattggttccaaatgagcttttaaagcaaacaaancagttgtttgccattttttgccctcanacctgtgtaatatatgttcctggaaccctta

SEQ ID NO: 525317 - DNA, 448 bp, Homo sapiens
gtgggaggtatagctcccagaggcggtcctgccgcggcctagtgcgccgcggtgtgtggctgctatcgtatcagccagagccgtgtgctccggtgcccacgcaacctggtcgatgggcagacctggcagctctcctgttctgtgggctcagacccgcctgatctccctagtccccgggctcatcccaccttgtccccgagaggtcccacagagtttcgcgatctcctggatacccggcagggtgctgcgggtgcgtggcaatatctcatcgagggagatgtgagggttcctctagtgtgcagaaggcgtgcagcctggcccagtctgatgtgaccctctttttacacagctgctagtgccttccccttgggcatcctcagtgccagccaggagccccctcctgtggcctccgagcaccctcctgacacctgaggagaccctgcccaag

SEQ ID NO: 525318 - DNA, 568 bp, Homo sapiens
tccagcacggagaggaatgaacggcccactggagatggctccttactctacacggctgatgcttatggggctacgagagcgattcaaattcatttaccatctaagagtgggatcttaaaaatatgattcacggggagaagctctgctagcatacgtttcccaggaagctttccatggatcacctttaaacaggacgccgggcatactttcggcgatgctgctcgtccactcgctccaggtaccaagtacctgggaaaaggctgtttgtgtcaccaggtggggagaaattcaccttatggtagaattgctctctttggttcattatttctgtgaactcctcatgagacacacactttcaggaggctacgcgttttggcaggtctgatgtgctggacaccaacttgtccacgggagagcctggagcagcatcctcggatactcgaaatgaaaagaaacttgctgctaaaccagagccataagagaaggcaccaatcctggagccagccagttcttgggcatagtggtgggacagaagcgaggccaagcacccgtacagggatgaagtgta

SEQ ID NO: 525319 - DNA, 113 bp, Homo sapiens
gataaagttaaatgtcctttgaagtatacttaggagggtgaactcactggaatggggatcttgcatgtgtatcgttagtaagagctaatagagagcagcagggaaagacaggc

SEQ ID NO: 525320 - DNA, 143 bp, Homo sapiens
cttcaagacagcgcgggcggggtgcagtgactcacgcctatatcccagaactttgggaggcagaggctggcacgaatgcttgagtttgagaacagccatgggcaactatggtgaaactcctgtctctactaataattatgcca

SEQ ID NO: 525321 - DNA, 1002 bp, Homo sapiens
ctgtgacccaatcccttatttccacaccccaacctcttatctctgtgccccaatcccttatttccatgccccaaccccccttcccacttttctagggggcaagaacccccaatcccttatttccacaccctgacctcttatctctgtgccccaatcccttatttctgtgccccaaccctttctctgcttttctggagggcaagaaaccccaccccttctccgtgtctctactcttttctctgggcttgcctccttcactatgggcaagcttccaccttccattcctccttcttctcccttagcctgtattcttaagaacttaaaacctcttcaactctcacctgacctaaaatctaagtgtctcattttcttctgcaatgcctcttgaccccaatacaaactctacagtagttccaaatagccggaaaacggcactttcaatttttccatcctacaagatctaaataattcttgtcataaaatgggcaaatggtctgaggtgcctgacatccaggcattcttttacacatcagtcccttcctagtctctgtgcccagtgcaactcattctgaatcttccttctttccctctcgcctgtcccctcagtcacaacccaagcgtcactgagtctttctaatcttcttttctacagacccatctgacctctccctacttgcagggcaagctagggtcccaattcttcctcagctccgttccttcaccctgtaatcttttatcggctccctctcaactggtcggtacagttcgtctgtgatagcctcccacacttgccagcatttactcttaaacaggttggttggagccaaggatagtcaagttaatggccctttagtttatccaaatcagaagttggaggcctttcatcagatttaaagccaggcaggtcatttcgttggcagcactgaaagtacgcctgacctaaagtgaaggccctattcagaacgttttaccagggtcgattatattcacaaaacaggacac

SEQ ID NO: 525322 - DNA, 885 bp, Homo sapiens
ggtctggcagtcgtttccggatgctggtctgctgcgctgcagtgccgcgtgtgctgggctcctccgtcgccggcctccgcgctgtcggcccgctcgcctttccggcagctcctgcagccggcaccccgtgtgtgcacccggcccttcgtggctgctcaaggtgcgctgcaggattccgaagcggggtcgggcctcctgcggctcgggaccctggcctgtgttgtggctgcgtgtcgctgcaatccgactgggacaaagctttctgttgcattgacctgagctgatgcaattaacggacgtgcaaaagcacaagacttccagaagcataaaaccctccctaagatgtctggaggttgggagctgccactgaatcgcgacagacagcgacaattacgtgcggacaatctctgccgggccaccgccaactcacggtcactttcaccattgaccaccgcatcccaccaacaattatgatgcgttgaggaggaaccctcgccagcgggcaaaggctgactgaacaggagtccctgaacttgacatctaactacccaacttccgtggtatcgacggttatcaacacgcaatgatgactctgcaacgaaggccctatggggctcgaaccttgtcattataccacgacagactcgaccgcttcggaccacaccaccgatcgaatcgcctcgcgatctgacctttcctctcctctaatccgggaaacattagcccctacaggacccactttgcgatatccgacctggccgcgtaatccctacgtctatccaacaccaggcccgacagcaccgctttgcctgcgcgcctactgtgacccccctcaattgcttcgccttcccgaccgcagctgttgaccagaccttctgcgcacta

SEQ ID NO: 525323 - DNA, 170 bp, Homo sapiens
taagtgcagtgcatcatggctcatgcagctttgaactcccaggctcaagcgatcctcccatctgagcctcctgagtagctgggaaccacaggagcatgcaaccatggtgggctattttttttttctttttcttttctttttttttttttttttttttttttaaggcaaaa

SEQ ID NO: 525324 - DNA, 792 bp, Homo sapiens
gtgccagacggagcggccgtgacgctttcgcgctgcagacggctgccccgacccggggcgctgacccctggcccacgcagctccgtgccgggccggagagcgcaactcggcttccaggaccctgcctgctgcgatgctgtcccctgtgactgagcctgggcagcgcagcctccgcactggtactgccctgtgactgggctggcctggccagcagtgatgctgagcttcccctgcaccgtgccaggctgcctcctgcacagctggctgccgcccccgcagccccatgctgccagcccctggaggggcgcaggctgacgaggagtgagccggcgcggggcgcatgaatgccagcaaggggcgcgccgcgaaacgcgcccccaggagacaagcagagatctgcaagcaggaagaagaccgggaaggaaggtgagcacgcagcaacgacagaacgaacgccagacaaagagaagccgaagaagagcagccagggagccacggaaccgacagaacgaaaaaagaacaaaatatagcgaaaggaaatggaaacaagcaacgccaaacaagaacaccatccaccagacaccacacgacaacgaatcacagagcaccgcatcccgcgcaatgacaacactggcacaggaaaaaacagaacatcccaagacaagacggagcaaacacaagcggacaggagaccacgtggcaacaccagagaaaaaaacggcagaccaacagcaaatccaaacagagaaaaaaccaaaagcagagcgcaaagaaaacaagaatcaaacaaaa

SEQ ID NO: 525325 - DNA, 317 bp, Homo sapiens
ccccccccccccccccccccccctgggggttggggggggggggttttaaaaaaaccctttcggggggggggggcccccggggggggtttttttttcctttccccccccccccggggggggggcaccccccccccccctttggggcccggggggggttttttttttgggttttttccccccggggggggggcccccccttttttttttccccccaaaagggggtttttttttttttccccccccccccctgcctttttttttttttagggggggggttttttttccccctttttttaaaatttttttttcctggggga

SEQ ID NO: 525326 - DNA, 826 bp, Homo sapiens
ggttgtggctgcggcctttgaacaagtaagtgagccaccctcgtgagacccccgcgctggggacgggagtgccggcgagcctcgggacctctgaaagccttgaggagtgcgctggggacaccatggcctgagcctcatgacaggaggaatgactggcgatggactggctctgctggagcccccctgggccctgtgaatggcctgaaccctgcccacacctgctgcctctgtagctggccaagaacctggccctgcttaaagccctgctccttcgatgtgacctttgacgtgggcgacgagtacgagatcatcgagaccataggcaacggggcctatggagtggtgtcctccggccgccgacggctccaacgggcagacaggtgtggcatcaagaagataccctaatgctttcgatcgtggttgagcaatgccgaagcggagcctcagcggagctgaagatccatcaagcacttattaacgaaggagagaatactattatcgagcatctaaggagaatctctgagaggccaacgtgggcccattaaggcgcgaaatccaagatcacgagtaaaaagtgggtcccggggaccctgatgggaaccaggcggactcgtgaaccaagatcattcgcatactctcacaaggcccactcagcactgagagcactgtggcgctactttcctgtaccaacctgcttgcggcggccctgacattacatgccacatcgggatcaggtcatccaaccgtgaacctgaaggccctccaaaacacatatgggctgaatgagacctggtgcagctcaagattgggagcactaggggtatgg

SEQ ID NO: 525327 - DNA, 872 bp, Homo sapiens
gatccctgctacgaccgatgcccgcgcagcgcgtgtccccaaagtgagggccaatgcctcttcgccggttcccatgacgaatctggcgcctgaatgtctggactgagacttgtccatacaaatagtcgacacgacctcgggctggctgctgtgggaagcaaggtccctgagtagcattgctgagaatcgatgatggcgggtcccctgcatgcgtatgtccaggagcagctctcgtatctcctaaccaactgaacgtggcccgcatcgctggctgcctgcacatgaccgtggagacggccgtcctcattgagaccctcgtcaccctgggtgctgaggtgcagtggtccagctgcaacatcttctccacccaggaccatgcggcggctgccattgccaatgctggcacttccggtgtatgcctggaagggcgaaacggacgaggagtacctgtggtgcattgagcagaccctgtacattcaacggacgggccctcaaccaatgattctggacgacgggggccgacctcaccaccatcatccaacaccaaggtaccgcagttctgccaggcatccgaggcatctctgaggagaccacgactggggtccacaaacatctaaaagatgatggccaagggatcctcaagtggcatgcatcaaggtcatgatcagacccagaccagttgcaacctctatggtcgccggcgtcatcataatgggaccagcgggacccacagtcagaatgcgcaagaccaaggaccagaaagggcagggaaggctccaagcgagggtcgaacagacaaacaaaaagccccacagcgccagcgacaagacccaaaagaaagcaccgacccaaagaaacagcagacaaagaaa

SEQ ID NO: 525328 - DNA, 913 bp, Homo sapiens
gtggctctcacctataatcctagcaaatcgtagtacttgggaggccgaggcaggaggatgcctgagcccagggttcaagaccagcctcagcaacataaaatacaaaaaaatacaaaaattagctgggttgggtggtgtgcacctgtggtcccagctactcaggaggctgaagtgggaggatcactttgagcctgggaggtcaaggctgcagtgagctgtgatggcatcactgtactccagctttgggtgacagagcaagaccctgtctcaaaaaaagaaaaaggaaaggaaaaggaaaaggaaagaagaaattggtttttgggatatactaatgtgccagggcacgatgccaaggccctgtgatactttctctaacatttcacaggcatgggcggacagggagggtccacgcagatgtaagactactttggccaagggttcagccagaaaggtggaccgtggcgatttggccccacggttgggtggagcagtcctcacctatgggaggctcagacaatatctggtgtgtctagcccttttgctcagctcccaagcttcgtgggttcctttaccttaatttcacatgttgactgtgagctaaccgtcatctcggggcagcctaaggtggcacatcgtgagcgaggcgtccattgccccagttggtcttcgttccagattacctcaggaagaaagcgaggcctttgttgtccaagaatttaaaagcgaggtcaagggggcatgcgtgttatccaacattggggggctgagcaggaagtcgttgggcccggagttgggaccacgtcggatgttaatagaagcgctctaaaagtgcaaggtggggtgtgggccccctccacacaaggggggaggagacactccaagaggagggggagagcaatacgccgggaaaact

SEQ ID NO: 525329 - DNA, 140 bp, Homo sapiens
gtcctgtcttcagtcttgaagcagggcttcccaatgccccttttcctccttgccttccttcccccattatttccacaggcagcataatttgttttcctacttatagtcactgctctagacagaccaagagaggccacagt

SEQ ID NO: 525330 - DNA, 228 bp, Homo sapiens
  misc_feature (33)..(33): n is a, c, g, or t
  misc_feature (73)..(73): n is a, c, g, or t
  misc_feature (131)..(131): n is a, c, g, or t
  misc_feature (148)..(148): n is a, c, g, or t
  misc_feature (164)..(164): n is a, c, g, or t
  misc_feature (168)..(168): n is a, c, g, or t
  misc_feature (170)..(170): n is a, c, g, or t
  misc_feature (185)..(185): n is a, c, g, or t
  misc_feature (225)..(227): n is a, c, g, or t
gaagagctgccattggctgacagggctttttcnggctctgtctttggtcagggggcacaccccagcctgaagngtgatgccattggccagggagtggttttgtcatagccgttggctgtgaggtggggggnaaagttctgggattgangccctgtggccagggngttngncggggcagcgacttntgggcctccaggccctcttcccaccatagcaatgtgggcnnnt

SEQ ID NO: 525331 - DNA, 1563 bp, Homo sapiens
  misc_feature (706)..(706): n is a, c, g, or t
tctagtggtgggacacttttctgttcgtatattataagctaacaacatattttctcagagggtttttttcttaagtaatactactcatgcgacactggcgtatttactcagtcgtcgtttagtatgggcgacgtaatttttattgctttcatcaacgactttttttttaggggtgctattaggccccccaggacggttttttcgcttctataaagaggagatttgtccgccttttttttcgtattagtgttgttttcgtcggcgccacacctccccataactgttcgcctctgtcgtttgttattgaagaagccccccctcttgtggggtaataagttcgatatgttgctcttccacaataggggtgtttttaaataactacattgccacatttcttttggttaatggaagagaaccatctacaggggcacctatctgcctttgggtgccaaaaggaagtttgttcagcagaggggtgtttttgaagcgaaaaatgcctagtggtgccttataataattcccttcgcggtttttatataaaaagatgttggtggtagaaagaacaagagattgttttttcgtcgcctccccgagtagaatatttgtttaagaccccctccgggcgccccttcggtgttttgtgaaagaggcccccccaggggggtgtatatgggggcgcccacaaacttccacgaggtgtgcgctntccacagggtcttttataaaagggccgctctctccacattataccgtttttgtcctctttctagctcgcacccctttgtatatttacagatattagcttgagagaagattttataaattgtgggccaccccctcatctattatatgtgcgtagtacacatatatatcaaatcgtcgtctatagtgggtataaaaattttccttgaaggaccgtcgtagaccttctctctgtgcgccccaccaccgctctctctcttgtgtgttgtgctcgtgcttttcccccgtcgagaagtgtaggatgatattattctctccaccgcgagatagagagggttcttgcgcacatacacgcgcttatggttatagaccaccttgtagagcgcacacacatatatatatgtgggagaaagaatctataggagagagagtagagagtccacagcgcgctttgttctatactataaggagactataagagtggtctcgcaccacacacagagttggtgcgcctcttttgttatatattgtcacatataaagagaaagagagagattgtgagagcctgggtgcgcacacatggcgcttgttgcgcctcgtattagatctccaccgcgtatacattgtggagaggctcgaagggcacaggagaggggtgcttgtagagagactaagcctcacagggaaacacataagtgaggagaccccgttctcacattataaaaaaataaaaaaaaggcacatggtggcacacgcacctgtaagtcccacgctaactccacggaggactgagggctagaagatcctttgaacctaggagtttgagaccagcctgggcgaaatagtgaggccccatttcca

SEQ ID NO: 525332 - DNA, 135 bp, Homo sapiens
acccgttataacgcgcacagcctgccatggcctccctggggtttaaagtttgctgctggtagatgtagggcttgtggagtctccaagtataaggtgaaggtgaaatgtcgaatttgttatctagtcgcatcacct

SEQ ID NO: 525333 - DNA, 105 bp, Homo sapiens
cgactctagaggtatccccctctagcttatacttccaatatttgttttttgttttctttaatagaggcaggtcttgctacgttgcccaagctgcttgtgaactcc

SEQ ID NO: 525334 - DNA, 626 bp, Homo sapiens
tctccaagctcctttcccggctgttgctcgtgacccatgtatggcttcttttccattgatgtgtgatgaatcccactggcacatgtgtgcagtttctttcccaatggcctggtggcctctttggtgtgccatgtgcccaggcccaggccccaccctaaaccctagtgacagggtgctctgccagtgcccagggcctctgtctaaccccaggttagggtggtctcccagtgaccaggtcctatgtccaacccaaggtgcaggtggtctcctgggagcaggtcctgaccccagaggtggtaggtcccatggtgccctggatctggacctaacctgagagccggtgtactgttaacctctgggaatgtgtcctcccaatcctagtgccagttggcctgggcccaggaccaaagccacaatctgagatcagtgcttttaagggacaaaccctgcccccaggtcaggtgtgtatccagtgcccaggcctatggaacccaacccaagaccaatgtggcctgggcccaggccctaatctagatgccatgagcattgtggcctcttgggcacaggatctggtcttaacttaagaatggctggacctcattgcctcgatcttgcccccattctaa

SEQ ID NO: 525335 - DNA, 107 bp, Homo sapiens
agacggatccccagatctgtcgacaggttgatcgccgtgccacccattcctctcgtccagtgatccctgcttctgagagcacaggggggcaactgtccacaactctc

SEQ ID NO: 525336 - DNA, 548 bp, Homo sapiens
  misc_feature (117)..(117): n is a, c, g, or t
atggaggccagatgcttaagtggccgcctgtgcagctgggaggacagggtcatgctatgattggtggaagctacccccaaatgactgctctagaaggaggcgaccgactgatctctncagcactggcactgggcaatgccatttcaatgcactaccaagtgatacctgcagttcctagctcttcttaggaaacaacatttgtggccttctcttaaatactttgcaatccagccttgccagtgttcgaggttttcgataatcacagcttctgctctctaagttccagactattacagatgtttgcgcagttcctgttatttcttttcacagagactaatggctgctagccacttggagagagagaggctagctcaggtttagaatcgtctttgtaacatttgcagatactccttattcctgtctgtgtcatagagataattatttttttctaaaatacaaaccggtgtgcctaagttaacttactatagaaaaaaaaataatctaaacatctcttaaacctgaaatgcttagagacatagataccatgt

SEQ ID NO: 525337 - DNA, 260 bp, Homo sapiens
tcaacagaaagaagtgcagtgggactctcatgcaacctcatccccaataggacaattaggcaggcttagatgtcactgaggaggggaccagaatcgctctgaggacagtaggaaaaacctaggcaggtgtaagagcagggagtggggtacccacgagctgagggccacaggatcgacatgattctatatgtgattgtcatgggtgcagggagcaggcggagacaccgtctaggcttcctgggggccgtcctgggcctcgg

SEQ ID NO: 525338 - DNA, 251 bp, Homo sapiens
  misc_feature (6)..(6): n is a, c, g, or t
  misc_feature (20)..(20): n is a, c, g, or t
  misc_feature (144)..(144): n is a, c, g, or t
  misc_feature (190)..(190): n is a, c, g, or t
  misc_feature (216)..(216): n is a, c, g, or t
  misc_feature (234)..(234): n is a, c, g, or t
ttaaantttagatcaagttncacattggaagtagctctatatcatatggcctacgagcccctctggtctggagctgaccccaggtaccctcatctcccacccaccactcagccttcagccctttgccactgcacgtgggctttntggtgctctccagatgccccacctcgttctgctacagactttgcanttgatgggagctggcttggtgctctncttcagacttgtaagttncattcaaatgcaagttt

SEQ ID NO: 525339 - DNA, 131 bp, Homo sapiens
aatgactaaccatgtgagaacatgccttgacaagtcgtcggaaggtgagacgatggagtaccatacgagccagcaattccactcctaggtgtatacccgagagaaatgaaaacatatgtcacacaagagac

SEQ ID NO: 525340 - DNA, 302 bp, Homo sapiens
gcgtcgacgcttcagcctggctgaaggggaaggtgaattcgagatcgcctgcgaattcgatgatctgccggcggcactggtgcttgacgaaaatgcgcaaacatccctggctcatgaattcctgctcaacgcgcagggctcattggaaatcgtcaagacgttcaaagccactaccggtaagctggatcgaacagccatccgttgcctgcatccaacaagcgacaagctatcgaagctcctgagtctgaagatcactgacttgaagaagctaggggagcaagagggtatatcagaccgggtgg

SEQ ID NO: 525341 - DNA, 1105 bp, Homo sapiens
  misc_feature (539)..(539): n is a, c, g, or t
  misc_feature (541)..(541): n is a, c, g, or t
  misc_feature (552)..(552): n is a, c, g, or t
  misc_feature (1105)..(1105): n is a, c, g, or t
gcttaaacaattatttgagctatttgaattatttcagattacacacataaagtgtgacttcattaatacttaatatcacactatttaaaatttacaaaattagtgggtcacagaggctcgtgcttgtgatcttagcactttggaggccaataggggaggattgcttgaagccaggagttcaacagctgcctgggcaacaaagcaagaccttgtctctacaacacaaaaataaattaatgcatggcggcactccagtagctggaattacaggcgcctgccaccacgcccggctaatttttgtatttttggtagagacagggtttatacatgtttgccaggctggtcttgaactcctgacctcaagtgatccgcccacctccaccttccaaagtgctaggattacaggcttttatcattatttctaattgacacataataattgtacatatttatgggaaactgtgatattttgatacatgtatacagtgtatgaggtttcaatttttaaaataaacatgcaataccttaaaacaaaacananacacacacaanacaacaaaactgcgacgcacaacatgacagaggggcgcgacacaagacgcgtaccaaatgcgcccgcgcccaaaagcggtaccagacccaagctccctggccaccgcggaaaacacgcgagacacccaaaaagggagcgcgaataaaatctcggaaaagccgagttaccgtagagcagcccccaccgacagacccaccacatccgccccacccacccccacccccccagccacgacgccaacaccaaacccacacacaacacagccaaaacaaacacacaacacagacacaacaccaacacatcagagcacaacacgaagaggaagacacaactgaagcgaaacaacaagccgcacgagcacgacgacgaacagccgacgccgagccagcaccgacagacggacacagaacgaacaccaagacggacaggacaacgaagaaagcaccaccgacgcgccgcccacaaggaaggcgcgacaacggagaaggccagagataaacgaagaacaaaagcacgaaggacgcaagagaaactagaggacgagatgacacn

SEQ ID NO: 525342 - DNA, 116 bp, Homo sapiens
aaaaataaattttaaaaaaggtggaaaagttacggcaacctcaggttcagcataaaaatttaggatgaaggaggagaagagagggaggcttgttctttgtcgatcatagggtatct

SEQ ID NO: 525343 - DNA, 259 bp, Homo sapiens
ctcacgtcaggttattcctttttataaggtttctgttgaaattttgattttacgaagacacttcattctgcaaggacgtaaaacacacgatacatctaatctgtttcactctctctacatctctgtttcatatcattataaatgagggggaattaacattgtatgcagaggtgtgggcaccatgattcaatgcgtatacattgaagtgattctacagcgtcattacccaggtattcctaataacattaacatggaacat

SEQ ID NO: 525344 - DNA, 980 bp, Homo sapiens
  misc_feature (441)..(441): n is a, c, g, or t
  misc_feature (829)..(829): n is a, c, g, or t
gcttgagtgcgctggaacggaggatggcgctggtggcgttggtgtgctggtgtgctcggcttggtggctggcggctgagctggtgcctggggtgctgtggtgctgatggtgcactggacgtgcgtgcctgggctgctccctgtgagcctggctgcgcacagctggccatgaacgccgatggctggagtgtgccctgtgtgtcctagtactgttgtagctgtaagctgcgcattgtccactgctgccgactcggcagtcttcgatggtgggggcgttcatgcgttcgtccgtgaggagcgcatgtgtgcggtgtccattcctttttgtcggttgacccatgcgtccaagtgtgaccgctgtggccccctgctgtccggctgcgccggacacgtgctagcccgggtcatcgagattcgctattgcgccctagtagacccctantccagccgtggtgatgacttagtgagccaagaagagattatacactctgtagaagttagcctttgcagggcttattcgaggatatacatcacgttgcatttgtcacctcgtaaaggaccattagcgagagagtagttactggaacagttccttgggtgatgcgataggcgaactccaagaccaacgaggattttcgttcacggacatatgcgaatttttcacgatagggacgcgcgagacaaagtgaatacaaagaacagaaggaggagacataacggaggttattgttaggtttgggaagacacccgatcaaagctcgggttcaatcccgcgtggagcttcctagatgacgaaggaaacggatccacaggaggaacaaccgggggtnggcattgccaagagatcttcccgtggcgggacccgcaagccatccaccgtcatacttaggtagttttgaccttgaaccacggggtaacagggaagtcctttcacaagcaatgtggaaaaacacaacttcttataattggcgcaactggtgg

SEQ ID NO: 525345 - DNA, 451 bp, Homo sapiens
tcatctagaggatccttttgcggtgcctttccccaaacaggccaggtctgggactgaaagaacagaagaggtgtgagagcagacgaggagggaagtgtgggaggcggggagggagagttgaggcaggtagactggtgtaggggtggatgaggcaggatggggatagggcgactggccaggatggaagagctggtacaggcagaggaggccaggaggagagggggagcagcagggatccagtggctgagctgccctcagatggagaggctgaaggcactgccgacttggaggcaactccagaggccaggcctgaggaggagctcacaggggaggagagtgaggcggcccagactagctgtggcctactgggcgtgcaatggggtggcctcacacacagcgtcaccaaaggccagggacctgagctgatggggggtcccagaccccaactaag

SEQ ID NO: 525346 - DNA, 428 bp, Homo sapiens
cccggatatatatatatatatatacatatacaaatgaatttaggatattatttaattcccctgaacaaaacacataattctcccatatctttgcatggaataatatgcagccataaaaaaaagaatgagatcatgtcctttgcagcaacatggatggggctggaggccattatccttagcaaactaacaaagaaacagaaaaccaaataccacatcatctcatttatacgtgggagctgaatgataaagaacgcagggatccatagagggaacaacacacagcgaggccttttggagggtggagagtgggaggatggagagaatcaggaaaaataactaatgagtactggccttaatacctaggtgatgaaacaatcttgtacaacaagcccccatgatacaattatagctatgtaacaaacctgtac

SEQ ID NO: 525347 - DNA, 536 bp, Homo sapiens
gatgcagtggcgtcggtgggaagcgcaggtcgaaaagcgatgccgattgtggtttcctggggctgtggccacttcggtggacccagcgctgaggcaggcgtgcggtagagtgctccaagaaatgagaagcggggctgggtgaggttgctcaggagccgatgggtgctggaggttgaccagtatccgtggaagacgtgcggctacaggagcgcactgagcggtggcttgtgtgtcatgatggccccaaatgaaaaactcttcttcgtggacactgtgctccaagtgaaacaaggtgctgacaaagaagagaaccatagtccagaagaagtcactgcttctcaatgaaagcccttcgggttgagctcatcctcgagaacacatcaaagtccctggccccaatagacgtctcgcccatcaggtccccaagccaagaagctcaggcggatggagcagctatgggagaagctggccaagcagtggcgagctgccccgggaggtgcgcaggtgccaggggccgttctcctcaagcctttctg

SEQ ID NO: 525348 - DNA, 465 bp, Homo sapiens
tatcaggattaagcccctacgcactctagcctggtcaggcagcatcggcgagcctctaccccgattgggagcagcaatgggccccgcctcactggatctgaagtgcagcagataccctgactggatccggaggggtggaagtcagtggtggtgtctgcaacaacagcaatcagtcagtggtagatggcgagcgaaagctcagttcgaaccagaacaatcacggaccacatagtatgcagttgtaagatttaatataatgacccacagagctcccatacaacaggaggggacccaaagggggttgcctttgccggctcaaatgcctgggtttatatcccaatcattgtccctccccctgtgctctcaggcaatagatgattggctatttctttacctcctgtcttagcctaattagcatttcagtgagctctctttactacctgattggtcaggtgtgagctaagt

SEQ ID NO: 525349 - DNA, 901 bp, Homo sapiens
tgctccagtagctgaacgggcgctggctgtgcagcaccccccccccatctctaccttgctccatttttctatttgtccagctgccctgtcaagagacacatgaaagccgatccttcagccagtcaagaattaactgagcactggggtgaatgcttatctacattgctgagaatggcgtcaaggtccagtctgataccaagacgaggttaaattgggacagagctgcacagtgatcctgatgtctgttcccagctacgcagtcaagactgtgataacaggaggtcccagttgttaccatggcttctgccgagcccctgacagcgctgtctcgtggtacctatatgctatccacggctacttctgcgaggtgatgtttacagcggcctgggagtttgtggtgaattttaactggaagttcccgggggtcacgagcgtgtgggccctcttcatctatggcacctccatcctgatcgtggagcgtatgtaccttcgtctgcgtggccgctgtcctcttctggtgcgctgcgtcatctacactctctggacttacctgtgggaattcaccaccggctttatcctacgccagttcaacgcctgtccctgggactactcccagttcgacttgtgatttcatggggcctcattaccctggagtatgctgtgcccggtgtctgcgggggccctccatccatggagcaggttaatcatcgggaaaagcctccggctgggctttgaccagggacccaagcctggggagctggcagccaacagcctggcaagggccgttagacacgactgagtcagaaacataatgggacggcccagagtcccataagcacctgaacagagaagaaaaccatggtggcgtccctgggaagagcgtccccaaggttaacagaga

SEQ ID NO: 525350 - DNA, 335 bp, Homo sapiens
aaccggacacattgacccagaagggtgagcaggcctacaggtgctgggcaggactgtcttgcaaagagcacaaaatgtgcaggtccctctgggagtgttatagtgggtagctagtcagaaagagcaggcaggagagggctccccataccccacacaccaggagtgtcaggtgaccatcaggtgatggtctggcggttgttgactgtctttctaaagtaataattggtcacacccggcaacagggaaaagccggctcctaatagatagaaaacactcgaaactggtgagcagtagtttccctataagatctcaggagttgagccagtgggctcaga

SEQ ID NO: 525351 - DNA, 159 bp, Homo sapiens
cgggaagggccacgcaactgggtcccaggcattaaggccacgtgcagggccatggaggtatgcttgtcacgaggcgcttcagaagcgagcgaagcgacagagaagccttgcgtccaaggcccttttgtcctggtagcaattgaggtgtgcagagcactg

SEQ ID NO: 525352 - DNA, 1598 bp, Homo sapiens
  misc_feature (282)..(282): n is a, c, g, or t
  misc_feature (1597)..(1598): n is a, c, g, or t
gaacacgtaataccgtattattcgagccgtcatgatcctggagtcttaggtcgcagttctaagcctccttattcgagccgagtctgcgaccacgccgacgtggaaccattcctaggctaaccgatccaacagttatacgacgatctatcggatcaacagtccactgccttagtaaatgactcttcgttcatagtcattatccatcgataatcggcaagcattataggcagacgtgacctaggttaccccgtaataattcggctgtcacccacgattagtggncgcttctgacccgtgataatacacaccgtaattacattcatagacctactgtactcttcgcacttcttctacctagcctctctgtctcgtcattctcgtcgactacgtcgtgatgggctcgtgagtcaggagacagcaccggtttgaagcaagtactagtccccataccacttactacaccgcgtgaaccctatactcaccaagcacacttgagaatgccctacccgttagaaacctacaccatactatcctctactctaacatccttagtccagtgtatgatcctctcgttcatagtcgttcattgcgggtcccattccaatattgcgcgtcaactcaaacatattttaattcaacatactaaaataactcacctgattacaataaacccccaatgtacccaaaaacggcaacactatcctatacggtgcgtgcaattccgtgttccgctaaagttccaccagggcacgcttcaccttacctatgctacctaatttatccttccctaagcttaacttagatttggccagggccattacacctgactagggtaaccttaaactaggtatccgtacaaaacctacgaaacagcaaacttttcttatcgaacacaccgtttccgggacgaggaaccggcggaaccccgcaaggtaacgtgagttaaccccaaaagatgtcctaaatatcccggaactatcatacgggcgcaaaccccgtgcaaagggcgccactcacttccaaaaaatatccataaacacacgggggatatccggaacaagaaggacgtccccagaagataggtgagaccccaacaatacagcccgagggagaacaacaaggcgagcggcaaagtggaacaaccacaccgcgtggggagccaagaaggcacaacagaagacgacgacacgcaggggaacccacacagggaggaagccccaagaggagagacgacacccaccatataatagtacacccacctacgtattcaacagagactacaccagagcgaggtacaataacccgcagcgatgtgacaacacgcggcgagcaaaaccggaggggcacaacaagtgagagtaagtcaacacatacgcgcgaagaccaacacagagaatgcgagagtggccgtgccaccgacgagactaagactactggcaggagacggcagagatggtagactcatcagtcagcatactagaacaacagagataaggcgagtaatacagacagcaagataagaagtagacaacgtattacgacagaaaagatatcactgccactcactgacacatacattcaccactcacctagcaann

SEQ ID NO: 525353 - DNA, 719 bp, Homo sapiens
cgtcgagcctgatagttgagaaaacatcccagaaaagtggaccccagaagtcaccgcatttctgtcccaatgtgcccatcatcctggttgggaataggaaggatcttcggaatgatgagccacaaggcgggagctagccaggatgaagcaggagccggtgaacacctgtaagacggcagcagatgtggcaaccaggatgggcgcttttgggtacatggagtgcttcagcaaagaccaaagatggatgtgacgagaggtcttcgaaatgggctacgagagctgctctgcagagctagacgtgggaaagaaaaaatctgggtgccttgtcttgtgaaaaccttgctgcaagcacagcccttatgcggttaagttttgaacgtgctgtttattaaatctataggcggtacttgatttaccttgggccctttatacagtttatatcgtataagtttacctaagattacaaactcagaagtcaatcttgctaccaggtatttagaagccaagttatgaattattaaagcgaatgtaccacaccccggtgttggtgcccaaccagggtgtcccttttgaacaacatggttcttaaacaaggacgctcacttcctgagaggtcacaccgcacttgtaggacacaaaccacaggggcgggcactaaaaatttcacagacggggaaattttcccttttaaacgatatctaggcgatactattctaaga

SEQ ID NO: 525354 - DNA, 128 bp, Homo sapiens
tctagaggatccctctccctacggtatctaaccctactctaatcacataacctattcccccgagcaatctcaattacagtatatacaccaacaaacaaggttcaaccagtaactactactaatcaacg

SEQ ID NO: 525355 - DNA, 290 bp, Homo sapiens
tatacataagctggtcggctgaagttgacccgataactccaatagatatccctgcgatagtttctacacagtatacacaggacattgaccaaaatcaagcaggatcagagctatcgccacatttcgtggccatctgaaagccttgactgtgaaaaccctctcgcgcagggcccggcggatagggaacagcacgactggcacagtgagggtcaccgcgagcagcacggccaggcgcacacagaggatgagcgggtccttctggctgtacatgtgcagcatctccgctttgg

SEQ ID NO: 525356 - DNA, 869 bp, Homo sapiens
cttgaaccatcccactctgcttgggtacctaaatccccgaagggtccccacctccctcctttacacggattcactaatcagtggcttattaatccacccctttccaaggtaaaagtcattcctctgatatgcaagaacgccctttattcactcaaattgaataataataaaggggccttctttctctcccggcggacgaacccctctccttcaagccaagcgccctctcgcccccgagtcccactcccttgcggccgaaataagaaagccttctctttcagacgcttacattttattaaccgcactctctcgccactcgttcaccactggtcctacacaccaacttgcgcgagagattgttgctcccacaaacggtggtcaagttgaaacccactcgccctcaggattgagaccacgacacattcgactcgtattgctctccccccaaagcggccacatgcaacatttgtgcttctctcagaccgccatacattagaacctgcctttggtgcgcccctttttcagtctcgcacacgcccactcgatggctggccctcgcgctgcacaccacaacactccatatcttccaaacagatgtgtgttgttaccgcaccgatacgacacaaccaccacatgcctctcagagagtcacgccgcagtcttgatagtcgtttaaacaaggaccacgccttgtcaactaacacacagggggtggggaaaaagcaccccacgcgtttcatccccttggcaaagagatacgccctggtctctggacgacattgggtgcccgaggcaacacgtctctatcaacatagatctcaaggaggccccaccccccggacatcccttggcaaagcacacccgcaccc

SEQ ID NO: 525357 - DNA, 5416 bp, Homo sapiens
gtgtcccatagtgtttccaaacttggaaagggcgggggagggcgggaggatgcggagggcggaggtatgcagacaacgagtcagagtttccccttgaaagcctcaaaagtgtccacgtcctcaaaaagaatggaaccaatttaagaagccagccccgtggccacgtcccttcccccattcgggccctcctctgcgcccccgcaggctcctcccagctgtggctgcccgggcccccagccccagccctcccattggtggaggcccttttggaggcaccctagggccagggaaacttttgccgtataaatagggcagatccgggatttgttattttagcaccacggcagcaggaggtttcggctaagttggaggtactggccacgactgcatgcccgcgcccgccatgtgatacctccgccggtgacccagggctctgcgacacaaggagtcgcatgtctaagtgctagacatgctcagctttgtggatacgcggactttgttgctgcttgcagtaaccttatgcctagcaacatgccaatctttacaagaggaaactgtaagaaagggcccagccggagatagaggaccacgtggagaaaggggtccaccaggccccccaggcagagatggtgaagatggtcccacaggccctcctggtccacctggtcctcctggcccccctggtctcggtgggaactttgctgctcagtatgatggaaaaggagttggacttggccctggaccaatgggcttaatgggacctagaggcccacctggtgcagctggagccccaggccctcaaggtttccaaggacctgctggtgagcctggtgaacctggtcaaactggtcctgcaggtgctcgtggtccagctggccctcctggcaaggctggtgaagatggtcaccctggaaaacccggacgacctggtgagagaggagttgttggaccacagggtgctcgtggtttccctggaactcctggacttcctggcttcaaaggcattaggggacacaatggtctggatggattgaagggacagcccggtgctcctggtgtgaagggtgaacctggtgcccctggtgaaaatggaactccaggtcaaacaggagcccgtggtcttcctggtgagagaggacgtgttggtgcccctggtccagctggtgcccgtggaagtgatggaagtgtgggtcccgtaggtcctgctggtcctaatgggtctgctggccctccaggtttcccaggtgcccctggtcccaagggtgaaattggagctgttggtaacgctggtcctactggacccgccggtccccgtggtgaagtgggtcttccaggcctctccggccccgttggacctcctggtaatcctggagcaaacggccttactggtgccaagggtgctgctggccttcccggcgttgctggggctcccggcctccctggaccccgcggtattcctggccctcctggtgctgccggtactactggtgccagaggacttgttggtgagcctggtccagctggctccaaaggagagagcggtaacaagggtgagcccggctccgctggtccccaaggtcctcctggtcccagtggtgaagaaggaaagagaggccctaatggggaagctggatctgccggccctccaggacctcctgggctgagaggtagtcctggttctcgtggtcttcctggagctgatggcagagctggcgtcatgggccctcctggtagtcgtggtgcaagtggccctgctggagtccgaggacctaatggagatgctggtcgccctggggagcctggtctcatgggacccagaggtcttcctggttcccctggaaatatcggccccgctggaaaagaaggtcctgtcggcctccctggcatcgacggcaggcctggcccaattggccccgttggagcaagaggagagcctggcaacattggattccctggacccaaaggccccactggtgaccctggcaaaaacggtgataaaggtcatgctggtcttgctggtgctcggggtgctccaggtcctgatggaaacaatggtgctcagggacctcctggaccacagggtgttcaaggtggaaaaggtgaacagggtcccgctggtcctccaggcttccagggtctgcctggcccctcaggtcccgctggtgaagttggcaaaccaggagaaaggggtctccatggtgagtttggtctccctggtcctgctggtccaagaggggaacgcggtcccccaggtgagagtggtgctgccggtcctactggtcctattggaagccgaggtccttctggacccccagggcctgatggaaacaagggtgaacctggtgtggttggtgctgtgggcactgctggtccatctggtcctagtggactcccaggagagaggggtgctgctggcatacctggaggcaagggagaaaagggtgaacctggtctcagaggtgaaattggtaaccctggcagagatggtgctcgtggtgctcatggtgctgtaggtgcccctggtcctgctggagccacaggtgaccggggcgaagctggggctgctggtcctgctggtcctgctggtcctcggggaagccctggtgaacgtggcgaggtcggtcctgctggccccaacggatttgctggtccggctggtgctgctggtcaaccgggtgctaaaggagaaagaggaggcaaagggcctaagggtgaaaacggtgttgttggtcccacaggccccgttggagctgctggcccagctggtccaaatggtccccccggtcctgctggaagtcgtggtgatggaggcccccctggtatgactggtttccctggtgctgctggacggactggtcccccaggaccctctggtatttctggccctcctggtccccctggtcctgctgggaaagaagggcttcgtggtcctcgtggtgaccaaggtccagttggccgaactggagaagtaggtgcagttggtccccctggcttcgctggtgagaagggtccctctggagaggctggtactgctggacctcctggcactccaggtcctcagggtcttcttggtgctcctggtattctgggtctccctggctcgagaggtgaacgtggtctacctggtgttgctggtgctgtgggtgaacctggtcctcttggcattgccggccctcctggggcccgtggtcctcctggtgctgtgggtagtcctggagtcaacggtgctcctggtgaagctggtcgtgatggcaaccctgggaacgatggtcccccaggtcgcgatggtcaacccggacacaagggagagcgcggttaccctggcaatattggtcccgttggtgctgcaggtgcacctggtcctcatggccccgtgggtcctgctggcaaacatggaaaccgtggtgaaactggtccttctggtcctgttggtcctgctggtgctgttggcccaagaggtcctagtggcccacaaggcattcgtggcgataagggagagcccggtgaaaaggggcccagaggtcttcctggcttcaagggacacaatggattgcaaggtctgcctggtatcgctggtcaccatggtgatcaaggtgctcctggctccgtgggtcctgctggtcctaggggccctgctggtccttctggccctgctggaaaagatggtcgcactggacatcctggtacggttggacctgctggcattcgaggccctcagggtcaccaaggccctgctggcccccctggtccccctggccctcctggacctccaggtgtaagcggtggtggttatgactttggttacgatggagacttctacagggctgaccagcctcgctcagcaccttctctcagacccaaggactatgaagttgatgctactctgaagtctctcaacaaccagattgagacccttcttactcctgaaggctctagaaagaacccagctcgcacatgccgtgacttgagactcagccacccagagtggagcagcggttactactggattgaccccaaccaaggatgcactatggaagccatcaaagtatactgtgatttccctaccggcgaaacctgtatccgggcccaacctgaaaacatcccagccaagaactggtataggagctccaaggacaagaaacacgtctggctaggagaaactatcaatgctggcagccagtttgaatataatgtagaaggagtgacttccaaggaaatggctacccaacttgccttcatgcgcctgctggccaactatgcctctcagaacatcacctacccctgcaagaacagcattgcatacatggatgaggagactggcaacctgaaaaaggctgtcattctacagggctctaatgatgttgaacttgttgctgagggcaacagcaggttcacttacactgttcttgtagatggctgctctaaaaagacaaatgaatggggaaagacaatcattgaatacaaaacaaataagccatcacgcctgcccttccttgatattgcacctttggacatcggtggtgctgaccaggaattctttgtggacattggcccagtctgtttcaaataaatgaactcaatctaaattaaaaaagaaagaaatttgaaaaaactttctctttgccatttcttcttcttcttttttaactgaaagctgaatccttccatttcttctgcacatctacttgcttaaattgtgggcaaaagagaaaaagaaggattgatcagagcattgtgcaatacagtttcattaactccttcccccgctcccccaaaaatttgaatttttttttcaacactcttacacctgttatggaaaatgtcaacctttgtaagaaaaccaaaataaaaattgaaaaataaaaaccataaacatttgcaccacttgtggcttttgaatatcttccacagagggaagtttaaaacccaaacttccaaaggtttaaactacctcaaaacactttcccatgagtgtgatccacattgttaggggctgacctagacagagatgaactgaggtccttgttttgttttgttcataaaacaaaggtgctaattaatagtatttcagatacttgaagaatgttgatggtgctagaagaatttgagaagaaatactcctgtattgagttgtatcgtgtggggtattttttaaaaaatttgatttagcattcatattttccatcttattcccaattaaaagtatgcagattatttgcccaaagttgtccttttcttcagattcagcatttgttttttgccagtttcattttcatttttttccatggttccccaaaagctttgttttttgggcaagcagaaaaattaaattgtccctattttgtaaatgtgagatgtttaaataaattgtgaaaaaaatgaaataaagcatgtttggttttccaaaagaacatat

SEQ ID NO: 525358 - DNA, 249 bp, Homo sapiens
tcctgccgttcatattgtatagtggatattataaacgatggggatttttttgatttctattgctgctaaccatggaaacttaacctagctttgttcatcaactctgtattgtgcatgaaacaggatctgttgcgaggcataatcttaagtggccacacacaatgtttccatctgatgccatctggccgtaactgtaacttgacttacattatcgcattctgcttatctaaaattgttaagctaaacttt

SEQ ID NO: 525359 - DNA, 1949 bp, Homo sapiens
gtgtcccatagtgtttccaaacttggaaagggcgggggagggcgggaggatgcggagggcggaggtatgcagacaacgagtcagagtttccccttgaaagcctcaaaagtgtccacgtcctcaaaaagaatggaaccaatttaagaagccagccccgtggccacgtcccttcccccattcgggccctcctctgcgcccccgcaggctcctcccagctgtggctgcccgggcccccagccccagccctcccattggtggaggcccttttggaggcaccctagggccagggaaacttttgccgtataaatagggcagatccgggatttgttattttagcaccacggcagcaggaggtttcggctaagttggaggtactggccacgactgcatgcccgcgcccgccatgtgatacctccgccggtgacccagggctctgcgacacaaggagtcgcatgtctaagtgctagacatgctcagctttgtggatacgcggactttgttgctgcttgcagtaaccttatgcctagcaacatgccaatctttacaagaggaaactgtaagaaagggcccagccggagatagaggaccacgtggagaaaggggtccaccaggccccccaggcagagatggtgaagatggtcccacaggccctcctggtccacctggtcctcctggcccccctggtctcggtgggaactttgctgctcagtatgatggaaaaggagttggacttggccctggaccaatgggcttaatgggacctagaggcccacctggtgcagctggagccccaggccctcaaggtttccaaggacctgctggtgagcctggtgaacctggtcaaactggtcctgcaggtgctcgtggtccagctggccctcctggcaaggctggtgaagatggtcaccctggaaaacccggacgacctggtgagagaggagttgttggaccacagggtgctcgtggtttccctggaactcctggacttcctggcttcaaaggcattaggggacacaatggtctggatggattgaagggacagcccggtgctcctggtgtgaagggtgaacctggtgcccctggtgaaaatggaactccaggtcaaacaggagcccgtggtcttcctggtgagagaggacgtgttggtgcccctggtccagctggtgcccgtggaagtgatggaagtgtgggtcccgtaggtcctgctggtcctaatgggtctgctggccctccaggtttcccaggtgcccctggtcccaagggtgaaattggagctgttggtaacgctggtcctactggacccgccggtccccgtggtgaagtgggtcttccaggcctctccggccccgttggacctcctggtaatcctggagcaaacggccttactggtgccaagggtgctgctggccttcccggcgttgctggggctcccggcctccctggaccccgcggtattcctggccctcctggtgctgccggtactactggtgccagaggacttgttggtgagcctggtccagctggctccaaaggagagagcggtaacaagggtgagcccggctccgctggtccccaaggtcctcctggtcccagtggtgaagaaggaaagagaggccctaatggggaagctggatctgccggccctccaggacctcctgggctgagaggtagtcctggttctcgtggtcttcctggagctgatggcagagctggcgtcatgggccctcctggtagtcgtggtgcaagtggccctgctggagtccgaggacctaatggagatgctggtcgccctggggagcctggtctcatgggacccagaggtcttcctggttcccctggaaatatcggccccgctggaaaagaaggtcctgtcggcctccctggcatcgacggcaggcataaaagaaatacatggtcgagcacggtggctcatgtctgtagtcccagca

SEQ ID NO: 525360 - DNA, 128 bp, Homo sapiens
gaaataaagcatgtttggtttttttcacaatttatttaaacatctcacatatacaaaataggtacaatgtttaaataaattgtgaaaaaaatgaaataaagcatgtttggttttccaaaagaacatat

SEQ ID NO: 525361 - DNA, 124 bp, Homo sapiens
cacgcagtctcaaggactttcaaagaatagtgcaccttcacttagtcaccaaataaatttcatcataaaacataagattctccttgcaacagcggagaaatgcctaggagggaggcgaccgata

SEQ ID NO: 525362 - DNA, 971 bp, Homo sapiens
gcttcgctctgaggtgctgtctcaccggtgagacccggaagcgggcgagtctcgtgctgtgtcggacctgcattaatgaatcggcaagcacatggagtacctcatcggtatccaaggccccgatatgtcttgtcgcctccgacggtgcgcagaatatgtccaatgaaggacgatcatgaaagatgtaaatgatgaaacgatattactcctgtgtgtggagaggctggagacactgtacagtttgcagaatactattcagcaaaaacgtgcactttataagatgcgaaatggatatgacttgtctcccacggcaacagctaacttcacacgccgaaacctggctgactgtcttcggagtcggaccccatatcatgtgaacctcctcctggcctggctatgatgagcatgaagggccaggcgcttgtattacatggactacctggcagccttggccacaggccccttattgcagccaacgagtatggtgccttcctgacctctcagtatcctcgaaccgatactacacaacgagctatctcacgtgaaagggcagtgaagactccttaggacaattgtcttgaaggagctccagaaaaccgcttcatccatgaaatctgccaaccttcagtgtgcgaatcatcgacacaactgggccaccatggaacctgcataacatttttcttttcccaaaacaaggggtcctaaccatcaatgttctccatccaataggccagggaactttttatgatgcccccataaatttaattactcttataatgccgaactttgataatggtaatccaaaaccgtgcttggtatattcgacatcaaaacgaacagacacccggtgcgacgaaccaagaaagccacatcagtcaaaaaatataaagtgcacagccaaggcgaatgcacgtaccaagaaaaaaaaaatataaaaagcagcaatcagctacaccccctcctgtccccat

SEQ ID NO: 525363 - DNA, 5476 bp, Homo sapiens
gtgtcccatagtgtttccaaacttggaaagggcgggggagggcgggaggatgcggagggcggaggtatgcagacaacgagtcagagtttccccttgaaagcctcaaaagtgtccacgtcctcaaaaagaatggaaccaatttaagaagccagccccgtggccacgtcccttcccccattcgggccctcctctgcgcccccgcaggctcctcccagctgtggctgcccgggcccccagccccagccctcccattggtggaggcccttttggaggcaccctagggccagggaaacttttgccgtataaatagggcagatccgggatttgttattttagcaccacggcagcaggaggtttcggctaagttggaggtactggccacgactgcatgcccgcgcccgccatgtgatacctccgccggtgacccagggctctgcgacacaaggagtcgcatgtctaagtgctagacatgctcagctttgtggatacgcggactttgttgctgcttgcagtaaccttatgcctagcaacatgccaatctttacaagaggaaactgtaagaaagggcccagccggagatagaggaccacgtggagaaaggggtccaccaggccccccaggcagagatggtgaagatggtcccacaggccctcctggtccacctggtcctcctggcccccctggtctcggtgggaactttgctgctcagtatgatggaaaaggagttggacttggccctggaccaatgggcttaatgggacctagaggcccacctggtgcagctggagccccaggccctcaaggtttccaaggacctgctggtgagcctggtgaacctggtcaaactggtcctgcaggtgctcgtggtccagctggccctcctggcaaggctggtgaagatggtcaccctggaaaacccggacgacctggtgagagaggagttgttggaccacagggtgctcgtggtttccctggaactcctggacttcctggcttcaaaggcattaggggacacaatggtctggatggattgaagggacagcccggtgctcctggtgtgaagggtgaacctggtgcccctggtgaaaatggaactccaggtcaaacaggagcccgtggtcttcctggtgagagaggacgtgttggtgcccctggtccagctggtgcccgtggaagtgatggaagtgtgggtcccgtaggtcctgctggtcctaatgggtctgctggccctccaggtttcccaggtgcccctggtcccaagggtgaaattggagctgttggtaacgctggtcctactggacccgccggtccccgtggtgaagtgggtcttccaggcctctccggccccgttggacctcctggtaatcctggagcaaacggccttactggtgccaagggtgctgctggccttcccggcgttgctggggctcccggcctccctggaccccgcggtattcctggccctcctggtgctgccggtactactggtgccagaggacttgttggtgagcctggtccagctggctccaaaggagagagcggtaacaagggtgagcccggctccgctggtccccaaggtcctcctggtcccagtggtgaagaaggaaagagaggccctaatggggaagctggatctgccggccctccaggacctcctgggctgagaggtagtcctggttctcgtggtcttcctggagctgatggcagagctggcgtcatgggccctcctggtagtcgtggtgcaagtggccctgctggagtccgaggacctaatggagatgctggtcgccctggggagcctggtctcatgggacccagaggtcttcctggttcccctggaaatatcggccccgctggaaaagaaggtcctgtcggcctccctggcatcgacggcaggcctggcccaattggccccgttggagcaagaggagagcctggcaacattggattccctggacccaaaggccccactggtgaccctggcaaaaacggtgataaaggtcatgctggtcttgctggtgctcggggtgctccaggtcctgatggaaacaatggtgctcagggacctcctggaccacagggtgttcaaggtggaaaaggtgaacagggtcccgctggtcctccaggcttccagggtctgcctggcccctcaggtcccgctggtgaagttggcaaaccaggagaaaggggtctccatggtgagtttggtctccctggtcctgctggtccaagaggggaacgcggtcccccaggtgagagtggtgctgccggtcctactggtcctattggaagccgaggtccttctggacccccagggcctgatggaaacaagggtgaacctggtgtggttggtgctgtgggcactgctggtccatctggtcctagtggactcccaggagagaggggtgctgctggcatacctggaggcaagggagaaaagggtgaacctggtctcagaggtgaaattggtaaccctggcagagatggtgctcgtggtgctcatggtgctgtaggtgcccctggtcctgctggagccacaggtgaccggggcgaagctggggctgctggtcctgctggtcctgctggtcctcggggaagccctggtgaacgtggcgaggtcggtcctgctggccccaacggatttgctggtccggctggtgctgctggtcaaccgggtgctaaaggagaaagaggaggcaaagggcctaagggtgaaaacggtgttgttggtcccacaggccccgttggagctgctggcccagctggtccaaatggtccccccggtcctgctggaagtcgtggtgatggaggcccccctggtatgactggtttccctggtgctgctggacggactggtcccccaggaccctctggtatttctggccctcctggtccccctggtcctgctgggaaagaagggcttcgtggtcctcgtggtgaccaaggtccagttggccgaactggagaagtaggtgcagttggtccccctggcttcgctggtgagaagggtccctctggagaggctggtactgctggacctcctggcactccaggtcctcagggtcttcttggtgctcctggtattctgggtctccctggctcgagaggtgaacgtggtctacctggtgttgctggtgctgtgggtgaacctggtcctcttggcattgccggccctcctggggcccgtggtcctcctggtgctgtgggtagtcctggagtcaacggtgctcctggtgaagctggtcgtgatggcaaccctgggaacgatggtcccccaggtcgcgatggtcaacccggacacaagggagagcgcggttaccctggcaatattggtcccgttggtgctgcaggtgcacctggtcctcatggccccgtgggtcctgctggcaaacatggaaaccgtggtgaaactggtccttctggtcctgttggtcctgctggtgctgttggcccaagaggtcctagtggcccacaaggcattcgtggcgataagggagagcccggtgaaaaggggcccagaggtcttcctggcttcaagggacacaatggattgcaaggtctgcctggtatcgctggtcaccatggtgatcaaggtgctcctggctccgtgggtcctgctggtcctaggggccctgctggtccttctggccctgctggaaaagatggtcgcactggacatcctggtacggttggacctgctggcattcgaggccctcagggtcaccaaggccctgctggcccccctggtccccctggccctcctggacctccaggtgtaagcggtggtggttatgactttggttacgatggagacttctacagggctgaccagcctcgctcagcaccttctctcagacccaaggactatgaagttgatgctactctgaagtctctcaacaaccagattgagacccttcttactcctgaaggctctagaaagaacccagctcgcacatgccgtgacttgagactcagccacccagagtggagcagcggttactactggattgaccccaaccaaggatgcactatggaagccatcaaagtatactgtgatttccctaccggcgaaacctgtatccgggcccaacctgaaaacatcccagccaagaactggtataggagctccaaggacaagaaacacgtctggctaggagaaactatcaatgctggcagccagtttgaatataatgtagaaggagtgacttccaaggaaatggctacccaacttgccttcatgcgcctgctggccaactatgcctctcagaacatcacctacccctgcaagaacagcattgcatacatggatgaggagactggcaacctgaaaaaggctgtcattctacagggctctaatgatgttgaacttgttgctgagggcaacagcaggttcacttacactgttcttgtagatggctgctctaaaaagacaaatgaatggggaaagacaatcattgaatacaaaacaaataagccatcacgcctgcccttccttgatattgcacctttggacatcggtggtgctgaccaggaattctttgtggacattggcccagtctgtttcaaataaatgaactcaatctaaattaaaaaagaaagaaatttgaaaaaactttctctttgccatttcttcttcttcttttttaactgaaagctgaatccttccatttcttctgcacatctacttgcttaaattgtgggcaaaagagaaaaagaaggattgatcagagcattgtgcaatacagtttcattaactccttcccccgctcccccaaaaatttgaatttttttttcaacactcttacacctgttatggaaaatgtcaacctttgtaagaaaaccaaaataaaaattgaaaaataaaaaccataaacatttgcaccacttgtggcttttaaacttccctctgtggaagatattcaaaagccacaagtggtgcaaatgtttatggtttttgaatatcttccacagagggaagtttaaaacccaaacttccaaaggtttaaactacctcaaaacactttcccatgagtgtgatccacattgttaggggctgacctagacagagatgaactgaggtccttgttttgttttgttcataaaacaaaggtgctaattaatagtatttcagatacttgaagaatgttgatggtgctagaagaatttgagaagaaatactcctgtattgagttgtatcgtgtggggtattttttaaaaaatttgatttagcattcatattttccatcttattcccaattaaaagtatgcagattatttgcccaaagttgtccttttcttcagattcagcatttgttttttgccagtttcattttcatttttttccatggttccccaaaagctttgttttttgggcaagcagaaaaattaaattgtccctattttgtaaatgtgagatgtttaaataaattgtgaaaaaaatgaaataaagcatgtttggttttccaaaagaacatat

SEQ ID NO: 525364 - DNA, 1266 bp, Homo sapiens
  misc_feature (997)..(997): n is a, c, g, or t
ggacgcgtgggcttcaggcagatgtcatccacctccaggatggtcagcatggctgcaaggagaaggatgccagcacccatcactcccccagattcccagacctttcccctgttggtcacagacgccttctgtcatttttccggtctactgtccccagtgtagagggctttgctgtccctgagactgaggcaggttccttttccatggtcagaggtggaggtagatctttcgtctcaaacacatcatgaccatccaacaacacagcctccgtccgcagggaaggagcaaagctgctctgtaactcatctctgagctatcgtccccacattcatcactgaccatgaccgaccagcagcatccattcccaccatcatcacatgacaaaggataatgtgcacagaacaagtatgtttatgtatcataacatgtatgggcacacaccaacatgcagcaagcaagcaaaggtcagcaagggttccacagcattcaaatgcagcctgcacttcagtgcaccagctgtgtgcagccatttgccacatggtcaagggcctcacagcattccgttggcagacgccagccccaggtattccaagcaaaataagactggttcgacaaatagatagtgtagaggggagtgatgagcacacatgaccagcgatacatacgtagattgctagccgataattggaaagagcaatggaccctggttgtactaacttagagggtatagggagacaaccaaacttgattgagggcaactacagactgagtgacaaagtatacaccgttcagcacgcacgtcgcacacgcatggacacccgaccaatgacgtaagcgaccgaccagacatacgagacacggacgcgggcccaggacaaccatcctgggggaccattacccgccacaaggcgcatcacagacaagggcaaccagacacatgctggcggcacccaacaacacccgtatcagggaacacaaagataattagccacacacnacagcaccactggaaaacacaaaaacagcgaaattccatggtcacatcgaacacacacagtaccgcaacaaacggagacccccaccatgagagtagaacagacggcaacaccagtacaacacaccaaacatgcgacgaacatagcacgagcgccaccagcacgaagaaacaacaccacacgatgcgaacaaacaaggacaacaaccaaaggagacaagagcaagcaacaagagcaagacaaccaaacgcggacatcgaacacagcacac

SEQ ID NO: 525365 - DNA, 146 bp, Homo sapiens
tgatgctcctaggtgcaatgttgctaaatggaaaggtcatcatctggagttctcacgtcctctagaatgatgttatacacacaggaaagtaagctcagaagacacagctgctggaaaaacagcatgaggatgacatcacgggatac

SEQ ID NO: 525366 - DNA, 5456 bp, Homo sapiens
  misc_feature (5224)..(5224): n is a, c, g, or t
  misc_feature (5272)..(5272): n is a, c, g, or t
  misc_feature (5274)..(5274): n is a, c, g, or t
  misc_feature (5277)..(5279): n is a, c, g, or t
gtgtcccatagtgtttccaaacttggaaagggcgggggagggcgggaggatgcggagggcggaggtatgcagacaacgagtcagagtttccccttgaaagcctcaaaagtgtccacgtcctcaaaaagaatggaaccaatttaagaagccagccccgtggccacgtcccttcccccattcgggccctcctctgcgcccccgcaggctcctcccagctgtggctgcccgggcccccagccccagccctcccattggtggaggcccttttggaggcaccctagggccagggaaacttttgccgtataaatagggcagatccgggatttgttattttagcaccacggcagcaggaggtttcggctaagttggaggtactggccacgactgcatgcccgcgcccgccatgtgatacctccgccggtgacccagggctctgcgacacaaggagtcgcatgtctaagtgctagacatgctcagctttgtggatacgcggactttgttgctgcttgcagtaaccttatgcctagcaacatgccaatctttacaagaggaaactgtaagaaagggcccagccggagatagaggaccacgtggagaaaggggtccaccaggccccccaggcagagatggtgaagatggtcccacaggccctcctggtccacctggtcctcctggcccccctggtctcggtgggaactttgctgctcagtatgatggaaaaggagttggacttggccctggaccaatgggcttaatgggacctagaggcccacctggtgcagctggagccccaggccctcaaggtttccaaggacctgctggtgagcctggtgaacctggtcaaactggtcctgcaggtgctcgtggtccagctggccctcctggcaaggctggtgaagatggtcaccctggaaaacccggacgacctggtgagagaggagttgttggaccacagggtgctcgtggtttccctggaactcctggacttcctggcttcaaaggcattaggggacacaatggtctggatggattgaagggacagcccggtgctcctggtgtgaagggtgaacctggtgcccctggtgaaaatggaactccaggtcaaacaggagcccgtggtcttcctggtgagagaggacgtgttggtgcccctggtccagctggtgcccgtggaagtgatggaagtgtgggtcccgtaggtcctgctggtcctaatgggtctgctggccctccaggtttcccaggtgcccctggtcccaagggtgaaattggagctgttggtaacgctggtcctactggacccgccggtccccgtggtgaagtgggtcttccaggcctctccggccccgttggacctcctggtaatcctggagcaaacggccttactggtgccaagggtgctgctggccttcccggcgttgctggggctcccggcctccctggaccccgcggtattcctggccctcctggtgctgccggtactactggtgccagaggacttgttggtgagcctggtccagctggctccaaaggagagagcggtaacaagggtgagcccggctccgctggtccccaaggtcctcctggtcccagtggtgaagaaggaaagagaggccctaatggggaagctggatctgccggccctccaggacctcctgggctgagaggtagtcctggttctcgtggtcttcctggagctgatggcagagctggcgtcatgggccctcctggtagtcgtggtgcaagtggccctgctggagtccgaggacctaatggagatgctggtcgccctggggagcctggtctcatgggacccagaggtcttcctggttcccctggaaatatcggccccgctggaaaagaaggtcctgtcggcctccctggcatcgacggcaggcctggcccaattggccccgttggagcaagaggagagcctggcaacattggattccctggacccaaaggccccactggtgaccctggcaaaaacggtgataaaggtcatgctggtcttgctggtgctcggggtgctccaggtcctgatggaaacaatggtgctcagggacctcctggaccacagggtgttcaaggtggaaaaggtgaacagggtcccgctggtcctccaggcttccagggtctgcctggcccctcaggtcccgctggtgaagttggcaaaccaggagaaaggggtctccatggtgagtttggtctccctggtcctgctggtccaagaggggaacgcggtcccccaggtgagagtggtgctgccggtcctactggtcctattggaagccgaggtccttctggacccccagggcctgatggaaacaagggtgaacctggtgtggttggtgctgtgggcactgctggtccatctggtcctagtggactcccaggagagaggggtgctgctggcatacctggaggcaagggagaaaagggtgaacctggtctcagaggtgaaattggtaaccctggcagagatggtgctcgtggtgctcatggtgctgtaggtgcccctggtcctgctggagccacaggtgaccggggcgaagctggggctgctggtcctgctggtcctgctggtcctcggggaagccctggtgaacgtggcgaggtcggtcctgctggccccaacggatttgctggtccggctggtgctgctggtcaaccgggtgctaaaggagaaagaggaggcaaagggcctaagggtgaaaacggtgttgttggtcccacaggccccgttggagctgctggcccagctggtccaaatggtccccccggtcctgctggaagtcgtggtgatggaggcccccctggtatgactggtttccctggtgctgctggacggactggtcccccaggaccctctggtatttctggccctcctggtccccctggtcctgctgggaaagaagggcttcgtggtcctcgtggtgaccaaggtccagttggccgaactggagaagtaggtgcagttggtccccctggcttcgctggtgagaagggtccctctggagaggctggtactgctggacctcctggcactccaggtcctcagggtcttcttggtgctcctggtattctgggtctccctggctcgagaggtgaacgtggtctacctggtgttgctggtgctgtgggtgaacctggtcctcttggcattgccggccctcctggggcccgtggtcctcctggtgctgtgggtagtcctggagtcaacggtgctcctggtgaagctggtcgtgatggcaaccctgggaacgatggtcccccaggtcgcgatggtcaacccggacacaagggagagcgcggttaccctggcaatattggtcccgttggtgctgcaggtgcacctggtcctcatggccccgtgggtcctgctggcaaacatggaaaccgtggtgaaactggtccttctggtcctgttggtcctgctggtgctgttggcccaagaggtcctagtggcccacaaggcattcgtggcgataagggagagcccggtgaaaaggggcccagaggtcttcctggcttcaagggacacaatggattgcaaggtctgcctggtatcgctggtcaccatggtgatcaaggtgctcctggctccgtgggtcctgctggtcctaggggccctgctggtccttctggccctgctggaaaagatggtcgcactggacatcctggtacggttggacctgctggcattcgaggccctcagggtcaccaaggccctgctggcccccctggtccccctggccctcctggacctccaggtgtaagcggtggtggttatgactttggttacgatggagacttctacagggctgaccagcctcgctcagcaccttctctcagacccaaggactatgaagttgatgctactctgaagtctctcaacaaccagattgagacccttcttactcctgaaggctctagaaagaacccagctcgcacatgccgtgacttgagactcagccacccagagtggagcagcggttactactggattgaccccaaccaaggatgcactatggaagccatcaaagtatactgtgatttccctaccggcgaaacctgtatccgggcccaacctgaaaacatcccagccaagaactggtataggagctccaaggacaagaaacacgtctggctaggagaaactatcaatgctggcagccagtttgaatataatgtagaaggagtgacttccaaggaaatggctacccaacttgccttcatgcgcctgctggccaactatgcctctcagaacatcacctacccctgcaagaacagcattgcatacatggatgaggagactggcaacctgaaaaaggctgtcattctacagggctctaatgatgttgaacttgttgctgagggcaacagcaggttcacttacactgttcttgtagatggctgctctaaaaagacaaatgaatggggaaagacaatcattgaatacaaaacaaataagccatcacgcctgcccttccttgatattgcacctttggacatcggtggtgctgaccaggaattctttgtggacattggcccagtctgtttcaaataaatgaactcaatctaaattaaaaaagaaagaaatttgaaaaaactttctctttgccatttcttcttcttcttttttaactgaaagctgaatccttccatttcttctgcacatctacttgcttaaattgtgggcaaaagagaaaaagaaggattgatcagagcattgtgcaatacagtttcattaactccttcccccgctcccccaaaaatttgaatttttttttcaacactcttacacctgttatggaaaatgtcaacctttgtaagaaaaccaaaataaaaattgaaaaataaaaaccataaacatttgcaccacttgtggcttttgaatatcttccacagagggaagtttaaaacccaaacttccaaaggtttaaactacctcaaaacactttcccatgagtgtgatccacattgttaggggctgacctagacagagatgaactgaggtccttgttttgttttgttcataaaacaaaggtgctaattaatagtatttcagatacttgaagaatgttgatggtgctagaagaatttgagaagaaatactcctgtattgagttgtatcgtgtggggtattttttaaaaaatttgatttagcattcatattttccatcttattcccaattaaaagtatgcagacaaaaatctgcanacttttaattgggaataagatggaaaatatgcagattatttgcccaantnttnnnagattcagcatttgttttttgccagtttcattttcatttttttccatggttccccaaaagctttgttttttgggcaagcagaaaaattaaattgtccctattttgtaaatgtgagatgtttaaataaattgtgaaaaaaatgaaataaagcatgtttggttttccaaaagaacatat

SEQ ID NO: 525367 - DNA, 472 bp, Homo sapiens
  misc_feature (5)..(5): n is a, c, g, or t
  misc_feature (26)..(26): n is a, c, g, or t
  misc_feature (32)..(32): n is a, c, g, or t
  misc_feature (44)..(44): n is a, c, g, or t
  misc_feature (59)..(59): n is a, c, g, or t
  misc_feature (165)..(165): n is a, c, g, or t
  misc_feature (420)..(421): n is a, c, g, or t
gcccnggaaggaaaattagtgtagtnaaatcnaagaagcgtttnactggactaatatgnaagagcctgtgatggatcattaaagacaagcatcaagcatttaaaaactgctgctccctatagggatcaaagcttaagtaaaacaaataaatataaggcaaaaatnaagttagcctactttttttgttttatttttggagacacggtcttgctctgtcacctaggctggagtgcagtagcatgaacacggctcactgcagcctcaatctccccaggctcaagtgatcctcccaactcagcctcccaaatagctgagaccacatgtgcacaccaccacacccagctattttttgtatttttagtagagatgaggtttcaccatgttggccaggatggtctcaaactcctgatctcaggtganncgcccacctcggcctcccaaagtgttgggagtacagcgtgagccaccgcgc

SEQ ID NO: 525368 - DNA, 224 bp, Homo sapiens
gctcctactcctcattgtacccattctaatcgcaatggcattctaatgctaccgacggaaaattctagggctatatacaactacgcaaagggccccaacgtgttagggcccctacgggccaatacaacccttcggttgaaggcataaaactttttcaccaaaggggcccttaaaaccggcaaaattacctttaacccttacataacggcccgactttgggtcta

SEQ ID NO: 525369 - DNA, 387 bp, Homo sapiens
tttgttttttttaattacaatataaggggctttacccacctactagtaaacattcaaaaacttgcattttaaaaatgctacgtgctgactgggcacagtggctcacacctgtaatcccagcactttgggagaccaaagcaggcgaattgcctgggcccaggagttcaaagccagcctgggcaacttagggagaccccgtctctataaaaatatacaaaaattagcctggtgtggtggtgcacacctgtagtcccagcttcttgggaggctgaggtgggacgactgcttgagcccaggagttcaaggctgcaggaaaccacgattgtgccactacatgacactgaactccagcctgggtaacagagcaagaccccatctcaaaaaaaa

SEQ ID NO: 525370 - DNA, 319 bp, Homo sapiens
  misc_feature (65)..(65): n is a, c, g, or t
  misc_feature (73)..(73): n is a, c, g, or t
tcagctgctcctgggcctcagctctgcccagggccagccaggttctgctgggaagggaaggtagngggtattnggtatatgcaagcagtgtctgagcctcaggtagtttttcctccctctttgcctatcccctcccctctgcttgagccttggagccttgactgggagcttaaaggagtttcagcttttggcctgagacctccttctgcccttcttggggaggtggggaccagcagataaatcccacccttccttgacgtgtcgctgtactctgaagttcagccagctcagattttataaataataatttaaatccccc

SEQ ID NO: 525371 - DNA, 335 bp, Homo sapiens
tcaattttttttgttgttctgtttcccaacctctatgtcagataaagaatcacccaggccagacacaatggctcatgcttgtaatcccaacactttgggaagccaaggtgggagaattgcttgaggccaggaatctgagcccagcctgggcgacaaggcaatacccctatctctacaaaaaataaaagatagccaggtgtagcgacacacacctgtggtcccagctgctcgggaggctgagcaggaggatggcttgggcccaggagttcaacgctgcagtgagctgtgattgcaccactgcactccagcctgggcaacagagtaagaactgtctc

SEQ ID NO: 525372 - DNA, 236 bp, Homo sapiens
tgttttgtattttgttgttttaattaataggctttatttgtaagaccagttttatgtttccagaaaaattaggcccaaagggattcccatatccctccttttttttgcatatttccccctctaattagcatgttgcattagcagggccctttgttacaactgatgaacttgtattcattattagctccagtgttcatagtttatattaaagttccctctttgtgttgtgcttccta

SEQ ID NO: 525373 - DNA, 173 bp, Homo sapiens
ggtcatctagaggatcccaacacgcatctatagtgtatagttacatacacaagggtctcactatgccactaggctggagttcatgatacatcacagctcaatgcagctcaaactcctgggctcaggctttcttgcaactcaactctaaagtagctggggactacaggtgagca

SEQ ID NO: 525374 - DNA, 795 bp, Homo sapiens
ggaccaagaacccaccaattccggacacactgggattacaggcgtgagccaccgcacccggcttttttttcgggggggggtggggaccggacgtcttgcctctactcgcccaggcctggcacctgcccgctggcgccccactctggcgcttccccctgccacatcctcctgccctcccgcgcagttcccacccagcactgcctccctgcccctcgcgccctccgcgcaactacccctcgggcacctactacgcgctactactgcccaccccccccccctggcgcctcggcactctccccgcctgctcccccccgcctcgcacgcaccccgcgcgcttctccaccccacctgcctctcggccccaccgactctaggcgtcctcacgcaacaccctcccagtgaaaacccctccagccaggcctcccacgaaaccaatcacctacacggcaccacctacacccacaaacacgcctgccacccgcgacaaactcaacacccgagccacctcgaagcgactaaaccaaccgccgccacccccacggcgcccaccacaccgcacaaacaacatacaacgaggttcagagaacaccaaacaaccccccccaggacaccgaacactcacatggcagaccaatgagggaggcggcaaccgcccgtcaaccgcgcacacacgcaccaagccccccccctgaccgcccccaccacaagccgcaacccgcggcccacagcacgaatggacaacacaccaagaccgtcgcacaaacctccgccccacaacacgggacccgcgccaga

SEQ ID NO: 525375 - DNA, 655 bp, Homo sapiens
aagcactggtatcaacgcagagttgccattacggccgggctgggagtcggaggggtgtcttctccctcgcccccttctccatgtcccaggaatcccagggcgtcaggcacaggccggtccccccggaccccaaggttattgcgggggaaacacattagagttgcaagcaaaggaaacagccacatttgacaggacagtccccaagtcacccggcacaaaacggaaaaaaaaaacgattaaggaacgcgcagaaaaacacatacaggcgacagggcacaacggacaccaagaacacacacggcgacgagagaccaagcataacaacagaaacacagagaacagagacaaagagaaagacagacacagaacagggcctgatgaccgaaaccaacgagaagagacacaccactcgagagaaaagaaacgagaagtcatgacgcagaagaaacaacagatggagagaaaaggggcagcggaagacgcggggaccacacacacggatcagaggcagagcacgggtagcacacacgaccgcaaggcaaccacgagcgcgggggacagaacgaagaagacaaagacaacacgtaggaggcccaaggacaacagaaaagggagacgaagagagaacgagacaccaacacataaaaacacaacc

SEQ ID NO: 525376 - DNA, 201 bp, Homo sapiens
tatctctaacattatggaaataacagtatctgcacatatagggtacaaattcctgcgaaattacctgaccccagttcatctctgctgaacatttggaaaccatgcacgtagcgaacccaacatgacttctagctagtgtagaaggcatttggtctatacgagatgagacgagatgcgcgggcagagtagtgatgagagcag

SEQ ID NO: 525377 - DNA, 210 bp, Homo sapiens
ccccccccccccccccgcccagcatcctacttgggttgggggggtaagagggcctgggggccttttttgtgggcccccccccctgtaagtttttttaaaaacatcgccgaaacatttaaatggggggacgttttgaaaaggtacagcttcccgcagccaaaagcaactgttgttttggcaaaacggtcctgatggtccaggttggtttga

SEQ ID NO: 525378 - DNA, 1065 bp, Homo sapiens
gagctacccaaaaagtggccttactacagtcagataatacagagtggctcacagctcctgatgctgaaatgctgtacatgcaggaggtagagagaatggatggctactggcgaagagagctaccctgctaaggatagccaaggaagtgacatatccattaggagcgtgtcttgaaggtatctttggtgaacacacaaggaatggcaaggcatcctgtggtatttaggtggcatgacattgcacaacatgtcccacaaacaagatcctttgatgcattagagctggcaagatacaagacggacgaccagttcaactttcaagactgagagacagtggaaacagcaaaatagcatttggagactctggtgttagcgcgagacaagttttacaggaactaacaccaggtggtaaactggcaaacgtcagactggtcacaggggaacccgaatcaggagagcaaggtccttccgtccaggtgatgtgtttctctggcgtgtaagcccccaggcctatgcggtaagtgctatccgccacaacgcgggaaagaagggcatcatactaaagtggggcacaagtatatcaacggagacaaacaaatagtcagaatctattgtcccacgagaataaaaacaacctctaggatgggaggacaaaaacaagaagacagaggggtacaacaaaaggtggaccacatcgatgcaagaagactctgtgggatagtaaggcagccacccaaatgaggtaggacatccatacgaagggcaggacaggaccctgcccgactaggagaatgagaaagatcggaaaataagcaaggtatgacaaaagagcaggccaaaagaagacggacacaaaaaacaaagtacacttccacagaaggctacccttagccatagggccagaacggcacggaaagggaacgagaagcaaagacgagataaaggaagtacaacacgcgacaagagagtcaaacgcaacgatgcaatgtggcacgggcaaaaaacagaacacccctgacgcggcaacagaagcaacagcagccaccacgggcgaagaaggacaaac

SEQ ID NO: 525379 - DNA, 309 bp, Homo sapiens
aagcatgtgtctcacctcctctgtgatatctttctttgcaccgcagacatcagtctccaacatgtttctgttgggttagtttgattcagcaaaaatctcccagtgacaacatcgcaatagttttttacttctcttaggtggctctgggaatgggagaggggtaggatgtacagggagtagtttgtttatagaaccagccgtattttacatagaagctgtataattaattgtcattatttttgttagcaaagattaaatgtgtcattggaagccatccctttttttacatttcatacgcccaggttagca

SEQ ID NO: 525380 - DNA, 355 bp, Homo sapiens
tacctggcccgcccttacgctatttcactgcactagaatcatcatatcaatacagtgtacacacttcatcactaatgttgatggtaaaggtggaaagaatggccgagtgtggtggctcatgcctgtaaccccaacacagtgggaggccaaggcaggtggatcacttgaggtcaggagtttgagatcagcctggccaacatgacgaaaccttgtctccactaaagaatacaaaattagccaggtgtggtggcacatgcctgtagcctcagcttctcgggtgggtgaagtgggaggatcaactgagcctgggaggttgaggctacagtgagctgcaaccatgccactgcacttctag

SEQ ID NO: 525381 - DNA, 186 bp, Homo sapiens
cacggcgaaaatcacgtcgctcaattccaccagaatcagtaccagcatcagcggtgtggcgtacagcaatccattcttacgcacaaagaaatgctcgttgtcgatggtgtcggtcatgcgcaaatgaccgcgtaccagcgcaccagcgcttgtcgccaatgcctgattcatcttcatgggcgagcg

SEQ ID NO: 525382 - DNA, 477 bp, Homo sapiens
ccatgattgtgaggctttcccagccacgtagaactgtaagtccaataaatctcttacttttgtaaattacccagtctcaggtatgtctttatcagcagtgtaaaagtggactaatacagtaactttataatgatctgtttcatacactgctaaatttcctaatgcagataacactgccttgcatataacaggtgttcaataaataattgtttaaaaatgacttgtttggcacaagttttaaataactgaaacatgtagaagtaggtagatgtcttgtctaactgatggtaattaatttccatctcagcccaatttagtccccaattatcacatcttatatacccagttaggaaattagttcaacctgaaccacccttgtggtttctttggaactcaaagctagcggtattcaccccatttgcctctgtctcttcaaagacttcaaagctctgagtttttcctgttgacagtttcaaa

SEQ ID NO: 525383 - DNA, 306 bp, Homo sapiens
ctctcgaggatccctatcataagtaagaaaataagggaattataatggaaagatgttttaagacagattggacaattacagagttatacttaggccaagcacagtgactcactgcctgtcatcccagcacttcgagaggctgaagcaggcagatcacttgaggtcaggagtttgagaacagcctggccaacatggcaaaaacccatctctactaaaaatacaaaaattagccaggggtggtggcgcacacctgtagtcccagctacttgggaggccgaggcaggagaatcacttgaacccaggagg

SEQ ID NO: 525384 - DNA, 1292 bp, Homo sapiens
cggggagagtgtggtgggggcgcttttgtgtgtgttctgaagccagtggtgtgtgacggtgtgtcgtcggcggcaggtgttgtgtgggggcgcgccgctgccgcaaggggtgtttctcgtgttcgtagagagtgcgctttgagctcgttccctactggtggtccgcgtatttgcctagattgcgtggccatcagtgtgtatgggtgcgagcgagttgtggtgcgtccttgcgtggtctatcgtgccgccgtgggtgtgggttgtcccctgctgtagtcttgctgccttttatagggtaggggccactagtgcgaaggcggcgtcgtaccccaggcggtgggggcgccaccgggggagggagttagataggacgcagcgttgatgggggggggggtagcgacgcggacgtagggaaaggagagaggcgagcgggggcgaaaagataggggggggcgcgggagagggaggattctttgggggggagccagcaaacagaagggggagatggagcgccgtcgagggggagggaggtgggcgacacgagggcgcccgagaagggggaccgatctaataggcggtggctcgccagcctggcgcgcaaccggagagaggagagagagataggggcgggagagaccgcccggctaagtgtgctagcgagcgtgcgcactctggcgagttgagagagacaaccgcgcgaccgatcgtcgagggggagcactctcacgggagggcgctttcctggattttgctgggcgcacgctcgctcctcgaggagtgtcgcctcggaggtctgtgtcttctcgcacgcgggtccagggcacacttctcttgttctgtctattcgcggggagggttgtctcctcgcggggagacgatgcccggcggggagaaacttcacataccgcacggacgcgtgcacacagcacgcctcacacatggggggaggccgctccgacggagactaataatgatggtgacgccgcgggagtcatgcatgttgttgaggtcaccacgccagccacgcgaagatgggagatacccacgcgcagctgtgagagaggggccctcgatggagcaacccacctcccctcggcagtcttcgtttcgtgccccgatgggagtgatgacacgttggcagactgagagaagcagcaagttatctttcctcacccacggttctattggggtgggtggccgcacggcgctgaagtatgtgctatacacacacacacacacacacacacacacacacacacacgatgcatttaataaagatgagttggttttca

SEQ ID NO: 525385 - DNA, 125 bp, Homo sapiens
ttttttggggtaaaacccccctttagaagccctttaaaaaatttgtttttttgccagggaccccccccttttgccttagaaaaaatgattaaaaggaaattaaataaatgttgccttttttttca

SEQ ID NO: 525386 - DNA, 854 bp, Homo sapiens
  misc_feature (104)..(104): n is a, c, g, or t
  misc_feature (563)..(563): n is a, c, g, or t
ggatgcataattaataatgggagctgcaaaggcagatcgtgacaagagatggaccggtcagaagaaacaatggaacggacaacggttgttgaccctcctgtacntgagagacattaagaagactgcagtggtgtcggtgccagcctattcctgctgctttcatgggacagtatcagcatgtgtgagcgtaacagcctacatgtgccttggccctgcttctctgtgaaccatcagcttaaggatataccaaggggtggtgatccaaagctattccaagaaatcagatgaaggcacccatttcagggcatatctggaatctgaagtggctaatatctgaggagtgggtccagacaggtaccaggaattctggctctgtggccatgtgaactgcccgataaacggaactcaggcgcctcttcttagtcgacagattagtgatcctctgcacgtttgccgggtgcactcgtggggtatttacctatgtttggtgccttgtttaaatgggtctgacccctactgatttggggtctccatttcacctctttcaggggtcccgttcaatntaatgaaacggggatcagtgcccacgatagagccattatcccaaggacttggcggacatcacgaactagtgcacacgaggcaatgggtaacaatccaaggccaaaaatccctgggattggagcccgcaaggctgcagtgagaaacgcgccaaaaaatttggaagcgggtcaccttacagcggacacccacgagacaaccggggcgggcacgcacacaagaactgaggtcgagcacgctccacaaccgcggtgaccctactccagacagccggggggggcaaaaccggcccg

SEQ ID NO: 525387 - DNA, 981 bp, Homo sapiens
  misc_feature (716)..(716): n is a, c, g, or t
cggacgtcaaagtatctagctgactcgccaaactccacggaagcacatatgaaatgatctggtgcaggtgctctgagaccctgaggattacatcttttctttatcagcgtggggtggacttgactggcattgtataagactaatctcatcactgaagacatcgtcatatacactgaccagcgtactagagtttgatagtctcaaattccatctagtgtccgtagacgaataggagctgaatctctggcatcataggaaggctatccatacacatgagtttcccctattctcaggctaacatcccatagacacaaagcgtacagccaaaaatacagtttcaacgtatcatattcatcggcgtagatctaacttgcttcgccacaacactttctcggctatccggaatgccccgacgttactcggactaccccgatggatacaccacatgaaacatcctatcatctgtaggctcattcatttctctaacagcagtgatattaataattttcatgatttgagaagccttcgcttcgaagcgaaaagtcctaatagtagaagaaccctccataaacctggagtgactatatggatgccccccacggtacaacattcgaagaagccgtatacataaacatctagaacaagcacaggagggaatccgaaagcccccaagaagctgggtttcaacgccaaacctcaggtgcggccaggacctncaaagaaactagaaaaaaaaaaaagacccgcgagggcttcaacacgggggggggcaaaacgcgggcaccgacggggtccaggtcactggttggtcccggacgcacggttcgggcgcaaggggtcacgcggcgggcccccaaagggggcgataaatccgaaaagtccggtatccgagcagcgggacacaattacacacacatcgacggcacaggaagaagcaggaggcaggacgcaaaggcacaatgcaacaaacgacaccgcgag

SEQ ID NO: 525388 - DNA, 707 bp, Homo sapiens
gaagaaggacctgggctttgggaggtcaaagcgggaggatcacttgagcccaggaatttgagaccagtctggacaacatagtgagaccctgcctctacaaaaaaattaaaaattagccagatgggctgggtgcggtggctcatgcctgtaatcccaacactttgggaggccgaggctggtggatcatggtgaaaccatgtctctacaaaaagcacaaaagttagctgggcatggtggcacatccctgtaatcttagctactcaggagactgaggcaggagaatcgcttgaacctgggaggcagaggtggcagtcagctgagatcacacccctgcattccagcctgggtgacagagtgagactccatcccaaaaaaaaaaaaaaaaaaaaaaaaaaaaatttttgggcggcttgggccctggaaaaacctttttataacccattgtgttgtgggacccgggggccccagtagaggtatacgggtaaccgtgggccaactagctgtctccccttagggaaacccggggccacagtaacaagagggcggtgggaattctttcccagattatataaaaagcccccgcgggggcaccgcgaagcggttctgtgacaaaattccccaaatcggatcacaggaggggacactcaccgggggactcctatcacacgaggggagctccaaggagagacctcgatatcaaattaccc

SEQ ID NO: 525389 - DNA, 87 bp, Homo sapiens
gtcctcttgtgttgaaactggaagtagtggttttttttgtagatgctttttatcaagtagaggaaggtcccttctgtcgtcttcctc

SEQ ID NO: 525390 - DNA, 1078 bp, Homo sapiens
gaaagtgcccaggctacagagacaccctgtaagccacagaaagacaaaggaaccggttgaaacactacttaacgttgtcctagtgaggacttagcagaatttctgtagatccagactacaatggtcctgcttcaaaggaatcgcgtcaaaggaatcaaaggaattgcagcgggctggtccttgcttctgcctatttcttcgggattccatgggaggctggagcccggccgagatcatcctactcaagttcctgaggaattagagaaaggctctttcgtgggcaacatctccaaggacgttgggtctggcgccccgggagctggcggagcagcggagtccgcatagtctccagaggtaggacgcagcttttctctctgaacccgcgcaaatggcagcttggtcaccgcgggcaggatagaccgggaggagctctgcgctcagagcgcgcggtgcgtggagagtctaatatccttgtggaagacaggatgaaacttattgggatagaacatagaagtacgtgatatcagagtgaaaatggtcgcaaaattccaagcatgaaagatctagacgtaaacattaatgaaaatgtcgctgcgggaaatgcgtattcctctcccggaagctattgatccggatgtgggcgtgaactccctgcagagctatcagctcagcccaataagcacttctcctaagagttcagagccgtgccaatggcgtcaagtactcggagctggtactggaagcactcccttaaatcgagaggaagaggccattcaaccaccgtggtcctcaaccggcttccgacggggtgaacccttacgatcttggcactgtccttgtcacgtgtcgaactggcttacggatggcaaattgaacaacgcgcgggtcttcacctttggcagaaataccgcgagtgaatggtcctatgaaaatttgctctgggtgcacccagtttgttgacaagtaaacagcccacgacagggcacaaaggtccccatgtagcaactggacgattaccttccggaaatatccttagaggcaatgtgtgaaatcccagtaacacatattatgggcacta

SEQ ID NO: 525391 - DNA, 688 bp, Homo sapiens
atattagaacaatgtctctcaaatttctcttccatgagcttcctgcctgaccctagagctccctcacctctttggcttaccagctcgccatccttcaaagtttctgagttattctgtggggaattgagctactctcttcctttaggatccaggccatctcagctaggtccagagagcctcactcacctcccgcaactaagcagagcatccctggaggtatgattcgttcagtgcgaagggcgagttcctgagagaattgattgggattagctcataagagggattatactgtctttcccctgcatcatgagcagagagtagactgaagtctactgactttaactgagaattctctgtgaagagtctgggagggacggttgagggtaagtccatctacaagggtgctcagagaggttcggagcgaaggcgattggtgtcgttatgatggcatatctatggcaacagtgagtgtacagtgcaccaggcactactgtttaaagacgttctcaagtgttcattcatgttaatctcttagccagcaatacctgtgagggacttccgtgtgataatctccgaggtacttggtgaggacgctgaagcagagaagtaactaatgtgcccaaggcctttctccttgaggataggcgccttggttcaggaatgccaagtcaatcctctgcgtcaacca

SEQ ID NO: 525392 - DNA, 460 bp, Homo sapiens
gcacgagggaggctggagcaggagaatcgcttgaacccgggaggcagagactgcagtaagccgagacgcgccactgcactccagcctgggtgacagagcgagactccatttaaaaaaaaaaaaaaaaggaaaaggtacaaagttttgtatacacgtttaaaggaggtaggccaggcacggtggctccgcctgtaatcctagcactttgagaggccgaggcaggcggattgcttgagctcgggagttcaggaccagcctgggcaacatggcaaaaccccatctctacaaaaaaatacagaaaattagccaggcgtggtggcgagctcctgtagtgccacctgcttgggggtctgaagtgggaggatcacttgagcttgggaggttgaggctacagtgagccaagattgcgtcactgtgcatcagcctgagtgacagaggaagagtctgtctccaaaaaaaa

SEQ ID NO: 525393 - DNA, 127 bp, Homo sapiens
tgcttgccctggtgaacgtggcgccactcgaccgtgggggcgctccctgacatcgttgtcgcggtgccgccgttgccccctctggggggctcctctcgacgtcgcgctgacggcctgaacgcttggc

SEQ ID NO: 525394 - DNA, 303 bp, Homo sapiens
tacataatactcgataacaatcatgccagggaggtatgatcatactcattcctaattaatattctattttagagacagagtttcactcttgttgcccaggctggagtgcaacggcgtgatctcagctcaccacaacctctgcctctcgagttcaagcaattctcctgcctcagcctcccaagtagctgggattacaggcgtctgccaccacgcccggctaattattataatttttagtagagacagagtttcaacatgttggtcaggctggtctcaaactcctgacctcagatgatccacccg

SEQ ID NO: 525395 - DNA, 388 bp, Homo sapiens
ccttccccccctctctttctttttaagggcccgcggaggaaaccccggcccccttttgttttttaaaacccccttttttttggccccccctttttggggggcccccccccccccctttttttttttttggggggggggttttttccccggggggaattttttcccaggggggccaaagaacccggggtttttgaaagccccctttttttttaaccagggggccccccccctttggggggggggggcctcttttttcccccccccctttttttgggggggaaaattttgggccccctttttttttgggggggttttttttttgggccccctcccccccgggcccggggttttgttttttcccccccctgggaaaaaaaggggggtttta

SEQ ID NO: 525396 - DNA, 914 bp, Homo sapiens
gggaaagggagccagagctgtatacctgggacaggccaggcagcctttagatgccagcagggcctgtgtcctgtggatgtgatgctagtgagtgaatgggagggcgggcctggagctgcgtgagagtgaaaccaagaagcggatggggaagggagagctggccttggtcaggctatagggatgaataggagaacggaatcattcgtgggcctcggctaggtcccagactgattacatgagactgggtgagtccttccctgtccagttctctcatttattacaggctatcccgcacaagactcgtaccccgtgtgccctggactactagcactcgcgcgtttgggcctctagcactttgggcgctggtcagcagtaccccatacctagaagtgctctctctggcagctgggagaggcggaacgaggtgctgagttcgctttccatgacatgcttatgtatacagtaaaggggtcaggtgcttgggctccagagagaccctaggttactgccttactaactactgcatccttcagtaaggggaccagggactgggaagtagagggaaaccatatgggcccaggggaatgggagccttggaggactgctgatagctctgttccggctcatccaagtgtcggaggtagaacgcctggactcaggacccagggccgataggcgttgcgcgaagtgggcaggggcaaagggggcacctcggtcgagctcagagtcattttggacttgccgccccgatctacgccaaccaagctgttaagtgtaacgagagactctccggtgtgccccttgcctcaattcacggaaggccatagccgggcaggcttcgctatgggatattctacgatgggcgttcatgagtaggaactatctgcagattagtccctattgatgagtttcac

SEQ ID NO: 525397 - DNA, 190 bp, Homo sapiens
cccgcttcagcattagatacagttaccctgcatcatgttaaataaaaattgtacatttgcttctgagatctaatttttttctacttctgtctctttattgcatcaactagtttccactatattgaacaaggatagaatatttcctcgtggtttctcagggtggtatccaatgattcgtcattcatgattt

SEQ ID NO: 525398 - DNA, 121 bp, Homo sapiens
cagctcggtccattgtagaatgtgctcagtgactttttaaactgctaaaaatttatgatcaaagaatactgaatcaaaacatcaaagatagaaaatagaggctcagcagcacatcttccaa

SEQ ID NO: 525399 - DNA, 258 bp, Homo sapiens
ttcccctagctggtataagcacaggtatctaggtccatctacatagcctacaggcagtgggtggtgcatagtccatgctaccctattctgggttacctgtggtagctctagaagttgcagcgactagcgatattagaagcctagatttagatacaccagtgtttactgtacatgtaactagtaggatagagttatagctacctagacatagtagacacattacaaccctgatggaccctgatagttttatcacaccaa

SEQ ID NO: 525400 - DNA, 1112 bp, Homo sapiens
tttttttttttaatggggcttgggtgagggaggtaggtggtagtttgtgttataatattttaagttggagtgatgaggaaatagtgataaggagtatgggggtaacttatggtgggccatacggatagtattttagttggggcattccggataggccgagaaaagtgttgtggagaacgaaagttagatttacgcccgattgcaaatatgaatagctgaacagtggatttgcggcgatagagttgtggtctacgggtgtgttagccgtgcaaaacatacggggaaactacaggtgaactgaagccctcctagtgactgggcacaataccagtctccgatatgtgatgaggaaacattaggtggcaagtgtgggatctaacaagcgataaaatagcgtgtgtgtcggagtatagaatacgaaatgtttcaagagtgaatgagttttgtggctaaaactaaacacatgtgcacagatacaggccacaaccttaacggggtgaaaacagacaagtattgcaactccataagggggcctcaaaagacgacgtgcgaggcagaactccatatctcataatgtcgcttcccgagtggagagttggttggggaagattcacgactaaacattcctttgtgaacaccgccagggttggaggactagccggcaagtgaattcctcatcgggttcacccggagcagtgctcgcaaactattgccgaccggtagtttgatcatcacgagtccctaatcaacccataacctgggtaaaccatcactaatggcggattgccttccaaccacggagataaacacccctctagggcacgcaccacattgggacctctccataagactcgacaaacgcaatacccactattgtgttcttccaaaagtgtgggaccccctactgacatccggggaggacacaaccaagcggtctccacaccacgtgggggacagatcatattcacgcgaagggcacagcgcagggcgtacaacaaccactaacagccttatgcgggggggagcgggacaaaaaacacccacattagacgtgagggcaataaaacgtggggcggctacacgccatcccgacgcgaggtgagcacaaaccg

SEQ ID NO: 525401 - DNA, 216 bp, Homo sapiens
  misc_feature (1)..(1): n is a, c, g, or t
nggtccgaaagcatcatggaagtgggtcatggataacaaaagtggtatatgcatacaaggtatattattcagccttagatagaagaacattctgacatacgctacagcgtggaagaatcttgatgacactactccaagtgaaatatccattcacaaaagaataaatactgtatgattacaattatataacctaccaagaatagttcacattcataa

SEQ ID NO: 525402 - DNA, 369 bp, Homo sapiens
gcgaggtgtgcggatcacgggaggtcgggagtcgagagcatattagatattcttgagggagataaatcttagatatgtatataaagatgtagttattgggtaatcttagtagggccaagatctaggtgggtagggtgtgtgggaatggtgaagttgtctgtctttcatatgccacatccataatcaatgacctaggtgtccagtgcctagttattataaagaacaaaaacctaaaaacattcatgaagtaatctatgtgcagagtccttctagacttttaagatcccctctccagtcttctcagtttgtttgtccatataagtgagcagtaatttctttttttttgggcggggtgactctaagcaagca

SEQ ID NO: 525403 - DNA, 400 bp, Homo sapiens
tgctgctccctcttcagagtaattcaaattgaatcgagctctgctgctctggttggttgtagtagtgatcaggaaacagatctcagaaaaggcactgaagagagagaggtggtgttaagttggtgtggctggaatctctgggtaaggaacttaaagaacaaaaatcatctggtaattctttcctagaaggatcacagcccctgggattccaaggcattggatccagtctctaagaaggctgctgtactggtcgaattgtgtccccctcaaattcacatccttcttggaatctcagtctgtgagtttatttggagataaggtctctgcagatgtagttagttaagacaaggtcatgctggatgaaggtagacctaaattcaatatgactggtttccttgta

SEQ ID NO: 525404 - DNA, 170 bp, Homo sapiens
aaataatgaaaaaagaactagttgaaggatatttcacaattatgaagatattagatgatattaaatggagagctttattgcaaatgtgaaactttttatgtggtgtgattggatacacgcattgcatcctgacacggtatctgactccactatcaatgagtcaggtcaat

SEQ ID NO: 525405 - DNA, 535 bp, Homo sapiens
  misc_feature (150)..(150): n is a, c, g, or t
  misc_feature (155)..(155): n is a, c, g, or t
  misc_feature (315)..(315): n is a, c, g, or t
  misc_feature (332)..(332): n is a, c, g, or t
  misc_feature (371)..(372): n is a, c, g, or t
  misc_feature (416)..(416): n is a, c, g, or t
  misc_feature (468)..(468): n is a, c, g, or t
  misc_feature (480)..(480): n is a, c, g, or t
aattcgcggccgcgtcgaccgagaagacgacagaaggggagactcaacaagagctccagcaaagactttcactgtagcttgacttgacctgagattaactagggaatcttgagaataaagatgagctctgaaaattgtttcgtagcaganaacanctctttgcatccggagagtggacaagaaaatgatgccaccagtccccatttctcaacacgtcatgaagggtccttccaagttcctgtcctgtgtgctgtatgaatgtggtctcatcaccatttaatcatagctctcatgcctatcagtgggccaatacantgtccagccaatacacntctcatgccatcagacagccagtttctcagctcgaggannggttggctaccagaggaaagctacttattctactgtgagagganctggacttcagcccaaaatgctgttctgaacaggtgctactctgcgtcatgntctgaaaagacngcttttagatacgcagtagagaggacacgggtggacgggaccggtcaccagggtg

SEQ ID NO: 525406 - DNA, 91 bp, Homo sapiens
taaacattttaaatttaatcataacattatggttggtgggggtgtctatagcaaagttttctatcaatttcccccatcccatccccacgat

SEQ ID NO: 525407 - DNA, 318 bp, Homo sapiens
  misc_feature (100)..(100): n is a, c, g, or t
cttcaacagtgcttggacggaaagccctggcgctcgttccccaccccggggcccggcacgcccatatgccatgcgccatccagtcacctcttcacactgncaagccccgctctggacttgccccaaggagcccccctgtgcctggccagctccatgcgccctgcgggcaaaggtgccgacctgcctgccgccgccagtcctttcctttcccccttttaacgtccgccgccagtgaaaccgaaaacgccggccggtttccacctcgcagtgtttgggccagggcccccgaaggaaaaagctaacacctaccagggggaa

SEQ ID NO: 525408 - DNA, 621 bp, Homo sapiens
tggatattttaaaaatagcagtacttgaaaaatcagaagcaactcgatataatagtatatactgacaaccacgtgctcccaaggtgtggggattacaggtgtgagccaccacacctggcctatatgattttgaattgcataggcacaaagtggtgtataactttttgaaaaatgctacctctattataaaccctgtaattctgtattagttctgtttagtggaaaagctatatatatatatatatatagagagagagagagagagagagagagagcagcagtgtgagagagagagagagagagagaggtgtgtatactatatactatatattgagagagatgatgcattctctctctgctgaggatagagagagtatgctgtagttgacaggcatatctttttatttgtgtgttgatatattgcatcacgagcgggttatatatgggcgttgtatcgagagctacacatatatagcggtgtgtctagcgcagctcgcgtgagtcaagttgattattacacacactgtagcgctaaaaataacataccgtgtgtgtatctcatatataaaatgcgcgtcaccacactttcttatttaaactgactcagagagtgtgttctct

SEQ ID NO: 525409 - DNA, 680 bp, Homo sapiens
ttgggaccggacgccaccagacttgtctccaaaaatcaccagctttaatactccccggtcctgcacacacccacagtctcactgggttccaactctcacttactgcccgccgtgatggccttgaggctgtccttgcccgcgccaggatggtttggcacaatagagccagcccgaagtccgctcaatgctctcgatgggcaccaggaagcgctcctaatgggatggccttcatccacaggtgcgttgggcatcacataagtgcggagctcaattagcccacctgactgcctccaggatcagtcagcttgaagaagctgtgtgcggcacgtgccaccgtggttctatgccgcatgacctggtactttacgtaggatctgccatctagcctctgtcctgtgggcagagccaggcacacgtggcgcagggggcctggatgaacccaaagccacctcttccaggcagccttccctgatctgtcctctaacttctgtcgaactgcaggaccacgccgtcactgtgagactctagtagcactgcctggatcctccttgaggctggaactctctccagggtggttaactctttccctctgtattacttattgcccacacactgggtcaggcagagcggggaacaaataaacgctgctaggcagaactcggagaaacaaacacaaaaac

SEQ ID NO: 525410 - DNA, 337 bp, Homo sapiens
gctcatgccgtggcagagccatgagccacccgttgaggaaggagctgtaggcacagtagggcttcttggctaggagtgttgctgtttcctcctttgcctaccactctggggtggggcactgagtggggaagctggctgtcctatggccgttattccaccgtctgcctgcctgcctgcctgctgacctgggcatggtgcgagacctgtgactaagataggttttaaatgtgtaaattatggtgcatatgggttagtggatgtgaacagggctaggtaagacctttccacagcctgcgctagcctccgtgcctaatgtctattctgatgaaaatatgcc

SEQ ID NO: 525411 - DNA, 325 bp, Homo sapiens
gtcattgagttctcccttcacatatcctatttcaccacttacaatggccaccttccacagagcagcaggacacctacacagcatctgtaaaaaagataacgccttctctacagatctctctccttgtgcggcttcaccagaatcacccttcatagcaaatacccctaaaactcttacagcctatacctgctacccagctccaaagctgcttccacatatttaaaaatttgttacagcagcacctcattcccagcaccgatttctttctcagaccatacaggttggtataacaaaatgctatagactaggccatttataaacaact

SEQ ID NO: 525412 - DNA, 781 bp, Homo sapiens
cagcggtcacgctcaagaacctgacgggtctaaaccagcgtcggtgagagaagggaacccgtgtgctgggaggagcagcagtagatatgaagggctttgacaagatgtgccacccattgaacaggatgttaatgagaacacactgaagaacttggagtcgtatgacagccacaaggctggaaatcacaatgcacttgctgccgttctgacctggaactgggccacttcttcagttcctaatgccaggcctggcctcctgatgccttttgcattgcagctgtgtgtttgaaaactgaggctcacatccaaggtttcaaaccacaaaaccttggcatgactctgccatggtgtcacaggcatcttgatcatgtcttgaccatagaattgctctctaggagctgggcatggtgacctacgtctgtattctcagcactcaggagactgctacagcaagattgagagatcagaggcaggcttgtctttgtagagaattacaagcctgcttgagctacagagtgtgatcctgtcaaaatcccctgagaaatattcttaggggctcacaaccaaggtccggaggcaacacatagtgggagctcttccccagcacagggcagacagtgctcacaaacatttgccactggccatgcctctggatcccctcagaaagctgctcccctaggcaggtgcctttggacagtcgtgctgagcctgggcatcaacagacaccaggcatgcacttcaggatcattagtgtattttgaatctgtcaaaacaaaaaaag

SEQ ID NO: 525413 - DNA, 199 bp, Homo sapiens
atgtctggcttttttcacttaacataatgcttctgaggttcatttatatggttgtatatattattaggtatttcttttattactgaataagtgttccattgtatagatataccacaatgtgtttatctatttatcagttagcctttagggctgcttttgtttggggctattattataataataaagctgctataaataa

SEQ ID NO: 525414 - DNA, 610 bp, Homo sapiens
actttcccagctccattcagagggttttcccctgaacatttttgaaacagaggcagttgttttcagataaaagaaagcggcagaaggtagaaatgggagcagccgactgagggaaccccggcctaaaggcactgcattttgagcacacacatctggtttcctctatctactgagaatgcagaaattctgtgtaatgtccaactgagatcatgctgaactgctgtaaatctaaggtcaacgcaagaagcccaaggacttctcagtactatttagatacaaaatcctgaatctaaccaagaatccactcaggtgcaacgcaaaaccaaacaaaagaaccccaccccccatgcctttaaaagatacactctgaacactgctgaagtgtgtggacagaaacgaggatgaaaccactaatccacaggtgtgctggaaaagccaagaagtcctttgtttttgtcattcagctttgaatccaacttgttaaggtatgagggctgagactgtaaccaaggtgcctttttcaaatctagatgttcacttcaaagaagcttcctcatcctagaaaaatgaggtgctcaggctgggcgtggtggctcatgcctgcagtcct

SEQ ID NO: 525415 - DNA, 487 bp, Homo sapiens
ggggtgcccgagccacccggtccgccgcgtcccgccgccgccgccgcgtccccgccggggccgaccgagcctgatgccgggccggagcggcgtggcgcgtgccgggcctgccatgtgatccacaatgccgctgctgcagtgagctgggccgcccgcctacaacctgtgaggccggccagggcgactacgcgtgcgggccctgcacggctacgggtgccatccccggctgagcaccagcgtgcaagaccgtccttacccactaacctcgtatacaatggataaactaaccaaaacatcccaacatcaacaagcagttcgcacagacacaggaaccagttaaaccgcgatcatcactagacaaccatcgaaagtcgataagtccgataacggatgagaaagctcctgatcatgcacacggtaagaggagtcgtaaaaaaagagctgattcaaagcataatgcagaactctacaatgtcccaaccaaacc

SEQ ID NO: 525416 - DNA, 781 bp, Homo sapiens
  misc_feature (282)..(282): n is a, c, g, or t
atgagctgggtaccggagagaggactgatagcccatggtcagtgataggctggcttagtgcatgtcgccacggctcttactgtgtgcgccgtgccggattgttggtgtgcggctggctgggcggctccttgaacgggggagcattggcggccctgtcgtcctgcgtagagagagagcgtctatagcagctgattgcgtcccggtgcccaggctccgcctcactgtctgcctgagatctgtcggcctgcatgggtgagtgcatgcgtggtggcggatggtccnatgctgcggcatggctcccgtgcgcgctgggtagggcgatgacgatgagaaacggagctgtgggacggaaaaggcgaacccggcgaggcccccaagtccaccgcagaaggggtctgggaggagccgagggtcgaccagatgtgacagatgggtcaccttggcgaaaacccacgcttttccgcccgtcttgcctggtaaaaagtgtgaagtttctcgggcgacccagtccggtggtgttcacgttacttgggctgtattcgtggaacaccaggctggcgtggcaccagaaacctcagtgacgtggtaaaaggtcgggctcgaggagttgtgggttcgctgttgggtacggaaacgcttcgacgattgcacatgtttgcgccgtcgagtgtcttctaaaagcgttcagcctcccttacaagaacttgtcagatggagaacagaccagaactggcggcctgtacgccagagctcactggggagggaaggggtgtcacatgga

SEQ ID NO: 525417 - DNA, 121 bp, Homo sapiens
gttaattgctaggaggtgtaattgcctggaggcgttcaattgccggaggctgttaattgcctggaggtcgttgaattgccggaggcgttaatggccctggatggcgttgaattgccctgga

SEQ ID NO: 525418 - DNA, 328 bp, Homo sapiens
gctcgacggagaacaaagcttcaactttgactttctgccagaggagagtgagcacaatatctggggcacctaagatgtagcatgtttccgaaagtgggaggtttaggactgaggcaagaaaggcttaaaggcagtgactttgctaagcagatgaagcgtagttgttaggagatggcatctgtgggctttctaaagtcatttagttgtttattgttttctcatctaacgcacagttgtctaatcttttggcttccctgggccacactggaagaagaattgtcttggaccaaacataaaatacactaacagtaacaataactgatgagct

SEQ ID NO: 525419 - DNA, 210 bp, Homo sapiens
tcaagcttctaacgatgtacggggacatgcacagcagatttatggctggccctttcccctgtcagttcctttgggaaccttgagctctgagttaagaagaaattctcgtagtttgttccaagttacagccttacttagtgtttgttgagagccggttcagtctccacagcttctgttacttcagtgtctaaatgtttgcttgtcaaaaaa

SEQ ID NO: 525420 - DNA, 592 bp, Homo sapiens
  misc_feature (442)..(442): n is a, c, g, or t
  misc_feature (451)..(451): n is a, c, g, or t
atgatttgtttcattcttctacatgtggcttgccagttttcccagcaccatttattaaatagggtatctcgtcctcaatttatgttttggtgtgctttgttcaagatcagttgactatacatatttggctttacttctaggttctctattctgttcaattggtctgtgtgcctacttttataccagcaccatgctgttttggtagctatcaccttgtagtataatttgttctttttgcttaggattgctttggctattcaggctctttttgggttccatgtgaattttaggattgttttttctaattctatgaaaaatgatgttggtattttgatgggaattacattgaatctgtagattgctttgagcaccatggtcatttgcacaatattgattcttctaatccatgagcatggggtatgttttcatttgtttatatcgnctatgattnttttcagcagtggttttgtagttctccttggagaaatctttcaccttaatgggtaaatatacttctaaggattttaatttatttttggccacttgttgtaaaggggaaaattctgaccctgtaaatccattttggatggga

SEQ ID NO: 525421 - DNA, 109 bp, Homo sapiens
ttgcctgcgagcactttcagaacctgatagaaggcgagctccgagggtggcacggctgcgggcgcgggctagactcgctgcacaagaacagcgtcagccagatctcggt

SEQ ID NO: 525422 - DNA, 240 bp, Homo sapiens
ccccttttggggggggggggggggggttttggacccccctggccccccttggaaaacccccttttttttttaaaatccaaaaaaaaagtggccggggggggggggggccgcctttttttcccccctcttttgggggttggggcggggattttcttttcccttggggggggggggttccgttggcccgggttgccccctttcccttttgcttggggccccaaagggaaaccccccccccca

SEQ ID NO: 525423 - DNA, 390 bp, Homo sapiens
  misc_feature (1)..(1): n is a, c, g, or t
  misc_feature (65)..(65): n is a, c, g, or t
  misc_feature (95)..(95): n is a, c, g, or t
  misc_feature (119)..(119): n is a, c, g, or t
  misc_feature (125)..(125): n is a, c, g, or t
  misc_feature (132)..(132): n is a, c, g, or t
  misc_feature (141)..(141): n is a, c, g, or t
  misc_feature (145)..(145): n is a, c, g, or t
  misc_feature (160)..(160): n is a, c, g, or t
  misc_feature (171)..(171): n is a, c, g, or t
  misc_feature (199)..(199): n is a, c, g, or t
  misc_feature (217)..(217): n is a, c, g, or t
  misc_feature (225)..(225): n is a, c, g, or t
  misc_feature (238)..(238): n is a, c, g, or t
  misc_feature (259)..(259): n is a, c, g, or t
  misc_feature (384)..(384): n is a, c, g, or t
nggggagggtgggaggtggttatgggggataaacagaggtgggggttagcgaaggactggggttngtgtgctccacaggcccagtgccctactgnacaacagctttagctacccttgcngacctnaggtctngccaggaanaganactttccagtgaaanaaaaaacagtngatgctgccccagccccctcctgctctngcacctgtttttactctnttcaccangtgggtgagctangtagctctgagttataaagcnatctgggggacgctgcctcagccctccctccctccccaggaaagcaagaatttacactccattccctttttccggcttccctgccacagtggtgctggattctgacagaactgtgggccagtttnaggtgt

SEQ ID NO: 525424 - DNA, 181 bp, Homo sapiens
cggccacatatcttctggacgcagtcaggatagtgtaaagctacttctggcagctccatccttacttcccgtcactcatcttgtactcctcaatcagcctggcgatccgtgtcatctctgatgctagggaagtcctccccattggatactaagatctatccccactgatcttcagtgtatt

SEQ ID NO: 525425 - DNA, 214 bp, Homo sapiens
aagcgctagtctgtgatgtattgagctgccagaacgaacagctgtaattgcacatgggaatgccgaattcatgaatgggagaaagaagagatgcctaagatgaagtcacaaagacgaaaagatcattaattggccaaatgataatgacttgggaaaatatgatttatgttttaaaaagatcactcactgggggctgtgggggtaccgtcgacgg

SEQ ID NO: 525426 - DNA, 1175 bp, Homo sapiens
tggcaaaggggacaattttaattcaaccacaagtccaaagaaaaaaaaaaaaaaaaaaaaaaaaaaaaaaaaaaaaaaaaaaaaaaaaaaaaaaaaaaaaaaaaagagagggggggcgcgcgcgccacaaagaatactccccgagggggcgcgccccaccacgcgcggcgaccacccacgttttgttgtggaacaaaagaggggggccccttaatagggggagccttatatattatatataaacacacgagaggcgggcgggggcgcgtggttattaacaacacacgcgtgtgaggtgggggaaaaaatcgcggcaacccatggaggatctttgtggaggaaggagcgacacttcttattttgtggggggggcgaacacacctagtgtgggcgcacaaaactccacctacagcgagagatatttataaaggctctctatggagggacacataatattaatatttttcaacggtcattactgggggtggtaaacacaaataccgccccaaaaatgtgcggcgtggcgtgggcgaaaaaacatgttgtgtggcacccagtggatgtttttgtctttattgaagaacaatatttttatatataacacggcgggcccctaaattttttaccatgcggggacgaacaacggagcagacggaaaaagacgaagcgagagaaaagcacaagaaagacaggggcaaagggagggagacggaaagcgacaaaacagaaaagaaagaagaacacgcgacggacagccggaaggcgaagccaaggacagagaaagccagaagggggagggggaggagaaaaagagagagcgcgcagaacgcgaagggaaaagaaaagacgaggaagagagcagagcagagagagaaaaaccgagaaccgacaacaggcggggcgaagaacaggagaaagcacgagaacaaaagaagggaaaggagagaaaacctcaggagcggaccaagcgacacggaagagacagagaacacaccaaggagaccaaacgagagggacgcagcagcaaggcgggcgacacgcagcgcaggagacggggaccaagcgacccagcacgtgcaggaccgacgacaaagcacgcacgaagcgaaaaaaggcagggcaggggaaagtggaacacagaacagaaccagagaagcgacccacagagcacgcac

SEQ ID NO: 525427 - DNA, 427 bp, Homo sapiens
gtgatcggtccagtctgtgcaccgttggccacggacgcgacgaccgtgttgttgaccgtcgggctcgacgaggacgagaccccgccggtgaaattgaccgtcgagtaccagacgttgcgcccggtgatcgtcaggttcgtcaactcggccgcgccgctcgtcggcgtgaacgagattccgtacggcgggtagtaataaaagccggccgagacggcggtgttgccgccgaccgtgacactgatcgaacccgtatcgccgctcggcgccttgaccgccagactcgtcgggctggccgagacgacagtggcataggtcccgccgaactgcaccgtgttgttggccgggttcgcatcgaagccgctgccgacaatcgtgaccgtcgtgttcggtgcgcccttggccggcgagaagttgtcgatcgtcggtc

SEQ ID NO: 525428 - DNA, 361 bp, Homo sapiens
  misc_feature (49)..(49): n is a, c, g, or t
  misc_feature (72)..(72): n is a, c, g, or t
  misc_feature (76)..(76): n is a, c, g, or t
  misc_feature (96)..(96): n is a, c, g, or t
  misc_feature (105)..(107): n is a, c, g, or t
  misc_feature (121)..(121): n is a, c, g, or t
  misc_feature (146)..(146): n is a, c, g, or t
  misc_feature (170)..(170): n is a, c, g, or t
  misc_feature (177)..(177): n is a, c, g, or t
  misc_feature (220)..(220): n is a, c, g, or t
  misc_feature (354)..(354): n is a, c, g, or t
ggatgggtggggggagtggggggacaggcaggggcatgggtgcgaggangggcatgcgcacgagtgcatctntgtncatggccttgtgaatgagcngctccagtnnnttgggctggttgtnctgggagttctgtgtggagcaaccnggggaggtacttgaagggcttttngtattcnttgagcgggtagtgccccagggccaggtagaagaggtaatcgngctgtgcctccttgctccctttgggcagcagctcctggagcagcaggatgcctttacggatgtgatcattgtacttgctccgtaccagggaccaggggtattcaaactgcgtgctcttggacaccgagcctgcngcgttgt

SEQ ID NO: 525429 - DNA, 375 bp, Homo sapiens
  misc_feature (222)..(222): n is a, c, g, or t
acggattagttgctggatagtacgggaatgaacaatgatccgttttctgacatcatcaagctcacgcaggcccagtctttggttactggcggttttaccgcgtggcggtcattgtggcgctgcgttttccgtgccccgtgaaaaaatcaagtttttcgccatacgtaacaaggcaggttgttcgggtcacttttgcacaggggagccaagcccccagtgcgngttttctacgcggtgatgttggggctgcttgagcgccaagcgatcttttattcctcgccagccaatccaggatgttgacgccggtcgaacgccatgagcgtgtatttctgggtgccgcgtaaaagtcgcatcaggagcgagttccacaatagg

SEQ ID NO: 525430 - DNA, 753 bp, Homo sapiens
ttctctggagcagcgtactttatctccgtccgcttctctcctagctaagtgcgtgacccaccgatggaagattcgatggacatggacatgaagccccctgtagaagccaccaaactatgttaatcagggtgtgaactaaaggccgacacagattatcacttaatggtggataatgatgaaaatgagcaccagtgatcttaaagaacggtcagataggggctggatgcaaaggatgagttgctcattgttgaagcagaggcaatgaattatgaaggcagtacaattaagaagtatgactggaataactttgaaaatgtcttgtacagaccaaccggtttctccttgggggctttgagataagaccaccgagtggtcttacaggttgaagatgtggttgcagtggccagtgactcctattagtggacagtacgttagtagctgtggaggaagatgctgtagtcaagacagtatgacggagcgaggaggatgtcgaaactctcaacatatatcttgcagagaagccggtctgtccctggcaaggtggtagcaaggttccacgcacaccaacgagtaaaacttgctggctgatgacagatgatgacgattcatgactgaccgaggatgatccttgacagattgattgactgatgaccgatcgtggtcgctgagggaagcttggatccaggaagcgcccgatggagacatctagacgagattcccgacccacttgccgggagccattcgaggcccaga

SEQ ID NO: 525431 - DNA, 362 bp, Homo sapiens
cttagcagggcgctaagctttcacgtgtgggatagggcctttgagagacagagcacatagcttagccatagagaaaagcttttcctcttcccagtgaaatggtctatcccaactgcagagttgtcagaaaaagcaattcttcatgtgcctgtagtcccagctactcaggagggtgaggcaagaggattgcttaaggccagatgtacagacgttcaagaccagcttgggtgacctagcgagactcgatctccaagagaagcaattcttcctcttcctgttttctgtaaatcattgtggtggctaactaattggtttatcatgtgactgttgatttcagtatagagaaaaagtttgggtgatta

SEQ ID NO: 525432 - DNA, 345 bp, Homo sapiens
caaaaccccttttttttttttcccccccattttgggagccccccccttttttaaggcctttaaatttaaaccccggggccgggggggggccgggggaaaattccccttttccgggcccccggggcccccccagaaaaggggcccgggttgggggggggggcccctttttcaaaaggggggattttttttttttttgccccccctttcgccctttttttttcgggggttttaggtcccttggggggggggggtgggcccttttcttgggggttttttccccccttttttttttggcccggggggggttttttcttttttaatttggggggggttttttttttttca

SEQ ID NO: 525433 - DNA, 1363 bp, Homo sapiens
tcttttgtgtgttgatagtgggtgtgagaggtggggaggtgttgtggtggtgtcgatcaggtgtggagatgtgatgattgatggttctttggtgtgggggtgatgaggatggatgctgtgagttttggaggggagaaggggtggggtgatgtttggttggacgatcatctcgagactcttggagttggtggtgtgattagcgtagtgctgggtgtgggtggttggagagtgcttgatgtgtgttgtgagtatgagagagagaggagtgtggttgatttattgttgttgttgggtgaagtgtggagagagagagggggttagggtggagtggggggtgtgggggagtggatttggtgggggggagagtgttgtgtggtgtggaggagttggttgtattttcatgagcgtgtgatgggaatggagtgtggttgagagggaggggagaggggtgttgtcttgggtggtggatatgatgtggagaagggggatgggaggaagtgtgtgtgttggagagaggggttgtgaggtgcatcttttttgatgtgtggtgttgtttgagaggtgaggagggttaggatgtttggattggtttaggtgtatgatgtcgtgagtggtggtggtttttgtttcttttggtttttcgggtggttgtgggtggatgcgagatgttgcagtggttttctgtgtgtggagcatgggggattgtgtgcgatgtttgtgggatagagtgatttttgagcttttgtttgttggtttttggtgatggtgtgtgttgcggattgttggatttgtgtttgtgtgatgtgtgtgcgcagtggtttccttgagtgttcttgtgttttgtagtgttggttgtgggacagcgcgcgctcggggaaacgcacacgcgcccacacgccgcgcgctcgcgcgcagtgtgtctggatttcttggtcttcgtctctctctcgctcgagtcagtgtgagactcatcgcgcccctccctctctccttctgtgtttttgtttgtgtgtggagagcatggtacttttttttttgtatttcttgactttgcatctcttctccctctctctgttcgtgtagtagacgacgcgcgcccgcgccgcgccgcacacccagagcccatgttctctcttgtgttctgtagtaagatgagagacacagtacactcattctctttcgcgttgtgtgaggatgcagtgggtggtgggggtgggggcgggttgtgtgcctcttccttctttcttttgctgttgtggtttcccccggtgggggtgtggcttctcactatcttatctatagatattgattatataatatatatagaataaaaagaaataaaaatataattataaagaatata

SEQ ID NO: 525434 - DNA, 146 bp, Homo sapiens
actctgtgtgccactcttgctacttctcactcatccccaacttccactgtgtagtggaggtcaattctcactctctgccatgggctacagaccctccctgctctggtcccatctaagtcctgtgccccgacgcacgacgggaactg

SEQ ID NO: 525435 - DNA, 160 bp, Homo sapiens
caggacctttgatcgtctgtatctcctctctggattagcgggtgccatcacggttaacaatagttatggtaattggtctatcaaaggcattgggcaggtctgtgactgatgtacaatcttcttcaggtggagctgaagcattgaagcaatatgtgtcata

SEQ ID NO: 525436 - DNA, 124 bp, Homo sapiens
taaaatcgagcgaggaacgatggcaagtggatgctggtccacaggactgaggtgatcaagtacacactggaccctgtgtggaagccattcacagtgcccttggtgtccctgtgtgatggggaca

SEQ ID NO: 525437 - DNA, 540 bp, Homo sapiens
  misc_feature (8)..(8): n is a, c, g, or t
  misc_feature (238)..(238): n is a, c, g, or t
  misc_feature (245)..(245): n is a, c, g, or t
ctcaaccncaagtcctctgcttggggagttctccaggagctccggaccctgagtcaatgttgggaggaagggtacctggtgtccccagtcaagcccatgaagcccatgcggcctgctacatggggtggggtcgtagggaggctgtttgcctccacgtctaggaaggcctgtgagaggagcagtcaggacttccggacaacttagctgggccctacttgggcccaagtttcaaaagggnaaaaaanaatttaaaggtggtttcccctatcaaggctgtgactagatcaggcagggatccattccctgtcccctgcccactaccttcaggccatttagagttgtaaatttacaaagatccacggtgggctccagctgccaagccacccaagggagtctgggccctaggcctagccccatccctccccatgaggggccaagacactgcctaaggtgtgggagggactggctgagattgcagcccatggtaggagctggaccaactgtatatagttttcaataaactttttccttttctgttca

SEQ ID NO: 525438 - DNA, 441 bp, Homo sapiens
catgtacgagctccagctgactatgcatcttcaagactcagctacacttcatgttgtccacagaacgccttactaactccctgcaaagggacatatataataaatcaccacttctttaagatcctaggaacaggatgtgtatcctagttcaaaaattttcagattttgaaaaggtaatagcgtgtatttaccaaatactacctagcactatcctaggggtgtctggggcaagatgctataatcaaacacgtaaacatttctcccacaaaaaacaaaaatatgagcacttttaagatgaaattaagacctacaaacagttttacagcactgtatgtcagattttgctgccaaatgaattcacattagttcatattttactgctacataaactaccaaaaaatcctttgcatatctgaacctgtaggatttcagagtggcaat

SEQ ID NO: 525439 - DNA, 227 bp, Homo sapiens
gttttaaaatttggggtttccccgggggtggggttgtttttttagttttggcccttggtccaacctttttggaacttttgatttggttttggctggactagggggttttttttgcggtttccccctttgggggggatttttttgatttttagggtttgggactgtttttaatttttttttggtttggggttggccaagggggtccccttggcctttgtttcccccca

SEQ ID NO: 525440 - DNA, 370 bp, Homo sapiens
  misc_feature (35)..(35): n is a, c, g, or t
gggttcagaggtatttctgtatgttttgacataanataagtgccatggagattacatcaaaatggcatgccaaatgaggcctggtgccttttggggtatgaatcgtagaaccttgcttttgcaagaaagggaacttggccaggtgcggtggctcacgcctataatcccagcactttgggaggccgaagcaggtggatcacttgaggccaggagttcgagaccagcctggccaacatggtgaaacgccatctctaccaaaaaatacaaaaaaattatctgggcatggtgatgtgtgcctgtaatcccacctacttgggaggctaaggtaggagaattagcctgggcaacagagcaagactctgtctcaaaa

SEQ ID NO: 525441 - DNA, 230 bp, Homo sapiens
caacaactcctttccctcctaggcatggttagcacggtcagaattcttacacaagagccaggacgacaccctgtagcctttctgtccaaacaacttgaccttactgttttagcctggccctcatgtctgtgtgcagcgactgccgctgctttaatacttttagagaccgtggaaagagagggagagggagagggagagcgagtaaattctttaaaatgatcaaagtgttg

SEQ ID NO: 525442 - DNA, 224 bp, Homo sapiens
ccaggtagacctaacagtggtggtcgagccaaacgctattcatcccagcggctaaagacctgtgccagagacccccgacccctccgatgcgcatatcagtatcatgagagggacgttactatcgatccacgttgagttttttcgttactgttcggggtacttcttcattggcaagggtgaacgtgactgtgtagataccagtgctcgctggctccctgaagttt

SEQ ID NO: 525443 - DNA, 292 bp, Homo sapiens
ttttttttttttggtttaaaaattcccttttttggggtaacccccaggtaaagggggggggggcttttcccaacttccccccccttggggggccaaatcggggggggggggggggggctaaaggaaggccctttttttttttaaaaagggggccgccccggggtttttttgcctttttccaatattccggggaaccaaaggggttttttccttcctttaaaaaaaacccccccccttttttaaattttttttggggaaaaacccgcccctaaaaagcggggttttgggccca

SEQ ID NO: 525444 - DNA, 1294 bp, Homo sapiens
gggaacccggcgctacgtaccccaccccggccggccgcccatagccagccctaccgtacacctactatacaccgcaccctacggactagccccaaggcccccgccgccgctaccagcgccgcgcagccaccgccgccgccgccgcctactacctaaagtacgccgccatagacgaccgcgtacacctacgcaggtagcgccagaactaaccaccagtgactccatcaggcctgccctacaaccgcctagataccacctaggagctactaacgcctacctaacgtattcaccctagtaccatagtactatcactaactatctgcacccgcgcatccactgtagcgctttcgcacacatactttctggccccaacctacctatatcttatcacgctctctacttcactgcattccacatgcggcacccactggccttgcagacacatctgcactagacagtctatgtttcgcaaagcccacatcgcagggcagcgccctcgaccctcctattcccttatccatgcccataacctccaccttaataccctccactcactcttgtgctgaccctcgcccccttgcgcgccgccgtctgctctccctttcctcctttccccctcctgcgacccgctgcctcctcccatactcccccatttctgcacccccacctcctccttcgcttgccactttccacctccccccccttccccttgcctcaccccccttgtctcgtccacacacccctttctcctcctacttctcctctatctccctctttgcaccccccccccaagcctctgctctcctcaccccatccccccctcttcacacccactctcctccactatctaactcccatttactctcttctacccctcctatctctcttctcctctctccccccctctcttcccccctctaacacttcgccacccctcgcaccccccctatctctccactctcccatcccccttatactccccccccccctccactctcccccaatcccatccccctccgatcccccttcctgtccccctcttgcccatctcttcaacccatctcctcccccctcctggcaccttaattccccacgtccccccccatgtctcccttccacccacctctgtaccttctcctttccacccaccccccttaccccctccctttccacactcctccacaccttttatccccccccccctattatcccctctaccctcctcacttacccattttcctctctattaccacacccctcactccctcctctctccccctttcccccctaactt

SEQ ID NO: 525445 - DNA, 890 bp, Homo sapiens
gactaatatattccaccctaaacctgacttcgctaattccccccagtcctgaccaccctcgatgaagcctaacgaaagaaactcataggcccccagtatatgtaacacatccatgagtcggatccaccctttggttatcacgtctccttccccataagaataattcatagtgcctacgaccaggaagtaatcatctcgaacggacactgagaccagcaacccgaaacacatccccaatcgtacctccctgagagtctttcaaagcctaagactgaacttcctaccagtagactgagttcactttcgccatgctgcgcgagtgggtggccgtctagcgagtggctgcgccattccataggaaacttcgtacaccctagttgggagtgagtactgatacaactaccgagaccgcggaagatcattgaactcaagtacttcaagatatcgtacttcatctagccctagattagcagtactacactctatagttacgcgctgaggcaagcctattgccaggctgatatgcaatcgaggcgtagaggagggcgtagcgaaagatatccttcttggctcactcaggttgatgatacgcccgagcagatgccaaacaggcaggagccaattcaagcgatcctatataagcgatatcgggatcatcggtttcatcctcgcctgagcgtgatataatgctacattgcaattcatgagacgcgaccaataaatagtcgcttctgaagacgctaatgcaagcctctaccccacttaatatgctcctcctaagcggcagcaggcaaaatcagcccagttagttgtttgcaacccctgggatgcctttagccgtagaaaagacgcaaccggttcagggctagattcaatcaaggcctattatg

SEQ ID NO: 525446 - DNA, 306 bp, Homo sapiens
cagaacaactgaagcaggataagatgaactggaaggacactgaagcagcataaagaataccaaggacttgcaggaagtaataggagaagaggtgagtctccctgcaattatgactagggaatgtagatagagttcaactgagaactctttcccaagtaggaattccaaacgggcaaagagttgaacaactatactgagtcctacacactatcaaggtaaaatatagtgcagagaaatatatatataaacctaggactaccagatacccctcaaggatctaccgaataccccatacaggatctccga

SEQ ID NO: 525447 - DNA, 679 bp, Homo sapiens
tatcgaagcagaagacggaggtggtgtggcggggtccccacccaggtggttgtgtacggccttcagcagtctacatcctggtggtggtgacccagtttgggaagatgggcacctggtctcctggagcccagcagagtggccagtgacgtcagcaagcctgtgctcaccaacaaaagtccttctggggcaggatgagcctctcatccatgtctttgcaaagaacctggtagcgtttgtgtctcaaggaacgcgggaaacagacgcagtcctcctcgccgtggccgtgaaggacaaaagcatggaggggctgaaggcgcctgagggaaggtgatccgggtgtgccaggtgtaaggtgaaccctggaggcatccagccccgcgctgctcagcaggactacgtgaacacccagattcacccaatcaggcgactcaagtctctacctccctccccgcatggaggcaggaactatggcactagccttggagccaggagaaaagattcgtgtctcaggcagactcttactctggttagtaagatcatcgtgcgcatagacggtgaggatggaacacgtcaccagaggagtcgtgacatggttctcaccagcacgtgaatcgttgctgctgtgtgagaattggaggaatgagtcaccaggcgtggaatcacggccccccggtgtgaa

SEQ ID NO: 525448 - DNA, 141 bp, Homo sapiens
cgggagctgcctcagcttactttaactcttcagtctctctgaagcttcagctgtatttgtctttctgtgtttccagttctgaattatgcttctgaagcttgccaatttctcttccacagcatccctgtatctcttcccctt

SEQ ID NO: 525449 - DNA, 222 bp, Homo sapiens
  misc_feature (79)..(79): n is a, c, g, or t
aggatagtctgagcagcggtgtccgacactgcactgactcagggcacaggtgaaaacttccttgccaacgagtcccacnacatcaggtgcctgatctgccactctctgcattgacagcttgcacctgctcccgctacagcacagtacaccatacctcttcttctgtatcctggttcctctcacccacagagtgagaggtggtggacccattggctgtcctcg

SEQ ID NO: 525450 - DNA, 443 bp, Homo sapiens
  misc_feature (13)..(13): n is a, c, g, or t
  misc_feature (19)..(19): n is a, c, g, or t
  misc_feature (61)..(61): n is a, c, g, or t
  misc_feature (73)..(73): n is a, c, g, or t
  misc_feature (131)..(131): n is a, c, g, or t
  misc_feature (432)..(432): n is a, c, g, or t
  misc_feature (440)..(440): n is a, c, g, or t
accgcaggctgtntgagcnccacatactgctcttgctgaccacgggcatcattgataaccnccgacataacgncccaattttaccgccgccttcgaagatccaacattctgtaacggtgttatcgacaaantgacgatcgtggctaaccagcaataccgtgccctgatagctgtcgatcagttcttccagcagttccagcgtttcgacatcaagatcgttggtcggttcgtcaagaatcaataagttgcttggtttgaggaacaaacgcgccagcagcaagcggttccgctcaccgccagaaagcgcacgtaccggcgtcatcgcccgtttcggatggaacagaaagtcctgcaaatagcccaatacgtggcgtggcttgccgttaaccatcacctcttgcttacttcggcaaggttatccatcaccgtttnatcggggncgc

SEQ ID NO: 525451 - DNA, 111 bp, Homo sapiens
tctagaggatccctggttgccagtattataacccaagctgatgaggcaggctttgaactcctcgtggacccagtgtgcctggagtgatcccggtcaaagtggttgaaggag

SEQ ID NO: 525452 - DNA, 141 bp, Homo sapiens
cccccctgaaagggtcccttccccagtcctgccaaaaaaccccggggggggggagggggcagcatgcagggtcccccctccctttttggggttgatgaaaaggtgaagtgaccaaatgaaaaaaagctgcattttcagtga

SEQ ID NO: 525453 - DNA, 1419 bp, Homo sapiens
gggcatgctctagaactgatgctggaggattcttgcctaccgatacagagccttcgacgtctgtcctgtgggccgccattacacactaccacctccatcctgcttggaaatggccttcgctcccggcctatgactggtcccagcgggcacgtacagaccaccctagaagcccctggagctcccactttatacgggcacccgtcccaatccttgtgagctctatcccacaccaatactaactccgcacacatcaacgagcgactccccaaaggattggagtatgtgctgcgctcccctaacacacacatttaacgctgtcccactcccgccctaccaatcgcgcatgatccgaacacccgggaccctcgatccggaaccacggcaaccgggcgcccacaacccaatggacaggaaggtggcaattcccgtctgcccaggacccacacacatcacgcgccccgcagtcactttgacaccacacccgccagctcctgcacccactcaggagtgcacactttactcttccctcccccaacccttaccctataccccatcccccttctcgactgaaccacaaacctaccactaactacacacagacccgcatacgtctcacactgataacatctcacacttactccaccctcgactcctccaccacaatcactccataccaaaaataacactgcaccacaacgacaacccatcaaaccacagctcacattaaccaccaacaaataacaaaccctcattaccaacctcccccacatcacgcgcaacgacagaataaagacacaccacctgccaacacccagaaaacagcgaaagaaaatcacacacaacccacaccacgactcaaccgagcccacacatgcccggaccaaccgacaacacgtaacaaagagggaaacaacctctcaccaacacacagtagactagagacacacaacgaacgacatagacacagagaaacacatcggagggaccagagacacgaccgacagcagggcacgagagaccacaaacgacacggaacacaacgacatcggatacgagaccgagaacaggatatcaaagggcaagaccaacaacgggcaaagcgcgaacaacgacgggtacagccacagatcgagcgaagcgcaccgacctgagcaaaacaaacagccgagcggcacaaagaaagaactcacatgcatccacagaacattgacactcaaataaacataaaccccatatcactccctcataatacctcatcaccactcaaccgacaatatcaaccccatctacatccctcctccctcaaactacatcacaggtcataaacactcctaacaataccatgcaccatcactaccctaacacatcctactaaaattcaccactcccatatcactacacacacaactctaaccaaca

SEQ ID NO: 525454 - DNA, 724 bp, Homo sapiens
  misc_feature (337)..(337): n is a, c, g, or t
  misc_feature (378)..(378): n is a, c, g, or t
gcatgtaacatgaggcttctgctgcttctcctaatggtcggcgtctgcgagtggtccgcgagccgaggcctcggtccaagtctgggcggggtgcccagcaagagattaaatgatgcaggtacgccaacggggcctggtgcgtctggaaagattcctgggaatttggtgattgccttgaagggtcttagtagagctgggatgttccgaaggaagctacattgcggggattatttagcccagtcggtataacccagtagcatcccgcaattgcaagtgcaggagagacttactctccacttcaaccactaagtgatattagaatcactgtgagcatccnttttccctgctcagtatctttcacaacctagcatatctaantgagggcgtgtaaactagagtctgcttgggccagaggtagtcccgtgttcgtcgtatgtcgtatggagtgcaaatgcacaagtgcatccctaggccatcatgggccagatggggggaccattgggaacaattgaagcggctgtataggtgcaattgctatagaatttgggttttttatcatatcctattgacgtcaaacaattggagttcgaggagaccaggagtgtaattggcttcaaaccagggcttgccacttagtgaggaatacatcttatttgaaccttggagttgtacccatggtgattggtcggtaaatgcttggacaatcgttggtcacgcgttctca

SEQ ID NO: 525455 - DNA, 332 bp, Homo sapiens
ctgaagcctggtaagtacaatgctggcgtgctcgtggatccaattctattccggatgatccggcaaaagaagcttccttgatgagccccagagcaagtgagcagctgcccctgcccctgcctctccaggtccaccatgcgacatatcgacaagtgggtcctaagtatgtgtaaaggtctccagggccactagataggagcctagtgcattacgtgtcaacgtggagcttcacaagctgggagtgagccatgcgagacccgacaaacgcaacaccattatcaaggtatgtcaagcactcagcaatagaggtctctccaaggagtgctacacgg

SEQ ID NO: 525456 - DNA, 1432 bp, Homo sapiens
ccaggcggcgcgtggtctacgccgagctgacagagacgctcaggctgtgttctcacggatgaccgagctggcgagacagcagcaccagcggcgcgcagagaccccacgacatcaacgctccctcttgcgcgcaacgctgcgcagcaccgcactgactgctgcacgactcacatgacactcctcccctgccagcgacttacactctgcacgctgacaggacgacagctatgccacagctacctgtcctccacagctgcacgggccggctactgccgcccacaacgccttccgcccacagcctcagctgctcccacttgctggcacgcgccctcacctacacatcccactcactgcactgccaacaggcccgccaaccacaacgggccacacgcacaggcctccactgaccctgctggccgccatccgctccaaagccacatgccctttccgcaccactcacctaccaccactgcgctccacacggccccagcacacaccctcctgcccagccccccctgccctgacacccgacccaccccatccacaccagctgggcgcccgcgcccccccgcgccccgggacacctcccgccaatcgcccacctcgcgccccgccgacccggcccaccctgccctcaacgcaccgcaccagcgcacctcgctcgcgccctgcctcctgcccgccccccttcccggccccgcctgcttgccccccccagtcggccccacccctggcccctatgcctcgccgcccacaccgccgccgccgtccgcccccacgcccctcgccccccacccggcgccacccactctccacgaaccccccattgcgtcggcacccccgccccatgcgccccgcaacaccaaacgcccctcgccccccaccgcggcccctgcccccaccgccgccgcctcccctcctcgcacccgcctcccactaccaggaccacagccacacagcgacaacgccaccccagccgcacgccacgcgcaccccgaccacacgcgcacccacagacgttcaaacccacgcccatcgcactatcacccacacacaccacgctcgcccccgcacacccaaccgcccgccgactcacgacgcccactctccggagcagcgacagccaccccgaccccgcacccacaccccaccaccccccctcccccaccccccccccacacccccccccacccacccccccccccaccccacccaccacccaccacccacccccccccctcacaacccaccacccaccccggcgccccgccgcccccgcccccccccaccccccacccccccgcccccgccgcaccccccccccgcgccccacccccccgccccccccccccccccccccgcccccccccccccgcacccccaccccccacccccccccccacccccccccccacccccgccccccgcctcc

SEQ ID NO: 525457 - DNA, 1078 bp, Homo sapiens
aagtaaaaccccatagaagaaacatgggaatacagaatatattctggggtcagcttcttaaagttatactactgtttactgctttctccgtctcttttgtattcccttttttttttttccttggagaacggagtctggctctgtcacccagactagagtgcaggggcacggtctcaccttcacgtgcaaccttccacctcctaggttcaagcaattctccgtgcctcagcctccgtgagtagctgggactacaggcattgcaccaccacacccggctaattttggggttttatagtagccagtgggtgtttcaccagtgtttggccaggctggtctcaaactccgtgacctcagggtgatccaccgtgcctcggcctcccaaaggtgctgggattacaggccttgagccaccggtgccgtggccccttaatcgtgcgtgaagaagagaagacagtagaagaaaattcaaccttgagttaaaagcagcaggtggtttgggagtttactaagctcagggtcttcattgagagaccgtcgggaaatacattaagggatggggggggtagataatccattcagccagacaaacgggggccagctcgttaaaataagaaagctgagactgaggaggtgaacctgcacttaccacgagaacgtgcatcctctaatccccagtgcttgtatacttcaaggtgcatcaggctaggaccgggggttacgctgttggacctgcggaaccttcatcactggattgaaaatgtacataataccgggccaagggggggacgcactcaagtatagggggacaacaggcacgggcgcgagacgggtaccccaaggggcaggatggcgttcccaactaacacctgtgacaaggcgccaagaggggtaacggggagaccactggccccagagagaagccgtatgtgcccatcggggactgagcaacagatcctagagggccaccacaacacgggggcgatacggacagaacattcaaaaaggtgcgcaccacgctgatcaagccacgtgagcgacacagcaggcgtcgctaccggtaccccaacacagatgggca

SEQ ID NO: 525458 - DNA, 261 bp, Homo sapiens
gtacccaagaaccagatgttcatgtcaccccgaggtaactcagccctgcccgtcaatagctacacaccagcaccagcccagcagaagagcaagcagaagtcatgtggtccacagccatgcccgttgaggagccggccaccaggatgctgaatccccgtatcccagtctctgtagtatgagtcccagttttgccttgcaagtaagggcatgcgtgtactccccccagaggagagaagtgtgcatagtgaagccttttccttt

SEQ ID NO: 525459 - DNA, 230 bp, Homo sapiens
ctactccagacaagttgaccgggaagacacctgagagaagcaacacaggaaaagctctctgccctcttcttatctatctaaaagaaagacataaatttgccttttcgaagatgtccctcattctcccccacaccagaaagatgacaccaatgtgtctgcataaacaaaccctactaactcttatcttctattagtttccttatatatttacttcggtcaacttgtctggg

SEQ ID NO: 525460 - DNA, 199 bp, Homo sapiens
agttgactctgaggatccccaatccattccagtgtattttgtgaggctggagcaggagggatctcagaggaaactcggtagtgtagatatgggaggacttgaaaggttcctgctagcttgggctggggatggagggaacatggaagatgggtcttggtttagaggaagctctttatcctggtacgctggaatggcatgg

SEQ ID NO: 525461 - DNA, 281 bp, Homo sapiens
gcagtcgtgagcactgtgtctgacctctgaactgttttagattaatggctcttaactttaaaaatgacaatcaaagcagttgaaatgagcctcgaggaagtgggtaaaggggctgccactctgcttaattttctccacactggggtctcatttcctccttgccagagggcttggagagtgagacttccaaagcagctccagtttccacaggacccactaggtgggatacctgtgagtgggaagggaggtttcaagcccttcccgagagacaaagggaaaca

SEQ ID NO: 525462 - DNA, 254 bp, Homo sapiens
  misc_feature (14)..(14): n is a, c, g, or t
  misc_feature (16)..(17): n is a, c, g, or t
  misc_feature (24)..(24): n is a, c, g, or t
  misc_feature (26)..(26): n is a, c, g, or t
  misc_feature (118)..(118): n is a, c, g, or t
cgggtctcttccgngnngcagggngntggaggtaggtggaagcagctgtggtgtggtgcaggggggtccatgcgcactttatcccctgagcgcagcagtgcctgatgccacatccgcnggaggggcaggcgagtgaagatgtggcccaaatccgggaccacaacagtgtccttctcatacctaaaagggcggggcacccctccagcacacggggcatagagatggtagatgtggaggccagagtggcccacgag

SEQ ID NO: 525463 - DNA, 621 bp, Homo sapiens
  misc_feature (4)..(4): n is a, c, g, or t
  misc_feature (96)..(96): n is a, c, g, or t
  misc_feature (98)..(99): n is a, c, g, or t
  misc_feature (108)..(108): n is a, c, g, or t
  misc_feature (122)..(122): n is a, c, g, or t
  misc_feature (145)..(145): n is a, c, g, or t
  misc_feature (151)..(151): n is a, c, g, or t
  misc_feature (160)..(160): n is a, c, g, or t
  misc_feature (164)..(164): n is a, c, g, or t
  misc_feature (170)..(170): n is a, c, g, or t
  misc_feature (189)..(189): n is a, c, g, or t
  misc_feature (201)..(201): n is a, c, g, or t
  misc_feature (203)..(203): n is a, c, g, or t
  misc_feature (210)..(210): n is a, c, g, or t
  misc_feature (215)..(215): n is a, c, g, or t
  misc_feature (235)..(235): n is a, c, g, or t
  misc_feature (237)..(237): n is a, c, g, or t
  misc_feature (243)..(243): n is a, c, g, or t
  misc_feature (247)..(247): n is a, c, g, or t
  misc_feature (251)..(251): n is a, c, g, or t
  misc_feature (261)..(261): n is a, c, g, or t
  misc_feature (304)..(304): n is a, c, g, or t
  misc_feature (359)..(360): n is a, c, g, or t
  misc_feature (369)..(369): n is a, c, g, or t
  misc_feature (385)..(385): n is a, c, g, or t
  misc_feature (401)..(401): n is a, c, g, or t
  misc_feature (439)..(439): n is a, c, g, or t
  misc_feature (499)..(499): n is a, c, g, or t
  misc_feature (511)..(511): n is a, c, g, or t
  misc_feature (513)..(513): n is a, c, g, or t
cttnatggggaaaatgaatggacctgagtagctgaaggaaggcccctccctacccaaagactggaggcttctcagcctcaatttccctgtctgtananntgaaggctntgcctgtcccccantgctatcagtatggaaccccaantggggncccctattnaatnccgacnccccccaccgccagcagcngctcctccagcnanacccctnctgcnccccccacccctagcccttnancctggntggnctgnaccgctccanaggccaccagatgggctcctgaaaccctccccaggctgcttanagctcattctgctgggggtagagatgaggaggagggagtaagtaaaaccttggannagcaagtanaagcctggggggatgngtgtgcctaagtttcntcctccacaactgaatatagtggctgaaaactgggganatacttgatggcgcgaatgtccgttttctctcccttcccacctcctgcaggaagcagganggggcaggaagnanctggtaggcacagtgctttgcccctcctccccttcccttctggaagtcttggggcctcagtgcttgacaacaaccggccttgggaaataaaagactaggttgtttact

SEQ ID NO: 525464 - DNA, 658 bp, Homo sapiens
aaaaaatttaaaaaaaaaaaaaaaaaaaaaaaaaacaaaaaaaaaaaaaaaaaaaaaaaaaaaacctggtgggccgcttggcccaatccgattttagattgggccagcttaaggcagggggccgaatttggggctaattggccaaatgccccttatggggggcggtttaacatttaatggccggcggtttaaaaccgccggaatgggaaaaccctgggggtacccaaattaaatggcttggcagaaaatccccttttggccagtgggggaaataccaaaagggccggaccggatggcctttccaaacggtggcccacccggatgggcaatgggaaatggaaggcgtaaatatttggtaaaaattcgggtaaaattttggtaaaacaggctaatttttaacccaataggcgaaaatggcaaaaacccttaataatccaaaggattacccgggaaagggttggggggtggtcccagttggaaccagggaccccttttaaaggaccggggactcaaacggaaaggggcaaaaaccggtataaaggccgatggcccattacgggaccaatcaccttaaaaagtttttgggggccgagtccccgtaaagccttaatgcgacccttaaggggagcccccgtttgttgacggggcccggccgtgg

SEQ ID NO: 525465 - DNA, 132 bp, Homo sapiens
tcctcaaaagggcaacctgcttgtcccgcctaccctgaggcttctctcaggaggtgcgggcgccccgttgagaggcggggcgccgccggccgcagcccggattgggcgaggggcggggctgcggagggattg

SEQ ID NO: 525466 - DNA, 248 bp, Homo sapiens
  misc_feature (14)..(14): n is a, c, g, or t
  misc_feature (16)..(16): n is a, c, g, or t
  misc_feature (39)..(41): n is a, c, g, or t
  misc_feature (43)..(43): n is a, c, g, or t
  misc_feature (106)..(106): n is a, c, g, or t
  misc_feature (119)..(119): n is a, c, g, or t
  misc_feature (122)..(122): n is a, c, g, or t
taatcgcttaactntnccttcactggatacctgatacannngntcgtagtctgtaatatctttccatatttctgtcatagtatttcctcctatatctaattatatnacttattagatanggntggcgcttcttgttctgctaactttgcacgtccttttttagagaaccaaggcgaaacagtcaaaccaattgcgtcattcattacgtaaccatgaagcaaagcattcgtaagttgcgtcaccttgcc

SEQ ID NO: 525467 - DNA, 995 bp, Homo sapiens
aaggggccgtggcgctttagcttgtaacattacttggtccccttggtctgtatcaatttataacaaaaccgagggccccgatccgactgaccctgacctgggacggcgcccccggctccgcctgagaagggcgcaggaggggccccgaggccttcgcgcggcccacgcccgggaccctcccgcgcccggccccacgcgcgtgtacctactaggataccgcagaatatacagtagcgaacggacgtggagtagcggacccggagcaaaggacgtagccgcatagctagggtgggccgcccgagactgagaagtagcgccgcccgaacagctacggaggcatacccggagcgggtaagacaggtactagcaggcactacagcactgggaccacactaccgacagacgagtgcgagctagacgcagcagaacgcgacatgccgacgggacaacccggaccctagaagacgtacatagtacctggggaccgctagcacggcaagtacctagtaggagcaccgtaggtagtagacaccagagaggcacaccagatacaggaggcgatacgaggaacgcaagaaccgggacagcagacacacaactgccgtggcgaggaagatacgagagccgggcggacccttgacacccttggtagccacattcccaaggagcaccgaggcccaagagaagcatttgggacaggccgaacccacacagagaggatcaacggcgtaaacaatctcccatcggtgcacacaatgacggcccaggggccacacagggagttccctgggggccggctaccaagtcggaggatagcagccaacgagcgagggcaagcatgcgcaagggtacaacgctgtgaggaagccacgccacggcaggataaagatatgaagaacgaagggaagagaactatatgagtgaacccagcaacggggcaggctagagcgatgtgatgccagaggcccccaagtcaatcccgggtcaataaatgg

SEQ ID NO: 525468 - DNA, 176 bp, Homo sapiens
atcagctcggtccgctcttcgtgaactcctccatatgcttcaagtgcatgccctaaaagcaaaaaataacaaagcaaaacaatcacctggggcagcatccagctcaaacagcctccggagaaagggtgctgatgcaggtagggcacccgcccacagggggacacaggtgcagtgtc

SEQ ID NO: 525469 - DNA, 446 bp, Homo sapiens
gaggaagtagaagaacatcttccagagatgttgcatctgcatgaggaacatctggaacatttggttcatgatggttttccttaggttacttggtccgagcgccgcgcttggtcttgcacggggcgcattcggcagccgcaggaagggaacgaatcgcctggtcgcgctggcggatcaggcgatagatggcgcgctgttcggcttcccgccagttgttcacgttgaagtgcgtgaacccggtgttctcgggaaacttgtcagtggccttgggcagggaggcttcgaggggcaggtagatcaggttcgtcttcttcaggcagatgccgtccgagcgaaccgaattgccgatgaaagccgagtactgcgggtcgatgttgaggtcgtgcatggcctcttccaccagctcgtccttcgcttcctgcagcgtgaagatgcggtagtcgaag

SEQ ID NO: 525470 - DNA, 179 bp, Homo sapiens
tcagcgcaatctattctagagtccatatcaacaatagggttgacgacctcgatgtttggatcaggacatcccgatgtgtgcagccgctattaaaggttcgtttgttcaacgtattaaagtcctactgtgatctgagattcagaccgagaataatccagcgtcgtgtttcatatctactt

SEQ ID NO: 525471 - DNA, 247 bp, Homo sapiens
tccataggtttcataagatgttgcagctgtgcataatcagtctccaaaaagggtatgaagtaattggtcacaattgtcagttgactcatcagcaacacatgggttagcgtattcagtaacagcattcgctaatttaacatgatctagtaatggtcactgctcaagataatgaccaaagccaataaacaccaagacattgaaattgtcatctcacatatctttaatccgatgagcagccacacttgtg

SEQ ID NO: 525472 - DNA, 788 bp, Homo sapiens
  misc_feature (152)..(152): n is a, c, g, or t
  misc_feature (176)..(176): n is a, c, g, or t
  misc_feature (179)..(179): n is a, c, g, or t
  misc_feature (192)..(192): n is a, c, g, or t
  misc_feature (207)..(207): n is a, c, g, or t
  misc_feature (218)..(218): n is a, c, g, or t
  misc_feature (240)..(240): n is a, c, g, or t
  misc_feature (249)..(249): n is a, c, g, or t
  misc_feature (304)..(305): n is a, c, g, or t
  misc_feature (322)..(322): n is a, c, g, or t
  misc_feature (331)..(331): n is a, c, g, or t
  misc_feature (336)..(336): n is a, c, g, or t
  misc_feature (345)..(345): n is a, c, g, or t
  misc_feature (347)..(347): n is a, c, g, or t
  misc_feature (356)..(356): n is a, c, g, or t
  misc_feature (372)..(372): n is a, c, g, or t
  misc_feature (375)..(375): n is a, c, g, or t
  misc_feature (457)..(457): n is a, c, g, or t
  misc_feature (671)..(671): n is a, c, g, or t
  misc_feature (675)..(675): n is a, c, g, or t
  misc_feature (677)..(677): n is a, c, g, or t
  misc_feature (691)..(691): n is a, c, g, or t
  misc_feature (750)..(750): n is a, c, g, or t
aaaatggcgagtgaggctgcggggactcgctgagcagcggagggggagcgtgcagagccgctgcggccctcacagtccggagcccggccgtgccgtgccgtaggaacatgcacttttccattcccgaaaccgagtcccgcagcggggacagnggcggctccgcctacgtggcctanaanattcacgtgaatngagtactgcactgtngggtgcgctanagccagctcctggggctgcaanagcagcttnggaaggagtatggggccaatgtgcttactgcattccccccaaaaaagcttttctnnctaaatcctgctgaggnaaaaaaaangaaanagcagtaananaagtaaatnaaagctgttcggcaanaancattgattgggagcagcgagaatttaaaaagtttcctgcgatagggcacaaaaggagaaaaaaaaggaccccaaaaaggaantgtccttggaaatgctgctcagcaaagggcagaaagttctggtcaaagtgctaaattcaaaaaaaaatgaggatgtactggaggctgtagctgcaaagctggatcttccagaagaattgattggataatttagtctattcttagttcgagaaaaaaaggatggagccttttcttttgtacggaagttgcaagagtatgagctgccttatgtgtntgtnancagccttcggagtnaagagtataagattgtgctaaggaagagttattgggactctgcctatgatgacgatgtnatggagaaccgggttggcctgaacctgctttatgctca

SEQ ID NO: 525473 - DNA, 972 bp, Homo sapiens
  misc_feature (1)..(1): n is a, c, g, or t
  misc_feature (287)..(287): n is a, c, g, or t
  misc_feature (307)..(307): n is a, c, g, or t
  misc_feature (320)..(320): n is a, c, g, or t
  misc_feature (363)..(363): n is a, c, g, or t
  misc_feature (379)..(379): n is a, c, g, or t
  misc_feature (395)..(395): n is a, c, g, or t
  misc_feature (407)..(408): n is a, c, g, or t
  misc_feature (416)..(416): n is a, c, g, or t
  misc_feature (419)..(419): n is a, c, g, or t
  misc_feature (427)..(427): n is a, c, g, or t
  misc_feature (429)..(429): n is a, c, g, or t
  misc_feature (444)..(444): n is a, c, g, or t
  misc_feature (447)..(447): n is a, c, g, or t
  misc_feature (450)..(450): n is a, c, g, or t
  misc_feature (453)..(453): n is a, c, g, or t
  misc_feature (456)..(456): n is a, c, g, or t
  misc_feature (462)..(462): n is a, c, g, or t
  misc_feature (480)..(480): n is a, c, g, or t
  misc_feature (486)..(486): n is a, c, g, or t
  misc_feature (510)..(510): n is a, c, g, or t
  misc_feature (513)..(513): n is a, c, g, or t
  misc_feature (519)..(519): n is a, c, g, or t
  misc_feature (521)..(521): n is a, c, g, or t
  misc_feature (548)..(548): n is a, c, g, or t
  misc_feature (556)..(556): n is a, c, g, or t
  misc_feature (574)..(574): n is a, c, g, or t
  misc_feature (577)..(577): n is a, c, g, or t
  misc_feature (579)..(579): n is a, c, g, or t
  misc_feature (592)..(592): n is a, c, g, or t
  misc_feature (602)..(602): n is a, c, g, or t
  misc_feature (616)..(616): n is a, c, g, or t
  misc_feature (649)..(649): n is a, c, g, or t
  misc_feature (855)..(855): n is a, c, g, or t
  misc_feature (939)..(939): n is a, c, g, or t
ntataaaaacagcttataattgtatgaacacaaaatacaaacaaatacattttattgcacataaaaatattttaaatgaagtattgaagtattgcacgtaatagaattgatttaggaaagtcacaaacctattataagactagtattattctaggtctgaagattacagaatatttcctaatagagatttgccacatcacatattgcacattttccaacactattctatgtcttgcaaatattcctcatagtctttgcttatgtcttttctctgtaagacactgtanaaaagattataaaggcaaanaaatatgtaccancgaaaagagacctgtatacagcagaggaagtaaaaaaataaanacacgatcaacccaanctttttggggaaaaanaacaaagtaaannggcaaaantcnctaaaaananagaaaaataacaaanctnaanaancanaagcanttgatccataataaaaangctccnagaaattaaaggagattaaataanacnaaaaancnaagtaaccagccaaaattccattgaanacattcanaatcaagaaccaacatcnaantnctatccagaagtncaaatgcaanaaagggctcaacantgaaggtagtaaatcagcaataaatagtaagtncacgcctagttatttcattatttctggattcaaaataatataaagtgcatccaaaggttgcatagtcattcttctcattcttgggcatggttattggtcaacctgtgatgcttctagctcatggcaataaaagcccacagtgcagattttcctggaatttcttcctttttttccatagttctgtttgggaagaaaattcccaaganactataaaattttttttcacaaagtctctatgggagacttcggaccacagagcagcatccactggacacagatttccttgagtnccattctataatagtcaataagtgaacacgttt

SEQ ID NO: 525474 - DNA, 463 bp, Homo sapiens
  misc_feature (48)..(48): n is a, c, g, or t
cagggcccggggttctgatgagtctctcttcgcttgtaaagcctgagncagctgcctgggtgggactgggatgcaggattttttcacccctttcctttgggacttcaagagcctctggcatctctttctgccaaggcatctgaatgggtctgggttcctgttagcataatgtgaggaggtggagagacagcccccccccgtgtcccccgtgacccctgtccccacactgacctgggttccctccccgatcatttttcctgttccagagaagtggggtggatgtttccctctctgtctcaactttacgggggctgagctgccactttttacttccctcctgaaaataagaatttgaatataaatttgttttttcaaatatttgctatgaggggttggtgggttaattaaataagtccattcctgggagttgagagagcaaataaagacctggggaccttcccga

SEQ ID NO: 525475 - DNA, 1123 bp, Homo sapiens
  misc_feature (33)..(33): n is a, c, g, or t
  misc_feature (40)..(41): n is a, c, g, or t
  misc_feature (67)..(67): n is a, c, g, or t
  misc_feature (71)..(71): n is a, c, g, or t
  misc_feature (191)..(191): n is a, c, g, or t
  misc_feature (198)..(198): n is a, c, g, or t
  misc_feature (507)..(507): n is a, c, g, or t
  misc_feature (943)..(943): n is a, c, g, or t
aatcggtaaggtatatgacgagtaaatagtccngaagagnnaaaagaggtgtttgttgttcaacttncctnctcacactcgttagtgggagcattaatccggatttattgcatacgagaggagagcaagatgcgaagtcgtgtttacagaaaatacgtgggaagactctgtctgcactctagagagatgtngctagtngattcttcgccagacgatagtagctctctttcgcacaaccaagagaatgttgcttactcaggatactactcaatatggcgttcacgaacacaagaccaggatgtcagaaacctcttatagcatttgtagaatggcgccatgatttgacacacgaacactctagtagatggttcatagaaatgttttggcaaacataacctgtagtttacgcacacagaagcttcttttatacactcaaggtggtgatcttgaatcatacggaagagacaaccctaccctatgtgcaccttgagatacaacacataagcnggtgtctagcaattgtcgcttttgtttgaagaaagaaattgaaaaatataaaaattgtgccatcatccaataaccatttttagaagaagagtagctagtgaggacagaatagaagaagcgcatggagggcatgaattttcttaggttgggcgccccgtgggggcctaaagaatgggaagacactcttgcgagccggtttttactttataagtgaagaggataaaagttaaataaatacactaggcttcacttgaactcacttggcgctttggtgtggatcagcttatgaccaagctgggtattacatctccttcaaaggggcgggttcaagtgtttttcccacattattctccgtggaattaccccaggataacaagattgttaaccaatacggcccaaccaaagggcacacaaccccctaaaaagggcgcgggtntttttggatgttatttatttaaaatcccaccccccttgtctaatctttccaaaagaaaggagctctatgtaagtcaggcggaagacccaccccgggttatttaagttaactagcctggtcacctccggagtcgttttagagccctcttactggatacactcaggtcgtttactggaaatt

SEQ ID NO: 525476 - DNA, 181 bp, Homo sapiens
ggagatgtctgggggaagggaggtgcatgggtaatcagtgctttggaaggtgaatttccttgcagtaaaataggcttggtttactgggtcaggacaaccattcagactgacagtgccccttggacttccaaggcttcagtggacgagggcacagggatggtgattggactatgatatatcc

SEQ ID NO: 525477 - DNA, 167 bp, Homo sapiens
accctaagcagaccacagcagtgactgcctcaaaaaagtacttattgaacctgttacttttttgctttagagcaacagctacattagcttttcttcaagcatccagctcatctcatatgttaagatgcttgagtaaggaaactatagtgtgctgttgtcttctgcag

SEQ ID NO: 525478 - DNA, 764 bp, Homo sapiens
ccccctttcggaaacattgctctgcgagtcctcccgtttaaacgcattcaatttttgggtctctctctctctctctctctctctcttcttctcttctctctctctctctctctcctctctctctctcctctttctcccccctctctccctcctctcctctctctctcctctcttctctgacactctcttctctttctcttttcattacatattataataggttgttccccttcttcttctcctttctctcctttttctcctctccctcctgttgtctcctttccactcctattccgtgcagaaagagagagcggctacaactttaaagaaaaaaaacaagggaggcagcgacggaggaggaggccccccctttcgtattcttcttatcgttttttatacatatatgatttctgcggcgggcggcacgcgtgtcgccctgccgcgctgtagaacagcccgccccttctccatcctacaccctcactccaaactagccacagcacccgacccaaccccctccccctcctcccaccacagcactctgccgcagcagcccatcctcctcgcccccctctgccgcagcactaccctttgtctctcctacaaccccctcgtcccatctgtttgggccgctttcgggcgcgcttcccctatcctgtggttgccgttcttcctgtacgctttgttggtggtcctcgcttctcttgtgtgttcgcttactgtcggtagagcactttgtgcggtggctcgttcatcagctgcgg

SEQ ID NO: 525479 - DNA, 836 bp, Homo sapiens
  misc_feature (1)..(2): n is a, c, g, or t
  misc_feature (528)..(528): n is a, c, g, or t
  misc_feature (580)..(580): n is a, c, g, or t
  misc_feature (590)..(590): n is a, c, g, or t
  misc_feature (830)..(830): n is a, c, g, or t
nngccctgcaggaattcggcacgagaaaaaataattgaaatagtacatttaaaacaaatgaattctcaactcctacggttcatgtagagtttagagaaaatttccatcattgtcatcattgaactgtgaacctgggaagccagatcatgattaacactgacatcaagtttcaagttgcagatcaatgcacccagtgttcagatgaggcaaacttctccgtgacaactgtgctgtgctctgtcacattacatttcctgcagactctaagatctacggagtagagaacaatgacctcattttattttctatgttagttatttatttcaaaattaacattttagttgatttttgtctgataagtctatgttttgcactgctaactatgatgagggtttaaaaaaatgcttcttcagggtcctttcactgaggacctatgcagtctacttaatgctgtgaattaccattttcaaatgtttaattttttaaagaaaattaatattctatttttggtaggcttctctagaaatngcagctttatttattacccccattctttcaagtccttggaaaataacatatnaagggtacangaaataacacatgatggaaagtcattgtgacgccatgaattcattgagttaactcattactcaaattattttatagacacctaggatctcaagattatattaatggtagctctaaagtgattgtctacatatgcgtgggagccacgatttagccttttgcaattcagactctggtgattttcttgacagagatgcagtttttcaattacaattggtttacatgacatatttggttcttanctggcg

SEQ ID NO: 525480 - DNA, 361 bp, Homo sapiens
cggttagtgcatggctactactaagggggtggaagtcttcaaaatatttcttatcttttctttttttgacgtaagagtctcgctctgtcacccaagctgaagtgcagtggcacaatctcgactcactacaatgtccacctcccaggttcaagcgatcctcccacctcaacctcccaagtaggtgggactacaggagagcaccaccatgcccagtgaatttttgtatttttgtagagaaagagttttgctacgttgcccaggctggtcccaaactcctgagcttgagtgattcgcctgcctcagcctcccaaggtgctgggattataggcgtgagccaccacacccagccattgcactccgg

SEQ ID NO: 525481 - DNA, 340 bp, Homo sapiens
ttttattcttttgtgttttttgagcgagtctcgctctgtcgccaggctagagtgcaggggtgtgatccttgtgtcactgcagcccccacctccttccaggcttcaagcaattctcctgcctcagcctcccgagtagctagtaccacaggcacgtgccaccaaggccagccaatatttttgtatttttagtagagacggagtttcaccatgttggccatgcatggtctcgagcacccaaaatgtgctgcagttttagatcttaggcatgaacgaaagaaagtcagtcagggatggcactgaggtattggtcctgcagggcatgggaggactgaagctgctg

SEQ ID NO: 525482 - DNA, 378 bp, Homo sapiens
  misc_feature (102)..(102): n is a, c, g, or t
  misc_feature (315)..(315): n is a, c, g, or t
tgtaggaatacggcacgaggtggggtttcaactcgtactccgtgggcagaccccagatgccagagctcgacggcagacacggacaccatacctcagaatagntatatataaaagggacacggattgtgacaggttcaccccatttggttctaaccccgctggccaagaataaggtctgtggtgtggtctgtgttggttttgggttctcccttgtggcaagtctcttctgggccaactgggtggctgtggaagactgtgaggtggcccaaccacaagcatacctattaagagaagcccagagctttcagaccccanttcgctcttctctggccccacatagcctccttcttcggtatatttccccacccccgttttttt

SEQ ID NO: 525483 - DNA, 1253 bp, Homo sapiens
  misc_feature (800)..(800): n is a, c, g, or t
gtggcggcttccagaaccgagtgggagtgcagcggtggagtgaggcaactaccgacgaggtttcaacgtgcagtcggagtgtggtggctactagccatgaaccagtatgggggtaacaatcgtaccgggaataacatacaactcctaacatatcagaggctagctacaaccggtgctccccagcaatcatgctcgccatgctgctgctaggccatccgaccaccagcagtcaccatcccttcagcgcacctgtcaccaccctctcgtacatggcctgcatcggaacccccctaggggccatgcacctacaataataactgtaacattccctgtgctcaatgcgccaaatatccttgctacccccaccgtcaagcatgctacggccctccacagccgatgttacagcctatccacccttactaaccatggtagggttacatccaggggctacatagccccaccgtctccatctctactaatatctgcctttcaacttctgtggagctatcgtgcggattacaatgccgagaccaccttattactaccggtcgcagaggctagaaatcgacttttcagatcttacagaagtcctggttgatttcccaaggtgctttataccctttactctggtaaaaaggcgtacgaatgacttgggtcacttgggccttccataggcacgtttgacctgcatgtattcagacgacttgaaaccgacgactatttgtacagtacattgcctggcaaacttgggtgcttaaccttaagggtacccccttctgtcttcgtgttagcactggganttccaccacagctgagataggctcatgagcttgacttccgcaaccaatgatggctcgcaaaattccccatttgtgtaacgtttgacaagggtatcgtggcgcgcagataatgacccatacaggtgtaacaaccagccattcgtggtggtgcagttgaacaccacatcaacaaggggcttgggttataattgtaagacacatacaaacagaagcaagactacacctgaaaaaatagacaaaagcagggcgcgccgccacaccaatccgacagacctggacgcataacaagtatatataacgatactacataagagacatagaccacgtacagttgtcaaagaatggaagcagacggccgtgaaaatcaccgctttgctaccacaccgcattactcgtggtaacaacaatacaggtgatagcagcccggaataactatcagacaaatagtggtga

SEQ ID NO: 525484 - DNA, 126 bp, Homo sapiens
tcgctgggggcgaactgtgagtggcacttcagggccaggagaggcacttggggatgtgggtcaccggcatgctactctgggcacgctagaatgctactagatgccctccacatgagcggtacttgc

SEQ ID NO: 525485 - DNA, 475 bp, Homo sapiens
tcgagccggtaccccgtagtatagaagtttcactagcatatagtagaatcggagaagcctcggtgaatgaagtcatgtttgccctaagcccctggtccctctttatattggcgagtggataaactggaaagtaagtgaacgtctactgtaccaaagctagttcaatatagaaaacaggttctacaaggattaaggaacatctcttggcccacagaagattcatgtggatcctgtgttaaacccgtttcatccatgtatgaaagtgattcaaccgttaagttagccatttattatataaatggaatacttcttccatatggtggcttttagatagatgggcagacctgtccccaactccttccctgttgaccatggacaatggagggttcgctgtataaacttgattgaagggttggcctttagctggggtggattactcaggcagcaatgtgctattgaaacttctaaaactagg

SEQ ID NO: 525486 - DNA, 112 bp, Homo sapiens
ttcggtaccggtgatgtagggctgggcagcttcgggtgtaaggtgaacggtgaaacgtcagttactcctctagtcccatcatctccctttatgatgtgtaaggtgtagggat

SEQ ID NO: 525487 - DNA, 237 bp, Homo sapiens
tctagaggatcctatggttgctccatcagccaatgctaagctggttcattagtacgaaaggattagaagcagcacttgttgtagtagctggaaaatgcccatgtagcagggaaaaagcacaggagaagtggtgtcagcgtgttgtaaggtaacggtgttcaatgcaagcactaaaggctaagagccaagggagtctggggcactagtgagactctgctctctagtggtacattagga

SEQ ID NO: 525488 - DNA, 207 bp, Homo sapiens
caattgctttttgtgatttttaaaaaatggggcacccgtgttattactgtaaaatgtttttaaccaaaatttggtgaatttccctagtctccctcccattttgttaatgattcaaaattgtcttgggtccactgttaaatttttgtcctttgatttaatttgcttaatgtattaaagttttctccccccccctcccaaaaaaaaaaa

SEQ ID NO: 525489 - DNA, 542 bp, Homo sapiens
  misc_feature (157)..(157): n is a, c, g, or t
  misc_feature (162)..(164): n is a, c, g, or t
  misc_feature (316)..(316): n is a, c, g, or t
  misc_feature (351)..(351): n is a, c, g, or t
  misc_feature (363)..(363): n is a, c, g, or t
  misc_feature (538)..(538): n is a, c, g, or t
aatgaccctcatcaatggcctgtggagtaaggtcaatgttgaagaggttggtggtgaagccttgggaaggcttcttgttgtgtacccatggacccatagattttttgacagctttgggaacttgtcctctgcttctgccataatgggcaacccaagngtcannncccatggcaagaaggtgctgactgcttttggagagtccattaagaatctagacaacctcaagtctgccttggccaagctcagtgaactgcactgtgacaagctacatgtggatcctgagaacttcaaactcttgggtaatgtgctggtgatngttttggctagtcacttcggcaatgaattcacagntgagatgcaggntgcctggcagaagctggtggctggggtggccactgcgctgtcccacaagtaccactgagccctctctctagctgtccagcaatcctgtgtgtccgctatgcctcctttctgcacatgaatactggactgttccttgaaagcacatcatgtttaataaagatcatccttcctggtnatca

SEQ ID NO: 525490 - DNA, 144 bp, Homo sapiens
attggaaagaaaagtttttgggtggagcccacttaggggctgaatgacgaaaacctatgtgaactggaagatacagatgtttcttggggacatcacacacacattggggaagaatttttccatatgttgacctagtgatatatc

SEQ ID NO: 525491 - DNA, 638 bp, Homo sapiens
cgtcttcgtcccatcagagaatactataaacacctctacgcaaataaactagaaaatctagaagaaatggataaattcctcaacacatacaaagctcccaagactaaagccaggaggaagttgaatctctgaatagaccaataacaggctctgaaattgaggcaatagttaatagcttaccaaccaaaaaaagtccaggaccagatggattcacagccgaattctaccagaggtacaagaaggagctggtaccattccttctgaaacgattccaatcaatagaaaaagagggaatcctccctaactcattttacgaggccagcatcatcctgataccaaagcctggcagagacacaacaaaaaaagggaattttagaccaatatccctgatgaacattgatgcaaaaatcctcaataaaatactggcaaaccaaatccagcagcacttcaaaaagcttatccaccatgatcaagtgggcttcatccctgggatgcaaggccggttcaacatacgcaaatcaataaacgtaatccagcataaacagaaccaaagacaaaaccacattgatttctcaatagatgcagaaaggctttgacaaattcacaacttcagctaaaatctcatcaataggtacgtg

SEQ ID NO: 525492 - DNA, 341 bp, Homo sapiens
tccggggtgttgtggcaggcgatcgcggaccagtcaccgtgccaccggtggtggtcacattgttgacctggagggtggtgggcggccccgtggggtccgcggtgaacagatccgaggtgaccgggaggttgccgatgaccacgttgttgtggtctcccagaccggcaccaccgacggcgcggatatccacagcagaggtaccgtgtgcggggttgcaggtccacttggtgccgagtcgcatcgatgttggtgtcagcaccaggaggccgctgcgccgggaagggcttcgtggagccggagtcagcgccgagcaggaggcgcaccgttgtggtgccactcgg

SEQ ID NO: 525493 - DNA, 100 bp, Homo sapiens
acccagaactgacttcaaaggcagcttctggacaggtggtgggggtcgcggttcccaagaggaggcaataaaccttctgtgcagaaaaaaagaagaaaaa

SEQ ID NO: 525494 - DNA, 675 bp, Homo sapiens
ggggagtgtgctatcttcagagaggaatagctctttagttctttgcaggaaggtagagatcaagacactttttcagaactggcagtcggtatcagaattcctcaagcaggccttgtttattgaaaatgaagagcaggaatatgttcaaactgtgaagtctcccaatggtggtttttgatcagcggtgttttcctatcctaccttcaatccatcctcggatgtccctgccttgtataaggccatagtggttaaaggagtggatgaagcaaccatcattgacattctaactaagcgaaacaatgcacagcgtcaacagatcaatgcggcctatctccaggaaacaggaaagcccctgcatgaaacactgaagaaagcccttacaggccaccttgagggaggtctgttgtagctctgctaaaaactccagcacaatttgatgctgatgaacttcgggctgccatgaagggccttggaactgatgaagatactcttattcgagattttgtccatcaagaactaacaaagaattcatatcctttaacaggttctacagagaggaactgaggaagatcctggcccaaaccctaccctcaaacacatctgggagattttcggacgctgggcctttttttgctaagggtgaccgaactgaggactttgggtgctgctggcctg

SEQ ID NO: 525495 - DNA, 266 bp, Homo sapiens
ggcagtgcacgctgcagtgctgcatggtcgagctctagaaggatccccccaggtagacctaacgggtttacatgaggaatggtagaagtggtcttttgttgaaatgtagttgcattcagcatatatgaattgtcttaaatattttaggggatactcccccgactttttaaacagttgcataagatcgtggtaaacatctctgtatatcttcactaccgtttcaagaatcgttgcgttaggagttatggtctagcctgagggtgacc

SEQ ID NO: 525496 - DNA, 162 bp, Homo sapiens
ccccaacacaaaaatataaaaatcagctgggcatctgtaataccagctactcaggagctgaagtgggaggaatcacttgagcccaggagtttgatgcagcactgagccataatcatgccactgaactgaactccactccagcccaggtgacagagcaaaacc

SEQ ID NO: 525497 - DNA, 153 bp, Homo sapiens
ttacaccccacgatcacatctccccagctccactgccacaaccactgcctgacaccctctccagcccagccccaccctttttttgtttgttttgagatggagtctcactctgtcgcccagactggagtgcagtggtacgatcttggctcactg

SEQ ID NO: 525498 - DNA, 190 bp, Homo sapiens
aactgtcacgacaagcagcacgaccacccttcaccaaccaccacccccagccgctcaataacgcaccacaaccacccctccggcaagcaccactcccagcagtggtgtatgtaacacaagcaggtcgtggaggtggacgtggaggcggaggtggggtggggggaagtgagggtggtggagtgtgtggggg

SEQ ID NO: 525499 - DNA, 1558 bp, Homo sapiens
  misc_feature (322)..(322): n is a, c, g, or t
  misc_feature (1558)..(1558): n is a, c, g, or t
tgtgtggggggggggaaacccaaaaaacttctttattatcaccccccgcggcgcgcgcgagagggagcgccgaaaatacccacgcgcggggggggggggcggggagagtgcctcgtcgggagggggcccgcgcgaacaaaccacccgggggggagaggagacacagcgcgccgcgcgcggagggagagagagagagggcgccgcgcgcgcgcgcggtgggtgggtctctccatccccaatgtgggtggcacccttcactcgcgcgcggaggagagagagacacacgcggtggacacaccgcgctgtgcactcgcgcgcgggngttgtgcgcgagtgcgaagagagagagagcgagagagagagcgctctccgcgcgagtggcgactctatcatctctctctctctctctctctctctcgttcgcgcgaggcgagcacgcgcgctgctctctcgttcgtcgcgtcgacgcgcgcgagagagagagagagagagcgagcaccacactctctctctccgcgcggagagagcagagggtgcgagccacacgcgacagacaatgagagcgcacccctctctcgtcgtcgacgcgcgcgtgcgacgcttcgtaccgagtagagaacacacaacacgcgcgcgaggcgcaccacacgacacacacgcgacacgacgcgcaacgacgcgtagagagacgacacccacactctactacactcgtcgtcgtcgagaagagtcaacatcacgcgaccgtagtagtcgtagaacaacacaacgacgcgacaccgccacacatcgtcgcgacacacgacgcgcgtagacgcagcagaacacagagcagagagcaaggcgcccccctcgcgcagcgagcgagagacaaaccgaaggagcgcgagcgaacacacgccgacgctgagtgaagaagctaagatgaaaaccaccaacaaggaggcggagcgaaggcgatgcgcagaacaacccgaaagaaaagtagataagcagcagtagagagcacccgacgacgcggcgacccatcaacacagaaggaagatgaccaaatgcggacacaccccgcaagaacaacaacaccaaacaaatgaatatatacaaccaacaaccacgcaaaaaaaagaaagacgcacaaacagtaaaaacaaacaaccacacgtgggacgaataaacaaagcacaaacaacgacactccttcctcttgtgttggcggcgcgagaccaccaaccaagtagcaatacagcaggaagccaaaccaccacccacaccccccaaacgaccaggacaagaacataacctacaccctaatgatggcgcacgcgacctcaccatacgccaacacataacgctcataggatagaacagagaggaagacgaaccacacacaaacacgccacctacacaccacgcgaaaacgaagaaaaaaaaacacacaccaacacaagcgaagtgcgatcacatacccacagcatgagaagcaatgagcaacaaaccaaacaaacaacagcatccccacaacaacacaaagcgaaaaaaacacaaaagccgaaggagn

SEQ ID NO: 525500 - DNA, 726 bp, Homo sapiens
  misc_feature (424)..(425): n is a, c, g, or t
ccattgtttgggtgtttttttgtgtggccgggggggggccttgtaaacaccccaccgccctttccggtcgcgcccttggggccttgtgcccctgttttctggggttcccccttcgtggggaccccgtttccgccttgtggagtgtatcccccccccccccaccccccgggcccgcggttttgtgggggggacgagaagggccccctaccacaccccccccccccgcgggtggggggattttttatataaggggggccccacggttttccccctggaaagggggcgggggggccccccccatttttttgggtttgctcccccctttggccccccccgctttcccccttttgctcccgggggggttttgggggggggtgggggggggggaccccttttcccccggggcccccttttcccttttttnnattttttttcccccccccttggggggtttggccccccgggccccaaatttggccccggggggttttttttaaaaaggggggttcccccggtttccccgggggggttttttttccttaccccgggtttccccccccccccgtttccccaagggggggggtttcggggccccccccccccccccgggctttttttttttttggggttttttttttttttttttgggccccccccctttgggggggtttttttttttttgggccctttttgggggttttttttttaatcccctttgtttttcca

SEQ ID NO: 525501 - DNA, 551 bp, Homo sapiens
tatgagcacgatcgaggagctcatcgaggagacagaagccggtgcggctatggaggagacccgtggtggtggcagtggctacggtggagaccgaagtggaggctatggaggagacaggagtggtggcggctatggaggagaccgaggtgggggctacggaggagaccgaggtgggggaaacggaggagaccgaggtggctatggaggcaaaatgggaggaagaaacgactacagaaatgatcagcgcaaccgaccatactgatgactgttttgaatgttcctttgtctctgacatgatccatagtgaaattgccagagttttgcctgctgctttcctcgtggcctcttcttgggtagtgaaattaagtgacatttggatttttatttgggtgggagggctgggacagtttttcttctagaaatgtctgttgagatttccccctttagtttccaaccttctccccaacccttggagctaaatgcgttgtaaaatattgccaaaatgaaaagtgttttgtaatactgcaataaaggctgcttgtttttgtgga

SEQ ID NO: 525502 - DNA, 935 bp, Homo sapiens
gcggccaatggcggaccgatgcttcacacgcgttgccgggagatgcggtcgcattcgtgcctctgcagtatatgaagctgggcgcgtcgaggactgggatttcaaatatgcgtgcattagcagaatgactttctcaattctcccccatgattgaactgttcggattggctgggaacgtgtggacagacaccgtcttgctgaacgtacagaaaagcatccagactcagcgaagataggataattatcaagaccaccatgccggaggcagtctagcgaggggccgcgttccacccatctgcgggatgataagtctcaagacaccgttccgaggcgtctagctcgattcgcccttcgcacaccatacagtcttcccacactcagcagatgagtacatatcgaaagacaacctgcctgaagcgttctggagagggggccgagttccaaccctcagacgggatgagtcactctcgagagacacctgtaccgaagacgtcaggactcaggcatccgccttcacaaaactcaagagctccataccttcagcaagatgaagtaagtactacagagataaacagccggaggcgtactggaggagagacagaacactcgcaagagacgcgcccaggctgcccagacacctactaaacgagaattgcatcaatacatcaaagaaaaagtgataacgcgaagggcgattgacgtcctactcaccccattaccctccgcagtccaaacatacaaacgctactagtggaaatgaacaataaatgcaaaggcaacaaaatgaccggaaacgaatcaagatagagagcacgggtctcgcagcactatctagaggacgtcacaatacttcaaggcacaccaatacacgaaaggtcaacaaataaacctcaccattggcacctatcaagcttcgagccctcacggcagaagga

SEQ ID NO: 525503 - DNA, 536 bp, Homo sapiens
ctagtacggcgcagtgtgtggatacggtcagagtccaacagtgcataccccttcgagggcaacactccctatactgctcccactaccagaaacaactcgccatttcacgagtgtacactgctatccatattcatgcatataatggggattctatgtgggtcgtgtattgaagatcctttcttctgatacatttgaattaaaatatgacagtatctggatctcaaatttttctttcacgctagtgcgagtagataagatgcagagttagtgagtaaacttgatagggtccatgaattcaatgaactgaccaccacctggatctggtgagaaccagctcatctatgatgatactagaccagcactacacgtacgtagaatcacttctaacgtttaatccatcaccaatttcaattcctaaacccaaaaatctgtatcagacaagtctattcccaaaacagtgcataagcaggtgtattacataagccaccaccagtgcatcctagtctacccttaccgaaggcactagtaggcctctg

SEQ ID NO: 525504 - DNA, 483 bp, Homo sapiens
tggggtatacagcaggcctctcgctgcacagtctggctgcggtgccccacatagtcccggacacaggagtacctgggaccccctactcctttccggtcctatccttcaggtcacgcagccctgtactgtatccagcaccacagaaagctcagtgtatttcctcgtgctggctccggggcacaaggaagccttagggtatggggaaaggctgttattacctagagtttactcccaggccagggggctgccatcttcttcacagacatccctgaaaggaagcccctttggggcagggaggtgaggacttcatctcaacatcggctggtggtaggtaggggagcttattcttttctttccttttttttggtttaggtttcggttatggttattggtaacatgtaaggagttaatgttgcaaagagtagtaacatcttcactttctgaagacacttgactttaggaccgatgtatctgtgacaagca

SEQ ID NO: 525505 - DNA, 1657 bp, Homo sapiens
  misc_feature (313)..(313): n is a, c, g, or t
  misc_feature (422)..(422): n is a, c, g, or t
  misc_feature (1063)..(1063): n is a, c, g, or t
gtttgtgttgtgttttgttgtgtctgttgtgttggttgtctatgtcttggtgtgtgattgttgtttagtgttcgtgttgctgtgtggttctttgtggttgctgttgttaggtatgtgtgtgatggggtttagcttgtagtgtgtggtgcgagctggttgttgttgttgtgttgttgtgttggtctggtgttctgtttgtgtgtctgattagtttcgtgtgttgtgtgtgtggtgtttgtttgtgtttagtttgtctggctttcgtgtttatggttttgtttttctgctgctgtagtgggcgatgggtgcagcncctggcagttaaacacatccccgtggagggtgtgtagacgcgccaccaatccccctgtttttggggcacccctctattggaacttctcgcaagggagccgcccccacgnggtgtggttccacaaaagaacgcacgcccttttgtgtaacacgctcggctccccgtgttactcgtattaacccgggtcctctaaaaggtgtatactaagaggcctcttggggtggtcctaaaatttcggccacaccaatggggtcgcaatacaacaaatcgtctgttgaatgtatcccatcttgtcctttggcccaaaattccatatgcgttgaataccacaccccccccgggaagaagttgtccccgaccttttttgggtggaaccccggggatatctttggcccacatttctgggtttaccaagaggtatggctatgactcgtatacccctgttaaaattagctctggtgtcttcctatggctttagcgccctaggatccccagggtgctcacctggcgcccagaatatgtttgtaaaaaagaagcgtcttggcaccagaattttacccgggcgcccaaagactcccccgggggtggacccccctattgtggatcgcagcgccacaccacagtttgtgggccccacaaatttggtgtatatgatgtaactcttacgttgtaggggcaccaggaatttgtggagtcccccgagttgccttatgtgagacgccgtgtgttgcccacacgaagtgtacccanggagtgtgggagaacacccactatatatctgatgttgctgtcatgcgcaaactgtgtgccacaaggcccgacacctgggggataaagggagatattttatgtcaccacgcataggatattgtgtcttgacaccacgaaatatgtgtcacacggggatattttggggacacccagcgggggaagggtggtgccctgagttatatgttcgcgattggacccccccgtgtagattaatactttgccgaagctggctctttgggagacacccaatgtccaggcaccatagaggcccaaatgtagtggagatgtctcctctttaccacaccgaagcgcccagaaacctgacaatatgagtgtggatcttgtaccggtccctttggagagtgtgttttggccgggagagtgaaacccttgggggaaaatgctaggagattcttttttgtctgtttttgtgtcttcattttctcgctccggaaaattttttaatcctcctttggtggccattactgtattcccaccccatagcgtgtcgccccattttccaagtaatctttactggccccacttgggaatggggaaattgcctttaaaaaa

SEQ ID NO: 525506 - DNA, 448 bp, Homo sapiens
ataaatggtcagaaaaagacaaaaagaatatttcgacacgtgaaaatgataggaaatcctgattccagtgtccatgagttaaagcttccggaagcagccgctccgtccacttccacgctgtctgtggctgctctcgcactacagcggcaggcttgatgagctgccagaggccacccggcccccaaggcctgagccattgtctgtcctggtcagaagcttgccagcccttccctgggcacaggttggcttggctgttgtatgcagcctcatgggggcccacagtggctgagtctgtggcctcctggcgcctcagcgacggccaccgcgtccttgctggcgcgtgctgtgtgcctgccctcctgtgcatttgtccacgtttcctgccaggtcatttgctccccacactcacgcccagccctctgctgcttgccttctgcttgaaggacgc

SEQ ID NO: 525507 - DNA, 629 bp, Homo sapiens
tcacggtcagtacacccccgacttatgtacgaggcctgggtggcgcccacgctggagactgtggagaagggctgtcagactgaagccagctctgagcggcccttcagactgcgaggtgtgtggccgatcctacaagctcgccggcagcctcatcaaccacctggcagagccaccagaccggccactttggctgtcaggcctgctccaagggcttctcaaacctcgatgtccctcgaagaaccaccggcgcatccatgcagatccccgacgtttccgctgcagcgagtgtgggaaggccttccgcctgcgtgaaacagctggccagccaccatgcgggtccacattggaacaggctgtggggtgtggggagcacccgaagaggcagagctcgaggtaacgatcgaggccttccgctgtgaggcatgtgcggagctggaccgtatcagaccacgccgtgcagcctcctgaaccatgcggtcgacagtcacagagacgggccatgtacagcgtgcccagctgcccaagaactagtccaaccgcatggcccttaaggaccaccagaggctgcactcagagaatcggtggcgacgggctggacggtccaggcgcacaggtgtgcgttgcgccct

SEQ ID NO: 525508 - DNA, 333 bp, Homo sapiens
tttgaagagacgggttttcaccacattgcccaggctggtctcaaacttctgagctcaagcaatccaccacctcagctaaaaacataaaaaactagccgggcatggtggcaggcgcctataatcccagctactcaggaggctgaggcaggagaattagtgtgactacagtgatcattttattatgaggtcagaagtagaaaaatgagaaaaactggaataattcgggtaaaatgaatagaatagactttattttgtggacttattttaaatttcatctaataaagataaacttggattaacaaaatacttctaggaaaattctgaaactactcc

SEQ ID NO: 525509 - DNA, 722 bp, Homo sapiens
taaaaatctcaacactcagtcattaatcccgttttggcaaccaaagcaggtaataaatattatttagcacttggtttttacaaagaataaaacagatgatacactctctgcgaggggcgggtgcgatcagaggaaggggtgttacacggcagacgctacaaagcccagttggcaacgcaggcagcgccgaggcggctggcacggaacgcaggaagcacgtggaggagtttaccattggggttaaccgtggcaaaaagtaaaccaaaatagcaggaaagcgggcttagactccgatggggctggcagtccacgtgagcaacacagctttagcatggggcacttaccctcatcatggataacatttacacattccaaaaaagcaaaatttgtaaaaagccaaagagaaacccccaaattaacgccaaaggtggtttccacgagcaacgtggccttttaatctcgtggtaagcgttctcagggtaccaaaattacaccaaattcacttggggcttagacgaagggacacgatgagttcggtgggcgtagttccctactttacacactaataactacaattgcacccggccccgtgtaaaactcggcgagctatgggggttatttccaatcccacaaaggtgggttcctaactcggaagtgtctataacactggctcataacgtgttgaaagaaggaaacatccacgagatttatcgagaaaaacc

SEQ ID NO: 525510 - DNA, 104 bp, Homo sapiens
gggtacatggagtgtacagcaaagaccatagatggacgtgagagaggttttcgaaatggctacgatagctgctcgtgcgcacgctagcaagtgggaaggaaaaa

SEQ ID NO: 525511 - DNA, 332 bp, Homo sapiens
gcgctcgccgttgctgtaggtggcgtaaactttgccatcgtcatcaacctgcacaccattctgagtcgcggaggcgtagccgttggcggcgttggtggtgaccgaaaattcagagccgtattgcgtacaggtcgagtaatcaacggttaagtcgatgggtgcggcagcgtcggtttgaaattcaatggtctgcggcgtggttggcgaggtcagcttcccggtgttcgggtcgaaggttaacgtcgtcgccggaacgccggtctgctgctgaccgtcgaaggtgtactgcacttcccaggagttgtcgctggttttggtgaagtactggcatg

SEQ ID NO: 525512 - DNA, 520 bp, Homo sapiens
gatccccgggcagtaggatgggtaaggggctccaacctcgtgggtgcactgtggatggtgcgccccatgagctggaattgctgtctgtgtcaaactccacaggcattcttggctgcactgcgtggatagtggatggtgctgcccccaacatgtgactggccctgtctcctggcacaccccagccccggccacatgaaggttcctttggcttctcctcagatgtcttcatcatggacactatcgggggcggggaggtgagcctggtgggacttggcagatctcaccgtcaccaacgacaatgacctcagctgcgatctgtctgacaggacagatgcttttaagaagacgtgtaaccccaagttcagcctgcgctcgcgctaatgatggcattcgttccctggccttcccacccacagccaggtcgggtctggtcacctgcctccgaggacgggacgctcaaagctctggaagcttgcatgaattgcgtgtcacggcccacgaagaatgcggcgctagattg

SEQ ID NO: 525513 - DNA, 715 bp, Homo sapiens
cactaacgctacaggtagaccacggtgggcttggcaacaggtgtcttgcgcagatgctggcgttaccgctagaccaaggagcgctctggtggccctgtccgggcataacagaaagctcgcactcttgtcttctggtcactcctcactgtcccctcagctcctatctctgtatggcctggtgtttcctaggttatcattgtagagcgaggattattataatattggaataaagaataattactacaaaaaaaaaaaaaaaaaaaaaaaaaaaaaaacaaaaaaaacaaaaaaaaaaaaaaaaaaaaaaaaaaaaaaaaaaaaaaaaaaaaaaaaaaacaaaaaaataaaaaaacacaaaaaaatcaaaaaaaaccataacaattcatagggggaaaccaacaacctctcatacaacaaaaaaacctttgggccccctgctcccaacacttccttatacgccgacaatttttctctctggtgcccaaatttgggcctctttggacaatctccccataaaggggggtcgtataaaaaatccgcggccgcgtgtttaaaaacaccgctggtcgggaaaaaacctcggggtccccctacattaaactcgttcgcgaacaacaacccctttttccacgctgggtctatattaacaagagcccccccaagtggtctttcatggtgcaccccctctgggcgctagtttggcccgcttatttct

SEQ ID NO: 525514 - DNA, 167 bp, Homo sapiens
aatttgcccacagaaccctctaaatccccttgttaaatttaaactgtttagtccaaagaggaacagctcttttggacactaggaaaaacctgtagagagagtaaaaattgcaacaccatagtagggctaaagcagccaccattaggaagcgttcaggctcaacacca

SEQ ID NO: 525515 - DNA, 1559 bp, Homo sapiens
ctcagagtgtccgtgacgcgctaccgctaaaatgtccaaagatgggagacaggaagagagactacatatccaagcattgctcgatcgagtagggcatcgacggatacgcattcgggcgacgctccaccaacctactggccaactctgcatctatacaattgtccggggggcaatcggtacaaaaggaaccgatttgaacagaccatttagtagaagagagcgtcatcgacgtgatcagtgaggacacaggagactcgcttcatagaatcattgccataggtggtccttcgcgtatgatagacttggacgaagcgtcgcatccggtaaaaactggctggatcatcgacactcatatcgagtcatctctcccctagggatcgtggcacagtcttgcgaaaaccggagcatagcgcttacatgatagtagaaagctactcaagttgcagaggcccctccagggtacacatcagcaaggactctatgcattcccaaaagacacactccataggatgttaaccttgcgagaaccattgcttcctaagacgcatttcgtgaacattgtacggcatttggtacacctacggacttttggttacgcacttaggcgtgggggcttgctaacggagcccggcatttggccggaacaggcaaagcggttagtacggtacactagaggcaataggtggcgcagtcgaaaggaactcccctgtaggaaagagccaggttgcttccccttttcctaggggcttgtgaacgacacatccgctgggcgggattggtggacttcccgaggaaactacacagtgtggttgcgaggtgggctgcaaagccaaacacacttgggtatttgccgcaatcgtaggggggccggtgcccacttaagcaaggacccaacgggacacggccacggactaactggcaggacgcaaaaacttgggttggacgacccggacacggatacaaagagaccgtcctaattaacaagtactccaatgtgaagaccacctttcgggcctacactaaatcgcgcctggagcctagcaaaggttaagcctggtgacgtgtagaccacatatgcactgggcctcggcacattcgcgatgaaccatccgatttgcgtgggaagccacaaagtggcgtcaacacaatgggccgttgaggtgtttcaaccggtgtcgtcggccaaagaatcacacccaggtagagagctttacactattacctgcgttggaacacctacacctgactttgaaaggtccatagagacgtggaaatagataacaacaaaatcggttgaaaaataggacagggacccctgtcgccgtgagcatctccgaaggtaacgacacaacaaagagaggcaatggcgacagaaaccggcaagaccgaaagaagaagaaaaaaaacaagaccaagaatgaggcacacaatgaacacaaactaacagcagagatacacaagaaaaggaacacaaagcaagaaagcgaacggaccaacaaggacaaccgaaaccgacacgcaccccgcgacaacacagcacgcgagaagaacccaaacaa

SEQ ID NO: 525516 - DNA, 112 bp, Homo sapiens
acatggcctggtctctgaggagtgagttgcatccacataaaacccggcatccagatatgacatggaccgccagttctcgttctagcaagcctcgttcaacgtctcgtgtgtc

SEQ ID NO: 525517 - DNA, 1536 bp, Homo sapiens
  misc_feature (558)..(558): n is a, c, g, or t
  misc_feature (1059)..(1059): n is a, c, g, or t
ggtttgcttgagcagggccatggtgtgtactcaaaggattgccgtcacctgctcccatgtcactctcggtgtgtgagcttcccttgtccttcgtctgatgctcttcagacttaagaatagaaggcccctttcaaaggggtttgtacgctctggctgcgagggaacctcttcgcttctatatccttcccatgagtgctcgtactcgtatacgaagattctctatccgcgatagggtacagggggaccaccgaatgggaataacaaggtaccctcgtagcgatgccggatagctctaaggcatgagagaatagacctgccattcagacgtgagtgctgttccaacttgtcctggaaggttcctggattagagatcctgcgagtggccgcgttagtcgaggcagacactgtgcagtggactccatgtgtgacacagcgtagtacggcacatggaaggctctctttactacactaccatacccgagctattccccaagatgtttggcagacgaagaggaaaaacccaagcagaggctcacaagattatgcgcctcaaagtantggccttgggaggcactcattgtccccttggaagcattctcgagctaagctggatgccacttgctagtggatggctctaccttgggacctcgtgagtgtccattccccttcggtgcggtagtgcgccccttggcgtgggtgtttgggccagcgattttcccggggcccctggaagctaatgcccctttttaatttggttgcgcttgtggggacccacgggaagcgacgacggttaaccggcgagtggaaaccaatcccaagcgttctaattccccaagttccagtttggccaaccttggcctacaggacaggtttgggggagccttttgctttccttggtggggaacgcgaaccgcaacggttcacggccccaaagggcgttttacaggaacccgctaacggcaacttgcggggggggttccaattccaaagaaaagggtggtacttggtgccgtcccccctttttccaaaaacacccacacccaaaattttcaagtgggngcaaggaaaaacaccccaacggataatgggctatgtttccccgtttcccgcaagatttttctccccaaaaagagtttgcaagccgccggcatatgatcacattgggatgccgattatattgggcggcaacacactttgtgtgtggccccaacgccgaaaaatatcggggcggtgtagccacacgtgacaacccttgtggcctttcctatttgggccctttgggggggccacacggcttggaggatcggattggcgaagaaaaacccacagggctggagacagcgtttccatttccttaaatgttggaaacacacccgtcgacaacaacggcccccagacacgcaccacacgcgacagtttccgttcccttgggttggggaacacatttcccaacattaatttcacaaattggggagcgcagaacacatttggcgccccccaagagaagattcccctttggttacttccattttggcg

SEQ ID NO: 525518 - DNA, 89 bp, Homo sapiens
  misc_feature (11)..(11): n is a, c, g, or t
  misc_feature (83)..(83): n is a, c, g, or t
aaagtcttacntgccttattatgtgtatgggattctaaagtggcattccacttggatttcctgtgctacctatccaaatccangtacct

SEQ ID NO: 525519 - DNA, 209 bp, Homo sapiens
atttcacttatttggtaacataataagaaaatattaataaacaataaatatgtggtaagctctgtgctagatactgggagataataatgaacaagacacagagcaggcccttagggagattagaaacgcaaatgtaatgaaacaggcatttatactgcagtcagaataactacagtcaggctaggtataaaaacctgtgtaagctgtgt

SEQ ID NO: 525520 - DNA, 380 bp, Homo sapiens
gatggatggatggatggatggatggatggatgacagatggatggtggagggttaatggaaggaaggaagatggatgggtggaaggaagatgggtggatggatggtggagggtggatagaaggaagatgggtatatgaatagatggctgggtgggtggaaggaaggaagatggttggatggatggaagatggatggatggatggatggagggtagagttttaatggaaggaagatggatggacgaatagatggaaggaagatgggtggatggaaggaagatggatgaatagatgggtgggtggatgtttggatggatggtggagggcagagtgttaatggaaggaagatgaatggatagatggagggtagagtgtagatgg

SEQ ID NO: 525521 - DNA, 943 bp, Homo sapiens
gcccatcttcgtgccggcttgcgttgattatttctgggtcaaggacgccatctgcttacgagactgccctatgggaccaaggggagtgaggatctgctcctccgggtgctagccatcacccagctcctccatccccaagaacatccagagcctcaggtgccgccgctgtgtgggtcgtggggaacgggcgacgcggctgacggaacagctcagctggagagcatgccatcaagcacagtacgacggctgggtcaatcagactggagacaaggccccaggaggactggctcatgagggtgacgtgggcgtccaagaccaccgagtgcgtcagctgtcatacgcgcggaatgtcggcgccagcgtagcggagcccccaaaggtggaaagagcaacccaagaacacagaacaccacggcactggagagcgtatgcaaagggcaaggggagaagaccaacgtgggagagaagagcgagtccgtggaggcggagtaacgaacgccggggtggcggaacaggggcacaccatgggaaaagacagagcactcccgcacgtcccactcagtgggggaatcggctccacagcccgcttaacaacccagacatcacgcggaacgccttaccaagccgcacaggcagagccactcggcagcaagcaaggcacgccacgacccaacacgtggcctgcaagagcgaggcgcgaacggccaaacaaagaccaaccggaacggaacttcaagcacagagatgacgccaacacaaagggcgccgcgcgactgggacaccgctcaacggcaaggacgccatcgcacccactcgtgatgcaaactaagggagccaacagataggccccgaggcctgatgaggcgtacaccacagaagaacagccggtaccacagccagacgaacgacaagaaccaaacaaccacgccgagacacaagtgag

SEQ ID NO: 525522 - DNA, 409 bp, Homo sapiens
aatcatagttttataacattcactttaatcagaagttcacttgaaaggattattaaatgattgctgtagtgtaaaagctctcaaaataggaaattattaatttttattaagagaaattctaggccaggtatggtggctcacacctgtaatcccagcactttgggaggccgaggtgggtggatcacttgatgtcaggagtttgagactagcctggccaacatggtaaaaccccttctctaccaaaaatacaaaaattagctgggcatggtggcagtcgcctgtaatcccagctacttgggacactgaggcaggagaatttgcttgaatctgggaggtggaggttgcccgtagccaagattgcgccattgcactccaacctgggtgacagagagagactccgtttaattaa

SEQ ID NO: 525523 - DNA, 189 bp, Homo sapiens
  misc_feature (18)..(18): n is a, c, g, or t
  misc_feature (43)..(43): n is a, c, g, or t
  misc_feature (69)..(69): n is a, c, g, or t
  misc_feature (102)..(102): n is a, c, g, or t
  misc_feature (180)..(180): n is a, c, g, or t
cctgtgcccaagcaaganggtcacctagacagcgagagcccanccaatatcccactgacaaagcaaggnggttccagggatgttcagggaccagaccctgtntgcagtcaacccatccagcctttgttttggcatggaagcagcctggttccccagggcccaggcgacaccctaccaccnttgccatgt

SEQ ID NO: 525524 - DNA, 307 bp, Homo sapiens
acgtacttcatacactattctttaagatcaggagcaaggaatgttcagaaatatctctcccaccggttttttttcctattttaggttcagggggtacatatgcagggttggttagtgtaggtaaactgtgtgtcacagggagttggtagaacgagattattttggtcactcatggtactaagaccactagagcttaatttttttgtttctggatccttctctctcactcccattccttcagcccttcggagtacggctccagttgtgctgtggttccctgttttggtggtccagtgagtctcattct

SEQ ID NO: 525525 - DNA, 1470 bp, Homo sapiens
tggaacagtcggccgcttgggatgctgtctaagcttgtgatacctgatgttaataacggacaacagataaagctccgcatccttgtcgccacgtgcttcggtccgtggttggctgtgcatgacgtttgacctgtatggtgaccctcgcgatttgcaaagtgtgctgaggatctggaatacttgaagctgtgatacggcacactcattgtgttaggggagcattgtagtagtttgccctcctgttgactgcagctggcttccactacgagagagtgcaaacggtgcaaagcgctcatgcgtacctgcatggcgcctctcgttgaccccgtacctcgcgcacgcggttagctcccggaggtcggcggcatcgtgcctcgtcgcgccgaatcctcccgtcatgctgctttcgaggctacggtgtcgcggaggaccgcgcttccggaggggggccggatgaatgcccaggcgatcgcgtacgcccgcgcatcttccggagatttaccgaggtcgatggccctagaactgccaccggccgtttgccttgtcccgtgggtgacgtgggacttgcttgggcggacaaggctttggcttccgctccgcacccactcgggacgtcggcccgggtacctacagcaggctggcctcggtccgggcgaccaatttcggctcgcgcgcctcgacgggagtcccccggacgggtccccgaaccatggaagaccgggcgaaggccgcaaaggcagtcccttatcccttgggccacgaaaaggcccccgtacccccggacacggtggggaaccctgggagcgaaccccggaagggacgactaagcgacacggaccgcagggcgcgcacatacaacgcgctctcgagcacctaaccgctccctcctgcgaacaacgccgcaaggacacctcttcccccaacacagaggacaaccactcgaagccaaggaacacctcccgacacagtaggctgggcaccctacccaacacagctggaaagacaactcacgcgatcacactaacgaccccccaacagctacgtggccgccgacacgaacgctacaacggctgaggcaaaataccaccgactacgatccccgaacaagaaacgtacaaacagcacacaaatacgcgaggcgcctacctacgctaagaaaccccacaacgacgacaaaatcacgaagaggcgcagggacccccccataacactaacacacggcgaaatcacaccagaacgcgctagcaccatagcacgcgccaatgaacgggcccacctcagcccctggttgaccacccggacacacgcgttacaacccagtgacacacttataactggaaaccgacaacaatctcctagcgaccgacatcgctcccagcgaccgcgacaccgaaccgccgactgaccacactggacacacggcacggcatgctacaggccgagtaagagacctaccccgcaacaagcgac

SEQ ID NO: 525526 - DNA, 800 bp, Homo sapiens
gctgaagcggctggcggagcagaacggattgctaggatcagctcgatgtcatctgagcctcctcgcacctaccatcagtgcccccacccatcacgcttcagtcgggctgctggacatgccctcggagccgtgagcgctcacctatcccctctgcggcggcaatcgtggtcccaagtgccactggccactcgtccgtgacgaggtaccttctcggacgacgcgtgcgtggcttgtcactagggtcccgcgttcttacggagaggcatggtctgcgaaagtgcgttcgtgcgcaggtcgcgaaggggccagtgggctctcattgagccccgagactggatggtcggcctccgagcgatccttccgtgcagcagtctactgcagtgtgtgaacgtgggatgtactgtcccaagtggaaggcgacgaggtcacctataaataggtgctccatcgcagccaaggaatgaagaagctgccaggcctgttggaaggtcggtccattcactctactcgtggtcaccgagggcgacgaggcattgcagacctggtctggacatgtcgatccaggtcctaggagatggtggaagcactcgccttggtcctgtgcttgtgggagacttggcggggaggaggcagcagacactggagatgacattcttccacacgagacggggcttcagccgggcatggtccctctcaggtatctcctggaggaaggggtataggaggggcaggtgtgggagagtgggggtagtcccggcccaccagtgacaggctatgaccattgcatacaacctctcacc

SEQ ID NO: 525527 - DNA, 474 bp, Homo sapiens
gacctctagctcggtaccctaacttatattataacatgatgtacgtataaaactatcatttttaaccacgccaatgattaaaatcattgtcagttctaagcctgtaagtgggaaaggaaatgagtgttttctaaacctttaaccccatcaaatgcatgatattattgtggaaatacttttttagagcccaagtgcagttcgaccatacccgtcgtaccgctcctggacaatatattttagaggtaagtaaaaaaaggtcattaaccccccctcccctcggataattcctagcttcaccactatcacaatgttgataataatagccaaaaactcgcctctggatcagccacttatttacgcaatttcaattatttaggtatacctggattacgaaataaattcagccaaaaatgagttattaccataaaattttgcagtacacttgactgaacacaaataaaaatatattattat

SEQ ID NO: 525528 - DNA, 169 bp, Homo sapiens
  misc_feature (45)..(45): n is a, c, g, or t
  misc_feature (73)..(73): n is a, c, g, or t
  misc_feature (137)..(137): n is a, c, g, or t
cagaaaggaggcattgagcaaaaactaggaaaatctgaataaacngtggacctcgcttggttaatatatttanactggtgactcattttaaaactttcccgggcgcgatggctcatgtctgcaatcccagcacttgngaggctgagcgggtggatcacccaggtcagga

SEQ ID NO: 525529 - DNA, 321 bp, Homo sapiens
  misc_feature (189)..(189): n is a, c, g, or t
caggaaaagggggtcccccctttttttaaagccctttggttgcattttattttatttttttaaaagtcctttaaaaaggccagtcaggaaggggatggggccccaaacccagcccccagcatttggaggggccaggccccaaatttttgcttcccgtagttctccaggggtttaacaaaaaaaaagcantggcccttggccagggtcctcccctgccccactccaagggatgggtatggatcgctgggccccaggtttttgcttttgggggtattggaggggcagggtttgggactgaaaaaagttcccttttgggggcca

SEQ ID NO: 525530 - DNA, 305 bp, Homo sapiens
cagctatggacagcgacatagtatgatatttatctcctcccatgatgctgagaggagctcgtattctgatctctgagtgaatcctttgttctctgtttaaaaaatcctaaaaggaaaagggaaaaaaaaaaagaactggtgggggattgtcaaccagcttatctgcgggatggtccagatctgataaatcctgatggaaacgggttatgatccggaattccgtaccatccccattggaatatacatggaatattgtaaaacctacatgagcagatgaaatagacgcattaaatatttttatctat

SEQ ID NO: 525531 - DNA, 121 bp, Homo sapiens
ggccggcaaaccccccctccccggggtttttgggttgcccgaggatggttgggccggaccccgttttaaatttttcccgggcccccgcatggaaattaagcccccccccctgccctgggga

SEQ ID NO: 525532 - DNA, 847 bp, Homo sapiens
  misc_feature (44)..(44): n is a, c, g, or t
  misc_feature (63)..(63): n is a, c, g, or t
  misc_feature (88)..(88): n is a, c, g, or t
  misc_feature (90)..(92): n is a, c, g, or t
  misc_feature (105)..(105): n is a, c, g, or t
  misc_feature (113)..(114): n is a, c, g, or t
  misc_feature (124)..(124): n is a, c, g, or t
  misc_feature (145)..(145): n is a, c, g, or t
  misc_feature (151)..(151): n is a, c, g, or t
  misc_feature (153)..(153): n is a, c, g, or t
  misc_feature (157)..(157): n is a, c, g, or t
  misc_feature (164)..(164): n is a, c, g, or t
  misc_feature (172)..(172): n is a, c, g, or t
  misc_feature (179)..(179): n is a, c, g, or t
  misc_feature (202)..(202): n is a, c, g, or t
  misc_feature (204)..(205): n is a, c, g, or t
  misc_feature (253)..(253): n is a, c, g, or t
  misc_feature (279)..(279): n is a, c, g, or t
  misc_feature (282)..(282): n is a, c, g, or t
  misc_feature (309)..(309): n is a, c, g, or t
  misc_feature (313)..(313): n is a, c, g, or t
  misc_feature (325)..(325): n is a, c, g, or t
  misc_feature (327)..(328): n is a, c, g, or t
  misc_feature (355)..(355): n is a, c, g, or t
  misc_feature (357)..(357): n is a, c, g, or t
  misc_feature (432)..(432): n is a, c, g, or t
  misc_feature (443)..(443): n is a, c, g, or t
  misc_feature (453)..(453): n is a, c, g, or t
  misc_feature (471)..(471): n is a, c, g, or t
  misc_feature (502)..(502): n is a, c, g, or t
  misc_feature (527)..(527): n is a, c, g, or t
  misc_feature (534)..(534): n is a, c, g, or t
  misc_feature (554)..(554): n is a, c, g, or t
  misc_feature (568)..(568): n is a, c, g, or t
  misc_feature (589)..(589): n is a, c, g, or t
  misc_feature (613)..(613): n is a, c, g, or t
  misc_feature (617)..(617): n is a, c, g, or t
  misc_feature (633)..(633): n is a, c, g, or t
  misc_feature (706)..(706): n is a, c, g, or t
  misc_feature (714)..(714): n is a, c, g, or t
  misc_feature (736)..(736): n is a, c, g, or t
  misc_feature (766)..(766): n is a, c, g, or t
  misc_feature (771)..(771): n is a, c, g, or t
  misc_feature (809)..(809): n is a, c, g, or t
tctcccacacgccggtcggcctggcccacctggggtacaccgcnggacccggtcccggcttancccgggcggtggcccccgccccctngnnnggcacccacaccncctcaccnncacccgggtncttacggccccctttttgttnccccgncnctcnccccccnctttgccnccccccnccccctcccacccccgcgccccncnntcctcccctcccggccccacacccccccccccccccccccacccttcncctttcccccaacctccccccccccntcncccccgcccccacccctaccctcctcnaccncgccctcctccncnnccccacctccgtccttctccccctttntnaccccaaccttccctcctcacccaaccccgccttcaactcttccaccccaacctcaccgcccccctccccaaccncctcaacttcncccccatcanaccccttcattcccttcncaccacccgcctccacatctacttcaccctnctgaccgaagggggcggcgagatcnacttccnctgccccctggaaaatcccngctggaacgcccanatcaccctaagcctggtcaanttcaaaaaccagcaggccatccanacantgcgggcccggcagancctcgggaccgggaccctcgtgtcctaaaccaccaggcgcaccatctttccttcatgctacccaccacctcantgctgaanacaaacttcattattccctctngcttgtgggggcacggctgtgctccatgtngcaangtggaaaacataaacgtgtggaggaggcgctggagctntaagaaatggacgaccctcggaggagggcaaaagctac

SEQ ID NO: 525533 - DNA, 955 bp, Homo sapiens
ggcttcaggaatcaccgtgcattgattggcgtgtggccctgcgcttcctctcactgacacttcgtgcccacatgtgagtgtcgaactcagtggccgtgctgtgattataccgctgcatcagcaggctggcatatccatcgtgcatccatgtgggatatcggttgggagtcgagtggatctgctcctggcgatctgctgcgtgccaaactgaccctcgtgttaacatgtctgcccacatagtcgttattccaatacccattgacaaatgttaccattgttcaactgttcaattgtctgctcatatggagtataatctccggtgcacttcattggtctactcaccatacagctatctgtgcaagattcgcatattcccgccactatcaagtggtggcgatgctctttttgcctggagttacgatctgtgtgatgtcccacgtggggtcattcagactagcgcgattggagaaaggctggggctcatttgcagtggaggtgagccaaaagggtcagtcatcatctgccccctctgctgaatgcccccatgttcgtcatgggtgtgaaccatgagaagtatgacaagcaggctcaagatcatcagacaatgcctcctgcagccagcaagtgcttaggacccctggccaaggtcatcgcatgacaactttggtatcgtggagaggactcatgagcacatgtccatgccatcactagccacccagaagactgtcggatggcccctcccgggaaaccttgtggcgtgatggccgcggggggctctccagaacatcatctctgctctactggcgctgccaaggtgtgggcaggtccttcctgatctgaaacggggaagctcacttcgcattggcttccgtgtcccactggcacctgtctggtggacctggacttcgttaaaaacctgcatattgtgaatcaacgtggtaacagcttgaagcct

SEQ ID NO: 525534 - DNA, 926 bp, Homo sapiens
ggatttcgctatgttggccaggctggtctcaaactcctgagcttgtgatccacctgcctcggcctcccagagtgctgggattgcaggcgtgagccactgaagcccgagagtaaataatataatactgctataaaatcttctataaataaaatctataaatttcaacttatgtacaatcggtcgatccgtgcttggctctgttacgcagtgctacagccctgatggcgagttacccccagcctctcattcctatgttctacaatgcataggaagaccacacatactgattgagcttagcttactctgcctaccccaaaatccactgactgttcctggaacaaacactgagtccaggtggtacagctatctaatttcactggtcacacacctctacaggtgagtacagagcactgtcattggcaacaaatgtgcttgctcatctatcaggccaccacaccttacatcacatagcatcgcaaccttacccattctgccctatcatagtacaggaaaggtccttacctatccaccggcaccactcccctctatgcactgctgtccaccatctcaatcttgcctcacaaggacctcccgagactatgctgccaaccgctccacatgtccaccgcccggaccggccagaccgagcccgggcacgcgcaaaacagcgagcatcacgacaatatcctaccccgtcaaccccgcggggccgccaacaggggaaccacgcatgacccaccaacaactagggcagaccacagccgacaacccaacaaagccaacgcgaccggccccccgaactatgcgcaaacacacggacaaaagacaccgcccgggacccaccgaccacgacagccgcacgcagcgaacaaccaccacagccccctcacgcaagacacgacaaagcacaccaatacgcacacaaa

SEQ ID NO: 525535 - DNA, 377 bp, Homo sapiens
cacgaggcgcctcgcagtctcgacaaagtcgcgcttgacccgctcgaggccggcgcggtccagcgccaccggggcgacttcgctcggggcatgcggcaccgcggagggcgcctcggtctgccagccctcgggctcgtcgggacgaatctgcgcgccgccatcccagggcgcgcggctcgaggccttgcggcccgcatgcgcgatctgcatcgcgacctggatcggcgaataggcgcgcacggccttcagcacgcgggccagcgccgcttcgttgtcgtccgagtacaggccgaggtcgtaaggcgtgatccgtccctgcggcgagaccgcggtcgcttcgagaatcagcatgccggcaccggacagcgcgagatgcc

SEQ ID NO: 525536 - DNA, 443 bp, Homo sapiens
cggcggggtcagtgcagagccgcggagggcacacatgaaccctggcacgcagcctcagggaggggcaggctggaaatgaccctgcctgcagctgggccatcagcctgaccacctgccccctgagcaaacgttgatgcaggtcgggcgcggtggctcatgcctgtaatcccagcactttaggagcccgaggcaggtggatcacctgaggttaggcgttcacgaccagcctggccaacatggtgaaacaccgtcgctactaaaaatacaaaaactagccaggcgatggtaatggggtgcacctgtagtccagctactcgggaggctgaggcccaagaatcgcttgaacccaggaggcggagcttgcagtgagcggagatcaccactccagcctgggtgacagagtgagactccatctcaaaaaaattaattaaagaaaaaacgct

SEQ ID NO: 525537 - DNA, 885 bp, Homo sapiens
  misc_feature (278)..(278): n is a, c, g, or t
  misc_feature (629)..(629): n is a, c, g, or t
tggtggtggcggcagctggagcccaacggggctgcgccttcttcgccgtgggcccggctcggatgcccccaccccaggcctcaccggcccagtcgctgaggctgcctcaccggaaacactgaggccgtaattccaaggcatacttgtccttgcttcgccgagcgggtcgcagcactccaagtcggtagccctactggaagtcccatgatcagtcacgacaaggctggcatgcctaagacttcacgcctgccttgtacccatggtgaaagtaaacaggnctcatgttgctgcacgacaaagcctgtttgggtggtctcttccctacctggtacgcgccgatgtacagatgcacgtgtatgctactaacattcagtaccagattactcagagcttgtggctttcgggtcagagtcataacttgtgaagtgacaggacatcctagtggagacggacgaatcattatctttgcttcatctaattagctttttgcatacaagatcagaccaattttgccttaaagttgtttgctatcagcaattgtagtaccaggatacgcactgacagtctaggtgagacacactagggacgtggttaggcgttggcgtgatcgaactaccaggctacaggcngccgtgaacaggccaagttgcaggggccagtacgacggaagtcaatttccatgtaagtcctggctttagcaaggtttgtgagtgccgctagttctcgcattgatccggacgaaaagatttgtcttaatgaaaaggacgcaatctcctaaggctttgaggtactctaattgttagtattagatactacttagaagaagaagagttgggacgcatgaacaatagaatctggttgtcttaagatatgtttctagaatat

SEQ ID NO: 525538 - DNA, 495 bp, Homo sapiens
gcaggaggactgcttgaggccaggagttagagaccagcttgggcaatatagcaagactctttctacaaaaaaaaaaaaaaaatttaacaggttaaaaaactacacctggagtaaaagattagggggaaatcattggagaattaaacgaggcaagaaagacttaagaacattggcgttctgatattataaaagaaaactatcactttttagcggccctttcttcccgatacttccacttcttgccctgtccacggggatctttggcgatcctggggggtttggctccacgattttctgcaccctcttctttttctctgatacgcgggcggggtcatctcacgcatttatatactatttgtgcggaggagaaacccgtgaggggaggacccggtgggaggcaccgtgggcgccatttgggaacctgcacctgcacggggagaataatcacagctgtgggccgaaaaaccctttacacccttgtggcgctatcacagg

SEQ ID NO: 525539 - DNA, 267 bp, Homo sapiens
gttatgagcttttttacataacacgacttgttgtgttgattattttttaaagtatgcattttatcacagtttttgattgtaattatagaatacatttgactaaacctaacaaactggtatttaaatagtattttatttaaaatgctgtttttaggcctggtgcactagttcatgcttgtaataccaacagtttgggaggccaaggcaggaagatcacttgaggtgaggagtcgagaccagcctgggcaacataacacccatctctac

SEQ ID NO: 525540 - DNA, 193 bp, Homo sapiens
tgagaccaaggagagctctgaagagcctccctaaaaagagagccaggacaccccacatttacacgtgagtttggatgatggatttcgatggaggaacccacatccccgcataggtcactgtggtggccatctaaccactattgaatgggtccagctgatgggcactactctctaatggcctgagggtagaaga

SEQ ID NO: 525541 - DNA, 197 bp, Homo sapiens
cacctatagtccaggtactcgggaggctgcgggcggcgaatggcgtgaaccttggaggcggagcttgccgtgagctgagatcgcgcgactgcactccagcctggtgtgacagagcgatcctctatgtcaaaaaaatcaatagataccctacaatagtgcacagatcatccacaaagcctcatccagacccagcattg

SEQ ID NO: 525542 - DNA, 231 bp, Homo sapiens
gcgcgagagtgttagcagcacatatcgtatacccagacttgcggtgttatggtccttcggcgatatagcagtgtaggaggctcggcgtgtgcagcaacaatctatcgtccactgggacctgacttgaagaagtgtatggggtctcggcgtgtgcatgcacacgccgagtatccaaacttcttaaggtccgatggacgaagttgttgcaggtcacagtggacgaagttgttg

SEQ ID NO: 525543 - DNA, 594 bp, Homo sapiens
aaaggccataccagggctccacaccccccctgcccaaaaaggcctggaatcggggatatcccatttatcacccagaaggtttttttcttggcaggatttttttgagctttttaccattccagctaagcccctaccccccaattaggagggcattggcccccaacaggaatcaccccgttaaatcccctagaagtcccattcttaaacacatcggtattactggcatcaggagtatcaatcccctgggctccccatagtttaatagaaaacacccgaaaccaaataattcaagcccggcttattacaattttagggggtttttattttaccctcccacaagcctcagaggatttggagtttcccttccccatttccgagggaatttaggggctaaacattttttgaagccacaggcttcccgggatttcaggtcattatggggtcaactttcctcacaatttgtttcatccgccaaataaaatttccctttacatccaaacatcactttggttttgaagcccccgcctgaaacgggcattttgtaaatggggtttgactatttttgtatgtctccatctattgatgagggtttta

SEQ ID NO: 525544 - DNA, 129 bp, Homo sapiens
gagacagggacagacgtaggccaagagaggggaacagagaggaaccagaggggagagacagagacagacaagacagtggattgataacttgaacgacgaacagacatgagactaacttactaacaacca

SEQ ID NO: 525545 - DNA, 281 bp, Homo sapiens
aggagccctgctctcgcaactcaagatggcggacgagagtgagacagcagtgaagccgccggcacctccgctgccgcagatgatggaagggaacgggaacggccatgagcactgcagcgattgcgagaatgaggaggacaacagctacaaccggggtggtttgagtccagccaatgacactggagccaaaaagaagaaaaagaaacaaaaaaagaagaaagaaaaaggcagtgagacagattcagcccaggatcagcctgtgaagatgaactctttgccag

SEQ ID NO: 525546 - DNA, 315 bp, Homo sapiens
atgatgagatcaaagaaatatgtctaatgtaagtcacaacacaaagattcagagatatacatgtgaacttgatctacaagtacaccgatccatagtgtggttcaatagactattcctaggggacgtaaaaagatctgggataaaaccagactgaaaggaatgctccagaagagatgctcattgagtgtacataaacaccacccatgtcttttgtatttatttacacctttaaatcccccacagcaaatagaaaataatttatcatcacttgtacaattcaactgaagccttgactaataacctgacctgtgaacc

SEQ ID NO: 525547 - DNA, 127 bp, Homo sapiens
ttttccccggggggccccccccctttgggggcccccgggttttttttcccccccccccccccccccccccggggttttttttgggtaaggggggggggggaggaaaaaaaaaaggggttttttgcca

SEQ ID NO: 525548 - DNA, 184 bp, Homo sapiens
aggagccctgctctcgcaactcaagatggcggacgagagtgagacagcagtgaagccgccggcacctccgctgccgcagatgatggaagggaacgggaacggccatgagcactgcagcgattgcgagaatgaggaggacaacagctacaaccggggatgaactctttgccagcagagaggatcc

SEQ ID NO: 525549 - DNA, 146 bp, Homo sapiens
agactcacagctagcaggctcacaggagtggcaggagcattgggagagtgggaggcagcacacgggtccgctcttccacgaaaacagagaaacggggacagctctacgagcgggagtagcgggcacagacgaacagagaaggaaag

SEQ ID NO: 525550 - DNA, 1432 bp, Homo sapiens
gcattttgcgtgtgacctgagaaggttctcgatactggagtagtatgtgattatccgtcgtaacttaccggaaatacttagcagctaaatgatctctgagatactcgttaggatgtccttagctatactgtaatagtaggagtgatgataccttatagatgccattgcatcatagcaataccgatgttacgttggtcatcagagtctgtgcacttgcatatgtgcattcagatacatctatgtaactggctaccactggtgaactgtgcatcttatctgcataaatatctcacagtagagtacctaggggaagaacgtcgttactagctcggacagacttcgtgtcaagtatgttgtagcccaatatagtgataaaccacattgtatgaattggttcaggtgttaaaatattcgcgtccagagcgaaagatatctagtgtcactaggtaaggccgtggtggtgaattggaataggttttgaaggcgtagacgttggggctaatttggagaatgattgaaatttccctataatgtggtcttgggtccaggtcttgctaaattacgcttagggaaaagcttatctaattaaaatctaggaaattaaggaggcgaggacgcgtctccggggaggaaagacttaggggtaaatgcggtaatgacctgagaggatctaattgttgtgaaccccgccgaaggtgctggtggaaccctaactccgagggcagcgttcggttcccaccagaggtatgaggcccagtcctttggtaattgtctttgaaagcctgtaacacaataaactccaaattggcccgccttggtgtgcttaaacagacgaaaaaattttcttcccttcagtgtggcgcccctaattggttgcgcaacccaatttgtgcccaattcccacaaatggcaaaccaaacccaaaagggggggaaggccttcaacccttcacaagggtggaggggttcacggagcttcgttgggctgggacgttggcttttggggcttccggcggacaaacgacgttcacttgtgcggcaaatttgccggttggggcaccccagtttttcccccggtgaaaaacaccccccaatggggagagaggcgtccagtttgcactgtgaagtacatggataacgtttctttaagcagggaagaaattcccttggagggacggacttttggcccaccacagtaacaggagagcccagtggcactggccttgctcttggcagaaaaggcggcaagtgttgaccccaaactgggaagcgggaacattctcacaggggggtcaaaattgtgggccactgtgcgtccccgggcatagcccagtaactattacacgtggtgcttaacttcaagcctgtatggtgttggatcgaactggtctgtgcacggggcgtcgtataatcgagagctgtcgctccctcgg

SEQ ID NO: 525551 - DNA, 285 bp, Homo sapiens
acactgactgtatacatgacacagctgtcctcaaaaatgctctcaagagaggacagcaggttcatgttgatagtatgtctcttaatagagggcagcgtggctagtaatttcaaagatgcttcataacgattggtgacaaaatattaagtgtaaatctgtaaataatgagatggcatttcaatagtaattaacaagcattgataaaatgaatttaaaattaatctcaaacatactctatgaatgtaaaaacttttgtgatattctcaggatacagtagggagaggc

SEQ ID NO: 525552 - DNA, 1287 bp, Homo sapiens
gaatcaccatggcaggctgggaccctgatacactgtatcctgaaaactggagtggccttcaaggctctcatcgcatgctcatgtacatgctggggctcatgtgtcctgctgtgctctcctgcaccaccccacttccatttttggccaaaccaacctgcacccctgaatttctccgacaaatttcctgcctggcaatggtcccagcattatgacgtggttgattgactgtgacttcttgatgatgatatttgacgacgcaaactgccactattgccatactacttgtgacgcaccatgacgtgatgccttgcgtggggacactgtaactcacagactggacacgcacgcccagctgtgtgttgcacgttgtgtgtagatgctatttgcattgattcctagataataagattgccacccatgaccacgtacacctgtgtgatggttccccacaacctatggggcactcactgccactcacaaaacacaaccatgtgccacttgatgaaattgcaacaagggacgggaccgctcgacgggctgaacttcctaggcgagctggctgggactcgcctatacctctgacacgaccgaacggccctttcaactgcgctgcgggacgcaaccgacaatgaacatatggggattgaccactctagcacaatttgctcttggctaaccacaatgatagcaagggcatcctaattaaagccagtgtatcttaccacagccctacctttaaccatgcacaaagtggcctaacccaccaataaccaaaccaggctgggtatccctcaacactggcattaaacccaagcacccaaagattcctggggctgggtccaagcgggcgcgcacgcggacaacatggcgctgacacaacgaacaggagccccagaacgggactgcctaacaacgcttgccccacaaaacccaacccatacaaccagggaccaccgcaaccggcaaccacgacaaggcgtccaccgggaacacagaacaccccaccagccccaagacacggcgcgcacagcggacgctagcacacagcgagagaggccccaggccccgggcagccaacctggcgacacgagccaagagacagcatgcagacccacggcaagaacccaaggacacccgaccacagaccaagcgcagagcgaacaccgaaaccccacagagcaagcacctgggcagcgcaacagaggagacaagaaaaggagggccagggaccaaaactccaaggagtagacgcaacaccaatacaggcacccgagacagcacacgaac

SEQ ID NO: 525553 - DNA, 272 bp, Homo sapiens
gacagggtcttgctctgttgcccaggtagtacagctgcgaccacaactcagtgcagcctcaaactcctgggctcaaacaatcctcgtgtcagccgcccgaatgaatagctgggactacagatgcacgccaccatatttggccaatttttttttttgaaacggagttttgctcttattgcccaggccggaacgcaatggtgcggtcttggctcactacaacttctgcttcctgggttcaagcaattgtcccgcctcagcctcccaagtaggtc

SEQ ID NO: 525554 - DNA, 125 bp, Homo sapiens
gcattgagccctgtgatgcttcacgatatatcacctttagtgtcactggtctcccaacccctcgtctcctctctggtccaaaacgccatcatcttttggtccaacaggtgctagctgatcttcct

SEQ ID NO: 525555 - DNA, 207 bp, Homo sapiens
agaggcatggagatccatgagataatgacgccgagaacgatggcacacgtcactgcacatcatgaagataataggagaccaagttagtgaggtagagcagggaaccgatctctccatgtcagcttcactttgtcagtactctttgtatctggactctttcttcagagacttctccaagactctggcttcgtattcagctctaggata

SEQ ID NO: 525556 - DNA, 297 bp, Homo sapiens
  misc_feature (121)..(121): n is a, c, g, or t
gaaaaaaaatgggaccccctggggttttttggggaaatattgggttttttcccttcccaaccccatatataataaaaattttggcctaaaaaataattttctgtggttttccccgggcctnattttatttggttttccctaataaaaggcccctttccaacccgtttaaatccccccaaaataaatgggggtggggccaaaattaaactaagggtgtttcccccccccggcccccattaattttggggaataaccccttgggcccctttaagccctggccgggtttaaaccccccca

SEQ ID NO: 525557 - DNA, 239 bp, Homo sapiens
gcgtatacttaacttgccccttgagatgaaatgaaataatacattaaaaaatacattgaatctccaatatatgcttataatacaagttatgctctttgcagatcttacttttctgttacttgcatattctactttttattcataattgaactgcaaaactagtaggccatgtcggagaacagtgacatacacttgaacagttggacttatggctagcagcctcactcttcactaactgc

SEQ ID NO: 525558 - DNA, 1318 bp, Homo sapiens
ggtgggtcctttgccaccgtcgaccccgtggtggtgtagtgtccgccgcggctccacctctgttgctggggggaagatgtcttgtcgcgcatgggggtttgtggggttgttgtgggtgtgtcaccacccctgtgcaaggtgatgttgtgtgggtgaggtttgttccgtgaggggacgtcacctccggcgcccgtccgcgatgcacccacgacaccaacgtcgtggtgtgttctgataatcccgcccccgcgtggcgttgcgtgtgttcgtcgtgtgagtagttgtcacgccgcgataatgattatttgagaccttggtgggcgctacattgggtgtgtgtcgcttgttgtgtgttgtccccggctgtgtgggataatggtccaccgcagagcgtggatgcctttcggtcggggtgagagtcgcgttgtgagggtcgcctccggagtgcatgaggaggatgaataaccgcagacatgtgtgggtggataaaccacccccaagcacggtgatgatgcgcagccggagaatgaagttgttttgctccaccagcagtgggttgtctgcctccgactaaagaggactgcctctattacacagcccacaaggtgcgtgacaacattgcccaccagcgcgccctcatgtggaggtgggcaacacacagaatagtgagtagaactccccctccgtgtggtgctccactatatatgagtttgaggagtgttgtggagttgcacatagtgttgcggcacgctattttcttgtggagaggggcgtctgctcagatagtgcaccacacgtaacaagagatatacttctgtagtgtgtgtgccacgccagaggcccatataaggcgccacacgccacatggggcgtttgacacacaacgtgtttgagtgtatatatatagagggcgtgccaaatatatatgtgtgtgtatgtacccttgagactctgcgttatatatacgcactaggtgccgatatagagggaagatggcgatatagtattggctgtgctacgccaaagtggagactgtggagatcttcccaggaccagagggagaaagatgcttggatgcccaaatgagacaccagattggtgttattcgccaggtgatccaccagcccttaaagaaattgatcgttgtgttcgccaaaagaaattttataatgatttacccgtctccacgtgtgttaatgtttccaacgtgtatcataaagggtataattgtgtaaccaaatggtctaccatgaatcttttggtatttgtaaaaaaaagaaaatatctcgagcatgtactcggggcgaatagagtagag

SEQ ID NO: 525559 - DNA, 145 bp, Homo sapiens
ttgggctcgttgggggcagtgtagcagcagggtgcattgcatgtcatcaggcccatcccacgctggctgcacagcccccaagtcagtcagtgtgccatgttctatgcacagcatgttgctgcccacagcagtccctgcattttgt

SEQ ID NO: 525560 - DNA, 266 bp, Homo sapiens
  misc_feature (6)..(6): n is a, c, g, or t
gcggtnagagagagacagaggggaagggagagagagacagagaggggccgggagaaattgacagagaggggaagggcgagagagacagagaggggaagggagagagagaccgggagagatctagaaagataaagagaggggccgggcacggtggctcacacctgtaattccagcactttgagaggatgaggcaggtggatcgcctgaggtcaggagttcgagagcagcctgttttactagtgaaaacctgtctctactaaaaatac

SEQ ID NO: 525561 - DNA, 122 bp, Homo sapiens
tcctccccgactagcccgacagcactcccagcctgactcggtggcgggcttccttcagtgactttgcgcaagtcagttctgctcattgggtctcaactttccccgatcccttgtgatgggag

SEQ ID NO: 525562 - DNA, 744 bp, Homo sapiens
accactctcacttctagagaatacgtagtatatcgctcacgcctcatatcctccctactatgcctagaaggaataatactatcgctgttcattatagctactctcataaccctcaacacccactccctcttacgccatatagtttgtgcctattgcgcagtactagtctttgccgcctgcgaagcagcggtgggcctagccctactagtctcaatctccatgcacatatggcctagactgacgtacagtaagcctaaacctactccaagtgcgtaaagactagatcgtggccgaacagattatattactagccactgacatgactttccagaaaaacacagtaatttggagatcaagcagcaacgcacccacgagcctaacttattagcatcatccctctactatttgcataaccaaatcaagcaagcaacctatttagcctgttgccccaacgcttttcctccgagccgccctaacaaaccccgcctcgctaatgactaactacctgactcctaccccgtccacaatcatggcaagccaacgccgacttatccagtgaagccgactatctacgaaaaaagactcatagcctctctatactaatctccctacagaatctccttattatacattgcagggcacagaacttccccgtggactatctcttcgaaaccacattatcccacagggtattaaaccgagaggcccagcagaggctgacgagggttctcctttctccccaat

SEQ ID NO: 525563 - DNA, 444 bp, Homo sapiens
aacatcaaagcatatgcaggcaaagggcagttactgggcttctgggctgcttagtccctggctgggcaggaagggtagggaagatggatggggctcattgtttggcattgatgatgtccacgaagttcgtgacttgagaggaagcatcacgcacaagcgaagccatccacatcacggctggctggccagactccttgcacggttgccccacgtcacagagcgctccataaactgatagcgggtgctctagagccaccagcatcagagatcgttggacttcagcacatcctcaggagcttctcgctgtacttcctgggcactgttgggcgtgttgcacgtcttgccaagtaccaactggcccacacatggctcataggccagtgacgaccttgctccagtccttcacgttatctgcgatgacctttgtctgctcgaaaacaacct

SEQ ID NO: 525564 - DNA, 115 bp, Homo sapiens
cgccgtggtgcacaactactccgcggtggtgctgggcacgacggcgaactccagcaccttccggcccagcgccttggagatgcccttgcctcggaaacgtgagtccacagacatc

SEQ ID NO: 525565 - DNA, 450 bp, Homo sapiens
cttactcctgccattttcttatttgttttctggttgttctgcgggcttgtcttctttccttccttcccgtcggggattttctcttgtggtatgttttaatttctttttattttttgtgtatccgttgtatgttttttgatttgaggttaccatgaggcttgcaaataatataacccattattgtaaactgatgacaatttaacacttattgcattaaaaaacgagcaaaaactagtaaaaactctacagttccacttcatccccctgatttctctttgttgtttccatgtatatcttattgtattacatcttaagaagatatttttaattggtttgtcatttaaagaataaactacataagatatgaggactttaacagcataatacagcgttataatattctgtttttctatgtacttagtattaccagtaagttttgtaccttcagat

SEQ ID NO: 525566 - DNA, 833 bp, Homo sapiens
tgaggtggtgtgtacctgtagtcacaggtacttgggaggctgaggtgggaggatcacttgagccccggaggtcgaggctacagtgagccaagagtgcactactgtactccagccagggcaagagagcgagaccctgtctcaataaataaataaataaataaataaataaataaataaataaataaaaacaaagttgattaagaaaggaagtataggctaggcacagtggtcacacctgtaatccttgcattttggaaggctgaggcaggaggatcactttaggcctggtgtgttcaagaccagcctggtcaacatagtgagacactgtctcttccttaatttggagggttaggggacagtgatctaaattgggtaggaaaattgagtaggatgtaattatgttctaagtgacttccaagttcaaaagttaattggaaatgtgacgagtgtggtaaacgaaaataccgttaggaggacaaaaggaatgtgtaagtcttttaattgccgaatatcttgcagaaaaaagctaagcaaacttacagggtcctgttgaagatggcagaagtctggagaaggaaaatcatgatataggttggcatttgtggaagatcttacatgtctaggagaacacgtgtggttctattaccattatggataaagatgagaatgttatagagaatggttctaactgggtgcaagaaattaggagcgaaggaattccggatctggttgggtaaggaatgatggcaaagattgatggatgggtttgggttgatcctcaattattgttgctggtccttttatggtgacggtttgagggaggagtgattggg

SEQ ID NO: 525567 - DNA, 104 bp, Homo sapiens
tcactctagagtgatcccctctctccacactgggggaggggtgtgtgtttgggcagtgagcaagccggcaagagaatgtgagtgggcggccagtgtggagagag

SEQ ID NO: 525568 - DNA, 388 bp, Homo sapiens
  misc_feature (111)..(112): n is a, c, g, or t
  misc_feature (115)..(115): n is a, c, g, or t
  misc_feature (126)..(126): n is a, c, g, or t
  misc_feature (255)..(255): n is a, c, g, or t
  misc_feature (329)..(329): n is a, c, g, or t
  misc_feature (383)..(383): n is a, c, g, or t
aagaactctgctaagtcagtttggcaagaagcctccatccccccatatctgatcagggtcctcagcctccgccacccccaggcgatgtctgcttaccttgcctgccttcannacncttccttttanctgggtagggtcctcagcttccaccacccccaggcgacagtctgctcaccctggctgcccgcagcaagattcctgttatctgggtagagtcctcagcctccgccacccccaaggcgatgtctgctcacnttgcatgccttaagcaagattcctgttacctgggtagaagtcctcagcctctgctacccacaggcaatgtctgntcaccctgactgccttcaagcaggttttcacttttacctgggtaagggtccttnagttt

SEQ ID NO: 525569 - DNA, 510 bp, Homo sapiens
agtcgacactgcgaacagcgaaggcacattggtagaatccaaatgtgctccctttttacgtggtgacagagatttggctctatgtagcccaggatcgagtgcgatggtgcgatctcggctcattgcaatctctgcctcccaagtacaaggcaattctcctgcctcagcctcccgagatagctgggattacaggcatgtgccaccacgcctggctaatttttttggtatttttcgtagagatggggtttcaccattgttggccagactggtctcaaactcctaacctcaggcaatccatctgccttggcctcccaaagtgctgcgattgtaggcgtgagccattgcacctggcccagatgatttatattcttagccaaattaaagaaatactgacttacgccagttaagtaaatcttacttgaccagttgtagtaattttaagcttgtgtgttacatggaatgtttccatatgaatcctagatttactctatcgcgtgccagaaggaggta

SEQ ID NO: 525570 - DNA, 760 bp, Homo sapiens
  misc_feature (524)..(524): n is a, c, g, or t
  misc_feature (564)..(564): n is a, c, g, or t
  misc_feature (580)..(580): n is a, c, g, or t
  misc_feature (621)..(621): n is a, c, g, or t
  misc_feature (631)..(631): n is a, c, g, or t
aaataagacacagatggatgggatgtccttattgcccattttgagaggtgccagtaacttgacctggcgatcagatgtcctggtggaataccaaggagaaggccgtaacgtcactgacccaacatgcccttccctgagtcctggcgtatctcaatgcttcccagactgtgtatgtgaagatgcttataacaatacctatgcctgtgtgaggacaatgtcagcattgtggaatttgcagtattgcgagtttgattggacccaggaagggtttggtaaaatctctttatccggctgtgcgaaacccgaaacacaatactcatcatacactattgtctaaacccatagacccagagcttttaggaaagatgaactatcggttaatgatgttacagtcctgttctgggccaacctgtcgcactccaggggtttttgaccccggatacaggtttgacccccgtctcatgttcagcaatcgcggcagtgtcaggactcgaagattttccaaacatcttctgtagcgaccncacacagcctctgcagatggatccctgcacgcctctttcngatgaagtgattgtantaggtgtctgtagctagtcttcaagaccacacctggaagantttctgggcnggctttaagtcctgtttgaaaaagcacccagtcagctgacttcctcgtgcaatgtgttaaacatgtgaacacccccccatgtgtcaggagtgctgtctctggtctcattccatttagctgacccaagac

SEQ ID NO: 525571 - DNA, 135 bp, Homo sapiens
aggatccgtgatattcagagagtactggcgctcgattgattcgacgcatcgacggccccggtcgactgctgttgtgctgctgtccggaagcgcacgatcgcacttgactgctacggagatcgcagcatgctgacg

SEQ ID NO: 525572 - DNA, 168 bp, Homo sapiens
catgggggtgggatctgctgacctagaccacttggctccctggcttcacgctactttcaggtgagtgaaaggttctatcttgctggcattccagatgccactagagtacacacacacacacacacacacacacacacacacacacacaaaacaaaacaaaacgaaacg

SEQ ID NO: 525573 - DNA, 1171 bp, Homo sapiens
cctgagtaccccgtcaaactgcaaatcgaccccagcatccagagggtgaggaccgaggagcgcgagacacgatcaggaccctcaatcaataagtttggtctccttcatcgacaaggtgcggtacctgtgagacagtcgaggatactaatggttcttggacgccaacgtgtgaccctgcgtgcatggagcaaaggtcgaccaaggacttgcttgagtgcacgaatcctgcgagcctgtctcgtgctgatgcaagtaaatcgagacaatacactgcaaggagagtcaggactcgagtacatgcctaatcggatgtgtggcgaaactgggggacctgcttggaacatcacgagtcgtgatgaaaactattgacaggacactgtggtggtagaggattgcaaggacacaagtagtgatggactgacaagtcaaacaatgacgttaacgactggactgacgaacttgagtatatggtgagttgcttgcaatgcaagagatagtacggatggctaggcggtacaatgaaacagaggtgagacccttgaggaggccgaacggtgttgattgcacctgaatgcgatgaggtaattacatcttcattgaaggatgctactttatgatgtgcgagaagcgtagatcccaatgatcgctgtgactgcaatgtcctctgatcgatccatctaagtggttcctctatctcagtggaacaagcaaatcggtataggcttgtgacctgggataagtccatcattcgtcttgaggtatacatggtcctcgaagtatgcatggaggagttgtcccaaaccgccatgcggtgattagtaacgtccggagtgctggtaatcagagccaaggtaattgaggcagctgcaggcagaacatgcgttgggccggttaatggccgagtgaactcacggaaacaccaaaggcattgagatctctgagaatgaaacccggatgaatccaggaaggctggagaagcccgagattggaccaatgtcagggaaaacagtaggcgccagatctggcaagaaacggccgattgggggttgccgaagcagcgtgggggaagctgggcctcaagggatgccaggaaacaggtgggcgaagctggaggaggccctgaaaagggcaccaagacatggccgggtgtgagtgaaaaccggagccctgg

SEQ ID NO: 525574 - DNA, 942 bp, Homo sapiens
  misc_feature (14)..(14): n is a, c, g, or t
gaagcttctactcncataattagcatctctcaggattaaaattcgttagtcgtcccgtcagaggctcctgtcaccacactttgtgacccctctcactgacaagaacatgctcttttgacacaacctctcgtgtgttaagacccccctgttaactctaggcccccctctatattttgtcgttccccttagagggttgattcatccccatccttgtagccgcgctttctcccacgtgccgggacgcgtgatctccttctacaggcagcaccgcatcccttatgtaccctccccgtactttctgtacgtgtcaactcggccggcgtaattgtgcaacagatctatcggaagaccccccgtggtgttccatcttaaagaagggtcttcagaaaaggtcattttttcttctaaaatccccttaaggccctctcggttgtccttccacaaagtagcccatgaagaggccactcactcaacagggtttttcaaaaaactgaccatttcctctttctccaaatacttctttcccatccaacagatttgtagtagatatatccccagtattttacactcctcgcctaagtattcgttatcaagggcttcactgccattccccattcatttagccacgcacacgtaacctctaccatttattttgagccacttactcacactcgtagactgtttccgaacgcctctaaagagtacctcacaaggaactctccccctcttgcgcgaacttgagaagctccaccaccggaaatttggcatatgatcaatccccacgtaaaaaaatctgcgtcattcgcggaggatgcatacaatagaatattctgttagggtaataaattctaaaataacaatagaaattcaaagatcactccttttaaaaacagacaaattttttggtttaaaaaaaacgctaccccaaccaacaacaaaaca

SEQ ID NO: 525575 - DNA, 281 bp, Homo sapiens
ggcagattgattttccctctttccggggaattcctaagtaattaaaaataaataagttccaaaaaaaattgtagctggaattttaaaaacaattgggagtggctgtttgagttgccccccccatgtccttagttttaatttgtgcccccttattaactcccagcagggttattgaaggggttcatttcaaatttagttgatttttcccccaaaggcatgtcatgtattttcaaaagggtgtattcccaccagtcaataaatgaacccccgtaaaaactcca

SEQ ID NO: 525576 - DNA, 212 bp, Homo sapiens
gcccgagcggcatgtgcgcggcggcattacctcggtcgtcggagtcgcactgctgattgagctcccgctggctgcgattgacggcgtcgtgcactgtcgacgtagtccagcccgtgacggtaggtgtgccggagatcagcctggcagggccccgtttctagagggcccgtccccagcccgggccgtccatcctcgcattgcttgttccgctg

SEQ ID NO: 525577 - DNA, 364 bp, Homo sapiens
cgtcagggagtttgagaccaccctgtgcaatgaagcgagacacccatttcttgaaaaacttaaaaaaaaaaaaaattagctatggcatgggggcatttgcctataatcccagctacttagggggctgaaaagggaaaaacccttgagccccaagaggttaaggctgcagggaactatgatcatgccactggactccaacctgggcaacaaaacaagaccctgttttttaaaaaaaaagaggaaaaacatcactggttttagatcaccctaaccgcttttattataatgatgaaaaagtttgaaatactgggtgaattaccaaaatgggaccaaaacccaaattgtgcccaggctgttggaaaaa

SEQ ID NO: 525578 - DNA, 239 bp, Homo sapiens
gttcgttgggcgggtgctgtgtttttcgctcgtcgactgcggctcttcctcgggcagcggaaggccgcggcggtgggaagaagtggcctaaaaccttccgccgttgggtgaaaagaaaatggcccgacccaggaaagacttttcgtaagtccaccggtgggaaagccccccgcaaacaatctggccaaagaaagccgccaggaaaagcgtctccctctaccgcgcggggtgagagaagc

SEQ ID NO: 525579 - DNA, 619 bp, Homo sapiens
gatgctttttcggttgggaaatataccccctacatattccacaccaacggtttttttcttcgaaaaaaatctccctcttgggtcttaaaaacaacattacgtcaatcttgtacgcttgaatattacttctaagcaactacaaatcactatgtctatcgtctctctctcaaccacactactttaattcctccctcccaaccatctcgggcctttttttatgggccctatgatattacacaactattttatttcgttccctgaaatattaagccccgagagaatggtctagagtgataactctcacggagacggccacgcactgcattctttcaaaattggttctgcattttacccacccatctcttgtataagatcctctgcatatgtgtgtgtgtgtgtgtgtgtgtgtgtctgtattattaataaagatgtaaactgcaggctgcactgaagacaaaatatatggctatgggaattattcactgaatagataagcacttccctagaattttacgaagccaaaatgccatgcaatttatgttacagaaattgtgtgaataggattttctcttttctttcttgatggcaataaataaactggaaagttgtcttttccttt

SEQ ID NO: 525580 - DNA, 294 bp, Homo sapiens
caacttcaagccaaatatctctagtaaaccacggaaactctgatatggactggttcgactaaaagcacaagaataaggaccctgctatgaattgacgcacaaccataaaacagactcagttaaccaagacacttgttcaaaaagggaaacaagtacagagactgattaactgggtgaacaaggcaagtaacaatatagttaaaaacctgctggacccaaggacagaagatacattccttataccagaatagttaagttcctgaaagtccttacccactctgctcccttactgta

SEQ ID NO: 525581 - DNA, 183 bp, Homo sapiens
agagaataggcgatatgacggctgtagaggtcaggggaggagtacatatcgactcgtatcatgtaataacacggacaataaatctcccaccatacacactgggggctgtatatgaggcaatttttgggaaggccaaaggggaggtatacgccgcgagatacaaagcctgggaaggtggagaga

SEQ ID NO: 525582 - DNA, 223 bp, Homo sapiens
  misc_feature (141)..(141): n is a, c, g, or t
tacttaagaccagctccacagagattatatcaataggctattctattaagatatgcatcagtagcgtaacttcaaacagaaacacaggccaatgagtctgctgaggtggtgattgctgaggtcagaatcacgacagctgancacatggtgaacccgtctctactaaaaatacaaaattagctgggcatgtggcggaagcctgtaatcccagcactttggaagg

SEQ ID NO: 525583 - DNA, 372 bp, Homo sapiens
  misc_feature (118)..(118): n is a, c, g, or t
  misc_feature (121)..(121): n is a, c, g, or t
taccggggccgacgtgatgtcgcttttttggggccccgcccccctcctggttttagaataactttggggggggggggggccccccccccctgctcccgctcccccctgcccggggtgntgntttgggccttctgtcaaaaccctggtgggggaggtgtgggccccccttaaccccgaggaacaggggggtttccctgggttttcggaaaaccccttatgggggggggccgccccccccccctgtttcaaggggggggggggggggggggccagcaaagcctccccccccctgggcaaaaacttttttttgttttttaacccccccggccccctttccccttgggaaaaagggggttttttaaacccgcggga

SEQ ID NO: 525584 - DNA, 450 bp, Homo sapiens
agtattaatgagagtgtcaatgccgtgttccctctgacacctgcttgtcttcccagctgcacatgggctcatgggagtcctgtgatcacttggacagtgaagataaaataaggtcctgttcacagatggtcctgcaccatatgcaggcaccaccggcaagtgcacagctgcagcactaccgtccctttctaggacatccctgaagaacagcagtgaaggaacatcttctcagtgggcagaacttggagcagtgcatcaggctgtgtgctttgcttagaaagagaaatggctagatgtgtgattatatagattcatgagctgtagccaatggtttggttggatggtcagggacttggaagaagcatcattacaaaattggtgacaaagaaatttggggaagagctctgggcatggacctctttaagtggtcaaaaactgtgaaggcatttg

SEQ ID NO: 525585 - DNA, 1330 bp, Homo sapiens
gcttaggcgcagacggggaagcggagcctacatgccagtggcccggatgactgggtttgtctgcacaacttatgtgaccccgcggaggacccttcgagaatactctcgtctcgacacaagagctgaagctgatctggcagagttatgggctcgggaatcaagacgtgaggtctggagggtcaatatttaccgcgatgtgccaaagatcactgcgaaggaccgtacacaggtgaatctgattgacggctttgaatgagaagggacactcaataggtgtctgttacgatatggcaaggcgccttggtgctagacgtgtcgttggtaccgacataggaggatgctggaatgagaggcaagatgacagctgggattacatacgcttggggactgaaggatagacggatttccttacgagagaacgccatgcaggaaccgcaggctcctctcacagacatgagagccttggagaccaaggttcacaaataccaacacgacagccatcgcatgtgacatagaatcgccggacaagacacgcgcacatattcaaggggttcccagacaaagaccatgtggtgaatggaaaacaattcccggatcgcgttccaatagcggtacacggagcctgggaacttctcccgcaagaaaaagacacagcattatggaagcgttgtactacgttgcgtgacgggccttccttcacaccgataaaacgggggggcacagatcgcgggcccggccacccccgggggaagacgagccagcttcgacaaaggacaggggacaggcacaagtttggacccacgaggaacaaggggcgacccaatgcggggatttggacggagggacaattgtgggaggagcatttagggggagaggaaaacgtagaacagggaaaggcggaacgaggaaaatggagaaactaaaaaaggatttgcgcgaaaacgtttggattaccacagatacatcttgggagttaatttgtgctttggaagaaattatgggttcaggtcaaggatagagaaaacgaacatggggagccaaaaagtcggcagaacacaccaggggcacatccaggggcggacggctaacgaaagaccaacgaagcagcaaaaaacaaaaacacgaagtcaagcaacaacaaaggcagaccaccacaacagaagcaaaagccacaagcacgcaaaaaaaagaaagcagcaacaaacaaacacagaagacagcaggaagcaacgaaggccacacaaacacagaagaacagcatgacaagacgagagggaggagacgcacgcaaaacataaaacacaccgcagcacaagaatcgaaacagcta

SEQ ID NO: 525586 - DNA, 126 bp, Homo sapiens
aaacgagcaaattataaagaatcagttttctaattaaatacaaatagaaagctgtgaggctcctaattcgtggagtatcttattgtaaaaacagttgagatcatcctgaagtgcaatctattaaca

SEQ ID NO: 525587 - DNA, 864 bp, Homo sapiens
ttgggttatttcctagtccacctgatcacgtggcttatgtgcatgtccttttagccgtcatcaatgctcgaacagccaagtctctcacaaatccgcaattgttccagggacaagcccgggcactggagcgctttgttggccatgaaaccgtgggcatctaatcgagggcggggacctgcctgaggagtctgctcaggaacctgtgacgacagcaatccgaaatggagcccttcaagattcctgaggatgacgggaatgacctgacccacagccttcgttcaaccctggaccgggaggagctggctacctgaatgctggggcgagccgcggatgaagacgtggaagcggcgacttgctttatcctcacagacaactgcctgctactacttcgagtacaccacggaacaaggagccccgaggaatgcatccgcactggagaatctgagcatccgagaggtggacgagcccccggtaaacgcgaacatgcgttgaactctgacatcccctacaacaaggggcagctcatcaaagcactgcaaaacagagagcggacggccgaagatggtggagcggaaagccacaatggtgtaccggatctcggcccgcacgcaaggagtgagaaggacgaagtcggatcaagtccatcgcaggtcgcgctagtagatgagtggagccccttgatatgagagtagctggcagtcgagataagaagcggatttcagtgcaagaagaagcaggagcagtcctgaccacagtgccctcaactccattatttattacggaggtgccccgcatgggtggccggactcatgggcataggggctgtggatcatggttacctgttaacaactggcaccttagctc

SEQ ID NO: 525588 - DNA, 324 bp, Homo sapiens
aatgagattagccggcaccagctctgattcctctgttgtttgctgttttattgcctgccctggtcctgacttcctgttacttattaaagctcggtggcgtctgcaatgaatcatagcttctttgatgaaatggacatactccccatcatcaggccgaggttgcgaggaactgtgagtgccgtcctgcattctatacgtccgagaggaacacattgcctttaggccttccctacacatgtgtctaggatactggcattgcactttcgcatttaacacagaaggcgaacgccactttcatcgcaaattgctcaccgtaatttattc

SEQ ID NO: 525589 - DNA, 409 bp, Homo sapiens
agtgctggcagtcttcttctagtcccctcgatcttctccctccttgtgggtggtcgtgatagcgagcagccggtccacggagggcgccttcgctggggcctggtaccggttgggtccagaagccctttggggagaggctggtccttgctgcttgcagacccgctgacgctagcgcaactcggacagaagctgcctcatgctggtggtaatctcagagctcaggagccacaaaaatatgcaaatgtccccagacacagagatgagctgtatacaatcattactaaatttcatgccagtaacaatctctgagtggacaaaaatggtggccaagcaatcgcctgaggagcagtcaaacatggagagatcttgtcagaacagctggtggcaatgtaaatccctaaggggtctt

SEQ ID NO: 525590 - DNA, 920 bp, Homo sapiens
  misc_feature (1)..(1): n is a, c, g, or t
ngctgtacttagttagtgtggtgttggcccaataaatcgccgtgttgttggcgttgccgccaatatctccccaggagtggtgtggccccaacgttttgacccacagggcgtcgtgagaaaacctcgtggtctccccccctctgaatgatgccacgccccgcgggtctgaccagttagggaggtcagctcttgttgttgaaaccccagaagttggttggcagacagggtcgtggtttaacaaacaatgtcttccaacgactgttctcagcccgagatacaccacgcactctactacattgtcgactctcaaaaatattcaacgcgaaatcaattttatgactcgtgcaagaatacttctcctcctcatacgagtcttaacaccacaatggttggttctctataagaatttctctctattcaacaagaatagaggtaattttgtatggtaccattactgtctatacagaacgagtaacaccaccgccgccccaattaatcctccccaagcaatctggcgcgccaaccacgcaatgaaacctagtcatatacgcgcgcgctggtcaacatcctcgctactcgtgtatatgttattaatcaacaaaccagattatttctctccgagtgattcactctctacacaccccaattcttttttggtgcggtctagatcccgctttcctcttgccgtggctctgcaacccgtgctgcccggcttgtctgctatacaagtacaaaacattcgggacgcggggaactttgttaaaacaagagatcattggcgccgaatcgccggtcaaaggcagaagtgcaggtacgcaaaaccgaagcaccgggcgttatatacagcgcgcccggcgagatgtcgagggcagaccagcccgcgtagccacaactccccaaaatcaaacccccacaaaaca

SEQ ID NO: 525591 - DNA, 357 bp, Homo sapiens
  misc_feature (14)..(14): n is a, c, g, or t
  misc_feature (275)..(275): n is a, c, g, or t
  misc_feature (337)..(337): n is a, c, g, or t
tgtggagagtccangagattctacgatggtgcgttggagtaccgcaacacttgctcaacaccgatttcctcaggtgctggattggggcctgacttatccagtcacactctccttcggcaccgaataccgctatgaacagtggaaccagtccctggcattccggcttcgtataacggcatgaccggcggcgcgcagggatttgcagggttttcacctctgaataccgtgcatgccaaccgtaataattacgcactgtatgctgggctagaatggcnatcttagtgagcatctgttctgcaggaattggccgggcggtccaagcactactcctaatttngggcaatcaaacttcaggca

SEQ ID NO: 525592 - DNA, 322 bp, Homo sapiens
tacatgagcagacaaggtcatctgcagataactgtgaaggaatggagcaaggtcgtcctggatcatatgagcctgtgtgggccattggtacttggcaagactgcaacaacaccaacaggcccaggagagtacacgacgaagctccagaggatggattgaagtccacacgtctcatgatgcgtgtggctcagatgcaccctgtatcatttcatggatgtgctcttgtgacttgtgtggcaaacttgcaagggatgcttggccatgccaagcacttgatgttggatgtgcttcacttgatggtgtggttgcttaccctacaatg

SEQ ID NO: 525593 - DNA, 974 bp, Homo sapiens
ggagagaactagtctcgagttttggagttgttgtgtctacagtatacaaagagagtgaatgggctcatccaacggataagtccaggggtaaacctagtttccaggcatgtcgggatctcggggtcaaccagggtcaccaggactggggctctcggtcttcccagcttaccgttcttaaccttcaatgatccagacaatcgctccgatgtgggttggcaagggtgggccggtctggcgtcggtagtcctggttatggtcctgtgacccacaatgactctggttgtccttgggacagccgaaacttctgggaaaagaatggtcttccactatgctggtggtcccacttcatcctggtcttgttcaattcacattttctaaaaggaggcgagaacaactagagaagcgacggtgaggagccaggggccacacttcatttgcacctttaagaacggactgcagagaaaaccaggagggtacgactcagatccccggggccagcagcagggccgcggggccacgaggggataaccgctggtgaggaaaatttaagagagccgctcaggaccttgtagcacgatcctaaaagacctcggaataactcggcctctcccggtaaggggtcccaagcgagatacgggcagcgcctccggtgggccctgggtaaacagcccagaaacccaaaccttggctccgtagatcctcgagagaaacctaggtctcgaagttaccgaacgtgacatgagtcgacatgagacctggagaagacatgacattgatggaggaacaacgcgcgcttttaggaccacaccaagggagagacccccccgggtggtaaaacacacacacgcgggggtctccacacaagccggaggggggaaccccggacggccccgcgggggacaaccttacaaaggggagccggggtacgacaccccaaaggaagaggccgcccggctgcccgggcaagtccacca

SEQ ID NO: 525594 - DNA, 761 bp, Homo sapiens
  misc_feature (3)..(3): n is a, c, g, or t
  misc_feature (72)..(72): n is a, c, g, or t
  misc_feature (88)..(88): n is a, c, g, or t
  misc_feature (137)..(137): n is a, c, g, or t
  misc_feature (142)..(142): n is a, c, g, or t
  misc_feature (183)..(183): n is a, c, g, or t
  misc_feature (188)..(188): n is a, c, g, or t
  misc_feature (199)..(199): n is a, c, g, or t
  misc_feature (201)..(201): n is a, c, g, or t
  misc_feature (212)..(213): n is a, c, g, or t
  misc_feature (237)..(237): n is a, c, g, or t
  misc_feature (241)..(241): n is a, c, g, or t
  misc_feature (249)..(249): n is a, c, g, or t
  misc_feature (258)..(258): n is a, c, g, or t
  misc_feature (263)..(263): n is a, c, g, or t
  misc_feature (273)..(273): n is a, c, g, or t
  misc_feature (284)..(284): n is a, c, g, or t
  misc_feature (288)..(288): n is a, c, g, or t
  misc_feature (297)..(297): n is a, c, g, or t
  misc_feature (306)..(306): n is a, c, g, or t
  misc_feature (311)..(311): n is a, c, g, or t
  misc_feature (321)..(321): n is a, c, g, or t
  misc_feature (328)..(328): n is a, c, g, or t
  misc_feature (332)..(332): n is a, c, g, or t
  misc_feature (335)..(335): n is a, c, g, or t
  misc_feature (359)..(359): n is a, c, g, or t
  misc_feature (428)..(428): n is a, c, g, or t
  misc_feature (433)..(434): n is a, c, g, or t
  misc_feature (449)..(449): n is a, c, g, or t
  misc_feature (453)..(453): n is a, c, g, or t
  misc_feature (737)..(737): n is a, c, g, or t
atntcagtatgctttttgtgtgttgtttcaaaatttgggaagataattagagaatatgatactgatcatggngaaggtaagagtatcnggatgtaaaaattcagtacatggtaataataaataatctaaaattttantaganattaaatatattaataaactgtgaaaatattagggattcanaattnatttaaaattnanagtctaaaatnncttctatgattacaggcttctgtnaaantgattggnatgaaattnaaggntaagtttgtnggtgatttatntatngtttccatntggtgtgtnatttnattttttttnttctttntttnttnttacattgttgggttttggtttantgtaccatcacattcaatattgacagaaaacaacattactagcttatttccaacatgtggcccagcctntttanngataaatcaaatgtntaantttgggcatattttaagaccgagttaaagctcttgggcccaatttatttcgaaagtcactctgagaacattgcactgtgttttgctggaacaaaatcaggaccttttgcattgatgtgacgaggcaatgacgtacgttaggcttagaatgggaatctgttccccatgggtttcctccaaccccacctcatttcctctctcttccgttttctcttgtacatactttcacacacatctcatcccaagctatcctaaggcactttgcttagaagatataaaaattangcaggaacgcacaaagctaagagg

SEQ ID NO: 525595 - DNA, 830 bp, Homo sapiens
  misc_feature (756)..(756): n is a, c, g, or t
gaacattaattacaattaacaataattttaggtatggaatgttatgattacctaagagagatgtctctacctaatgagctcaagtgatcctcccacctcagcctaccaagtagccaggaccacaggcaagtgcaccaccatgtactggctagttttgtttacaggtttttggtttttgggtttttgggtttattttttctctgggtgaggtgggttgtttttcacaggcggggtctcactattttgtccaggctagaagaatttctaatggtctattacacctcccgtttgggcaacgtaaattcagaataatttaaggtcctttggttatccagtagtttggcagcatcttaaacagtgtccaatttcagacattcagaagatgaagctatagtagtcaagaatctcaagctgaagggcttgggggagccaaagcagctttttagagcataggcttgaacttaaatctcagctcagtcacctgcaggactttaggcaccagtgatttcacccttctgagcctgttcttaatccgtaaaatgattataataattctttcacagcgttgtgaggattacgctgaaagtgggttccatgcctactacagtagggtgctccagaatattcattcaatctctactttatcgcccatttgttttccctggctcttataaatggactgctctaaaagtcctaggggaaacaggcgaagcactgggttcaatgatggcagtcgaaaaaccattttgtcagcgntaaatcattccattgaccttattttccctcccatttacggggtattacaacatttcgccacacccaaggacacc

SEQ ID NO: 525596 - DNA, 983 bp, Homo sapiens
  misc_feature (10)..(10): n is a, c, g, or t
  misc_feature (982)..(982): n is a, c, g, or t
cccacgcgtncggaacagaattaaagaagaggaaggacctaaagttcaaaaaaaaaaaaaaaaaaaaaaaaaaaaaaaaaaaaaaaaaaaaaaaaaaaaaagaagaagaaacaaaaaattactacaaataaagaggagaaagacaaagagaaaataaaagacacacaaatgtaaatgatgaaaaagtagtgggcacataaatgagagaggtattattatatagtgctaatagacagtgaatacatatacaatgacgtttagtttgttggttctactactgtggcgtaaaatgtgagagagaaacgtgagtgaagaagaggacaagcattgaagatatctaagagtgagtgagtggcacaatgaatcatgtggagacaacaaatatactcactaaagagaaagatttatagaaaagattatgaaagagagagaaaaaaatatccaagcaatcattcagaacacacgagaacgatacaacagagcagagagctgacaagaccacgcagcacacgagccacgactaataatagacacgacgactagaacaatacgacaagagcgcaaacaaagcgacagctaagcgcgcggccatataacaacagagggagaactatacaaacgcaccatcgctaagcacacacacaatatcattcgtacaaccacaaccgggccaaacgcacataggaggtcaaagaaatcaagacaaaggaaaagttatacaaacaaccatataagagcacttgatcaatgttagatagatattagatttgagtgtacaaaacgcagatttgctatatcaagataaaccgatcacaacagagaagcacgtaacagtggccgtagagacgggagaacagtatagataagagcagaagtaagaagtcattgacaagacaattaagctcaagtagccgagtcgagcgtcacacctgtcgtatagcacacgcttacttctactactgacgtccggttggaccagccna

SEQ ID NO: 525597 - DNA, 207 bp, Homo sapiens
gaactcatcaccttccactcaacatttcagtgctgtggaccaagaaagctccgcgaacaggtccaactacatgcccaaaggagcctttctaagcggaaaccaacccaaaaaagggcaaccaactttgtggccccaaatttttcgcgggaaaattttggcgaaaccacaccaaattttttctctgggcaacagggggaaaacccccaa

SEQ ID NO: 525598 - DNA, 385 bp, Homo sapiens
atgtcagcagataaacaagtgatgcaaaggtctctgtgtttcctatgcagatgaccctgcgttcttccgcagcgtttgtgtccctggttacttgagattagggagtggtgatgactcttaaggagcatgctgccttcaagcatctgtttaacaaagcacatcttgcaccgcccttaatccatctaaccctgagtggacacagcacatgtttcagagagcacggggttgggtactacgctttggctgccaaagcgtagtacccaatagctaggactacaggtatgcaccaccacacctggctaatctttgtatttttagcagagatggggttttgccatgttggccatgctggtcttgaacccctggcatcaggtgatccacccgc

SEQ ID NO: 525599 - DNA, 253 bp, Homo sapiens
tcactcgaggttgcgtagtgtccagtttgggtcagagcaagtagatttatccgtgtgaatgtaaaacactctgaaatgtacatgctccaattttatagttctcattacagtatttgagtagtcaaatgaatggtggtcaagataagccttaccaccaaaagtcacatttcggatctgaaagtgttccactgatgtatgccaaacaaatggtaagataaggaaaaggtcgtcccagggaactcggtcagaggtg

SEQ ID NO: 525600 - DNA, 659 bp, Homo sapiens
ccgaagtctgaaatgtgtatgtatatagctatatatataattaacatattaatacacaaggcacacatactatgagcatcctgcaaatttgtacagcattaatacttgattacatataattggaactgcgtagacatcacaggaagcaaatttatatatttatagcatatgtaatcatagcattaacacttatggcagcaattttgaaaaggttaattaaagactacagactagcagttatttatcctttctttagtttgccttattatagcatataaattgtccatgttgagtcttttgagattaagataatttccatattgaatatatgattaagctgcactattcacaaacatgtttgatttcttattacttcttaattcattcatatgacttgagttccaggtttcattattgtgtacccaactttgagataccaatagataaaacgtaataagatgaaagccaggggactggccttggttttccaacacgctcagtatttgtctgcagtatgtttctgacccttaatttctcagaagtacaaattttaggcaaacttcttaaatttatactggattatcttgatgtctctacatatatgtataaaccatagtaacttagattttgtactagaaaatctctaactcttacaagca

SEQ ID NO: 525601 - DNA, 705 bp, Homo sapiens
gcggatcatgaggtcaggagatcgagaccatcctggctaacacggtgaaaacccatgtctacgtaaaaatacaaaaaattagccaggtgtggtggcgggcgcctgtagtcccagctactcaggaggctgaggcaggagaatggtgtgaacccgggaggcagagcttgcagtgagccgagatcgcaccactgcactccagcctgggcgaaagggcaagactccatctcaaaaaaaaaaaaaaaaaaaactcattttttccattttactttttttctcaaatgataaaattatattactgattacttataactttcttctttatggtactcagtttctctttatattttctctttgaattaaaatttactttcttacctttcatttgggctcttttataatctccacttgtccacagcattcttctccttttaaaccaattagtcccagaaaaagacccttctgtgaaatttctaggactggatttttaaaattgccttgaaccttgtttattctaaattccttttttaagaaaaccttaatgtcccagctcgttgaaactacactgtggaacacgtattttgtgcccaatttcgtggaagataatgaggctcactgtaaacactactttgtcctgcaaagtattctgatgagagttactgacttctagagccattctctttaccgtctgacagtctaggattactt

SEQ ID NO: 525602 - DNA, 232 bp, Homo sapiens
acagcctgtgaatgaggtggagcaccgcatcatagcctgcgatggaggcggtggtccctgggccaccccaaggtgtacataaacttggacaaagaaacaaaaacggggacatgtggctactgcggcctgcagttcaagcagcaccatcactagtgtggctgtgtcctggtcctctgactcctatggaacatctccacgctgggtgttctgtgtgaggccactgctctgtgaa

SEQ ID NO: 525603 - DNA, 258 bp, Homo sapiens
  misc_feature (141)..(141): n is a, c, g, or t
  misc_feature (192)..(192): n is a, c, g, or t
atagcgagttttgcacgatgacgtaagactaccagcatctgaattctcaataaaaataaaaagaaacctattagttttcagttcctacaataagaaagcaaattcatggattatacaagcttatctatcaatagtaaagtntgatttacaaactacaaaaaattttttaaacttaatagtctcaggctctangtttggtttatttacttgtatttacgaaatacacaactacatttcaacaaataaatttcaatctaa

SEQ ID NO: 525604 - DNA, 674 bp, Homo sapiens
  misc_feature (475)..(475): n is a, c, g, or t
  misc_feature (587)..(587): n is a, c, g, or t
  misc_feature (627)..(627): n is a, c, g, or t
atgaggtagtactgatagggttggtggacacgagtgcgtagagatatgataccttgcagacccttgcgataatgatgtttaatattcttataataataaccggtcgcgaagattcttaccatacattttttattcagacttgataatgatgcgaggtaaacgctggatgactcttcccattttacagacctgcacaccaagccccaggacttaagccggttgcccagaatcgcactgcttaaggccaatcgcctaagccaacatcgtcttctagatgaaagtccaggctctgcacgcaccttattagacagactacgtgccctactattgcctgaccatctcagagactgactcttgtcttgagctattatatgcctgctcaagaacctacctgacaacagatattcttgtgatggatttgtatccctaggacacattagagtacttgccgatctgaacaaggagatatacgggngatcaatattcttgtacctgaacagtaacattccaatcgtacaatggctctttatttatgacaacatacagcagccttagatgaaggcttgaatagacaaggctatacatangttaactgtgctgacacaattctttggtggcatgaaacgngccaacgctttgttgtgggtttactctgccatgttcgggattccttt

SEQ ID NO: 525605 - DNA, 622 bp, Homo sapiens
ggaggcaatggacagtatagtatagcactaaggtaggcactagcctccctgggggaaggccactgaggagggtagaggaggcagtgagctgtgtcacaggagttatggaaacacacacacactttgtgtccatggttgaaagcagaataataatagtaatggtagaagagttatttgtgaattcatgacttctaaaaattttttcttaaaatatattaacaacattagagaactgtttcactcataaccatcccacaccactataacatctgtgttcatttgtatagctcatcttctgtccttgcccacacacacatatttttatagggctgtacctagtatatattttatattcttctttttcaaatcaaagtattgtaagtactttcccatgtttctatctactgtagtcattaagaacttgaggtctgaagttttgaatactaccttcaccacctgtgatcttgggcaagttactaacacatttccttgtctatatctagctaccttattagatattaaatgatcgaatgagggttaaatgattatttcatgtaaagctcttagccctgtgcctggtacatagtaaatgctaaataaatagtggtattcttactgttta

SEQ ID NO: 525606 - DNA, 916 bp, Homo sapiens
ggaggcaatggacagtatagtatagcactaaggtaggcactagcctccctgggggaaggccactgaggagggtagaggaggcagtgagctgtgtcacaggagttatggaaacacacacacactttgtgtccatggttgaaagcagaataataatagtaatggtagaagagttatttgtgaattcatgacttctaaaaattttttcttaaaatatattaacaacattagagaactgtttcactcataaccatcccacaccactataacatctgtgttcatttgtatagctcatcttctgtccttgcccacacacacatatttttatagggctgtacctagtatatattttatattcttctttttcaaatcaaagtattgtaagtactttcccatgtttctatctactgtagtcattaagaacttgaggtctgaagttttgaatactaccttcaccacctgtgatcttgggcaagttactaacacatttccttgtctatatctagctaccttattagatattaaatgatcgaatgagggttaaatgattatttcatgtaaagctcttagccctgtgcctggtacatagtaaatgctaaataaatagtggtattcttactgtttaaaaaacaccacccccaccacgcaaggcgcaacaccccaacaacaacaacacttttgggggccccttgccccaagaaacttttagaacaactcgggaggacgcgaggccacagagtattaaaacatggtccaaacgggtgcacgagaacatccgggcaaaaacagcgcggcggagtctcccccaataagaaaacgccccggggacaacccgggtctttgacaaactccacgaggcagtcacgaacgcaacacgcggggtctacagaggggcccacgagcctcatacaaattaccg

SEQ ID NO: 525607 - DNA, 304 bp, Homo sapiens
  misc_feature (42)..(42): n is a, c, g, or t
atccgagcatacaccatgctctgtagtatctctgagttctgnatatttcttagactttttggatgtgcagcagtacatgtcttgaagttacttgaaggcctcacttttaagaaagcttacaggtggggcctgtaccatccccagttctttgtagctcctcttggacatgtttggcctacttttaaaagggtagttgaataaatagcatcaccattctttgctgtggcacaggttataaacttaagtggagtttaccggcagcatcaaatgtttcagctttaaaaaataaaagtagggtaccagt

SEQ ID NO: 525608 - DNA, 1476 bp, Homo sapiens
  misc_feature (544)..(544): n is a, c, g, or t
  misc_feature (737)..(737): n is a, c, g, or t
tctttaaaagcaattttaatttctggattcacaaaatacgggtgaggagctaggggcgatgccggtacccccttgggtgtggtgcattcttctcccagtctctatattttctgtgctttctataaaaatataccctgtgtgtgttacaaacagacaagcctcatgtgcgtgctcccacaagtgtgcttgtgcaccattctcataaacagctgtgacaaagtatattatgtgtacccagggtgtgagaacagtctcacaacacaagatgtcgcccacactctcacacccaagaatatagggcgccctctcacaatctcaggtctcttctctgtggcctctcacctttattcactctcatatagaataaagcgtggtgtgtgctctcttctcctcttgtgtggcctcatatgagactatcacaagtgacacacacgctgtgtcccacaaaattctctctcgcgagaggtgtgtgtttctcaagagcacaaaaacttctcgggagaagagagcccacagtgtgaacactaatagagacacaccctantgtctctctgatgtgtgctcctccccccagaggcttctcgctatatgtgtcttcccacgagggggcttgtgccctgtgtgatggccaccctgtgtgcactgtggctgtgtctgtagccccctgtgggtgtctctcgcgtgatcacatatctcacgagggggacaaaccatatgtggggaggtaggagcggcgncagaagagccaaacaacacgccaatgttgagagagacatatattaccacagagtctcttttataagtggtgggggctctcagagacacccagagagagagtctccggggaggggtctccttgtggagagaggaaccctctctgtgggctgcatatatctgtggctcacaaatatgtttcgtcttttttctcgctccacaagcggtggtcttctattatactcttgcagaggaccgcctgtgtgtttctccccctgatattaaagcccctctactatgtgagacgcgcggtgtgtctccctttattctgctctccgcggggaattacggtgtggcgaaactccgttggggggcattatgtccctcctttatgtccccattcttattcagttccccttctacccgaggaggggaggtggagcacgtaggctccacctgttgccctgtgagtatactctctttcccaaggaccccaagaaccctccttcgtcgtgaaggccgccgagggggctgggcccccccccgaagaatattgtgtggcgacaaaagcatttcacgacatcgggaatagggaggccttctacaagagaacgcgggcacatgaaaaaccccttttgtaagaggggagcccgacagcgcacgcaggtgagtaaatcctcccaacccaaatagtcgcagcgagtatttctactactgtttgggggtccccgacaaagaaggaggcgcggcgctaggtgagta

SEQ ID NO: 525609 - DNA, 789 bp, Homo sapiens
gactcatttaactggtattgcggagccacgaggcttctgcttactgaactcgctcggcgctgggcgtactggatcggggagtcccgggggcgtcttgttctaaccgggcgccatgaccgtcgcgcggcgagtgccggggctgccctcctcggggagctgccggtgctgctgtggtgctgttgtgcctgccggcgtgtggggtgactgtggcttcccccagatgtaacctaatgccagccagctttgggaaggcgtacaagttttcccgaggatactgtaataacgtacaaatgtgaagaaagctttgtgaaaaattcctggcgagaaggactcagtggatctgccttaagggcagtcaatggtcagatcttgaagagttctgcaatcgtagctgcgaggtgccaaacaaggctaaattctgcatcctcaaacagcttatatcactcagaattatttttccagtcggtactgtgtggactatgagtgccgtccaggttacagaagagaaccttctctctcacaaaataactgccttcagaattacaatggtccacagcagtcgcactttgtacacgccgaaatcatggcctaatcgggagaaatccgaatggtcagatggatgtaccagggggctattatttggtgcaccaatctccttcctcatgtaccaccggtaccaactattttggtcgactctagtttggctatccaggcagttctgtcagggagtgacccgttgcgagtgccgagaaattattgggccagccacccaaatgccagggcatactc

SEQ ID NO: 525610 - DNA, 352 bp, Homo sapiens
gtcctttcagctcctccctcctgagcccctactgtctccccggccctgaatggcagatggtccctcctgtcaggagcttggcatcgccgagtccgttcttcaggcaggcccagggcctgtcaggtgaggataattggcagagacaggctggggaggggacagagaagttccatttggcatacgggtatgatcatggccacccccgccattcaggcttggaacagggttggatcgatcatcaactttgtcttcctgtcccagccttagaagctgtgtcaattgccagcgcgtgagtcattcgttccagtcccgtccccattccgggatgttggaaaccataaccatgcggccg

SEQ ID NO: 525611 - DNA, 558 bp, Homo sapiens
gtacatgtgatacccacgtttgtggtgggaggccagcagtacctgtgagtattcagaagcaacactcagggctggtgaccgtgacatcagtgttggaggaatatccgataccagagatcaggcaaggctcattaatcgagaactggtacatgtaaggtgacccatatgtttagccagtttggaagccagagcaacctagacacttactagaaccactcaagagatctgaatgggaaaagtgtttgggtttagtggttgtgtgttagtttacggtgttggtgtttcttataaccttggagtcagaggttaacatacagggaactttaccatgcaatcatggtcagaatcctagggctctaagagccacagaaaccactaaagctttcatgggtcttttgacccatcaaacaggggaagagtggtaattattgtctagttgagctaaatgctcgattctacacttattcataatccctaaaaataatatttatgatccacacagttccagagggaggtgggcctggccacagtcctcccaccacaaacgtgggatccgtg

SEQ ID NO: 525612 - DNA, 103 bp, Homo sapiens
gtgaattctaaggaactcagggggcacgtgggtcaggctccaccgccacagaggagccacagtctaccagactcatgggcgtttcccctcccagatatccccc

SEQ ID NO: 525613 - DNA, 1030 bp, Homo sapiens
  misc_feature (1030)..(1030): n is a, c, g, or t
cttggtggctcacgcatgcaatcccccagcacttcgggaggccgagatgggcagatcacccgaggtcagggattccagaccagcctggccaacatggtgaaaccccatccccacaaaaaatacaaaaactagccaggcatggtggctcatgcctgcaatcccagccacctgggaggctgagacaagagaatcacttgaacccaggaggcagaggttgcagtgagcagagatcgtgccactgcactccagcctgggcgacaagagtgaaactatgtctcaaaaaaaaaaaaaagggaaaaaaaggtccttatctttaagagatttttccggaaattttccctagttgacaataggctatcggaaattggctccagggtcatgtacgaggattgtccagaagtttggctgaaccactgttgcccatgagcgggtaatggctgaagatgactgatgagtacattgggcataccttaaatactcttctactacggcttaggaaggtatttaacattctccattgacaaacaggtttaaaccagggctggggcacgcaatgggtacagcttgaattcccagaaccctgggaggccagagccagggagatcacttgaggtggcgacgtctgaaaccagcgtggccacattggaacaccccggttccaccaagcttcaaagagaagacaaaaaacactttggggagcatgcgcctcagaaagtttttacaccctcgtggagcgggcccttgtaatgcgacacgggcaacgggtccacacggaacccgggaagacacgcgcgttcccccaaatacaacgcgggcggcaaggagtcttgaaacaccaggggagtgaggggcatagggactcacaggggccaggcgctaaatccccgggcgagagtcaccgcatacgaagagcaggcagacagaagcaggagagcaaagagacgtgctaagcatcatcacagacagaactaactatgagaatcgtataagtagtacgctcctcgctgctcatccacgtcctctcgcgctn

SEQ ID NO: 525614 - DNA, 1245 bp, Homo sapiens
ggagcctgcgcactgggactgggaagggggacccaccgcgatgggtccagccaccagccccctcactaatagctgtgccaccccggcaaagctggctggcatgcatgcatgcatgctgacgcaagcgtgcgacagatcacgagcagtggatggccgcagccacctgcgtggcctggcctggatgctggtgcatgcccctagtgcccccctcccctgtgtgcaccctgcgttctatgcaacgccattgtttgcctggggacccagcatgtctccacccttgcctgccgagctgactgcctgcctattaaatccatggaacggtggccaacttctactacgagtgcggactgcttgcgcctgcttgcagtacggcaggcaatggcgggtcatagccagacgggagccacgctctgtggtggccagaacgccgagggaacggtggaaacgatacgcacgatacgaagcgcaatactagttgccaagacggatcgaagcgaaagccaaggaagatcaccgcccggtcagaagtatatcagtcccatgaaaaccctgagtaccatggagtggtgccaccgcaccgcaaaggctgcacgggcagtgccagcggacagtcggggccagcgggaccaaccccattgcggagagggccgagattcccagcacactacagcccgcctgcaaccagccagcgaccacagtccctcaccatccggggacccagacacgccccacgacgagtataccccaccattcacgcacacataacattagtacaaaaaggaactaccacagagacgaaaggggacacgagtgacacgagaaagcgccaggacccgcctgctacatgcacaacctctagaaccacatggtagcccggcaactggctggcagttcgcccatatggtcacagggcattgatccacgacccgaggcgaagtagaagtcccggtgcttcacacgggcttacacataacaggtctaccgcaaaccagagctaagcacaactcataccacacaacaccaccactcgcaaagacaccggaacacaccacacacattcaaacacacactcaaacacccgcctcaacctaccaacagcgagacaaacaccctgacacacggacccaccctgatatcatcattccatacacccactacccccccacacacacatcaaccattaacaaccaacctcctcctatacatcacctctcatctctcctcacctattcccgcaacctcaca

SEQ ID NO: 525615 - DNA, 265 bp, Homo sapiens
caggatccccaggagtgatgccccagaccgtagttttactccagaggaaatggtagatgccatttcacacatggactccaccgttcgattttagaagttggagactgtgtgtggttccgcagaaagtctgggatttctacagagctgaactgcgtactccactcgatgttccagtgccagcatcacgccagaacgcaagtcatccattcgctgtctgagatttcgattgcatggtgagagaacaagactccccagggatttcaaa

SEQ ID NO: 525616 - DNA, 166 bp, Homo sapiens
ttgttaccttcactaccacacatactttgctcacctccagaataagatcatatgtgggagcaaatgcagagataagatgaacacagctcataatcacggcacgttgaccaacatccaatcaaattcagttcccaaaccacagcaaacactctcaggagtctccaaa

SEQ ID NO: 525617 - DNA, 109 bp, Homo sapiens
atttcagatcgcctctgcccggacagcccgtctgagaggtgaggatcgcctctgccgggcaggcgtcccgtgtgggaagtgaggagtgtatctgcaccagcatgcccca

SEQ ID NO: 525618 - DNA, 585 bp, Homo sapiens
agcggaggggggtcttgtgatgctataaagaaataactgagatggccgggcgcggtggctcacgcctgtaatcccagcactttgggaggccgaggggggtggatcacgaggtcaggagattgaggccatcctggccaacatggtgaaagggggggggtactaaaaatacaaaaattagctgggcatggtggtgggcgcctatagtcccagctactcaggaggctaacgcgtaagaatcgcttgaacccgggaggcggaggttgcagtgagccaagataacgccactgtactccagcctggcaacagagcaagactgtctcaaaaaaaagaaaaagcaaaaaacaaagaaaaaaaaaagttgagaggggtatttctacttaaggaaatagggatagtggttaaggaaaagaggttaacatgtgggcatcacagttccgcaggtttgcaccaggcatggcacgcaatagtctgcttagcatccagtggagagggccttaggaaggctgacaactcattgctggaaaagcaaaggggacgccaagggtatcaccggtggcaagaccagaacaaggtgcggtgtgagga

SEQ ID NO: 525619 - DNA, 784 bp, Homo sapiens
  misc_feature (10)..(10): n is a, c, g, or t
  misc_feature (76)..(77): n is a, c, g, or t
  misc_feature (79)..(79): n is a, c, g, or t
  misc_feature (105)..(105): n is a, c, g, or t
  misc_feature (107)..(108): n is a, c, g, or t
  misc_feature (111)..(111): n is a, c, g, or t
  misc_feature (113)..(113): n is a, c, g, or t
  misc_feature (117)..(117): n is a, c, g, or t
  misc_feature (120)..(120): n is a, c, g, or t
  misc_feature (176)..(176): n is a, c, g, or t
  misc_feature (188)..(188): n is a, c, g, or t
  misc_feature (202)..(202): n is a, c, g, or t
  misc_feature (213)..(213): n is a, c, g, or t
  misc_feature (236)..(236): n is a, c, g, or t
  misc_feature (254)..(254): n is a, c, g, or t
  misc_feature (289)..(289): n is a, c, g, or t
  misc_feature (330)..(331): n is a, c, g, or t
  misc_feature (397)..(397): n is a, c, g, or t
  misc_feature (403)..(404): n is a, c, g, or t
  misc_feature (413)..(413): n is a, c, g, or t
  misc_feature (446)..(446): n is a, c, g, or t
  misc_feature (456)..(456): n is a, c, g, or t
  misc_feature (684)..(684): n is a, c, g, or t
  misc_feature (700)..(700): n is a, c, g, or t
  misc_feature (706)..(706): n is a, c, g, or t
  misc_feature (735)..(735): n is a, c, g, or t
cgcaccaaanagatatccaataatacaaattagcttcaagttacacatactgaacaaaagaggttgagcgaaccanncncgggaggagtaacgggaaccaggaancnncangngganggngaagaaacaaaaaaattaaacaggcatgcaggctttcccataccaccttcaacgcnaacctgcttcantgggagagtaaagnaggcaagaatnagcagccacggattgttgaactnttaccagcaccatgcccnccagcaacatttcagcggagttggaaacatttttnacagcaaaaccattacaacgaagtccctccccaaaccaccnntaaccatcccaagccaacacccaattacttgcaaacactggtataaaacacagtttaaacaattanaaaaannaaaactganaccacttatgcctctatagtgtgattaacctcnctcttagatncccgaccacctataagtctaatggctttcaaatgtaatttccatttgctaatggtgatcttgccacatctggcacggagacgacacagtaatgctgaaaaagcctctatgtagtcctgttagtgtcttaaagaacctaaaagctgggaccagtaaaatccacagaaattcactcttgcctttaagaactttttgaaaactgtttaaaaaaaaaaaaaaaaaaccaacnggggggggaacctaanattctngagaccaaatgtaaaaagtcaaatttggntggttctcaatagacaatgggggagtttccaaagggtggggatggggag

SEQ ID NO: 525620 - DNA, 382 bp, Homo sapiens
aggagattcacactcattcacacactaacccgactcattcacacactaacccactcattcacacacacacccattgattgacactaactcacccactgattgacacactagctcacccactcgttcacacaccctttcacacactaacctactcattcacacactaacccattcattcacacactcacccactcattcacacactaactcacccactcgttcacaaccgattcacacactaacccacccattcatgcactaacccactctttcacacaccagctgacccactcgttcacacacccactcatttacacactaacccactcgttgagacaccctctcattcacacactaactcacccactcattcacacactaa

SEQ ID NO: 525621 - DNA, 166 bp, Homo sapiens
attgctcccggcttgatagatgcccacctgccttacgccagaccactggtcgtgcctcaagtgatggacataaccctctcgtaggacatacatgtaaatgcacaatgtgactcattgtcatacgtttttgttcagctatgagcctcaaaaaaaacgttggcggccg

SEQ ID NO: 525622 - DNA, 245 bp, Homo sapiens
cctcgatagccgacgacatgagatctggttggaggatggcgggtctgcagcacgcggagtaaggtggagcacacatggccagaaactgtagcaggactgcaggcagtgtacaagcgctacatctgagtgtagaatgactgagctgacaagctggggagcaagggcaatggttaaaacacaagctcaggggctaggggtatatccctgatgtcacatgggcagccatgtagggtggatttggcatg

SEQ ID NO: 525623 - DNA, 165 bp, Homo sapiens
catcgagccggccctacttatgaggctctgaggactgggggctggatggtctgaagcctctgggtttccttctagaaaaggtgagtctgaggtcccttggaatggaggatatggtggcttgtggttctgaagtccctagaaactgggaacatggggtctgagacg

SEQ ID NO: 525624 - DNA, 233 bp, Homo sapiens
agatccccgctgtcaaacaggtggagacgagtgaggatgtttacagttgtgctatctttgcctctcatgccggaatgtgtcagggccatgcatcaaaaaatgggcgtatggtcctagcattactagatgcagttgctacctttcgcatacgtcatcgagcccgtgatcagctgaagcgacgcataagggtgcatactggtgaggctgactgtcactcgctagtgcctagttta

SEQ ID NO: 525625 - DNA, 208 bp, Homo sapiens
acttcaccaatctcatgaggagagggcacatgctgagaaacatgataagctgcagaaccaacgaggctggccaaatcttccttcaggatatctaacgaaaccagactgtgagtcactgggagagcgggctgaatgcaatggagtgtgcattacattcggaaacaactgtgaatcagtcactactgcaattgcactatctggtcactga

SEQ ID NO: 525626 - DNA, 254 bp, Homo sapiens
tctccccgaaatgcatttaagtgcagcgttgcgtgtttcttgttggaggtagagcgactggatggtttagcgggactatcatcttatcgacatcagccaaactcccaatgccaacaaggtgagagcgcggcagtgagactgccggggataagctccctgggtcgagagggaaacagcccaaatcgccggctaagggccctaagtgtgtactaagtggaaaaggatgtgggatcgcgaagacaaccaagaggttg

SEQ ID NO: 525627 - DNA, 345 bp, Homo sapiens
accgattagcaggactacaggaggaaggcgatgaatgtatatcatgcaacatagatacaacagtaataaatccccattcaacgggctggcctgtcggcctgatggtgacacacattacgcttgccatgcacggagactcatagttcaaatttcaactctagcttctctcatgccccagatcagaaaagaagtgaagaaacactgctacgcacttttagccattcaaactcacaggaagggaatacatcatgtctacaaccactagctactttctgctgaaaacctgtgaacacaagagctctagagaacaaagtctggactcccatccatgcaaactgtcggggc

SEQ ID NO: 525628 - DNA, 399 bp, Homo sapiens
ccattatggccgggaggtcaggtcagggttaaacagagttgattgtttctgcaaaactggagcactgtggaatgtatatctagctgaattaggaaaagaaatggaaaaaggaaagaaaatcaccggtgtagtttataactctgtgtgggctgaacccagccatccctctgtctctattcactttaagaggtcaatctgctttctttttaacatctcttctttttttaacatgaacaaataacaattttaaatctccaatatctggattatgggactgaatctttgttattttccttggacttacaatcatggaatattatgtctaagattatttttaaatagttcttttgagaagggtgctattcaatatttgatttttattcacatccaatgtgtgcc

SEQ ID NO: 525629 - DNA, 440 bp, Homo sapiens
gcaggagccatggtgcgggatctataccactgcacagagttctgcctcggtgcgtggctaagtcatgtgcgtgcggctgcatgtctggaggattgagaagctggagctggtgcccgtgccccagaagcgctcacggcgatttctacgtcggggatgcctacctggtgctgcactcggccaatgacgagccgaggtcgttcacctagcgcctgcaacttctggctcggaaaggagtgttcccaggatcaaagcacagtctgctgcctatcttcactgttcagatggatgactatttagggtggcaacgccagtgcagaatagagaacttcaaggatatgagtctaatgactttgttagctatttcaaagtgcggtctgaaatacaaggctggaggcgtggcatctggattaaatcatgttcttacgaatcgacctgacagc

SEQ ID NO: 525630 - DNA, 419 bp, Homo sapiens
tttccttttctgcactttaggtcttttaatttctttttccttttttgtttttgccttatcatactagccctatactaagtatctaatataccatcatctcatctttacaacaatccaatgttattccaatttaacaaataagaaaatgtggctcagaaaggttcagtaacttgtccaatcaagattgcacagctattagtagatctagaattcaaacccaggtagtcttattccatacctgtatgtacgactactagactagcttataaatttggaaaactcaagggcacaagaacaaaaaatgttatcaaattaaaaataggaaaaaaattccattactggcaaagaatatgaagagttcacagaagaaaaaggcatttattttaaatatgaaaagatgctcaacccctctcataatg

SEQ ID NO: 525631 - DNA, 162 bp, Homo sapiens
gtacaaagaggcacagtgaggtgaagtagcagcccacactagtgcctcctcgctcactacaccaccccctgcaccacagtgcagcctgcttctcccaccagctggggttccttgtgaaccccaagcctgggaagggggaggtgagtttacaaacatggcaag

SEQ ID NO: 525632 - DNA, 660 bp, Homo sapiens
cccttccctgccttattacaagaagtatcgtactagcccccctttgtacctcttaaaggggattctccccccctttccctccccgctaattacccagcgttctctccccggtaagtgacttttttatccacccccttctacccgactatgacttttggtaatttttatgaattcattcgtgagtataaaactctctcctgcgccacatatccacttcccttctccacaggggtttttaatcccgcgcgcagagaaattttaataatccacccagtgtttattagccccccctttattcacacagtgtcttgctgacagtatgtaggcccgcacgtgtattatgatattgtgctccctgcacttgcctcccctcttattaaatattccctctggggccaccacgtgtggattacctacccccccccccatattgtcttcacccgcgcagtgtccctcacacaagggacttgcgtgaccctcttctctctttgtgaaatattttccctaccacatcaatcaccccaaaaaagagaggtgacttctctcttctctcttccacccgccttttcttttgaaggccaccaccctctctttctcctctgattgatctcttacccctgcctccaatgagagaccccaccccatcaataaaaccaaaat

SEQ ID NO: 525633 - DNA, 510 bp, Homo sapiens
gctgtccctgcactctggctttaaaaaataacgaagttggtgagacagtggctcagcttgtaatctcagaactttcagagctcacgagtgatccagctgcccaccctcccaaatgtgctggggttatagggtgtaagccacctgtgccgtacttacgctgcacgttcagactgagaaaacccagacacagagaggacaggtcacttgcttggtgtcaggacaggcctgttctgagacagccattcctacaggacgctcccactgtgtgggccctgggctcctccccagcattcccagaggcagtggtcatgcaccaggccttgctattgggggctgctgttgagggctgcgtcctgggctgtggggtgtaccctctcctggggcgatggctgtcacccacctcttgtctaccagttacaaaagagggagcaaaagtaccttattcacaggtgttggtataacttagtcataacgttcttgcgtaggtgctcatccctcacatggttcctg

SEQ ID NO: 525634 - DNA, 158 bp, Homo sapiens
taatatagctcagaacaggctttggtcgatggaccttgcactcaagtatagagagacaggcatgcctttcaagtgcatgcagatcactgatttcatcctcaagttatccgcacagtgcccaccataagtatgtccgacaagcctggtagaaggcagac

SEQ ID NO: 525635 - DNA, 460 bp, Homo sapiens
  misc_feature (145)..(145): n is a, c, g, or t
ggaaattctccttaatatttatcagcacacagtatgctcgaccttaagtgaatttgagcgcagcccgagcccattcttggtcctgagagtggacagggttcacagaagaacgagtctggtttctgagcctgtagaagagacccgnaagcccctcatcttgatcgcggtgagaacacagggagcctttggaaacgctattcagccacggtagttaagagctcctgttctgatccagggagacctgggttcaagtcttgactcagccacttccaaggtgtgtgagtcacagaaaaaaaatcacttcacctcttagaacgcaatttcagcttgtgtaacaatctctaggttagaaggaagtggggcgggtgagggcgggagagggaggaggagaataaaacacaaacactctctctaggttaatagggagaaagggaggattaaatgagatgatgcatgtcag

SEQ ID NO: 525636 - DNA, 100 bp, Homo sapiens
agctgccgcacaagtaacagttccagaagttctgaggctgtacatcggcccgctccccacaatgtaaatataaagttatttggctcattcccaggtccaa

SEQ ID NO: 525637 - DNA, 728 bp, Homo sapiens
  misc_feature (359)..(359): n is a, c, g, or t
  misc_feature (655)..(655): n is a, c, g, or t
  misc_feature (663)..(663): n is a, c, g, or t
  misc_feature (726)..(726): n is a, c, g, or t
ggacaacaaggcaccaatccttatttgactcttcactgtgttaatcagggaacgattttgctggatcttgctccagaagataaagaatatcagtcagtggaagaagagatgcaaagtactattcgagaacacagagatggtggtaatgctggcggcatcttcaacagatacaatgtcattcgaattcaaaaagttgtcaacaagaagttgagggagcggttctgccaccgacagaaggaagtgtctgaggagaatcacaaccatcacaatgagcgcatgttgtttcatggttctcctttcattaatgccattattcataaagggtttgatgagcgacatgcatacataggaggaatgtntggggccgggatttattttgctgaaaactcctcaaaaagcaaccaatatgtttatggaattggaggaggaacaggctgccctacacacaaggacaggtcatgctatatatgtcacagacaaatgctcttctgtagagtgacccttgggaaatcctttctgcagtttagcaccatgaaaatgggcccacgcgcctccagggcaccacttcagtcattggtagaccgagcgtcaatgggctggcatatgctggaatatgttcatcttacagaggagaacaggcttacccagagtattnttattcantttaccagatccttgaaagccagaagccctttccccagaaccgcaacagccgcagagcaggangg

SEQ ID NO: 525638 - DNA, 314 bp, Homo sapiens
  misc_feature (4)..(4): n is a, c, g, or t
  misc_feature (124)..(124): n is a, c, g, or t
  misc_feature (134)..(134): n is a, c, g, or t
  misc_feature (172)..(172): n is a, c, g, or t
  misc_feature (189)..(189): n is a, c, g, or t
  misc_feature (237)..(237): n is a, c, g, or t
  misc_feature (271)..(271): n is a, c, g, or t
gggntgatgggcgtccgccgccgtgcctgggtaaatttctcgcatttttagtccagatggggtttcaccatgttgggcaggctggtcttgaactcctgacctcaggtgatgcggctgccttggnctcccaaagngctgggattacaggcgtgagcaccgcgcctggccccanatgtcatgtttttaaanaaaaacatagaaaatggtagtaaaggttcacagcatcaccaagaaaanagggccccagtgtcgcggaggcggagatgtccangccagtcctacaccctctggggctcagggaattcccttcacgg

SEQ ID NO: 525639 - DNA, 253 bp, Homo sapiens
ttttcccgggggggggggggcccccccccctttttttttttgtttcccaagggggggggggggggggttcccctttttttttccccttctgggggggtggggggggggtttttccccccccttttaaatttagcccccgggggaaattttttttttcccatttttccccccgggggggggtggggttttttaaggggggggtttctttattttttggggcccaataaatggggggccttgggcccccccccga

SEQ ID NO: 525640 - DNA, 332 bp, Homo sapiens
  misc_feature (155)..(155): n is a, c, g, or t
  misc_feature (234)..(234): n is a, c, g, or t
gagctagcgatagaaatgcgaatggacgcttgtagacagtaaggactcaatacgtgggtttgttcaagttatatcgtgcagacaggcatatgcagttagaaaatctgtctagggtagggagagataaaaccagccacttcagccctgctattttnatcctgaagattttttttttactctgtttatgaataaaacattttaatcagtgctgtatcaacactgatcaattttttncatggaagtgtaatacagggtgaattccattaagtcaattaaatacttagatccagtttttaaacagtgcggaggtagttaagctcttcttttattga

SEQ ID NO: 525641 - DNA, 899 bp, Homo sapiens
ggccggtgacaagtgcgccggcggccgaggcgtgttcctgctcctggcggtgaatgtcgtgctgcctgagcactactgatgctgatgcgatgctcatcctgtgcgcacgtgggggcaatgagctgcagcttacggctggtgctgtgccatgtgcgccgcctctttctattggtgcacccctggtgccccgaggacgaggcgcgcgcggagcggctggcggagctggtggcgctggagtgcgcgcgagcacggcgacgtgctgcagtgggccttcacttgacaccttcctcaacctcacgctcaagcacctgcacttgctcgactggctggctgccacgctgtccgcacgcgcgctttctgctcagcggcgacgacgacgtgtacgtgcacaccgccaacgtagtccgcttcctgcaggctgcagtcaaccctgtgccggcacctgttctccgtgccaggtcatggagggctccgttgcccatcctgcgaccaggtggagcaagtacttcgtgcctgcctgcagctcttccccgggttccgctttaccctggtgtactgcagctgtgcggctggctttcctcctgtccggcaccactggcccgggccctgcgcgctgtgtcgcccggtcacaccccgctcttccccatcgacgacgcctacatgggcatgtgtctggaggcgcgcctggccttgcggccagccgtccacgacgggcactccgtgccttacgggcgtgcagcttgctggccgcacagaaggtcatccttcgacccctgcatgtaccgcgagttgctggctggtgcaccggttacgcgcccctacgagatgctggttcatgtggaaaggcgcttgccaggccccgggctcagttgtaaccggggacacggggtcacctcagg

SEQ ID NO: 525642 - DNA, 221 bp, Homo sapiens
gccaaaactgacttcaaagtgtggggagggttcctcttcccgggacgcagccttcccgggcgatggcagacggtgccccggttagacatgagccgctgaccaccccgcgcagcccgtagggtgggtcacggatgcacacctggtcctgggagagacggcgcccgttctttccgatcccgcggccctctcggttgcggtccatgcgcgcattcctggggggt

SEQ ID NO: 525643 - DNA, 719 bp, Homo sapiens
  misc_feature (660)..(660): n is a, c, g, or t
taagcgcgaggagccgccgcaccaccagcgcagcagtcctggagctgtgaggagattccgggccgtcaccctgcctccccgtgcgtcccgccaccggccgcttctgtcctcggaccccattccaacaatctcgtaaaacatgctggattactatgaagttctaggcgtgctgagacatgcctcacccgaggatacttcaaaacggcatatcggaaactggcactgaagtggcatccagataaaaatcctgagaataacgaagacgcagagagaacattcaagcaacgtagcggaggccttatgactgtgctgtcggatgctaagaaacgggacatctatgacaaatatggcacagacggattacaatggtggaggaggaggtggaagtcatttcgacagtccatttgaactgggcttcacattccgtaacccagatgactgtcttcagggaactctttcggctcgcgaagggacccaattttccatttgacgttcgttcgggcaacttcagtacttcctaaggacattactacagctgccgtgtgaccgcttgtctcacttttccagtggtcgtagcaggaacagcgtcttgacctcccttcagtgacgtgcaccggagctgagtttggcagtgcctatcggtcctccatttcgcatacngaccttttgagggcttctttgggactccgccgggtcccgtggatctgtacccctgccgg

SEQ ID NO: 525644 - DNA, 661 bp, Homo sapiens
tgctaccgtgactaaaatggaagcgttttgggggtcgcggcccgaactctgggcggggggttccggccccaggacagttttaccgatttccgtccactcccgatctccttcatggatccggcgttcttgcacttttacagaggctccaattcacgcggacccagaaccccagtggtgaccgggacctcagtcctcggcgtttaagtttcgagggcggagtggtgattgccgcagacttgctgggactcctacggcctccttggctcgtttccgcaacatctctcgcatttatgcgagttcaacaacgagtaccagtgcgtggggtgcctcttggcgactacgctgatttctccagtatttttgaagcaagtttctcggccaaagtggtgatttgatgaggagcttcgtgggaaatggacacagttatagtcctaaagctattcattcatggctgaccagggccatgtacagccggcgctcgaagatgaaccctttgtggacacaccatggtcatcggaggctatgctgatggagagagcttcctcggttatgtggacatgcttggtgtacctatgaagccctttcgtggccactggttatgggcatacttggtacacctctgtgcgaaaatctggaaaagcgcagtgttagcagacgagct

SEQ ID NO: 525645 - DNA, 179 bp, Homo sapiens
tccccgcctcatccgtacaccaccatggtgacccgccctcagtctccttctttattattaggaaaacaacaacaacaacaaacaaaaaaatggcgtccatgaatatgaacagcattgtcagatgaattagttgaagtggtttttttttttttttttttttttttttttttatatttttt

SEQ ID NO: 525646 - DNA, 430 bp, Homo sapiens
  misc_feature (312)..(312): n is a, c, g, or t
gtgtttgtttaacctggttttttttccttcaatatcctttaaaagaatagtaactgtgtgaataaaactttttagttactcttgatactatggtttagcaagaactgtagacttaattggttgagaaaagaacatttaaagtaaatgaatgctttagtaagttaattatttcttagcatatcacaaatatatgtagaaagaataagatctcattctatagctttattcctaggttattaaaagcaaacttctatggaagttagttctcattaggctatatatatatagtgtgtgtgtgtgtgtgtgtgtatntatctatacatatatacatacatacatacatacagactatgtattgtaatccattggttattgtgttggggatgtgggatcaaaagaatgaaagcaaaagatgacttatgtaaatagc

SEQ ID NO: 525647 - DNA, 295 bp, Homo sapiens
ggaaaaaacacccttttgcccgtgggccctgggtgggccctgggggaccatgtggccccaaatgttggggccccctgtccccaaaacatttccccttgtttcccggggggccttttttgccccttgtcctgaagcccagcgacccaaaaggggggggggggggtttatggggaaaaagggagcgaggtcaaaggagggcatgggttggcagggggggggtttggggccccctatgcgggcttttcccccccaaggacccaggcggcttcccaaaaaaatttttttttttcccgga

SEQ ID NO: 525648 - DNA, 181 bp, Homo sapiens
actaacggaactaacgttaccctaggtataacagcgcaatcctattctagatttcatatcaacaatagggtttaccagctctatgttggatcaggacatcccgatggtgcagtccgctattcaaggttcgttttgttccatcgattaaagtcgctacagatcttgaattgatcacggggat

SEQ ID NO: 525649 - DNA, 449 bp, Homo sapiens
cgcatgcgtacactaaatagaaatcagaatattagctaggcgtgatggtgtgcccctacagtcgcagtcactcgggaggctgaagtggtagcattgcttgagcccaggaggttgaggctggagtgagccatgatcaagccactgcactccagccgaggagatggagattgaccctgtctcaaacaacaacaaaaaaataggtgaggatcagccaggcatggtggctcacgcctgtaatcctagaactttgggaggccaaggtgggaggattgcttgaggccaggacttcaagaccagcctgggcagcctagcaagatcccatcccttaaaaaaaagtttttaggctgggcatggtcactcatgcctgtaatcctagcactttgggaggccaaggcaggcgggttgcctgagctgaggagtttgagaccagcctgggcaacattatggag

SEQ ID NO: 525650 - DNA, 164 bp, Homo sapiens
ccgctacggacgccagctcctttcatccaggcctgtggtgggggcaaaaagaccatgggtttgagggggcctccacttcccctgaagacgagtaccctggcagtaacccccagccagatgccaccccgttccacgaaggtttgaggaccttctaccagctggac

SEQ ID NO: 525651 - DNA, 112 bp, Homo sapiens
gccttgtcccgaatcggcacggggaatagtttccgcctagggctataaggtaggaaattttttttcaaccaaaaaggggtggccaaaagtttgaggccccaaagatgggggg

SEQ ID NO: 525652 - DNA, 4105 bp, Homo sapiens
  misc_feature (106)..(106): n is a, c, g, or t
  misc_feature (113)..(113): n is a, c, g, or t
  misc_feature (115)..(116): n is a, c, g, or t
gcgtcgcatcgttcctggccagttcttagctgtgtgatcccaaagggcgagccgttatgattagtgccattgagaaacagaaattggtgtatatttagaacagagntgctgcngnncgacttaccatttcatctcccctggaagcccacaaagcaaacactttagtgtatcatgtagttggagtagatgtcggatttgaaaatccaatgtttgcttgtctggaaatggattatgaggaagcagacaatgatccaacaggggaagcagcagctaatacccagcagacacttactttctatgagctagaccttggtttaaatcatgtggtccgaaaatacagtgaacctttggaggaacacggcaacttccttattacagttccaggagggtcagatggtccaagtggagtactgatctgctctgaaaactatattacttacaagaacttggtgaccagccagatatccgctgtccaattcccaggaggcggaatgacctggatgaccctgaaagaggaatgatttttgtctgctctgcaacccataaaaccaaatcgatgttcttctttttggctcaaactgagcagggagatatctttaagatcactttggagacagatgaagatatggttactgagatccggctcaaatattttgatactgtacccgttgctgctgccatgtgtgtgcttaaaacagggttcctttttgtagcatcagaatttggaaaccattacttatatcaaattgcacatcttggagatgatgatgaagaacctgagttttcatcagccatgcctctggaagaaggagacacattcttttttcagccaagaccacttaaaaaccttgtgctggttgatgagttggacagcctctctcccattctgttttgccagatagctgatctggccaatgaagatactccacagttgtatgtggcctgtggtaggggaccccgatcatctctgagagtcctaagacatggacttgaggtgtcagaaatggctgtttctgagctacctggtaaccccaacgctgtctggacagtgcgtcgacacattgaagatgagtttgatgcctacatcattgtgtctttcgtgaatgccaccctagtgttgtccattggagaaactgtagaagaagtgactgactctgggttcctggggaccaccccgaccttgtcctgctccttattaggagatgatgccttggtgcaggtctatccagatggcattcggcacatacgagcagacaagagagtcaatgagtggaagacccctggaaagaaaacaattgtgaagtgtgcagtgaaccagcgacaagtggtgattgccctgacaggaggagagctggtctatttcgagatggatccttcaggacagctgaatgagtacacagaacggaaggagatgtcagcagatgtggtgtgcatgagtctggccaatgtaccccctggagagcagcggtctcgcttcctggctgtggggcttgtggacaacactgtcagaatcatctccctggatccctcagactgtttgcaacctctaagcatgcaggctctcccagcccagcctgagtccttgtgtatcgtggaaatgggtgggactgagaagcaggatgagctgggtgagaggggctcgattggcttcctatacctgaatattgggctacagaacggtgtgctgctgaggactgtcttggaccctgtcactggggatttgtctgatactcgcactcggtacctggggtcccgtcctgtgaagctcttccgagtccgaatgcaaggccaggaggcagtattggccatgtcaagccgctcatggttgagctattcttaccaatctcgcttccatctcaccccactgtcttacgagacactggaatttgcatcgggttttgcctcggaacagtgtcccgagggcattgtggccatctccaccaacaccctacggattttggcattagagaagctcggtgctgtcttcaatcaagtagccttcccactgcagtacacacccaggaaatttgtcatccaccctgagagtaacaaccttattatcattgaaacggaccacaatgcctacactgaggccacgaaagctcagagaaagcagcagatggcagaggaaatggtggaagcagcaggggaggatgagcgggagctggccgcagagatggcagcagcattcctcaatgaaaacctccctgaatccatctttggagctcccaaggctggcaatgggcagtgggcctctgtgatccgagtgatgaatcccattcaagggaacacactggaccttgtccagctggaacagaatgaggcagcttttagtgtggctgtgtgcaggttttccaacactggtgaagactggtatgtgctggtgggtgtggccaaggacctgatactaaacccccgatctgtggcagggggcttcgtctatacttacaagcttgtgaacaatggggaaaaactggagtttttgcacaagactcctgtggaagaggtccctgctgctattgccccattccaggggagggtgttgattggtgtggggaagctgttgcgtgtctatgacctgggaaagaagaagttactccgaaaatgtgagaataagcatattgccaattatatctctgggatccagactatcggacatagggtaattgtatctgatgtccaagaaagtttcatctgggttcgctacaagcgtaatgaaaaccagcttatcatctttgctgatgatacctacccccgatgggtcactacagccagcctcctggactatgacactgtggctggggcagacaagtttggcaacatatgtgtggtgaggctcccacctaacaccaatgatgaagtagatgaggatcctacaggaaacaaagccctgtgggaccgtggcttgctcaatggggcctcccagaaggcagaggtgatcatgaactaccatgtcggggagacggtgctgtccttgcagaagaccacgctgatccctggaggctcagaatcacttgtctataccaccttgtctggaggaattggcatccttgtgccattcacgtcccatgaggaccatgacttcttccagcatgtggaaatgcacctgcggtctgaacatccccctctctgtgggcgggaccacctcagctttcgctcctactacttccctgtgaagaatgtgattgatggagacctctgtgagcagttcaattccatggaacccaacaaacaaaagaacgtctctgaagaactggaccgaaccccacccgaagtgtccaagaaactcgaggatatccggacccgctacgccttctgagccctcctttcccggtggggcttgccagagactgtgtgttttgtttcccccaccaccatcactgccacctggcttctgccatgtggcaggagggtgactggataattaagactgcattatgaaagtcaacagctctttcccctcagctcttctcctggaatgactggcttcccctcaaattggcactgagatttgctacacttctccccacctggtacatgatacatgaccccaggttccagtgtagaacctgagtcccccattccccaaagccatccctgcattgatatgtcttgactctcctgtctacttttgcacacacccttaatttttaattggttttcttgtaaatacagttttgtacaatgttatctctgtgggaggaaggaggcaggctgtggtgggactgggtagggtatagtatcactcctgagttccactgctctagaatctaaccagaaatagaaacctagtttttaaggtgactggcatccatgtgtcttgttctggagatgaggatgtaggtgggaggtttgaacccaagttagagcaggaagaactgagtagactccttccttccagataccgacttggacttgcggcactctgtggctccccacccccaggtctgtggtggtttctttgttttttcctggttctttttgctgtgctgatgaaacatgacctcaataaccatgtgtatacccacccctcttcccactgggtattgaggaagggtggctgattcttcctcctcttctactctgaggatgttagtatggggat

SEQ ID NO: 525653 - DNA, 137 bp, Homo sapiens
aacgagcagggcgagtcatattctttattctgcctcttcctacatattggtacgaggcgcttatattactgatcatttctctactcagaaaccttaaacatcgatcattatcctcctgcttgcaattatagcaactg

SEQ ID NO: 525654 - DNA, 4282 bp, Homo sapiens
  misc_feature (106)..(106): n is a, c, g, or t
  misc_feature (113)..(113): n is a, c, g, or t
  misc_feature (115)..(116): n is a, c, g, or t
gcgtcgcatcgttcctggccagttcttagctgtgtgatcccaaagggcgagccgttatgattagtgccattgagaaacagaaattggtgtatatttagaacagagntgctgcngnncgacttaccatttcatctcccctggaagcccacaaagcaaacactttagtgtatcatgtagttggagtagatgtcggatttgaaaatccaatgtttgcttgtctggaaatggattatgaggaagcagacaatgatccaacaggggaagcagcagctaatacccagcagacacttactttctatgagctagaccttggtttaaatcatgtggtccgaaaatacagtgaacctttggaggaacacggcaacttccttattacagttccaggagggtcagatggtccaagtggagtactgatctgctctgaaaactatattacttacaagaacttggtgaccagccagatatccgctgtccaattcccaggaggcggaatgacctggatgaccctgaaagaggaatgatttttgtctgctctgcaacccataaaaccaaatcgatgttcttctttttggctcaaactgagcagggagatatctttaagatcactttggagacagatgaagatatggttactgagatccggctcaaatattttgatactgtacccgttgctgctgccatgtgtgtgcttaaaacagggttcctttttgtagcatcagaatttggaaaccattacttatatcaaattgcacatcttggagatgatgatgaagaacctgagttttcatcagccatgcctctggaagaaggagacacattcttttttcagccaagaccacttaaaaaccttgtgctggttgatgagttggacagcctctctcccattctgttttgccagatagctgatctggccaatgaagatactccacagttgtatgtggcctgtggtaggggaccccgatcatctctgagagtcctaagacatggacttgaggtgtcagaaatggctgtttctgagctacctggtaaccccaacgctgtctggacagtgcgtcgacacattgaagatgagtttgatgcctacatcattgtgtctttcgtgaatgccaccctagtgttgtccattggagaaactgtagaagaagtgactgactctgggttcctggggaccaccccgaccttgtcctgctccttattaggagatgatgccttggtgcaggtctatccagatggcattcggcacatacgagcagacaagagagtcaatgagtggaagacccctggaaagaaaacaattgtgaagtgtgcagtgaaccagcgacaagtggtgattgccctgacaggaggagagctggtctatttcgagatggatccttcaggacagctgaatgagtacacagaacggaaggagatgtcagcagatgtggtgtgcatgagtctggccaatgtaccccctggagagcagcggtctcgcttcctggctgtggggcttgtggacaacactgtcagaatcatctccctggatccctcagactgtttgcaacctctaagcatgcaggctctcccagcccagcctgagtccttgtgtatcgtggaaatgggtgggactgagaagcaggatgagctgggtgagaggggctcgattggcttcctatacctgaatattgggctacagaacggtgtgctgctgaggactgtcttggaccctgtcactggggatttgtctgatactcgcactcggtacctggggtcccgtcctgtgaagctcttccgagtccgaatgcaaggccaggaggcagtattggccatgtcaagccgctcatggttgagctattcttaccaatctcgcttccatctcaccccactgtcttacgagacactggaatttgcatcgggttttgcctcggaacagtgtcccgagggcattgtggccatctccaccaacaccctacggattttggcattagagaagctcggtgctgtcttcaatcaagtagccttcccactgcagtacacacccaggaaatttgtcatccaccctgagagtaacaaccttattatcattgaaacggaccacaatgcctacactgaggccacgaaagctcagagaaagcagcagatggcagaggaaatggtggaagcagcaggggaggatgagcgggagctggccgcagagatggcagcagcattcctcaatgaaaacctccctgaatccatctttggagctcccaaggctggcaatgggcagtgggcctctgtgatccgagtgatgaatcccattcaagggaacacactggaccttgtccagctggaacagaatgaggcagcttttagtgtggctgtgtgcaggttttccaacactggtgaagactggtatgtgctggtgggtgtggccaaggacctgatactaaacccccgatctgtggcagggggcttcgtctatacttacaagcttgtgaacaatggggaaaaactggagtttttgcacaagactcctgtggaagaggtccctgctgctattgccccattccaggggagggtgttgattggtgtggggaagctgttgcgtgtctatgacctgggaaagaagaagttactccgaaaatgtgagaataagcatattgccaattatatctctgggatccagactatcggacatagggtaattgtatctgatgtccaagaaagtttcatctgggttcgctacaagcgtaatgaaaaccagcttatcatctttgctgatgatacctacccccgatgggtcactacagccagcctcctggactatgacactgtggctggggcagacaagtttggcaacatatgtgtggtgaggctcccacctaacaccaatgatgaagtagatgaggatcctacaggaaacaaagccctgtgggaccgtggcttgctcaatggggcctcccagaaggcagaggtgatcatgaactaccatgtcggggagacggtgctgtccttgcagaagaccacgctgatccctggaggctcagaatcacttgtctataccaccttgtctggaggaattggcatccttgtgccattcacgtcccatgaggaccatgacttcttccagcatgtggaaatgcacctgcggtctgaacatccccctctctgtgggcgggaccacctcagctttcgctcctactacttccctgtgaagaatgtgattgatggagacctctgtgagcagttcaattccatggaacccaacaaacaaaagaacgtctctgaagaactggaccgaaccccacccgaagtgtccaagaaactcgaggatatccggacccgctacgccttctgagccctcctttcccggtggggcttgccagagactgtgtgttttgtttcccccaccaccatcactgccacctggcttctgccatgtggcaggagggtgactggataattaagactgcattatgaaagtcaacagctctttcccctcagctcttctcctggaatgactggcttcccctcaaattggcactgagatttgctacacttctccccacctggtacatgatacatgaccccaggttccagtgtagaacctgagtcccccattccccaaagccatccctgcattgatatgtcttgactctcctgtctacttttgcacacacccttaatttttaattggttttcttgtaaatacagttttgtacaatgttatctctgtgggaggaaggaggcaggctgtggtgggactgggtagggtatagtatcactcctgagttccactgctctagaatctaaccagaaatagaaacctagtttttaaggtgaaaaaaaaaaaaaaaaaaaaaaaaaaaaaaaaaaaaaaaaaaaaaaaaaaaaaaaaaaaaaaaaaaaaaaaaaaaaaacaaaaaaaaaaaaaaaaggcggcggggcggccgacgagaaacaccaccctcatccggaggagccctaaaaaacagagacgacacaccacatgtgttattatgagaacacaacgggtgggccacaaaaagaaggacaactactaacaattaaacaaggaagacgaggccacgaccagagtaaaagaaagaagctgcgaccaacgagagacaaacatacgcacaaccagaaggaccactgcaaggaaaaaaccaaccatccacgccagggggaggaacacacagaggagagcagcacccaaccaggaagaaaaatacacacccaagagcaaacaacacaacacaagacagcaatcgctggacaaaaaaacaaagtaaacacgcaacgaacaaaactcgccaca

SEQ ID NO: 525655 - DNA, 3750 bp, Homo sapiens
  misc_feature (106)..(106): n is a, c, g, or t
  misc_feature (113)..(113): n is a, c, g, or t
  misc_feature (115)..(116): n is a, c, g, or t
gcgtcgcatcgttcctggccagttcttagctgtgtgatcccaaagggcgagccgttatgattagtgccattgagaaacagaaattggtgtatatttagaacagagntgctgcngnncgacttaccatttcatctcccctggaagcccacaaagcaaacactttagtgtatcatgtagttggagtagatgtcggatttgaaaatccaatgtttgcttgtctggaaatggattatgaggaagcagacaatgatccaacaggggaagcagcagctaatacccagcagacacttactttctatgagctagaccttggtttaaatcatgtggtccgaaaatacagtgaacctttggaggaacacggcaacttccttattacagttccaggagggtcagatggtccaagtggagtactgatctgctctgaaaactatattacttacaagaacttggtgaccagccagatatccgctgtccaattcccaggaggcggaatgacctggatgaccctgaaagaggaatgatttttgtctgctctgcaacccataaaaccaaatcgatgttcttctttttggctcaaactgagcagggagatatctttaagatcactttggagacagatgaagatatggttactgagatccggctcaaatattttgatactgtacccgttgctgctgccatgtgtgtgcttaaaacagggttcctttttgtagcatcagaatttggaaaccattacttatatcaaattgcacatcttggagatgatgatgaagaacctgagttttcatcagccatgcctctggaagaaggagacacattcttttttcagccaagaccacttaaaaaccttgtgctggttgatgagttggacagcctctctcccattctgttttgccagatagctgatctggccaatgaagatactccacagttgtatgtggcctgtggtaggggaccccgatcatctctgagagtcctaagacatggacttgaggtgtcagaaatggctgtttctgagctacctggtaaccccaacgctgtctggacagtgcgtcgacacattgaagatgagtttgatgcctacatcattgtgtctttcgtgaatgccaccctagtgttgtccattggagaaactgtagaagaagtgactgactctgggttcctggggaccaccccgaccttgtcctgctccttattaggagatgatgccttggtgcaggtctatccagatggcattcggcacatacgagcagacaagagagtcaatgagtggaagacccctggaaagaaaacaattgtgaagtgtgcagtgaaccagcgacaagtggtgattgccctgacaggaggagagctggtctatttcgagatggatccttcaggacagctgaatgagtacacagaacggaaggagatgtcagcagatgtggtgtgcatgagtctggccaatgtaccccctggagagcagcggtctcgcttcctggctgtggggcttgtggacaacactgtcagaatcatctccctggatccctcagactgtttgcaacctctaagcatgcaggctctcccagcccagcctgagtccttgtgtatcgtggaaatgggtgggactgagaagcaggatgagctgggtgagaggggctcgattggcttcctatacctgaatattgggctacagaacggtgtgctgctgaggactgtcttggaccctgtcactggggatttgtctgatactcgcactcggtacctggggtcccgtcctgtgaagctcttccgagtccgaatgcaaggccaggaggcagtattggccatgtcaagccgctcatggttgagctattcttaccaatctcgcttccatctcaccccactgtcttacgagacactggaatttgcatcgggttttgcctcggaacagtgtcccgagggcattgtggccatctccaccaacaccctacggattttggcattagagaagctcggtgctgtcttcaatcaagtagccttcccactgcagtacacacccaggaaatttgtcatccaccctgagagtaacaaccttattatcattgaaacggaccacaatgcctacactgaggccacgaaagctcagagaaagcagcagatggcagaggaaatggtggaagcagcaggggaggatgagcgggagctggccgcagagatggcagcagcattcctcaatgaaaacctccctgaatccatctttggagctcccaaggctggcaatgggcagtgggcctctgtgatccgagtgatgaatcccattcaagggaacacactggaccttgtccagctggaacagaatgaggcagcttttagtgtggctgtgtgcaggttttccaacactggtgaagactggtatgtgctggtgggtgtggccaaggacctgatactaaacccccgatctgtggcagggggcttcgtctatacttacaagcttgtgaacaatggggaaaaactggagtttttgcacaagactcctgtggaagaggtccctgctgctattgccccattccaggggagggtgttgattggtgtggggaagctgttgcgtgtctatgacctgggaaagaagaagttactccgaaaatgtgagaataagcatattgccaattatatctctgggatccagactatcggacatagggtaattgtatctgatgtccaagaaagtttcatctgggttcgctacaagcgtaatgccagcctcctggactatgacactgtggctggggcagacaagtttggcaacatatgtgtggtgaggctcccacctaacaccaatgatgaagtagatgaggatcctacaggaaacaaagccctgtgggaccgtggcttgctcaatggggcctcccagaaggcagaggtgatcatgaactaccatgtcggggagacggtgctgtccttgcagaagaccacgctgatccctggaggctcagaatcacttgtctataccaccttgtctggaggaattggcatccttgtgccattcacgtcccatgaggaccatgacttcttccagcatgtggaaatgcacctgcggtctgaacatccccctctctgtgggcgggaccacctcagctttcgctcctactacttccctgtgaagaatgtgattgatggagacctctgtgagcagttcaattccatggaacccaacaaacaaaagaacgtctctgaagaactggaccgaaccccacccgaagtgtccaagaaactcgaggatatccggacccgctacgccttctgagccctcctttcccggtggggcttgccagagactgtgtgttttgtttcccccaccaccatcactgccacctggcttctgccatgtggcaggagggtgactggataattaagactgcattatgaaagtcaacagctctttcccctcagctcttctcctggaatgactggcttcccctcaaattggcactgagatttgctacacttctccccacctggtacatgatacatgaccccaggttccagtgtagaacctgagtcccccattccccaaagccatccctgcattgatatgtcttgactctcctgtctacttttgcacacacccttaatttttaattggttttcttgtaaatacagttttgtacaatgttatctctgtgggaggaaggaggcaggctgtggtgggactgggtagggtatagtatcactcctgagttccactgctctagaatctaaccagaaatagaaacctagtttttaaggtga

SEQ ID NO: 525656 - DNA, 145 bp, Homo sapiens
cacgaactcggttgctgcacggggtctgagtgtctgtattctatggagaattctataattgatcatgtgacgcaatagtgctacgggaatgcaatattactgagacatagtctattttaaagctcagagcgagttctccggactg

SEQ ID NO: 525657 - DNA, 361 bp, Homo sapiens
ttcttgaaagactatcacaacgcttggcagctgtcctctggcattcccagaattcctctttgatctgtacggacatatggactagttggttatatcgaggatcagttatcagaagaactattcagtaatatgaatctcatccagattatgcattagaggatctacgactagataatgccattgcctgaactgagagaccattttcagtcctatgatttggatcatatggaaacaaaggtaccacagtcatactccatggattgtgatcctcgctaaaatatttcgcacagaggtataatgaaacaaatggaccgaattcctaaaacgtataaagaacaagaggactacagagattagatta

SEQ ID NO: 525658 - DNA, 3654 bp, Homo sapiens
  misc_feature (106)..(106): n is a, c, g, or t
  misc_feature (113)..(113): n is a, c, g, or t
  misc_feature (115)..(116): n is a, c, g, or t
  misc_feature (3645)..(3645): n is a, c, g, or t
gcgtcgcatcgttcctggccagttcttagctgtgtgatcccaaagggcgagccgttatgattagtgccattgagaaacagaaattggtgtatatttagaacagagntgctgcngnncgacttaccatttcatctcccctggaagcccacaaagcaaacactttagtgtatcatgtagttggagtagatgtcggatttgaaaatccaatgtttgcttgtctggaaatggattatgaggaagcagacaatgatccaacaggggaagcagcagctaatacccagcagacacttactttctatgagctagaccttggtttaaatcatgtggtccgaaaatacagtgaacctttggaggaacacggcaacttccttattacagttccaggagggtcagatggtccaagtggagtactgatctgctctgaaaactatattacttacaagaacttggtgaccagccagatatccgctgtccaattcccaggaggcggaatgacctggatgaccctgaaagaggaatgatttttgtctgctctgcaacccataaaaccaaatcgatgttcttctttttggctcaaactgagcagggagatatctttaagatcactttggagacagatgaagatatggttactgagatccggctcaaatattttgatactgtacccgttgctgctgccatgtgtgtgcttaaaacagggttcctttttgtagcatcagaatttggaaaccattacttatatcaaattgcacatcttggagatgatgatgaagaacctgagttttcatcagccatgcctctggaagaaggagacacattcttttttcagccaagaccacttaaaaaccttgtgctggttgatgagttggacagcctctctcccattctgttttgccagatagctgatctggccaatgaagatactccacagttgtatgtggcctgtggtaggggaccccgatcatctctgagagtcctaagacatggacttgaggtgtcagaaatggctgtttctgagctacctggtaaccccaacgctgtctggacagtgcgtcgacacattgaagatgagtttgatgcctacatcattgtgtctttcgtgaatgccaccctagtgttgtccattggagaaactgtagaagaagtgactgactctgggttcctggggaccaccccgaccttgtcctgctccttattaggagatgatgccttggtgcaggtctatccagatggcattcggcacatacgagcagacaagagagtcaatgagtggaagacccctggaaagaaaacaattgtgaagtgtgcagtgaaccagcgacaagtggtgattgccctgacaggaggagagctggtctatttcgagatggatccttcaggacagctgaatgagtacacagaacggaaggagatgtcagcagatgtggtgtgcatgagtctggccaatgtaccccctggagagcagcggtctcgcttcctggctgtggggcttgtggacaacactgtcagaatcatctccctggatccctcagactgtttgcaacctctaagcatgcaggctctcccagcccagcctgagtccttgtgtatcgtggaaatgggtgggactgagaagcaggatgagctgggtgagaggggctcgattggcttcctatacctgaatattgggctacagaacggtgtgctgctgaggactgtcttggaccctgtcactggggatttgtctgatactcgcactcggtacctggggtcccgtcctgtgaagctcttccgagtccgaatgcaaggccaggaggcagtattggccatgtcaagccgctcatggttgagctattcttaccaatctcgcttccatctcaccccactgtcttacgagacactggaatttgcatcgggttttgcctcggaacagtgtcccgagggcattgtggccatctccaccaacaccctacggattttggcattagagaagctcggtgctgtcttcaatcaagtagccttcccactgcagtacacacccaggaaatttgtcatccaccctgagagtaacaaccttattatcattgaaacggaccacaatgcctacactgaggccacgaaagctcagagaaagcagcagatggcagaggaaatggtggaagcagcaggggaggatgagcgggagctggccgcagagatggcagcagcattcctcaatgaaaacctccctgaatccatctttggagctcccaaggctggcaatgggcagtgggcctctgtgatccgagtgatgaatcccattcaagggaacacactggaccttgtccagctggaacagaatgaggcagcttttagtgtggctgtgtgcaggttttccaacactggtgaagactggtatgtgctggtgggtgtggccaaggacctgatactaaacccccgatctgtggcagggggcttcgtctatacttacaagcttgtgaacaatggggaaaaactggagtttttgcacaagactcctgtggaagaggtccctgctgctattgccccattccaggggagggtgttgattggtgtggggaagctgttgcgtgtctatgacctgggaaagaagaagttactccgaaaatgtgagaataagcatattgccaattatatctctgggatccagactatcggacatagggtaattgtatctgatgtccaagaaagtttcatctgggttcgctacaagcgtaatgaaaaccagcttatcatctttgctgatgatacctacccccgatgggtcactacagccagcctcctggactatgacactgtggctggggcagacaagtttggcaacatatgtgtggtgaggctcccacctaacaccaatgatgaagtagatgaggatcctacaggaaacaaagccctgtgggaccgtggcttgctcaatggggcctcccagaaggcagaggtgatcatgaactaccatgtcggggagacggtgctgtccttgcagaagaccacgctgatccctggaggctcagaatcacttgtctataccaccttgtctggaggaattggcatccttgtgccattcacgtcccatgaggaccatgacttcttccagcatgtggaaatgcacctgcggtctgaacatccccctctctgtgggcgggaccacctcagctttcgctcctactacttccctgtgaagaatgtgattgatggagacctctgtgagcagttcaattccatggaacccaacaaacaaaagaacgtctctgaagaactggaccgaaccccacccgaagtgtccaagaaactcgaggatatccggacccgctacgccttctgagccctcctttcccggtggggcttgccagagactgtgtgttttgtttcccccaccaccatcactgccacctggcttctgccatgtggcaggagggtgactggataattaagactgcattatgaaagtcaacagctctttcccctcagctcttctcctggaatgactggcttcccctcaaattggcactgagatttgctacacttctccccacctggtacatgatacatgaccccaggttccagtgtagaacctgagtcccccattccccaaagccatcccgcttagcctgcctcacccacacccgtgtggtaccttcagccctgtgncaagctaat

SEQ ID NO: 525659 - DNA, 1651 bp, Homo sapiens
gtgaggtgccctagattattcccgtagcagcgcagccaatcaatgaaaacctccctgaatccatctttggagctcccaaggctggcaatgggcagtgggcctctgtgatccgagtgatgaatcccattcaagggaacacactggaccttgtccagctggaacagaatgaggcagcttttagtgtggctgtgtgcaggttttccaacactggtgaagactggtatgtgctggtgggtgtggccaaggacctgatactaaacccccgatctgtggcagggggcttcgtctatacttacaagcttgtgaacaatggggaaaaactggagtttttgcacaagactcctgtggaagaggtccctgctgctattgccccattccaggggagggtgttgattggtgtggggaagctgttgcgtgtctatgacctgggaaagaagaagttactccgaaaatgtgagaataagcatattgccaattatatctctgggatccagactatcggacatagggtaattgtatctgatgtccaagaaagtttcatctgggttcgctacaagcgtaatgaaaaccagcttatcatctttgctgatgatacctacccccgatgggtcactacagccagcctcctggactatgacactgtggctggggcagacaagtttggcaacatatgtgtggtgaggctcccacctaacaccaatgatgaagtagatgaggatcctacaggaaacaaagccctgtgggaccgtggcttgctcaatggggcctcccagaaggcagaggtgatcatgaactaccatgtcggggagacggtgctgtccttgcagaagaccacgctgatccctggaggctcagaatcacttgtctataccaccttgtctggaggaattggcatccttgtgccattcacgtcccatgaggaccatgacttcttccagcatgtggaaatgcacctgcggtctgaacatccccctctctgtgggcgggaccacctcagctttcgctcctactacttccctgtgaagaatgtgattgatggagacctctgtgagcagttcaattccatggaacccaacaaacaaaagaacgtctctgaagaactggaccgaaccccacccgaagtgtccaagaaactcgaggatatccggacccgctacgccttctgagccctcctttcccggtggggcttgccagagactgtgtgttttgtttcccccaccaccatcactgccacctggcttctgccatgtggcaggagggtgactggataattaagactgcattatgaaagtcaacagctctttcccctcagctcttctcctggaatgactggcttcccctcaaattggcactgagatttgctacacttctccccacctggtacatgatacatgaccccaggttccagtgtagaacctgagtcccccattccccaaagccatccctgcattgatatgtcttgactctcctgtctacttttgcacacacccttaatttttaattggttttcttgtaaatacagttttgtacaatgttatctctgtgggaggaaggaggcaggctgtggtgggactgggtagggtatagtatcactcctgagttccactgctctagaatctaaccagaaatagaaacctagtttttaaggtga

SEQ ID NO: 525660 - DNA, 132 bp, Homo sapiens
aacgacagctccctaacgatttgtaacgacgctcctaacgacgcctcgtaactagcgcttcctaactgagccctccgtacagcgcctccctaacaccccctgtactcctgcatgcggcgctcgttacaggag

SEQ ID NO: 525661 - DNA, 250 bp, Homo sapiens
gtttgtgtcagttttttgatgacctaatcccataggagaaggcatgactccttttttacttggaggaaagagaatggtctaaatggcaatagcagtggttttatttatggaaggtacattggaaaatatgcttttaaatcccatgttaggttggcattcattaagggggctaggggccaggtgcggtggctacgcctttaatcccagcactttgggaggccgaggtagtggatcagtgaggtcagtattc

SEQ ID NO: 525662 - DNA, 3750 bp, Homo sapiens
  misc_feature (106)..(106): n is a, c, g, or t
  misc_feature (113)..(113): n is a, c, g, or t
  misc_feature (115)..(116): n is a, c, g, or t
gcgtcgcatcgttcctggccagttcttagctgtgtgatcccaaagggcgagccgttatgattagtgccattgagaaacagaaattggtgtatatttagaacagagntgctgcngnncgacttaccatttcatctcccctggaagcccacaaagcaaacactttagtgtatcatgtagttggagtagatgtcggatttgaaaatccaatgtttgcttgtctggaaatggattatgaggaagcagacaatgatccaacaggggaagcagcagctaatacccagcagacacttactttctatgagctagaccttggtttaaatcatgtggtccgaaaatacagtgaacctttggaggaacacggcaacttccttattacagttccaggagggtcagatggtccaagtggagtactgatctgctctgaaaactatattacttacaagaacttggtgaccagccagatatccgctgtccaattcccaggaggcggaatgacctggatgaccctgaaagaggaatgatttttgtctgctctgcaacccataaaaccaaatcgatgttcttctttttggctcaaactgagcagggagatatctttaagatcactttggagacagatgaagatatggttactgagatccggctcaaatattttgatactgtacccgttgctgctgccatgtgtgtgcttaaaacagggttcctttttgtagcatcagaatttggaaaccattacttatatcaaattgcacatcttggagatgatgatgaagaacctgagttttcatcagccatgcctctggaagaaggagacacattcttttttcagccaagaccacttaaaaaccttgtgctggttgatgagttggacagcctctctcccattctgttttgccagatagctgatctggccaatgaagatactccacagttgtatgtggcctgtggtaggggaccccgatcatctctgagagtcctaagacatggacttgaggtgtcagaaatggctgtttctgagctacctggtaaccccaacgctgtctggacagtgcgtcgacacattgaagatgagtttgatgcctacatcattgtgtctttcgtgaatgccaccctagtgttgtccattggagaaactgtagaagaagtgactgactctgggttcctggggaccaccccgaccttgtcctgctccttattaggagatgatgccttggtgcaggtctatccagatggcattcggcacatacgagcagacaagagagtcaatgagtggaagacccctggaaagaaaacaattgtgaagtgtgcagtgaaccagcgacaagtggtgattgccctgacaggaggagagctggtctatttcgagatggatccttcaggacagctgaatgagtacacagaacggaaggagatgtcagcagatgtggtgtgcatgagtctggccaatgtaccccctggagagcagcggtctcgcttcctggctgtggggcttgtggacaacactgtcagaatcatctccctggatccctcagactgtttgcaacctctaagcatgcaggctctcccagcccagcctgagtccttgtgtatcgtggaaatgggtgggactgagaagcaggatgagctgggtgagaggggctcgattggcttcctatacctgaatattgggctacagaacggtgtgctgctgaggactgtcttggaccctgtcactggggatttgtctgatactcgcactcggtacctggggtcccgtcctgtgaagctcttccgagtccgaatgcaaggccaggaggcagtattggccatgtcaagccgctcatggttgagctattcttaccaatctcgcttccatctcaccccactgtcttacgagacactggaatttgcatcgggttttgcctcggaacagtgtcccgagggcattgtggccatctccaccaacaccctacggattttggcattagagaagctcggtgctgtcttcaatcaagtagccttcccactgcagtacacacccaggaaatttgtcatccaccctgagagtaacaaccttattatcattgaaacggaccacaatgcctacactgaggccacgaaagctcagagaaagcagcagatggcagaggaaatggtggaagcagcaggggaggatgagcgggagctggccgcagagatggcagcagcattcctcaatgaaaacctccctgaatccatctttggagctcccaaggctggcaatgggcagtgggcctctgtgatccgagtgatgaatcccattcaagggaacacactggaccttgtccagctggaacagaatgaggcagcttttagtgtggctgtgtgcaggttttccaacactggtgaagactggtatgtgctggtgggtgtggccaaggacctgatactaaacccccgatctgtggcagggggcttcgtctatacttacaagcttgtgaacaatggggaaaaactggagtttttgcacaagactcctgtggaagaggtccctgctgctattgccccattccaggggagggtgttgattggtgtggggaagctgttgcgtgtctatgacctgggaaagaagaagttactccgaaaatgtgagaataagcatattgccaattatatctctgggatccagactatcggacatagggtaattgtatctgatgtccaagaaagtttcatctgggttcgctacaagcgtaatgaaaaccagcttatcatctttgctgatgatacctacccccgatgggtcactacagccagcctcctggactatgacactgtggctggggcagacaagtttggcaacatatgtgtggtgaggctcccacctaacaccaatgatgaagtagatgaggatcctacaggaaacaaagccctgtgggaccgtggcttgctcaatggggcctcccagaaggcagaggtgatcatgaactaccatgtcggggagacggtgctgtccttgcagaagaccacgctgatccctggaggctcagaatcacttgtctataccaccttgtctggaggaattggcatccttgtgccattcacgtcccatgaggaccatgacttcttccagcatgtggaaatgcacctgcggtctgaacatccccctctctgtgggcgggaccacctcagctttcgctcctactacttccctgtgaagaatgtgattgatggagacctctgtgagcagttcaattccatggaacccaacaaactcgaggatatccggacccgctacgccttctgagccctcctttcccggtggggcttgccagagactgtgtgttttgtttcccccaccaccatcactgccacctggcttctgccatgtggcaggagggtgactggataattaagactgcattatgaaagtcaacagctctttcccctcagctcttctcctggaatgactggcttcccctcaaattggcactgagatttgctacacttctccccacctggtacatgatacatgaccccaggttccagtgtagaacctgagtcccccattccccaaagccatccctgcattgatatgtcttgactctcctgtctacttttgcacacacccttaatttttaattggttttcttgtaaatacagttttgtacaatgttatctctgtgggaggaaggaggcaggctgtggtgggactgggtagggtatagtatcactcctgagttccactgctctagaatctaaccagaaatagaaacctagtttttaaggtga

SEQ ID NO: 525663 - DNA, 282 bp, Homo sapiens
tcttttcacccccttaatatcacattggtaaaggaaaactccacgctactggctcaacatgagagggaacaaaacatgacactcacggcctgggccacgttacccgaagaagacagatagtgatcatcattacccgtaataggagccatttttcatggagtagcctagttgaagacagtcgtaggaagcaaggagggacaacctcaaattgagattctgaatgggcgagatacacttccctggccatcagtgctagccaatcttgataaagaccagataagc

SEQ ID NO: 525664 - DNA, 146 bp, Homo sapiens
aggtgcgtaagtcttcaacgccagaggaggtgacgaagcgcaaggcaggcggtgctcttctgcctgagtgagtgcacaagaagaaccatcatcctggaggaagggcaaggaagatcctggtgggcgatgtgggccagactgtcgac

SEQ ID NO: 525665 - DNA, 3601 bp, Homo sapiens
  misc_feature (106)..(106): n is a, c, g, or t
  misc_feature (113)..(113): n is a, c, g, or t
  misc_feature (115)..(116): n is a, c, g, or t
  misc_feature (3564)..(3564): n is a, c, g, or t
  misc_feature (3589)..(3589): n is a, c, g, or t
gcgtcgcatcgttcctggccagttcttagctgtgtgatcccaaagggcgagccgttatgattagtgccattgagaaacagaaattggtgtatatttagaacagagntgctgcngnncgacttaccatttcatctcccctggaagcccacaaagcaaacactttagtgtatcatgtagttggagtagatgtcggatttgaaaatccaatgtttgcttgtctggaaatggattatgaggaagcagacaatgatccaacaggggaagcagcagctaatacccagcagacacttactttctatgagctagaccttggtttaaatcatgtggtccgaaaatacagtgaacctttggaggaacacggcaacttccttattacagttccaggagggtcagatggtccaagtggagtactgatctgctctgaaaactatattacttacaagaacttggtgaccagccagatatccgctgtccaattcccaggaggcggaatgacctggatgaccctgaaagaggaatgatttttgtctgctctgcaacccataaaaccaaatcgatgttcttctttttggctcaaactgagcagggagatatctttaagatcactttggagacagatgaagatatggttactgagatccggctcaaatattttgatactgtacccgttgctgctgccatgtgtgtgcttaaaacagggttcctttttgtagcatcagaatttggaaaccattacttatatcaaattgcacatcttggagatgatgatgaagaacctgagttttcatcagccatgcctctggaagaaggagacacattcttttttcagccaagaccacttaaaaaccttgtgctggttgatgagttggacagcctctctcccattctgttttgccagatagctgatctggccaatgaagatactccacagttgtatgtggcctgtggtaggggaccccgatcatctctgagagtcctaagacatggacttgaggtgtcagaaatggctgtttctgagctacctggtaaccccaacgctgtctggacagtgcgtcgacacattgaagatgagtttgatgcctacatcattgtgtctttcgtgaatgccaccctagtgttgtccattggagaaactgtagaagaagtgactgactctgggttcctggggaccaccccgaccttgtcctgctccttattaggagatgatgccttggtgcaggtctatccagatggcattcggcacatacgagcagacaagagagtcaatgagtggaagacccctggaaagaaaacaattgtgaagtgtgcagtgaaccagcgacaagtggtgattgccctgacaggaggagagctggtctatttcgagatggatccttcaggacagctgaatgagtacacagaacggaaggagatgtcagcagatgtggtgtgcatgagtctggccaatgtaccccctggagagcagcggtctcgcttcctggctgtggggcttgtggacaacactgtcagaatcatctccctggatccctcagactgtttgcaacctctaagcatgcaggctctcccagcccagcctgagtccttgtgtatcgtggaaatgggtgggactgagaagcaggatgagctgggtgagaggggctcgattggcttcctatacctgaatattgggctacagaacggtgtgctgctgaggactgtcttggaccctgtcactggggatttgtctgatactcgcactcggtacctggggtcccgtcctgtgaagctcttccgagtccgaatgcaaggccaggaggcagtattggccatgtcaagccgctcatggttgagctattcttaccaatctcgcttccatctcaccccactgtcttacgagacactggaatttgcatcgggttttgcctcggaacagtgtcccgagggcattgtggccatctccaccaacaccctacggattttggcattagagaagctcggtgctgtcttcaatcaagtagccttcccactgcagtacacacccaggaaatttgtcatccaccctgagagtaacaaccttattatcattgaaacggaccacaatgcctacactgaggccacgaaagctcagagaaagcagcagatggcagaggaaatggtggaagcagcaggggaggatgagcgggagctggccgcagagatggcagcagcattcctcaatgaaaacctccctgaatccatctttggagctcccaaggctggcaatgggcagtgggcctctgtgatccgagtgatgaatcccattcaagggaacacactggaccttgtccagctggaacagaatgaggcagcttttagtgtggctgtgtgcaggttttccaacactggtgaagactggtatgtgctggtgggtgtggccaaggacctgatactaaacccccgatctgtggcagggggcttcgtctatacttacaagcttgtgaacaatggggaaaaactggagtttttgcacaagactcctgtggaagaggtccctgctgctattgccccattccaggggagggtgttgattggtgtggggaagctgttgcgtgtctatgacctgggaaagaagaagttactccgaaaatgtgagaataagcatattgccaattatatctctgggatccagactatcggacatagggtaattgtatctgatgtccaagaaagtttcatctgggttcgctacaagcgtaatgaaaaccagcttatcatctttgctgatgatacctacccccgatgggtcactacagccagcctcctggactatgacactgtggctggggcagacaagtttggcaacatatgtgtggtgaggctcccacctaacaccaatgatgaagtagatgaggatcctacaggaaacaaagccctgtgggaccgtggcttgctcaatggggcctcccagaaggcagaggtgatcatgaactaccatgtcggggagacggtgctgtccttgcagaagaccacgctgatccctggaggctcagaatcacttgtctataccaccttgtctggaggaattggcatccttgtgccattcacgtcccatgaggaccatgacttcttccagcatgtggaaatgcacctgcggtctgaacatccccctctctgtgggcgggaccacctcagctttcgctcctactacttccctgtgaagaatgtgattgatggagacctctgtgagcagttcaattccatggaacccaacaaacaaaagaacgtctctgaagaactggaccgaaccccacccgaagtgtccaagaaactcgaggatatccggacccgctacgccttctgagccctcctttcccggtggggcttgccagagactgtgtgttttgtttcccccaccaccatcactgccacctggcttctgccatgtggcaggagggtgactggataattaagactgcattatgaaagtcaacagctctttcccctcagctcttctcctggaatgactggcttcccctcaaattggcactgagatttgctacacttctccccacctggtacatgatacatgaccccaggttcctactngaacgtgatcccccttttccagatnagcgatgggcta

SEQ ID NO: 525666 - DNA, 1607 bp, Homo sapiens
  misc_feature (14)..(14): n is a, c, g, or t
  misc_feature (22)..(22): n is a, c, g, or t
ctacgtcgaggccnggtgttantcggccgaggcaaggctggcaatgggcagtgggcctctgtgatccgagtgatgaatcccattcaagggaacacactggaccttgtccagctggaacagaatgaggcagcttttagtgtggctgtgtgcaggttttccaacactggtgaagactggtatgtgctggtgggtgtggccaaggacctgatactaaacccccgatctgtggcagggggcttcgtctatacttacaagcttgtgaacaatggggaaaaactggagtttttgcacaagactcctgtggaagaggtccctgctgctattgccccattccaggggagggtgttgattggtgtggggaagctgttgcgtgtctatgacctgggaaagaagaagttactccgaaaatgtgagaataagcatattgccaattatatctctgggatccagactatcggacatagggtaattgtatctgatgtccaagaaagtttcatctgggttcgctacaagcgtaatgaaaaccagcttatcatctttgctgatgatacctacccccgatgggtcactacagccagcctcctggactatgacactgtggctggggcagacaagtttggcaacatatgtgtggtgaggctcccacctaacaccaatgatgaagtagatgaggatcctacaggaaacaaagccctgtgggaccgtggcttgctcaatggggcctcccagaaggcagaggtgatcatgaactaccatgtcggggagacggtgctgtccttgcagaagaccacgctgatccctggaggctcagaatcacttgtctataccaccttgtctggaggaattggcatccttgtgccattcacgtcccatgaggaccatgacttcttccagcatgtggaaatgcacctgcggtctgaacatccccctctctgtgggcgggaccacctcagctttcgctcctactacttccctgtgaagaatgtgattgatggagacctctgtgagcagttcaattccatggaacccaacaaacaaaagaacgtctctgaagaactggaccgaaccccacccgaagtgtccaagaaactcgaggatatccggacccgctacgccttctgagccctcctttcccggtggggcttgccagagactgtgtgttttgtttcccccaccaccatcactgccacctggcttctgccatgtggcaggagggtgactggataattaagactgcattatgaaagtcaacagctctttcccctcagctcttctcctggaatgactggcttcccctcaaattggcactgagatttgctacacttctccccacctggtacatgatacatgaccccaggttccagtgtagaacctgagtcccccattccccaaagccatccctgcattgatatgtcttgactctcctgtctacttttgcacacacccttaatttttaattggttttcttgtaaatacagttttgtacaatgttatctctgtgggaggaaggaggcaggctgtggtgggactgggtagggtatagtatcactcctgagttccactgctctagaatctaaccagaaatagaaacctagtttttaaggtga

SEQ ID NO: 525667 - DNA, 476 bp, Homo sapiens
  misc_feature (7)..(7): n is a, c, g, or t
  misc_feature (105)..(105): n is a, c, g, or t
  misc_feature (107)..(107): n is a, c, g, or t
  misc_feature (167)..(167): n is a, c, g, or t
  misc_feature (194)..(194): n is a, c, g, or t
  misc_feature (210)..(210): n is a, c, g, or t
  misc_feature (232)..(232): n is a, c, g, or t
  misc_feature (267)..(267): n is a, c, g, or t
  misc_feature (286)..(286): n is a, c, g, or t
  misc_feature (289)..(289): n is a, c, g, or t
  misc_feature (292)..(293): n is a, c, g, or t
  misc_feature (444)..(444): n is a, c, g, or t
ggcacgngggcacgcacacgtgaagtgtggaagtggaacaagtggcgtcgtcgtcgtgtcaggcgggccgtggacgtggaaagtgtgtggaaacgtgggaaaagngngtgtggtgagaagagggtcaaggtaaggaccgaggtccaggcaggaccgaaggcggccgntagaggaaggcacaggcaggcggcggngaagggaaagagcggnaaggaagcggggcggccaggcnagaaaaagggcaccaacagggggcggaggcagggngagggggcaggaagaaacnacnagnnagagaggaagagaaggggagcagaagggacggggcaacaggggcaagagaagcaaaagccgggagagggaaagcaaggaaaacaggcacaagaggagtgcggaggaagaggcacaaggagggcagggggaaaaggaacagaaggaaggaanccaaggagcaagggaggggcggcttgagtgac

SEQ ID NO: 525668 - DNA, 263 bp, Homo sapiens
tggaccttattaacactttatggacagacacaacacgtactgtttgtgctcgcacaaggccgggcaaccgagcctgatcccggtaaaatctgtcggagcggcagggccggcaggggagtgcgcttcccagggcacacattcgctataaagggtgtaaatgactggtccagcaagtttctttaccttcccacacccctcttctcaaggtccccccagagtcctcgggggggccttcgacctgcaaaagcctcacgaggagtgcg

SEQ ID NO: 525669 - DNA, 666 bp, Homo sapiens
  misc_feature (239)..(239): n is a, c, g, or t
  misc_feature (298)..(298): n is a, c, g, or t
taaggaaccagaatctcttattttttctcgggcgcccctcccaaggataaggttttttaaaattaccccgggccaaaacaaaccctgtcgcgcccacgcccccaggttcaaggcatttgttctattcggggcacccaacgccccctctgttgggggttaaggctcccaagaagggggccccccccatccgtggggccattattttggccaagttttccattgtccccgtggccaaaggntattgggggaacaaaattggcaagcccccccctgtcccttcaagagggacaggcccctncggttttttgttggtacgccttatccctgcacccagggggaatgggtttgtttccccccccgggcctaaaaaaagtgtccaaattggtgggatttaattatttgttaccccccagcccgggggtgccctgcccccctggggaattttgccaaggcccccttttatgccatttttaaaacctacaggtccctgcccccccccctttggaaggagacggtattccccaagtttccccatcaggggttccctgccccccttgtcaaaaccccccccaaagtttctcgggcaggggactcaaggccccaccttgggtggtcccacaaaaggcgtttttttcccacaaaaaaaaaaggtgaattaacgggtga

SEQ ID NO: 525670 - DNA, 1705 bp, Homo sapiens
cagccacagtgtcatagtccaggaggctggcctgtagtgacccatcgggggtaggtatcatcagcaaagatgataagcttggttttcaatttacgcttgtagcggaacccaggatgaaacttttcttggacatcagatacaattaccctatgtccgatagtctggatcccagagatataattggcaatatgcttattctcacattttcggagtaacttcttctttcccaggtcatagacacgcaacagcttccccacaccaatcaacaccctcccctggaatggggcaatagcagcaaggacctgatactaaacccccgatctgtggcagggggcttcgtctatacttacaagcttgtgaacaatggggaaaaactggagtttttgcacaagactcctgtggaagaggtccctgctgctattgccccattccaggggagggtgttgattggtgtggggaagctgttgcgtgtctatgacctgggaaagaagaagttactccgaaaatgtgagaataagcatattgccaattatatctctgggatccagactatcggacatagggtaattgtatctgatgtccaagaaagtttcatctgggttcgctacaagcgtaatgaaaaccagcttatcatctttgctgatgatacctacccccgatgggtcactacagccagcctcctggactatgacactgtggctggggcagacaagtttggcaacatatgtgtggtgaggctcccacctaacaccaatgatgaagtagatgaggatcctacaggaaacaaagccctgtgggaccgtggcttgctcaatggggcctcccagaaggcagaggtgatcatgaactaccatgtcggggagacggtgctgtccttgcagaagaccacgctgatccctggaggctcagaatcacttgtctataccaccttgtctggaggaattggcatccttgtgccattcacgtcccatgaggaccatgacttcttccagcatgtggaaatgcacctgcggtctgaacatccccctctctgtgggcgggaccacctcagctttcgctcctactacttccctgtgaagaatgtgattgatggagacctctgtgagcagttcaattccatggaacccaacaaacaaaagaacgtctctgaagaactggaccgaaccccacccgaagtgtccaagaaactcgaggatatccggacccgctacgccttctgagccctcctttcccggtggggcttgccagagactgtgtgttttgtttcccccaccaccatcactgccacctggcttctgccatgtggcaggagggtgactggataattaagactgcattatgaaagtcaacagctctttcccctcagctcttctcctggaatgactggcttcccctcaaattggcactgagatttgctacacttctccccacctggtacatgatacatgaccccaggttccagtgtagaacctgagtcccccattccccaaagccatccctgcattgatatgtcttgactctcctgtctacttttgcacacacccttaatttttaattggttttcttgtaaatacagttttgtacaatgttatctctgtgggaggaaggaggcaggctgtggtgggactgggtagggtatagtatcactcctgagttccactgctctagaatctaaccagaaatagaaacctagtttttaaggtga

SEQ ID NO: 525671 - DNA, 244 bp, Homo sapiens
ctgagtcggcggcggctgcgggaactttcccagcggatctaatggctgcgcgcgggccggctgtgaggcgcggcggcgagcgacgggcgcggggccgcggagcagcgagcgagcgagcgagcgcgaggccggagccccggcaggcccggcgacccgccgagcccgcgatgcgccccggggccgccccccggcgcagctgacgccccgcggcccgcgaagaccccggccggcggtcccggaggaa

SEQ ID NO: 525672 - DNA, 1426 bp, Homo sapiens
atggtcatagcgtatttcagccgggccggcttcccctcctggcaataccaacgcattcatttcttcctggctctgtgaggaacaatggggaaaaactggagtttttgcacaagactcctgtggaagaggtccctgctgctattgccccattccaggggagggtgttgattggtgtggggaagctgttgcgtgtctatgacctgggaaagaagaagttactccgaaaatgtgagaataagcatattgccaattatatctctgggatccagactatcggacatagggtaattgtatctgatgtccaagaaagtttcatctgggttcgctacaagcgtaatgaaaaccagcttatcatctttgctgatgatacctacccccgatgggtcactacagccagcctcctggactatgacactgtggctggggcagacaagtttggcaacatatgtgtggtgaggctcccacctaacaccaatgatgaagtagatgaggatcctacaggaaacaaagccctgtgggaccgtggcttgctcaatggggcctcccagaaggcagaggtgatcatgaactaccatgtcggggagacggtgctgtccttgcagaagaccacgctgatccctggaggctcagaatcacttgtctataccaccttgtctggaggaattggcatccttgtgccattcacgtcccatgaggaccatgacttcttccagcatgtggaaatgcacctgcggtctgaacatccccctctctgtgggcgggaccacctcagctttcgctcctactacttccctgtgaagaatgtgattgatggagacctctgtgagcagttcaattccatggaacccaacaaacaaaagaacgtctctgaagaactggaccgaaccccacccgaagtgtccaagaaactcgaggatatccggacccgctacgccttctgagccctcctttcccggtggggcttgccagagactgtgtgttttgtttcccccaccaccatcactgccacctggcttctgccatgtggcaggagggtgactggataattaagactgcattatgaaagtcaacagctctttcccctcagctcttctcctggaatgactggcttcccctcaaattggcactgagatttgctacacttctccccacctggtacatgatacatgaccccaggttccagtgtagaacctgagtcccccattccccaaagccatccctgcattgatatgtcttgactctcctgtctacttttgcacacacccttaatttttaattggttttcttgtaaatacagttttgtacaatgttatctctgtgggaggaaggaggcaggctgtggtgggactgggtagggtatagtatcactcctgagttccactgctctagaatctaaccagaaatagaaacctagtttttaaggtga

SEQ ID NO: 525673 - DNA, 245 bp, Homo sapiens
tcgtgcgtgcccacgatacacgatatctccctcgtaggaggtgaaaaatgcaaatatcatacgctggcatacgaactcgcttcagcttatacttagaactcataggctcttgattggcccccaaaaatatttttccttgtccttatttcaatgcccaactcaccacacaccacacaacagggcaaacacataaacaggcttgaacatgtacatgtctcaagtcagtgtcttgttcaaccaacaaa

SEQ ID NO: 525674 - DNA, 367 bp, Homo sapiens
ttttaaaaaaagttttttttatccccccccatcctggggaaggtaacaatccccccttaacacatttcagttttaaaaccggggtgatttggaaaaaaactttgtcccaattaaattgtaaaaatgctatggattcaaaagtaaacccggttgattaatcaaacaagctggaaaaccccggttaatttttttgttggaaattgacccccggaattttcccctacacgtcatttaaattttggaaaaaaaaaaacattttaatttccaaagcttttaacagggtgacaaaaaacttttccacgcagtaaggcagtcattttttccccttggaacggtaattcaaaaaaatttaatccggtttgggcca

SEQ ID NO: 525675 - DNA, 183 bp, Homo sapiens
  misc_feature (66)..(66): n is a, c, g, or t
gacttctttgtgtgttgccacgttgtagtacagtggtgtgatctcagactggcaacctcctcctgnagagcagccccgtggcagaactccacccccatgacccaatcagatctcacatggagagcactcactatcctgagagcagcccctgggggaactccacacaccaacacaccaaggaag

SEQ ID NO: 525676 - DNA, 132 bp, Homo sapiens
ggagcaaaatgcaatgaaaacatattttaatgggatgaaatttctatgcccatctctatcatcacatgtaaaaaaaaaaggaaggggggctttcaaatttaatggagaattctaatgttttaatgtgaactt

SEQ ID NO: 525677 - DNA, 291 bp, Homo sapiens
gcgcttactctggttactgctgctgctgccaggagtcctcggctcccttcaggcgccgttcaaaccaggccttggctccatccatggtatgtacctgacctggaagcgctgccactggctgcaggagagtcttcaactaccgggtgcgcaccttgtgcttcgggatctgcctacagagctgctcctgctgacgctgcttggcttcacacacctatcgtagctaacactcatagcgggcacgcaccgccagcatctccttctaatgccgtagacgaactgctcccagctcta

SEQ ID NO: 525678 - DNA, 367 bp, Homo sapiens
gcccagccctaagtgtgaatagttcttggcgtgtataaatgacaaaggagtttttcctctcctaagggcttgatgttaacactaaatagaatctgattttgactcctaatgcagcacattgctgtacacatttacagaatgtttgcagaatctctcctgatatttttcatgctggtcatgacctgaaggaaatttcttagcacgaatattgtgtcaggtatttttaacttgatcatggtcagctctgaggtgcaactgtgtcttcccgtgctgcacccctgtgaccactctggggtgtgcagcctgaatcatgctgttagaactgttgtggtacaagctccaaataaaatttattaataggatctat

SEQ ID NO: 525679 - DNA, 498 bp, Homo sapiens
tcgacagccgcaccagcgccgccaccgtggcggcggccgaggcccaacgcattggcctggcgcacgtgtcgcgggatgtattcctggacgacgtgcgcacgcccgaggcgatcacgactcagttgcagcaaggcgtggccctggcccacaagcagggctccgccgtgctgatcggccacccttacccgcaaaccttgcaagtgctggagcgtgagataccccggctcaagggccaaggtatcgaattgatcccgctgcgccagatgatcgccgaacgtggcaaccaggccatgcctgcccatggcgggcacgggctttaccataaccgctgacccctgccagcgcctattcaagcgaacgggatgatgtccttcacctgctcataggtgagcgggccccggtgaatacgctcaccttgcctggccagctggacggcttcggcacgaccgtagaaacgctgttgccaggttttcaggtgcgcccgagcgaactcatggg

SEQ ID NO: 525680 - DNA, 550 bp, Homo sapiens
ggtgggccactggggttgggcccaagaggatttccacatggaggtggtgggggtgggagaaacacacagattggtgtttggaggtgcccctacccccccgggagaaaaataacttttctttggaggaatgaatcaccccagtgtagggcccctcacccaaatggcccaggagggggccagtgggttctcccatgggggggaaccacggggaatatttttttggtggcaaagagggctattattaagggggcccccggggcccggggggggcccttgggggtttccaagggggccggggggggggggaaaaagggggctttgcccccgccaaaatggtttccaggggggggcccaaccaggttcccgggggggggccgtttttattaggcgggccccccaggttttgggaacagctttttttccgggccccagggttcccccggtttttttggaccctcccaattcctgttcccccaagggtttttttggggggggatagggaattggaacaaacccttggggtccccttaaaagggcccctttttgttta

SEQ ID NO: 525681 - DNA, 381 bp, Homo sapiens
  misc_feature (114)..(114): n is a, c, g, or t
gctcgacttctgttctcgcaaaatccccagttcgcgggcgctggaaaaataggtcagtgaacccagcgcgatggccgccacgactccctggcacgcggtgatgataatacggtncgagttccgcgggttgtcggtcatacagggatcgtcccagatagagggcgataagaatcaggccggcgataatcgaataagaggtctgttccagtgtcatggcacccttccttgggttggtagtgtcaggtgggtgttgtgacccataatccggccagggcgcccagcagcaagcccgccagcagtgcaccccccatgttgggaagagcatgccagccagctcgccccccagcgtcgtggcgatcatctggatgtccatcgtcgacg

SEQ ID NO: 525682 - DNA, 316 bp, Homo sapiens
ttgaaatgcagtccaaggaacacagttaaacagtccaagggttgaaagatgacatagccattttaggaaagaaccaaacagaacttctggaaatgaaaaattcaccacaggaatttcagaacacagtggaagtattaatagcagaaaagaccaagctgaagaaagaatctcatagcttgaagaccactcctttgaatcagtgcagacagacagaaataaaagagatagaattttaaataatgaacaaaacctccaaaaaatatgcctacatcaagaacttagaatgatcaccaatttacaacctaacatcaccatg

SEQ ID NO: 525683 - DNA, 1243 bp, Homo sapiens
  misc_feature (757)..(757): n is a, c, g, or t
ggattcaatccctccttgctgagctggctgagtgctatgatgtgcgtactgacgtgctctcacggtggtacatggcagcacatgcctgtacgcgccctgatgccattctcagatacgttgcgcagcgggttgcgtgatcccacgccgccagacttcggacttggcgttgagagagccatatggtcagttcaagcgtgcatcagagaagagcgttcctcgctgaagcactcaagcgggtagaatgcttcccccaggacctcctggcaacgatcatggcgagcaaggaggccactgtcccgagggtccagctcactagtctaccgttgcaggcgtggagcgtccccgcgtggtactgtagagcatggggactggaaggactctgcagcattggatgaacaagaacagtctttgttggcagtgtggcacgttcgcgcccccgcacgaaatggtggttccctgattaattccaggcagtccacattcatgagcgcagtgcggcgaggtttgaaaccctgcatccctctccgtccttgcaagttgagtagcctgactcgtgcaggcctggtattcgtctttgcctagatcgaggatggtcaaaagcatcgcaaggttcatcgaataatagccataaagataccgtagcgttggcattgggagacgaaccccacaggggttatccacgattcgcgccgagtcttgcgtttcccccaaaattgacccaggttggtgccacttttggggtcgactcgaatccctntaggccttcttttcttgcatcttaattgggaccctttgcctcattccacgtgggcacctgtttatcccgcctccctctatcccttcacaagatactcctaaacgacaaactaacaatgtccgcgatttttatcttggagcttgcacttttcttcttcgtgcaccaatataacccacacaattaacaacacctttgcatagaggataggtcccataagatattccaagccgatttgggaccatgccaaagggacccggcttcagtctctacgatacgttggggcacccagtgagggatcctttacccacctgtttattccccatgaatcccccatcccggttgtttggttgaccacaagagcaggaacacagcatttgttcgccgagtgctcgcctataatagaggtaaagctcggaattagacaactaccggcacattatcaacgccacggtataaacccgtgcatatatgacacgcgggggcaaa

SEQ ID NO: 525684 - DNA, 133 bp, Homo sapiens
taacatgataaatcgagctcggtaccgcagtatgcgccctttcctccagcgatgagtgcccgctgccacgtagcgcgtcgggtcatggatccggcgtgcagtcgtggcagcggctggcgcgttgcggccaggc

SEQ ID NO: 525685 - DNA, 392 bp, Homo sapiens
gagtctgttagctgttgaatggataattatgtgcagtattgaggataactaagaatatgtggtaccgggtaggcaagagttacataggaggtgactgaggaagaaagactgcagctgtgtctcactcagtacccaggcctcttggtcaaaagtctgaaaagcatttaagcccaaggctcattgcccctgtagtaccaatggctaagccatcagggcattttcccatacacatgtactgaggaaggctctgtatcctcaaaagagctggacttcaacttaatatcatgtgcaccgtgatcctagcacctcctttacctttagcggtttttctacacaatcattcggagtctgtaaactcaatgtgacccagccctgttaagtccgtcgacgcg

SEQ ID NO: 525686 - DNA, 234 bp, Homo sapiens
attctctgggtctgccctcaccagctcactgaactggggcttcaggaaatggagcctgttcagggtatactccattttaattttctgtagtcctggccacagaagagctaaacgtgccttatgcagagcaaagctagccttttcagccttgttttagagcaagcttgtccaacctgtggcctgtggaccacatgcagtctaggatggctttgaatgtgacctatatacaaattc

SEQ ID NO: 525687 - DNA, 224 bp, Homo sapiens
gtacttgctttgtcactgccccccgtttacatggggggggggtttaatttggtttctgagcgcataagctaaggagtgggaaaaaaaaaacaaaaaaaaaaaaaaaaggaaaaattcccccagaaaaaaagggggggaaaaagataattgacattaaatttgggggtctccaaatttccctcttatatatttcttgaaaccaaggacaaaccaaaaggcatgga

SEQ ID NO: 525688 - DNA, 272 bp, Homo sapiens
ctacaggacaatccttcgtctcaggtagtaaatgcccttgctcctgagtaactggggtgttggctgtaagagacagctaatgacaaatcctcaggctgagagggaggctgggactggagtacgggtggagactggcgatgatgctgaagctggggctgagactgaggctgaggttgagccacaggctcaggttggggctcagattctttttcttctttttcctcagactccttttccatgtctaaagcactgacattctctttcccaggaga

SEQ ID NO: 525689 - DNA, 116 bp, Homo sapiens
caaccctagcggagatagccaaagtggagctggacaatatgccactccgtgaaacgcagctgcgtgtgcgctttgcctgccaatagtgccatccctatacagttctgaaacctatc

SEQ ID NO: 525690 - DNA, 255 bp, Homo sapiens
cccgtccacgtctgaatataatgttctactaagttcactcagtatatggtactaaaaggaaactgtaagaagacccacaagtgacgtggaccaagactattatttaattgctcaacttgcaacttcgctgccagcaagagtgcagctccattcctttgactccagtgttgggctgttaactgctgcacctcattgcctttaattgttaatgtttgtgttttgtatgagggtaggcactgttgggccatatgcacg

SEQ ID NO: 525691 - DNA, 261 bp, Homo sapiens
  misc_feature (228)..(228): n is a, c, g, or t
ttctactttgggggcttttccccagtgcattaccaggcccagggcagctgctggtgtgtcatggacagcggagaagaggtgcctgggacgcgcgttaccgggggccagcccgcctgtgagtagccctgcggtgtccgctgcgcattcaactgcgtcggacggtggttggctggaacaatcctcgtgtgagacaatctctgggccccacatggctcggccatgcagcangtgccaatgtgcttgtgcgcgccatgggctccg

SEQ ID NO: 525692 - DNA, 355 bp, Homo sapiens
ctcgacaggagcacaacacacatgaattcctatattctatttatatatgttgtagagaccaagtcccgtcctgtcatccaggctgcaatagcagtggtgcacatctatggctcactgaaatctcaccctcccaggttcaagcgattctctgcttcaccctcctcagtagctgggatagcaggtgtacacaaccatgcccagctaagttttgtattatttagtgaagacagtatttcaccatttaggccaggctggtctcgaactcctgacctcaggtgatccaaccgcctcagtctcccaaagtgctgagaatacaggcgtgagccaccatgcccggctgtcagctctattttct

SEQ ID NO: 525693 - DNA, 734 bp, Homo sapiens
  misc_feature (53)..(53): n is a, c, g, or t
  misc_feature (128)..(129): n is a, c, g, or t
  misc_feature (131)..(132): n is a, c, g, or t
  misc_feature (165)..(165): n is a, c, g, or t
  misc_feature (225)..(225): n is a, c, g, or t
  misc_feature (231)..(231): n is a, c, g, or t
  misc_feature (289)..(289): n is a, c, g, or t
  misc_feature (293)..(293): n is a, c, g, or t
  misc_feature (386)..(386): n is a, c, g, or t
  misc_feature (404)..(404): n is a, c, g, or t
tttacatatatggaagtaatccaagtctcctctataggtctgttaaagttaanatgataagtaagctaaagagacttaccaagtaaccaataaggttgatagagcttgtggtagatttcacacagatnnannaccaatagagagaaagggaatgtggcactaatntaggaagcacatagttaagtaagcaaaagttaagaaactaccatcttaaaggtgtgttcncagganaagcaagatccacaatggatcttaagttaagtattggcaggctggcatacaagagtgngatnagatgaagtccaaaaggcagataccaagagagagtggactctgctggcaattaagactcagcaccagggctgcagaggagaggatacttctcnccgtatcttgaggaagcnccttagcacggaagaacgagcagaactagcaccagtgtgtgttaggaagccattcagcaagcaccagggggtctcccatctctttggttcaccaggaatccaggaagaggagaaacggaatatcttgttagatggtctcaaagcaccgggagatttggtgcccttaaatttagcaggtggggccgagcgcggtggcttacccctgtaatcctaaaacactgggagaccaaggcaggtggattgcctgagctcaggactttgaaaccagcctggacaacatggtgaaaactcatctctactaaaatacaaaaaattagccagctcgtgccg

SEQ ID NO: 525694 - DNA, 342 bp, Homo sapiens
  misc_feature (100)..(100): n is a, c, g, or t
tgcaaaataatcaactgcccccaaatggccacacagggccctgtcattgcacttatactctcagactcccttagaagcatttgaggtttatattctttcnaaagtctgtcctgaggagggttttaaaaacaaggactatttcctttgggtcatcccagaaaacctttagacatttagacaaaacaggcctgtttgccagctggacccccccccccttttcatactaagatcctggtattatataaaactgaaggattaaaaactggatagctcatacctcctttcttggtgaacttcaataaaattttaagcctttaataaaattagacttctcgttttgga

SEQ ID NO: 525695 - DNA, 168 bp, Homo sapiens
tggacagatcacaaggtcaggagtttgagaccagtctgggcgacagagcaagactgtctcaaatcagaaaaaaaaagagcccattcccattgaacaaccaaacgaacgcattcccccagaatttcttcccaaagaacagagccagagaatatactcccaactttatcc

SEQ ID NO: 525696 - DNA, 104 bp, Homo sapiens
gcaaacgccagggagccacatcaactccaggagacactgccaactccaggagccacatgccaactccaggagccacccctgacaccaggagccactgccaaatc

SEQ ID NO: 525697 - DNA, 943 bp, Homo sapiens
gacccacgcgtccgcggacgcgtgggaggctagtcccatcggtgtggacaactgctctccagatacccttttgccgtagagtacttgcctgatctacagagctgccactcctgaaaagctaacactttccatgccatgctgcctttggaaggaggtgccagccaggcagcattagctaaggccctactttgtaggctctcctcacaactagtgctggccgtctgtgctttcatcggtcatcatctcatgaagtcagaaatgtagctgcttttctatggtttccatggtttagccacactctaggggatattagttttggcactttcccaagcaggcctcgtgtacagggtggtgaagctccccttcctctttctggatgcagctgtagtgtgtgtcattgagccgttgaactcacagttcgcagcactagaacccagcacctgaagaccaagcttggctaacaaggcgtcctctctgtaaggcgcattacagccttcttgctcataaggacagctagacagcgcttcagcattatgcttggaggccgttctcacacagtgaaatgcaaccaacaagaagctcaaaactgcaaaagaagtggtactatagagaccatgagaagactggtagcaggtgcgagtaggaacaagaaggcagcgtggggccctgcatggcctcagctgcgaggcgagtggcttcaatgtggccctactctgcacatgttcctgtgacgtgacagcaccacgagtatgatccgggggttacaatacttcacccagcaggaaagtcaccaatatgcacaagtggccagggggacccccccatgtggaggaaacgaggaggagtgcaagtcgcccaaccggagcatggtgcccatcctgtagccggcgtggcccgccgggacaaccatccaggagaccgcacaaacagacggcgcgacgag

SEQ ID NO: 525698 - DNA, 1111 bp, Homo sapiens
gaatgaaagtcatgcccagagggaacgaaactcgagcatggcggcagtggagctcgtgagactatgctgctcacagtgaggtaggataggatgagacgcggcgtaacgatcgcgtggtgggtgcttcgagaacctcgtgttcctgatccctgatgtctctgttgtttattgccaaactgttcgctccagtaatatggcatgcgtttatttgcagagatttaattctagtgggaaacgtagatgtccgtatctagaaaggtttttcacctcaaagcggcttggcatgtgtagaagagacatgctagaaggaacgtttgacggaccgatggaacattggggaacaggtgcacgcaagaactagggaacgacacgtggtaattccaaccttgcgccacgaggtaggtgcatccggtagtaagctttatgtggcgatttagttatggaggcgtaggggtaattactcgcacatagtgccatgttctagggtatgcacattgatgcgtgctggtactttgagcaggatctaacacaaccttctaaactatacttgaaagttcaagtctaggggtaatcaattaagacttgggcaggcctagcctagtaagccctacgactttcaatgtagtgagctggtttacgtcgcttgataatcctgaccctgtggactaatgtactatacgaatgggtgctgcctgcacgttctctagacagacttgtgggtgtgccaagccatgcaccaatcaatgcgcatccatggaaataccgtaggagcgactgagtccggtgtcgtctatcacgctgcctgatcttgtgaccgcagggcatgtttctcgtttgcgtgcaagcggtcgtttgagcccttgttgggctagggttccttgattggctcgcggggatctgtgctagcaggtgcggtggggtagcgcattgccggtgcggagacgggatgttactgcagggttggactgaaatcctccctcatgtttttgattgtcgtgcctttccaagtctgggatggtccgacgatttgggcctctacagttgcttctgggggggaacatatccaggtggggcccgtccaaacacagttgcttaggggctgggggagaca

SEQ ID NO: 525699 - DNA, 1368 bp, Homo sapiens
acagcgtctggctggcattctataatagctgtatttacctgcttttcctctatagactcctgtggaagaggtccctgctgctattgccccattccaggggagggtgttgattggtgtggggaagctgttgcgtgtctatgacctgggaaagaagaagttactccgaaaatgtgagaataagcatattgccaattatatctctgggatccagactatcggacatagggtaattgtatctgatgtccaagaaagtttcatctgggttcgctacaagcgtaatgaaaaccagcttatcatctttgctgatgatacctacccccgatgggtcactacagccagcctcctggactatgacactgtggctggggcagacaagtttggcaacatatgtgtggtgaggctcccacctaacaccaatgatgaagtagatgaggatcctacaggaaacaaagccctgtgggaccgtggcttgctcaatggggcctcccagaaggcagaggtgatcatgaactaccatgtcggggagacggtgctgtccttgcagaagaccacgctgatccctggaggctcagaatcacttgtctataccaccttgtctggaggaattggcatccttgtgccattcacgtcccatgaggaccatgacttcttccagcatgtggaaatgcacctgcggtctgaacatccccctctctgtgggcgggaccacctcagctttcgctcctactacttccctgtgaagaatgtgattgatggagacctctgtgagcagttcaattccatggaacccaacaaacaaaagaacgtctctgaagaactggaccgaaccccacccgaagtgtccaagaaactcgaggatatccggacccgctacgccttctgagccctcctttcccggtggggcttgccagagactgtgtgttttgtttcccccaccaccatcactgccacctggcttctgccatgtggcaggagggtgactggataattaagactgcattatgaaagtcaacagctctttcccctcagctcttctcctggaatgactggcttcccctcaaattggcactgagatttgctacacttctccccacctggtacatgatacatgaccccaggttccagtgtagaacctgagtcccccattccccaaagccatccctgcattgatatgtcttgactctcctgtctacttttgcacacacccttaatttttaattggttttcttgtaaatacagttttgtacaatgttatctctgtgggaggaaggaggcaggctgtggtgggactgggtagggtatagtatcactcctgagttccactgctctagaatctaaccagaaatagaaacctagtttttaaggtga

SEQ ID NO: 525700 - DNA, 913 bp, Homo sapiens
tcagcgcgatctctctttatttatttacttattttgagatggagtctcactctgtcacccaggctggagtgcagtgggacgatctgagctcgctgcaacttctgcccctcctccctccaggttcaagcaattctcctgcctcagcctcccaagtagctaggattacaggcacacgccaccttgcccagctaatttttgtatttttagtacagacagggttttgccatgttggccaggctggtctcaaattcctgacctcaggtgatccacctgccttggcctcccaaagtgctgggattacaggcatgaaccaccacacctggtcttgttgaggattcttgcatctatgttcatcagggatactggcctatagattttttttcttgtgtccatatctagttttggtatcagggtaatgctgccctcacaggatgagtttgagaactggtatgagttcttctttaactgttcagtagaattcagcagtgaagccatcagggcctggacttttctttgatgggagactctatataactgatttaatctcattactcatagttggtcttttcaggtttctatttcttcttggccaatattgtaagtggatctggtcagaattatccatttcattttggtttccaattgtggctatagtggtcataaaggcttaatgaccttggattttggggatagttaatgtctctaagcctgctgtttaacacctgggcgggggtattaacaagtcctgcgcttattcagaaggggggcaaagcctgactgttacaattactgataaggctatggcaataactatgatcctgaaacaaaggggcccggcccatccctttggaggtttccgcgtcggcggttagggggggcgatattgagggagtgagttagagcgaaaggatgg

SEQ ID NO: 525701 - DNA, 3222 bp, Homo sapiens
  misc_feature (106)..(106): n is a, c, g, or t
  misc_feature (113)..(113): n is a, c, g, or t
  misc_feature (115)..(116): n is a, c, g, or t
gcgtcgcatcgttcctggccagttcttagctgtgtgatcccaaagggcgagccgttatgattagtgccattgagaaacagaaattggtgtatatttagaacagagntgctgcngnncgacttaccatttcatctcccctggaagcccacaaagcaaacactttagtgtatcatgtagttggagtagatgtcggatttgaaaatccaatgtttgcttgtctggaaatggattatgaggaagcagacaatgatccaacaggggaagcagcagctaatacccagcagacacttactttctatgagctagaccttggtttaaatcatgtggtccgaaaatacagtgaacctttggaggaacacggcaacttccttattacagttccaggagggtcagatggtccaagtggagtactgatctgctctgaaaactatattacttacaagaacttggtgaccagccagatatccgctgtccaattcccaggaggcggaatgacctggatgaccctgaaagaggaatgatttttgtctgctctgcaacccataaaaccaaatcgatgttcttctttttggctcaaactgagcagggagatatctttaagatcactttggagacagatgaagatatggttactgagatccggctcaaatattttgatactgtacccgttgctgctgccatgtgtgtgcttaaaacagggttcctttttgtagcatcagaatttggaaaccattacttatatcaaattgcacatcttggagatgatgatgaagaacctgagttttcatcagccatgcctctggaagaaggagacacattcttttttcagccaagaccacttaaaaaccttgtgctggttgatgagttggacagcctctctcccattctgttttgccagatagctgatctggccaatgaagatactccacagttgtatgtggcctgtggtaggggaccccgatcatctctgagagtcctaagacatggacttgaggtgtcagaaatggctgtttctgagctacctggtaaccccaacgctgtctggacagtgcgtcgacacattgaagatgagtttgatgcctacatcattgtgtctttcgtgaatgccaccctagtgttgtccattggagaaactgtagaagaagtgactgactctgggttcctggggaccaccccgaccttgtcctgctccttattaggagatgatgccttggtgcaggtctatccagatggcattcggcacatacgagcagacaagagagtcaatgagtggaagacccctggaaagaaaacaattgtgaagtgtgcagtgaaccagcgacaagtggtgattgccctgacaggaggagagctggtctatttcgagatggatccttcaggacagctgaatgagtacacagaacggaaggagatgtcagcagatgtggtgtgcatgagtctggccaatgtaccccctggagagcagcggtctcgcttcctggctgtggggcttgtggacaacactgtcagaatcatctccctggatccctcagactgtttgcaacctctaagcatgcaggctctcccagcccagcctgagtccttgtgtatcgtggaaatgggtgggactgagaagcaggatgagctgggtgagaggggctcgattggcttcctatacctgaatattgggctacagaacggtgtgctgctgaggactgtcttggaccctgtcactggggatttgtctgatactcgcactcggtacctggggtcccgtcctgtgaagctcttccgagtccgaatgcaaggccaggaggcagtattggccatgtcaagccgctcatggttgagctattcttaccaatctcgcttccatctcaccccactgtcttacgagacactggaatttgcatcgggttttgcctcggaacagtgtcccgagggcattgtggccatctccaccaacaccctacggattttggcattagagaagctcggtgctgtcttcaatcaagtagccttcccactgcagtacacacccaggaaatttgtcatccaccctgagagtaacaaccttattatcattgaaacggaccacaatgcctacactgaggccacgaaagctcagagaaagcagcagatggcagaggaaatggtggaagcagcaggggaggatgagcgggagctggccgcagagatggcagcagcattcctcaatgaaaacctccctgaatccatctttggagctcccaaggctggcaatgggcagtgggcctctgtgatccgagtgatgaatcccattcaagggaacacactggaccttgtccagctggaacagaatgaggcagcttttagtgtggctgtgtgcaggttttccaacactggtgaagactggtatgtgctggtgggtgtggccaaggacctgatactaaacccccgatctgtggcagggggcttcgtctatacttacaagcttgtgaacaatggggaaaaactggagtttttgcacaagactcctgtggaagaggtccctgctgctattgccccattccaggggagggtgttgattggtgtggggaagctgttgcgtgtctatgacctgggaaagaagaagttactccgaaaatgtgagaataagcatattgccaattatatctctgggatccagactatcggacatagggtaattgtatctgatgtccaagaaagtttcatctgggttcgctacaagcgtaatgaaaaccagcttatcatctttgctgatgatacctacccccgatgggtcactacagccagcctcctggactatgacactgtggctggggcagacaagtttggcaacatatgtgtggtgaggctcccacctaacaccaatgatgaagtagatgaggatcctacaggaaacaaagccctgtgggaccgtggcttgctcaatggggcctcccagaaggcagaggtgatcatgaactaccatgtcggggagacggtgctgtccttgcagaagaccacgctgatccctggaggctcagaatcacttgtctataccaccttgtctggaggaattggcatccttgtgccattcacgtcccatgaggaccatgacttcttccagcatgtggaaatgcacctgcggtctgaacatccccctctctgtgggcgggaccacctcagctttcgctcctactacttctcacctttcctaacactaacattctgtccaagccactattagtttatgcctac

SEQ ID NO: 525702 - DNA, 273 bp, Homo sapiens
tgggctcattcagtgaaccaatatggtggttctgcaatgggctggtctagactactctccagaaaaggataaaaagggcttgagcaattgcctagaagaggcaatctccgaggggctagggtggctgcactgtggaaggcagtgactggcagcaggttcttagctcttgaagctcttccgggaggaggaggtggtgggagacaaattggacgcgggagctggctagctcctcgccaaggactaagcctagccccagccctcggccagggcttg

SEQ ID NO: 525703 - DNA, 455 bp, Homo sapiens
aggggcacaggcttgccgggtaacaggatgctcgaacaggcaatcagcccgacaggggtacagagatgcgcgtcgatcaacccattcgctagcaagagttcggccatatcaggcgaactgacgttcgagtactacataaggcgccatgagcaccgaacaatgccagcggctggtcgcagcgttgcgctgggccaaggcgcagagatacccaggtgttgctgatcaagggcggatgtggcaagctataccaaatggcgttcacctcaacgtcatccaggccagccgacgtgccggggctggaagcctgggccaacattcaaagccatcgacgatgtgtgcctggagctgctcaccgccaggcaactggtgatcagcggcctgacctggcagtgcaggcgcaggcggcgtgatgctggagctggacgccgacattgtattggctcacgaaggtgtgg

SEQ ID NO: 525704 - DNA, 1261 bp, Homo sapiens
tggccacactgcgatataagtgattctgagcctccggatcagcgtgtcttctgcaaggacagcaccgtctccccgacatggtagttcatgatcacctctgccttctgggaggccccattgagcaagccacggtcccacagggctttgtttcctgtaggatcctcatctacttcatcattggtgttaggtgggagcctcaccacacatatgttgccaaacttgtctgcgccagcctcctggactatgacactgtggctggggcagacaagtttggcaacatatgtgtggtgaggctcccacctaacaccaatgatgaagtagatgaggatcctacaggaaacaaagccctgtgggaccgtggcttgctcaatggggcctcccagaaggcagaggtgatcatgaactaccatgtcggggagacggtgctgtccttgcagaagaccacgctgatccctggaggctcagaatcacttgtctataccaccttgtctggaggaattggcatccttgtgccattcacgtcccatgaggaccatgacttcttccagcatgtggaaatgcacctgcggtctgaacatccccctctctgtgggcgggaccacctcagctttcgctcctactacttccctgtgaagaatgtgattgatggagacctctgtgagcagttcaattccatggaacccaacaaacaaaagaacgtctctgaagaactggaccgaaccccacccgaagtgtccaagaaactcgaggatatccggacccgctacgccttctgagccctcctttcccggtggggcttgccagagactgtgtgttttgtttcccccaccaccatcactgccacctggcttctgccatgtggcaggagggtgactggataattaagactgcattatgaaagtcaacagctctttcccctcagctcttctcctggaatgactggcttcccctcaaattggcactgagatttgctacacttctccccacctggtacatgatacatgaccccaggttccagtgtagaacctgagtcccccattccccaaagccatccctgcattgatatgtcttgactctcctgtctacttttgcacacacccttaatttttaattggttttcttgtaaatacagttttgtacaatgttatctctgtgggaggaaggaggcaggctgtggtgggactgggtagggtatagtatcactcctgagttccactgctctagaatctaaccagaaatagaaacctagtttttaaggtga

SEQ ID NO: 525705 - DNA, 470 bp, Homo sapiens
  misc_feature (48)..(49): n is a, c, g, or t
  misc_feature (333)..(334): n is a, c, g, or t
  misc_feature (339)..(339): n is a, c, g, or t
  misc_feature (428)..(428): n is a, c, g, or t
  misc_feature (454)..(454): n is a, c, g, or t
  misc_feature (464)..(464): n is a, c, g, or t
attctcctgccttagcctcctgaaaagctgggattacagggccctgcnnccaagcccagctaattgtatttttagtagagacaggatttcaccatgttggccaggccagtctcaaactcctgacctcaggtgatccacctgcctcagcctcccagactgttgggattacaggcatgagccaccacgcctggccagtttcttcattttacatatggtcacattgggcgcctagaacagttaggtcgctcgtcacatagggcagttaagtgggagaaccaggtttcaaaatcaggtaagaaaaccatcattcatttaactgaggcaccagctgtnnttaangccttgccacgggcgttttccttggcagcttcacaacagtgggggagggtttgttattcctggaatgttccttcattttttacagatgnagggacattttaggggagaaggaganttttaccccngggttt

SEQ ID NO: 525706 - DNA, 3197 bp, Homo sapiens
  misc_feature (106)..(106): n is a, c, g, or t
  misc_feature (113)..(113): n is a, c, g, or t
  misc_feature (115)..(116): n is a, c, g, or t
  misc_feature (3145)..(3145): n is a, c, g, or t
  misc_feature (3181)..(3181): n is a, c, g, or t
gcgtcgcatcgttcctggccagttcttagctgtgtgatcccaaagggcgagccgttatgattagtgccattgagaaacagaaattggtgtatatttagaacagagntgctgcngnncgacttaccatttcatctcccctggaagcccacaaagcaaacactttagtgtatcatgtagttggagtagatgtcggatttgaaaatccaatgtttgcttgtctggaaatggattatgaggaagcagacaatgatccaacaggggaagcagcagctaatacccagcagacacttactttctatgagctagaccttggtttaaatcatgtggtccgaaaatacagtgaacctttggaggaacacggcaacttccttattacagttccaggagggtcagatggtccaagtggagtactgatctgctctgaaaactatattacttacaagaacttggtgaccagccagatatccgctgtccaattcccaggaggcggaatgacctggatgaccctgaaagaggaatgatttttgtctgctctgcaacccataaaaccaaatcgatgttcttctttttggctcaaactgagcagggagatatctttaagatcactttggagacagatgaagatatggttactgagatccggctcaaatattttgatactgtacccgttgctgctgccatgtgtgtgcttaaaacagggttcctttttgtagcatcagaatttggaaaccattacttatatcaaattgcacatcttggagatgatgatgaagaacctgagttttcatcagccatgcctctggaagaaggagacacattcttttttcagccaagaccacttaaaaaccttgtgctggttgatgagttggacagcctctctcccattctgttttgccagatagctgatctggccaatgaagatactccacagttgtatgtggcctgtggtaggggaccccgatcatctctgagagtcctaagacatggacttgaggtgtcagaaatggctgtttctgagctacctggtaaccccaacgctgtctggacagtgcgtcgacacattgaagatgagtttgatgcctacatcattgtgtctttcgtgaatgccaccctagtgttgtccattggagaaactgtagaagaagtgactgactctgggttcctggggaccaccccgaccttgtcctgctccttattaggagatgatgccttggtgcaggtctatccagatggcattcggcacatacgagcagacaagagagtcaatgagtggaagacccctggaaagaaaacaattgtgaagtgtgcagtgaaccagcgacaagtggtgattgccctgacaggaggagagctggtctatttcgagatggatccttcaggacagctgaatgagtacacagaacggaaggagatgtcagcagatgtggtgtgcatgagtctggccaatgtaccccctggagagcagcggtctcgcttcctggctgtggggcttgtggacaacactgtcagaatcatctccctggatccctcagactgtttgcaacctctaagcatgcaggctctcccagcccagcctgagtccttgtgtatcgtggaaatgggtgggactgagaagcaggatgagctgggtgagaggggctcgattggcttcctatacctgaatattgggctacagaacggtgtgctgctgaggactgtcttggaccctgtcactggggatttgtctgatactcgcactcggtacctggggtcccgtcctgtgaagctcttccgagtccgaatgcaaggccaggaggcagtattggccatgtcaagccgctcatggttgagctattcttaccaatctcgcttccatctcaccccactgtcttacgagacactggaatttgcatcgggttttgcctcggaacagtgtcccgagggcattgtggccatctccaccaacaccctacggattttggcattagagaagctcggtgctgtcttcaatcaagtagccttcccactgcagtacacacccaggaaatttgtcatccaccctgagagtaacaaccttattatcattgaaacggaccacaatgcctacactgaggccacgaaagctcagagaaagcagcagatggcagaggaaatggtggaagcagcaggggaggatgagcgggagctggccgcagagatggcagcagcattcctcaatgaaaacctccctgaatccatctttggagctcccaaggctggcaatgggcagtgggcctctgtgatccgagtgatgaatcccattcaagggaacacactggaccttgtccagctggaacagaatgaggcagcttttagtgtggctgtgtgcaggttttccaacactggtgaagactggtatgtgctggtgggtgtggccaaggacctgatactaaacccccgatctgtggcagggggcttcgtctatacttacaagcttgtgaacaatggggaaaaactggagtttttgcacaagactcctgtggaagaggtccctgctgctattgccccattccaggggagggtgttgattggtgtggggaagctgttgcgtgtctatgacctgggaaagaagaagttactccgaaaatgtgagaataagcatattgccaattatatctctgggatccagactatcggacatagggtaattgtatctgatgtccaagaaagtttcatctgggttcgctacaagcgtaatgaaaaccagcttatcatctttgctgatgatacctacccccgatgggtcactacagccagcctcctggactatgacactgtggctggggcagacaagtttggcaacatatgtgtggtgagttgatgttgttaacttgggttacagtgatgtgtaggaaagctggctcagtttcttgtgggtaaagccaaggaggaatcaaatctgagaagtaaaaatggatataaaattccatcctactaaagctaactctacaagcaatctgttctttaagccttcttactagtcttttggatttttctctgtggtttatctccctcctccctattgaacgtgatttaatgataggtttagtttgagctaatggctaatactcttctttttacattttataagaactttggaatgtctgtatctatgttgtgtggtttngctttacctattacgcctgtgtaaactcattgctcnttggtaaagatgggga

SEQ ID NO: 525707 - DNA, 328 bp, Homo sapiens
  misc_feature (306)..(306): n is a, c, g, or t
aaatggtcaacaagagaccttgaacctggccatctctagcgtgaattgcccttatttcttctaatgctccagctgctccagtttctcctggcccttcagttccagttgccgttgttccctctggctcttcagttccagctcctggtacttcctcaggtattggtgctctggctattgctcacttcccagcctcccaagtcctatatgttgggggaaattgacttctgctgccagatctgggatctgtcattccttttgattgttctcagagattacctacacaaggggcttaggtcctccagcttngggagtcttctctttgggcttt

SEQ ID NO: 525708 - DNA, 1598 bp, Homo sapiens
  misc_feature (224)..(224): n is a, c, g, or t
  misc_feature (354)..(354): n is a, c, g, or t
  misc_feature (466)..(466): n is a, c, g, or t
  misc_feature (584)..(584): n is a, c, g, or t
gtccggcgaggctggcgacgccgggcgttgactcgatgcggcctagcagaagtggggcatcacttacctcaagcctcgtgcgtgaaacactgtactatggtctgattcgacgagagcccactgtgattactactacttactgtttatcctttatactaaccaggaaggaggatagagaaccagacaacgcataaatttcttgacagtaatagagatagatagtngctctccagagtgaggagccttgcgtatggggagattctggcgcctcgcctacagagcctgtcatatgtgtgcatgtagtagacgtagtttggtcgcatgacatatgaagatcatagacttgaatgctcncagctggtcggtgcctatatgtaggtgagtgcgcgaaggctgtgtgtctataggcgtgtgataccgtgaacccgagcagtcaaagacggtgtgacgtatgatcacacgtttntatgcggtagagcagaccaccacagagatacagtatcgttgcacaaaagtgggtacgggcacaagcgcaacggatatgcgacccagacatggctggagaacacagcatgccaaaggtncagggagacataatggcacacacttgtgtggggcaggcagctcacactaacagggaccatgaaataacaggaccggctttgttcataggatacatacacacaacacaaagaaaccaaagaaattagcgccaggggcgaatctcctcattgggtcgtgcgcgttcgtgagtgtaacatcccaagggggggtaccaatttgcacaatggcgcgttagggacgtgtgtcaccaactacaaatagcgttaattcgttgtacatcccttcagtggtcatttctcttagtggtctacaccatacagtggacggagaccctgggccgcaggacagcacgctagaaaataagggggcctctcgtcccagttgaatatccctagcatggtacgcctaaggttttggcccgttggcatttgaacaagtcaccttgaagaccaatgggttaccctaactatccttaacccccttccacggagggacctggatcagaaacggcttgggctttccccaggaccaaggagcaaatgctaaaacgagaccaaggagggcgcacccaggaaaggcggcgtggacgtgcaacggggcaacccgggagaggagccaacactggcgcgcaacagaacagtgagccgacaggggcaaccccggacgccacaacagacaaggaaagaacggacgacacgcaaaggaagagataaagaaagaggcacaaacacaaaattgcagcacaaaatgagcagaagaaaacaacagggaccaacacaagaaagacagcaaccagggacacgagtggacggcgaccacaaacagacagacgtgagagaaacccaagaagaacaacgcacagacagagaaacgagaaacacatggacaaggaggaccacagagagagcggccaacaccgggcaccataagacgagacgactcgacaacgagacacctggtactctccgccctgcggcacggcggaaggacagaaaacagacgagcgacaaacagacaaaagacgaggaaagagc

SEQ ID NO: 525709 - DNA, 135 bp, Homo sapiens
agcctgaccattactgggttacagtcctaactgcttttaatttaggaggtccagcgaagttacttgggtaccagggactaatcgtattcattgttcgtcactctacccctgttgaaaattgcttccccaaaactg

SEQ ID NO: 525710 - DNA, 1011 bp, Homo sapiens
gaatgggccccagggagaacactgcttagcacttttcctgttgccctcactgaagaaattgcctttggtgaattattcatagtgcacacgactgtgctgagtgctgtccgtccacagtcctttcttaccaatctgcaaaaaatctccttggagagtagcgagttccttagagagagtccattcccagtcctctgctctgaggtgtgtcctgggctttactttctcctgtaggcatgtgctgctttaatagagcatccttgtgccattcacgtcccatgaggaccatgacttcttccagcatgtggaaatgcacctgcggtctgaacatccccctctctgtgggcgggaccacctcagctttcgctcctactacttccctgtgaagaatgtgattgatggagacctctgtgagcagttcaattccatggaacccaacaaacaaaagaacgtctctgaagaactggaccgaaccccacccgaagtgtccaagaaactcgaggatatccggacccgctacgccttctgagccctcctttcccggtggggcttgccagagactgtgtgttttgtttcccccaccaccatcactgccacctggcttctgccatgtggcaggagggtgactggataattaagactgcattatgaaagtcaacagctctttcccctcagctcttctcctggaatgactggcttcccctcaaattggcactgagatttgctacacttctccccacctggtacatgatacatgaccccaggttccagtgtagaacctgagtcccccattccccaaagccatccctgcattgatatgtcttgactctcctgtctacttttgcacacacccttaatttttaattggttttcttgtaaatacagttttgtacaatgttatctctgtgggaggaaggaggcaggctgtggtgggactgggtagggtatagtatcactcctgagttccactgctctagaatctaaccagaaatagaaacctagtttttaaggtga

SEQ ID NO: 525711 - DNA, 817 bp, Homo sapiens
  misc_feature (8)..(9): n is a, c, g, or t
  misc_feature (12)..(12): n is a, c, g, or t
  misc_feature (15)..(15): n is a, c, g, or t
  misc_feature (19)..(20): n is a, c, g, or t
  misc_feature (22)..(22): n is a, c, g, or t
  misc_feature (24)..(24): n is a, c, g, or t
  misc_feature (27)..(27): n is a, c, g, or t
  misc_feature (32)..(32): n is a, c, g, or t
  misc_feature (40)..(40): n is a, c, g, or t
  misc_feature (45)..(45): n is a, c, g, or t
  misc_feature (145)..(145): n is a, c, g, or t
  misc_feature (156)..(156): n is a, c, g, or t
  misc_feature (179)..(179): n is a, c, g, or t
  misc_feature (244)..(244): n is a, c, g, or t
  misc_feature (252)..(252): n is a, c, g, or t
  misc_feature (299)..(299): n is a, c, g, or t
  misc_feature (318)..(318): n is a, c, g, or t
  misc_feature (322)..(322): n is a, c, g, or t
  misc_feature (324)..(324): n is a, c, g, or t
  misc_feature (337)..(337): n is a, c, g, or t
  misc_feature (343)..(344): n is a, c, g, or t
  misc_feature (359)..(359): n is a, c, g, or t
  misc_feature (379)..(379): n is a, c, g, or t
  misc_feature (400)..(400): n is a, c, g, or t
  misc_feature (423)..(425): n is a, c, g, or t
  misc_feature (444)..(444): n is a, c, g, or t
  misc_feature (466)..(466): n is a, c, g, or t
  misc_feature (514)..(516): n is a, c, g, or t
  misc_feature (560)..(560): n is a, c, g, or t
  misc_feature (579)..(579): n is a, c, g, or t
  misc_feature (606)..(607): n is a, c, g, or t
  misc_feature (610)..(610): n is a, c, g, or t
  misc_feature (624)..(625): n is a, c, g, or t
  misc_feature (634)..(634): n is a, c, g, or t
ggagagannganagnactnntntnganttttntttttttnttttnggggataaaagtctttattgaacaaccttatctcactcagtaacaaaagagcaggaggcgacaattcccccaaaagtctgcagccgtgtccacccttggnagcaggatgcntggcctgctgataacatcagctncagttcaaagccccgtggtggtcacttagagatcataatgggggttcttccgaaggataacaaanccttccanaaggggggtaacaggaagaaactcctcaggggccaattctgcccgtnccccgtgggccaacaacantggngntgtatgcgtctgnaacccnngtgatagtcttcggnttgccagccgtggcccaccnaatccactgcctggcccacanggacagacacgggcaagggccgnnngctcctcatcaaagcgtanccagcattcggggctgcatggnagccaccagcccatacaatacatagggtgattggcctaaaataaggtnnncgaacatccaggaaagagacaagcacagtgagcagtccagccanggcacctggctcataagcngccggtcgctgtggtaggggcagaggnntangggtgcccttcccnnaaatgtgtnaggccctgtgccaagcgcccccatgaaagaagggatgaaaggggaccatagggaagtgaaaatggacgcatacaggagggcaaaacatgaacgccaaacggggcataaaatgggcaccaatgcccacccagtgccatggcaaacagtgggtaataggaaacttgtggaacagaacacgagaga

SEQ ID NO: 525712 - DNA, 2679 bp, Homo sapiens
  misc_feature (106)..(106): n is a, c, g, or t
  misc_feature (113)..(113): n is a, c, g, or t
  misc_feature (115)..(116): n is a, c, g, or t
  misc_feature (2557)..(2557): n is a, c, g, or t
  misc_feature (2567)..(2567): n is a, c, g, or t
  misc_feature (2585)..(2585): n is a, c, g, or t
  misc_feature (2640)..(2640): n is a, c, g, or t
gcgtcgcatcgttcctggccagttcttagctgtgtgatcccaaagggcgagccgttatgattagtgccattgagaaacagaaattggtgtatatttagaacagagntgctgcngnncgacttaccatttcatctcccctggaagcccacaaagcaaacactttagtgtatcatgtagttggagtagatgtcggatttgaaaatccaatgtttgcttgtctggaaatggattatgaggaagcagacaatgatccaacaggggaagcagcagctaatacccagcagacacttactttctatgagctagaccttggtttaaatcatgtggtccgaaaatacagtgaacctttggaggaacacggcaacttccttattacagttccaggagggtcagatggtccaagtggagtactgatctgctctgaaaactatattacttacaagaacttggtgaccagccagatatccgctgtccaattcccaggaggcggaatgacctggatgaccctgaaagaggaatgatttttgtctgctctgcaacccataaaaccaaatcgatgttcttctttttggctcaaactgagcagggagatatctttaagatcactttggagacagatgaagatatggttactgagatccggctcaaatattttgatactgtacccgttgctgctgccatgtgtgtgcttaaaacagggttcctttttgtagcatcagaatttggaaaccattacttatatcaaattgcacatcttggagatgatgatgaagaacctgagttttcatcagccatgcctctggaagaaggagacacattcttttttcagccaagaccacttaaaaaccttgtgctggttgatgagttggacagcctctctcccattctgttttgccagatagctgatctggccaatgaagatactccacagttgtatgtggcctgtggtaggggaccccgatcatctctgagagtcctaagacatggacttgaggtgtcagaaatggctgtttctgagctacctggtaaccccaacgctgtctggacagtgcgtcgacacattgaagatgagtttgatgcctacatcattgtgtctttcgtgaatgccaccctagtgttgtccattggagaaactgtagaagaagtgactgactctgggttcctggggaccaccccgaccttgtcctgctccttattaggagatgatgccttggtgcaggtctatccagatggcattcggcacatacgagcagacaagagagtcaatgagtggaagacccctggaaagaaaacaattgtgaagtgtgcagtgaaccagcgacaagtggtgattgccctgacaggaggagagctggtctatttcgagatggatccttcaggacagctgaatgagtacacagaacggaaggagatgtcagcagatgtggtgtgcatgagtctggccaatgtaccccctggagagcagcggtctcgcttcctggctgtggggcttgtggacaacactgtcagaatcatctccctggatccctcagactgtttgcaacctctaagcatgcaggctctcccagcccagcctgagtccttgtgtatcgtggaaatgggtgggactgagaagcaggatgagctgggtgagaggggctcgattggcttcctatacctgaatattgggctacagaacggtgtgctgctgaggactgtcttggaccctgtcactggggatttgtctgatactcgcactcggtacctggggtcccgtcctgtgaagctcttccgagtccgaatgcaaggccaggaggcagtattggccatgtcaagccgctcatggttgagctattcttaccaatctcgcttccatctcaccccactgtcttacgagacactggaatttgcatcgggttttgcctcggaacagtgtcccgagggcattgtggccatctccaccaacaccctacggattttggcattagagaagctcggtgctgtcttcaatcaagtagccttcccactgcagtacacacccaggaaatttgtcatccaccctgagagtaacaaccttattatcattgaaacggaccacaatgcctacactgaggccacgaaagctcagagaaagcagcagatggcagaggaaatggtggaagcagcaggggaggatgagcgggagctggccgcagagatggcagcagcattcctcaatgaaaacctccctgaatccatctttggagctcccaaggctggcaatgggcagtgggcctctgtgatccgagtgatgaatcccattcaagggaacacactggaccttgtccagctggaacagaatgaggcagcttttagtgtggctgtgtgcaggttttccaacactggtgaagactggtatgtgctggtgggtgtggccaaggacctgatactaaacccccgatctgtggcagggggcttcgtctatacttacaagcttgtgaacaatggggaaaaactggagtttttgcacaaggtaggaatctgccagtggttctcctagattttaagtcccattgaattctctcacttttgcttatgntatggatcantcttttggggaccagctncttgattccaatctctctcttaccagcacatggtgctggggccttctagctgcantgatgttcttgggcctgtgcattccacggggctttgtgc

SEQ ID NO: 525713 - DNA, 157 bp, Homo sapiens
  misc_feature (8)..(9): n is a, c, g, or t
  misc_feature (12)..(12): n is a, c, g, or t
  misc_feature (15)..(15): n is a, c, g, or t
  misc_feature (19)..(20): n is a, c, g, or t
  misc_feature (22)..(22): n is a, c, g, or t
  misc_feature (24)..(24): n is a, c, g, or t
  misc_feature (27)..(27): n is a, c, g, or t
  misc_feature (32)..(32): n is a, c, g, or t
  misc_feature (40)..(40): n is a, c, g, or t
  misc_feature (45)..(45): n is a, c, g, or t
  misc_feature (121)..(121): n is a, c, g, or t
ggagagannganagnactnntntnganttttntttttttnttttnggggataaaagtctttattgaacaaccttatctcactcagtaacaaaagagcaggaggcgacaattcccttctgtngtcttctcgcagcggtatagtagtagaggcggccgc

SEQ ID NO: 525714 - DNA, 1074 bp, Homo sapiens
  misc_feature (25)..(25): n is a, c, g, or t
  misc_feature (47)..(47): n is a, c, g, or t
  misc_feature (127)..(127): n is a, c, g, or t
  misc_feature (145)..(145): n is a, c, g, or t
  misc_feature (158)..(158): n is a, c, g, or t
  misc_feature (172)..(172): n is a, c, g, or t
ggaattggattgatgggaattagtnccccaggaggtgcttccccttnagggcaagacccacagcccagagcaaaggcttcacctgcttcctgcccaatcctgaacttctgaagtacccaaagagtcnaacttaaagataagtgtncccctggatcctnacaagtggggttcnaagtatcgaagtggagaataaaaagttttccccggtctgggcgtggtggcacacatttgtggtccccagccaatcgggaggctgagcccccagattttgagagtgcagtgagctaagattatcccactgcactgcaacccggatgatagggtgagaccctgtctcaaaaactaaaaaataaaaacagctttccctacaagtgctgctttagcatgtgccattttctttaggcatctcaccattttttttctttctgctttctccatacctgtgaagaatgtgattgatggagacctctgtgagcagttcaattccatggaacccaacaaacaaaagaacgtctctgaagaactggaccgaaccccacccgaagtgtccaagaaactcgaggatatccggacccgctacgccttctgagccctcctttcccggtggggcttgccagagactgtgtgttttgtttcccccaccaccatcactgccacctggcttctgccatgtggcaggagggtgactggataattaagactgcattatgaaagtcaacagctctttcccctcagctcttctcctggaatgactggcttcccctcaaattggcactgagatttgctacacttctccccacctggtacatgatacatgaccccaggttccagtgtagaacctgagtcccccattccccaaagccatccctgcattgatatgtcttgactctcctgtctacttttgcacacacccttaatttttaattggttttcttgtaaatacagttttgtacaatgttatctctgtgggaggaaggaggcaggctgtggtgggactgggtagggtatagtatcactcctgagttccactgctctagaatctaaccagaaatagaaacctagtttttaaggtga

SEQ ID NO: 525715 - DNA, 121 bp, Homo sapiens
cttgtagacagcttggatcctttctctgaaggaatcatgttcagtgttcgaccaactaagaaaagttggaaaaagttcttcaacctttcgggaggagagaaaacatttagttcaatggctt

SEQ ID NO: 525716 - DNA, 1204 bp, Homo sapiens
tgataagattattagtataaaaggggagataggtaggagtaggggggtaggggggatgagtgtggggaggaagtgggggtgggtttgggtatgttcaaacgtgcgtccattttatttttcacgtgtgtaagaatatggggagtaggtggtgatggcagggtggcagtagacattaggcgtaggtagcaagtagcaggttaaggcagggatgagtgggtggacatagtgagtgggtggggcatgagtgaggactaatgggtattttgtggtgaattatctatgagaataagtggcgccatttggggggacaaaagagcgcggttataggcgggggacagggctatccttagaggaagaaggaagggtgtggatggacattaagggggtgtaagctcatgctacagctgtgtgtttcaggtgtgcgaaactaagtacgaataggggatcagggggtgcttggacgattaaagttggagttagataggcaatgcggcaaatagataggatacatataaataggttcaactttcaggaatgggtctagtgtacgggttgtcagggtaaaactgctattatacatccatatagtggggaaattgacggcagtatgataagatttagggcgaaagcgtggagcatagggtagaaatcacaccatcaacgtgcctgcatatagcagtggcctaacgattgcagagacgtgagagagacaggactataagataaccagagggcaaaacatgcgaacactgcaacgcacaaggaggacaaatatagccattgaagacaaaaagaaacacaggcaccgaacacgcacaccagagggagttgccatgggagaaacacctcggggaaactaaacatgtgaaagagggggccacaaccacagcacaaaagtgacagacccaaagagagtacaacacagaacaaaccgcgacgggaaacacagtgaaagatgttaacatccgcgaacaaattagggacgaagagacagagctagaagaagggaagcaggaggacagagagcgaacaaactgcagatgtgagacacgggcactgggggagtcggaaaaaaacgggacagtgaaccggagaaaacggcagccgcagcaactatgcaagcagcaaataaacgcgggcatacaaagaaaagtgactggcgaatcagtaggggtaactgaagaccctgagccaattagcgcag

SEQ ID NO: 525717 - DNA, 177 bp, Homo sapiens
ttttgggggggggggaaaaaaaaaattgcccctttttaaaaccgggtaaaaaccctgggttggggggggggttcccccccaaaattttttttttacccccggggtcttgggcctttggggtaggaagtttttttcccccaaagtcccccccaaaaattttttttttttccccgggta

SEQ ID NO: 525718 - DNA, 2364 bp, Homo sapiens
  misc_feature (106)..(106): n is a, c, g, or t
  misc_feature (113)..(113): n is a, c, g, or t
  misc_feature (115)..(116): n is a, c, g, or t
gcgtcgcatcgttcctggccagttcttagctgtgtgatcccaaagggcgagccgttatgattagtgccattgagaaacagaaattggtgtatatttagaacagagntgctgcngnncgacttaccatttcatctcccctggaagcccacaaagcaaacactttagtgtatcatgtagttggagtagatgtcggatttgaaaatccaatgtttgcttgtctggaaatggattatgaggaagcagacaatgatccaacaggggaagcagcagctaatacccagcagacacttactttctatgagctagaccttggtttaaatcatgtggtccgaaaatacagtgaacctttggaggaacacggcaacttccttattacagttccaggagggtcagatggtccaagtggagtactgatctgctctgaaaactatattacttacaagaacttggtgaccagccagatatccgctgtccaattcccaggaggcggaatgacctggatgaccctgaaagaggaatgatttttgtctgctctgcaacccataaaaccaaatcgatgttcttctttttggctcaaactgagcagggagatatctttaagatcactttggagacagatgaagatatggttactgagatccggctcaaatattttgatactgtacccgttgctgctgccatgtgtgtgcttaaaacagggttcctttttgtagcatcagaatttggaaaccattacttatatcaaattgcacatcttggagatgatgatgaagaacctgagttttcatcagccatgcctctggaagaaggagacacattcttttttcagccaagaccacttaaaaaccttgtgctggttgatgagttggacagcctctctcccattctgttttgccagatagctgatctggccaatgaagatactccacagttgtatgtggcctgtggtaggggaccccgatcatctctgagagtcctaagacatggacttgaggtgtcagaaatggctgtttctgagctacctggtaaccccaacgctgtctggacagtgcgtcgacacattgaagatgagtttgatgcctacatcattgtgtctttcgtgaatgccaccctagtgttgtccattggagaaactgtagaagaagtgactgactctgggttcctggggaccaccccgaccttgtcctgctccttattaggagatgatgccttggtgcaggtctatccagatggcattcggcacatacgagcagacaagagagtcaatgagtggaagacccctggaaagaaaacaattgtgaagtgtgcagtgaaccagcgacaagtggtgattgccctgacaggaggagagctggtctatttcgagatggatccttcaggacagctgaatgagtacacagaacggaaggagatgtcagcagatgtggtgtgcatgagtctggccaatgtaccccctggagagcagcggtctcgcttcctggctgtggggcttgtggacaacactgtcagaatcatctccctggatccctcagactgtttgcaacctctaagcatgcaggctctcccagcccagcctgagtccttgtgtatcgtggaaatgggtgggactgagaagcaggatgagctgggtgagaggggctcgattggcttcctatacctgaatattgggctacagaacggtgtgctgctgaggactgtcttggaccctgtcactggggatttgtctgatactcgcactcggtacctggggtcccgtcctgtgaagctcttccgagtccgaatgcaaggccaggaggcagtattggccatgtcaagccgctcatggttgagctattcttaccaatctcgcttccatctcaccccactgtcttacgagacactggaatttgcatcgggttttgcctcggaacagtgtcccgagggcattgtggccatctccaccaacaccctacggattttggcattagagaagctcggtgctgtcttcaatcaagtagccttcccactgcagtacacacccaggaaatttgtcatccaccctgagagtaacaaccttattatcattgaaacggaccacaatgcctacactgaggccacgaaagctcagagaaagcagcagatggcagaggaaatggtggaagcagcaggggaggatgagcgggagctggacgtatatatggcaatactgttccttaatgtctcttgcatccccttctgcaatatcctttttggggactccactttccctatcctccttctacgaacgcttcctttttttatagatattatcttgtttctatccctttacttgcgcgtgactctccccctggcccgtgtctcgcctctccgcctcccctctcctct

SEQ ID NO: 525719 - DNA, 2189 bp, Homo sapiens
  misc_feature (106)..(106): n is a, c, g, or t
  misc_feature (113)..(113): n is a, c, g, or t
  misc_feature (115)..(116): n is a, c, g, or t
gcgtcgcatcgttcctggccagttcttagctgtgtgatcccaaagggcgagccgttatgattagtgccattgagaaacagaaattggtgtatatttagaacagagntgctgcngnncgacttaccatttcatctcccctggaagcccacaaagcaaacactttagtgtatcatgtagttggagtagatgtcggatttgaaaatccaatgtttgcttgtctggaaatggattatgaggaagcagacaatgatccaacaggggaagcagcagctaatacccagcagacacttactttctatgagctagaccttggtttaaatcatgtggtccgaaaatacagtgaacctttggaggaacacggcaacttccttattacagttccaggagggtcagatggtccaagtggagtactgatctgctctgaaaactatattacttacaagaacttggtgaccagccagatatccgctgtccaattcccaggaggcggaatgacctggatgaccctgaaagaggaatgatttttgtctgctctgcaacccataaaaccaaatcgatgttcttctttttggctcaaactgagcagggagatatctttaagatcactttggagacagatgaagatatggttactgagatccggctcaaatattttgatactgtacccgttgctgctgccatgtgtgtgcttaaaacagggttcctttttgtagcatcagaatttggaaaccattacttatatcaaattgcacatcttggagatgatgatgaagaacctgagttttcatcagccatgcctctggaagaaggagacacattcttttttcagccaagaccacttaaaaaccttgtgctggttgatgagttggacagcctctctcccattctgttttgccagatagctgatctggccaatgaagatactccacagttgtatgtggcctgtggtaggggaccccgatcatctctgagagtcctaagacatggacttgaggtgtcagaaatggctgtttctgagctacctggtaaccccaacgctgtctggacagtgcgtcgacacattgaagatgagtttgatgcctacatcattgtgtctttcgtgaatgccaccctagtgttgtccattggagaaactgtagaagaagtgactgactctgggttcctggggaccaccccgaccttgtcctgctccttattaggagatgatgccttggtgcaggtctatccagatggcattcggcacatacgagcagacaagagagtcaatgagtggaagacccctggaaagaaaacaattgtgaagtgtgcagtgaaccagcgacaagtggtgattgccctgacaggaggagagctggtctatttcgagatggatccttcaggacagctgaatgagtacacagaacggaaggagatgtcagcagatgtggtgtgcatgagtctggccaatgtaccccctggagagcagcggtctcgcttcctggctgtggggcttgtggacaacactgtcagaatcatctccctggatccctcagactgtttgcaacctctaagcatgcaggctctcccagcccagcctgagtccttgtgtatcgtggaaatgggtgggactgagaagcaggatgagctgggtgagaggggctcgattggcttcctatacctgaatattgggctacagaacggtgtgctgctgaggactgtcttggaccctgtcactggggatttgtctgatactcgcactcggtacctggggtcccgtcctgtgaagctcttccgagtccgaatgcaaggccaggaggcagtattggccatgtcaagccgctcatggttgagctattcttaccaatctcgcttccatctcaccccactgtcttacgagacactggaatttgcatcgggttttgcctcggaacagtgtcccgagggcattgtggccatctccaccaacaccctacggattttggcattagagaagctcggtgctgtcttcaatcaagtagccttcccactgcagtacacacccacacacccttaatttttaattggttttcttgtaaatacagttttgtacaatgttatctctgtgggaggaaggaggcaggctgtggtgggactgggtagggtatagtatcactcctgagttccactgctctagaatctaaccagaaatagaaacctagtttttaaggtga

SEQ ID NO: 525720 - DNA, 1518 bp, Homo sapiens
  misc_feature (106)..(106): n is a, c, g, or t
  misc_feature (113)..(113): n is a, c, g, or t
  misc_feature (115)..(116): n is a, c, g, or t
gcgtcgcatcgttcctggccagttcttagctgtgtgatcccaaagggcgagccgttatgattagtgccattgagaaacagaaattggtgtatatttagaacagagntgctgcngnncgacttaccatttcatctcccctggaagcccacaaagcaaacactttagtgtatcatgtagttggagtagatgtcggatttgaaaatccaatgtttgcttgtctggaaatggattatgaggaagcagacaatgatccaacaggggaagcagcagctaatacccagcagacacttactttctatgagctagaccttggtttaaatcatgtggtccgaaaatacagtgaacctttggaggaacacggcaacttccttattacagttccaggagggtcagatggtccaagtggagtactgatctgctctgaaaactatattacttacaagaacttggtgaccagccagatatccgctgtccaattcccaggaggcggaatgacctggatgaccctgaaagaggaatgatttttgtctgctctgcaacccataaaaccaaatcgatgttcttctttttggctcaaactgagcagggagatatctttaagatcactttggagacagatgaagatatggttactgagatccggctcaaatattttgatactgtacccgttgctgctgccatgtgtgtgcttaaaacagggttcctttttgtagcatcagaatttggaaaccattacttatatcaaattgcacatcttggagatgatgatgaagaacctgagttttcatcagccatgcctctggaagaaggagacacattcttttttcagccaagaccacttaaaaaccttgtgctggttgatgagttggacagcctctctcccattctgttttgccagatagctgatctggccaatgaagatactccacagttgtatgtggcctgtggtaggggaccccgatcatctctgagagtcctaagacatggacttgaggtgtcagaaatggctgtttctgagctacctggtaaccccaacgctgtctggacagtgcgtcgacacattgaaggtggctggtgaaggtgctgatcaccacagatgagtttgatgcctacatcattgtgtctttcgtgaatgccaccctagtgttgtccattggagaaactgtagaagaagtgactgactctgggttcctggggaccaccccgaccttgtcctgctccttattaggagatgatgccttggtgcaggtctatccagatggcattcggcacatacgagcagacaagagagtcaatgagtggaagacccctggaaagaaaacaattgtgaagtgtgcagtgaaccagcgacaagtggtgattgccctgacaggaggagagctggtctatttcgagatggatccttcaggacagctgaatgaggtcccgaacgggggttcccatgtgggtgctgttctggccgttccccggtagaagggccgtccgggggggggtggccgcgggaattccgggcccgtg

SEQ ID NO: 525721 - DNA, 212 bp, Homo sapiens
ctagaggatcccggcaccactgtgctggcatctggggacgcggaccccactcccctcacattccacaggcccatggtactcactttgtaacaaagtcctaccaacacgaccaataaaaaaaaatgtgggttttttgttttttttttttttttttttttttttttttttttttttttttttttgtgggggggggctgtttttttttttttttt

SEQ ID NO: 525722 - DNA, 105 bp, Homo sapiens
acaatttccatgttattgttctccagagagtagcctgtcttcagtcttttggaacgcagctccggacatgggcctgggtgggggacgtggggcagcacccgcagg

SEQ ID NO: 525723 - DNA, 199 bp, Homo sapiens
gctggtgtccatgctagatcagatgtggctctctcattggaaaatggtggatgcaagatcaaggaagtagagagagtacaggggctcaggtccaggtggcaggggatacgctacccaactcaactgagcgggccatcactattgctggcattccacaatccatcattgagtgtgtcaaacagatctgcgtggtcatgtt

SEQ ID NO: 525724 - DNA, 281 bp, Homo sapiens
tcagatcagaaaagtattcactaaaacaattcacagcaacaatctgccagctccatcatcacctcaacccaaaaaggcataatgagggtttacttcctctctttcttcttcccagctcatcctaaccctactcctaactcacataacctacttcccccagagcactctcaagttacaatatatacaccaaccaaacactgttcaaccagataactactcactaatcaacgcccagtaatcatagaaagcccccgcaaccagataggatacagtagggagca

SEQ ID NO: 525725 - DNA, 718 bp, Homo sapiens
gggttggcgcgcgccgggcggcggggggaggagctcgagacggagcctagttatgtctgggaggcgaacgcggtccgtaggagccgtcagcgctccgggcaagggcccatctcctactaagcctctgcgtgaggtcccagggaaatcaggctctgaactcccgagcatcctccctgaaatctggccgaagacacccagtggggtgagtcagaaaagcccatcgtcttaaagaggatcgtggccatgctgaagaggtcccactgtccaatcacctcgcaggagccctaggatttcctttttcttggagaaagaaaaccgagccccctggcagggagctttactaaggaggacctttcaagacacacagcgtcactggcagccccaacagcattctgtggccgaacctgaggacgagtcaagctccaaggaaggagagctggacgcagagacttggacatgtctaacgaaagtcaggcgttacctaaggcggctggaggaccattgggctctggcctttactccaccccaggctggccggtactgctttggattcgaggggctgtgggggcagaagacttgttcaggagttctcgccagtggtggtgctcacaactaaaccaagggccccaggtttgggcaaagccctgggcacccagaacttgatctcctgcatttccccaccaacgagaaacagaaacgctagagaagaaatgcgaca

SEQ ID NO: 525726 - DNA, 117 bp, Homo sapiens
gtgcatcatgttgtgctcagcagctccgtcctcctccatgcaccttgcacaagcttgtctgagattcgggagatcctcatagagtctgatgcgtgccatggtcatgcaatgcttggc

SEQ ID NO: 525727 - DNA, 125 bp, Homo sapiens
acggccgtgtattactgtgcgagacatcaggtttcgatgcattactatgatagtagtggttattactggcctacatcatactactactactacggtatggacgtctggggccaagggaccacggt

SEQ ID NO: 525728 - DNA, 1309 bp, Homo sapiens
tggtctgggagaaatgggtgacaccaaaattcatttgggcaccagagtgtggaaacagaatgtcttcacaaaaagatgtgtctaaggcaacatgccaactcagttaataattccaagaaacaccgggctatgtgggactttgcaaacctccccaatcaatgttccccgcgaaaatatcgatgtgaaacaaagcgggtttggggattcccacccctgtggatgtgggtggctcgggggaaaactcgagggcttcatgaggacaaaactcgaacctcttctattaacacgagccccttatattcctaaacacgtgaaactcgtggtcacgccccagaacaaggagaagcatcaataccgtgggaagcccagccagacacacaacatattgtgcacacagacacactgtgtctccccagaattggggagggcctctcaacctgtggtgtggccacaattgtggacagaacgccagaaaggggggtgctcaaagagctataccgtcgccctttagaccaagtgtgggataagaatatcacccctcgtgtggagcgatcatgggggcgagaccccgcttatcttcaacatgtggcagaaagaaaagaatttgggttctaccacccagcacccataaatataactctcctccccattattttattagagaagattagaagacacacatcttttgagacaagagcgtgataacccctgttgacatatgtagaccaagaaaagaaacagcggagtatttttagaaaacacaagtggtgggcagaggagaaacatatcacaaattgagagaaataaaatataagggcggtggtagcactattgggtgagcgccatattaaaaacattataaatatttcacccccctttttttgggggcgcgcttgttgtgccttttaaaacgcccccctttataaagaagtttgagggggcaggataccaatattagaccggtggcaaatatacacaccaaaaaaaaagggggggttcaagacctcgctgggtggcgcccagtgtcacacattgtgcccaaaaaaacgtcgtttgaacaacattctcacaacccccgtagaaaggggcaaccgctggacacactcggccttgtgacaccacacagcggcgcgttcctcgtgcctatacaaccttctcacccgaacctctttaagcattcccaaaattctttatctcctataccctgtgattcgccgaaaactcctctgtgccacgctataccgagatcttatacagcacacacccgagccctacgagcaactttcctcacagaatggcagagccatcc

SEQ ID NO: 525729 - DNA, 441 bp, Homo sapiens
tggagaacgaagtcttgctctgtcacccaggcagaggtgccggtgacccgatctgtggctccactgcagcctccatcttctcgggtctcgaggtgatttcctcctgtgcgctcggccctctctcagggtagcgtgggatttaagggcgttgcaccaccgcgacccggcttagtttcggagacttttggggtagaagattggggtttcacgcgagttttggccgagagctttgttcttcgaaaactctcccgagagaggtgggaagaggatccaccgtggagggggctcccggaaagcttgtggaacaccacgctctgtgggcccacattatggcggttgagaaccccccgcgtcctctctaggttatacacaattctccgggggacattgtggtctcaggcgcgtgtgggtgtgtgtgcccacccccgttgttatttcccg

SEQ ID NO: 525730 - DNA, 423 bp, Homo sapiens
cattggataagggatgaggggctaggttgtgtgttccttatgagaatctaatgcctgatgatcggaagtggaagtttcattctgagaccatccccacaccccgtccgtggaaaacttgtcttccacaaaaccagtccctggtggcaaaaaggttggggactgctggtttaaaggaactggcacctccccctctctctcttgctctgaccatgtgacatgcctgcccctcctttgcctcctgtgttgagtggaagcttcctgaggtctccccagaagctgagcagatgcgggcaccatgcttgtacagcctgcagaacggggagccacataaacctcttttctttataaataccccagtgccaggtattcttttatagcaatgccaaacagactaacacaggaaccttcccccccaccctcatc

SEQ ID NO: 525731 - DNA, 383 bp, Homo sapiens
ggattttgagaccagcctgggcaacatggcaaaaccctgtttttacaaaaaagaattctctgggtgttatgatacacgcctgtaaagacagggtctcgggccgggcgcagtggctcacgcttgtaatcccagcactttgggaggccgaggcgggcggatcacgaggtcaggagatcgagaccatcctggctaacacggtgaaaccccgtctctactaaaaatacaaaaaaattagccgggcgtgatggcgggcgcctgtagtcccggctactcgggaggctgaggcaggagaatggcgtgaacccgggaggcggagcttgcagtgagccgagattgcgccactgcattccagcctgggagacagagcgagactccatctcaaa

SEQ ID NO: 525732 - DNA, 165 bp, Homo sapiens
  misc_feature (10)..(10): n is a, c, g, or t
  misc_feature (57)..(57): n is a, c, g, or t
gtgactctgnaggatcccggcacacccgctagggaaaagcagtgattaccttagcantaaacgaaagttactaagctatactaaccccaggtggtcaatttcgtgcagccaccgggtcacacgattaacccaagtcaatagaagccgccgtagcggtggtgtttg

SEQ ID NO: 525733 - DNA, 252 bp, Homo sapiens
ttcagcgcacacaacagttgcctttcctttctcactgttcatgcctcgtgttaccctcaattcccagatgcttagatgccctgtccaaactgggcaatgtcagtccgctgctccagcacctccgcctcctccggctcctggaatgaaattcagcccaaggccctgacatgcaggggtgactcttggattcggccacagtgccctccctcgctcctggaatcgctacgtcagttcttgcctcgaggtctttga

SEQ ID NO: 525734 - DNA, 1112 bp, Homo sapiens
  misc_feature (161)..(161): n is a, c, g, or t
  misc_feature (189)..(189): n is a, c, g, or t
  misc_feature (229)..(229): n is a, c, g, or t
  misc_feature (258)..(259): n is a, c, g, or t
caagaggtctcagatctatgcgagtcgtcagattatcctgtagaaagaggaactcaagcagctatatgcggttcgatgatccaggtttgatgctcatgggttgcacgccgttggtactgctgaaggcacgtcattacctgagtccctccctgttcgtgtanccagaggagtcgctggtgattgggagcncaacctgttcagtgctctgctcatcaagtgtctggagaangaggttgcagcattgtgcagatacacacnncgcaggaacatcccatccttattttgtggctatggtgccacaggaagaagagtaggatgaccagaaaatatcaggctgactcctccaggcttccagacttggctctttttacccttatgctgatgataaagaggacgatgcccgtttactgaagaacaatcatggcaaatccagagcaggctgggcacaggactgaaggctatcgtctgagaagcttcgcgttcacatacagaagtgacagcttccgagaaccccgtgctgcagcagaacttcaggaacctggcaggcttggaccttgggcatttggcatggagccggaacaatgcagtggaccgtgacattgcccaaagggttgaagcacatgaagtaaaagactgggtctccttggtggagtgacgtctacaggagcttggtaacccaccaagattacaagtcctgaaagtggacagttaccaagacgaaaacacgactactgacacggtacctggagagcaacagagggcccaagggtaggagtacttccaccaagaaggagctcgaagacccaccatccagcacacgggtaccgctgggcccaggttcacagctcgcccatgaattcaaccacgagggccctagcccggaggcatcaccgggcctgaaagaagtgggtccaaagaacacaagcaacgggcagacatggagaggcaaagagaccgggtacaaacccaaagcacgaacacaacaggaacctggctaccacggagaggccgagaacggatacaacagctaggacacattatcccgcacacaagcggcaaggaaaggcccagggaccctgggcacccacaagacggaccacaccgcggaacac

SEQ ID NO: 525735 - DNA, 162 bp, Homo sapiens
tgcatctatcctccacatagaagctggctctcagttataaaacacagagtccaggcgccctgtatgccctgatgagctagtaagagaaattcttgcacactgtttggttgacagggaagtaaacaaaggccaggccaccagaacccaaaggactatgagtga

SEQ ID NO: 525736 - DNA, 401 bp, Homo sapiens
aggatcccttattcagcacgctggagtcagggaattgggagttacttgtttaagggtacagagtttcaattttgcaagatgaaacagctgcacaacagtgtgaatatacttgatgccactgaactgtatgcttaaaagtggttaaaatgggctgggtgcagtgtctcatgcctataataacaacactttgggaggtcaaggtgggaggattgcctgaggcccagaattctagaccagcttgggtaacaaagcaaaaatttttaaaaattagcagagtatggtgctgcatgcctatagttccagccacttgggagactgaggcaggaagatcccttaagcctgggagttgaaggctacagtgagccaagatcacaccacagcactccagcgtgctgatacaa

SEQ ID NO: 525737 - DNA, 312 bp, Homo sapiens
ccgtagtcgctcttggtggcactgctgtgctgcatgccaataggctgaggcctgggagccacttcccaatctgcgtgcaccattaagaaaatggggttggtctgggcgcagtggctcactgcctgtaatgccagcactttgggaggccgagatgggtggatcacgaggtcaggagatcgagaccatcctggctaacatggtgaaaccccgtctctactcaaaatacaaaaaaattagccgggtgtggtggcgggcgcctgtagtcccagctactcgggaagctgatgcaggagactggcgtgaacctgggag

SEQ ID NO: 525738 - DNA, 1086 bp, Homo sapiens
  misc_feature (1080)..(1080): n is a, c, g, or t
  misc_feature (1086)..(1086): n is a, c, g, or t
ccgacgctgtagccgcggattggtatatgcttaaaatggcgccgtgtagacctggacaagtatgtggaaatagcgcggctgtgcaaggtacctgccagagaacgacctgaagcggctatgtgactacggtctgtgacctccatcttagaagagtcaaatgttcagccaggtatcaaaaccagtaacagtgtgtggggatatccatggacaaggattgatgaactttgtgaactgttcagaactggaggtcaggtacctgacacaaactacatatttatgggtagatagagaagacagaggttcactcataagtaaggagaccttcacttaccttcttgcattaaaggctaactggcctgatcgtataacactattgcgaggcaacatcatgagagtagacagatcaacacaggtctatggcataaatgatgagtgacaaaccaaatatggacaatgctaatgcctggagatactgtaccaaagtataagacatgctcacagaagccagctatcaatagatgagcagattaagagtgtccatggtggtcatctcctggatatcaaaaacatggctccacatacgagccatcgaacggaatcaagaaagatgcgcaacacagtgaagcaactcaggagaccacagagaagagcacacgaacctggcagacgcgaaacaccaagagaacaagacaccagagaaaaacagagagaaaaagaggagacaccggcaacacaagacacagacaacgtcgaagagtacaaaacaacattagaagagcaccaaaaacaggcagacacgacgttacagactgtctagcacgccacatacgataacaatctactcaccaatataaaaccactcaacgaaaaaaataataaaaacacacaatcactatctaaatacgccaacacatcatgcacaaagaacaaagttacatcaaataactgaaaccataccagaacaactcgtcaatcaaccttaaacaaagagaagacacaaaaaagaacgacaaaaggtacaaacaaaacactcaataacacaatccctctacacttgtcctcttctctctctatccttgnaggagn

SEQ ID NO: 525739 - DNA, 1142 bp, Homo sapiens
ggcgcggcggccagatgggctcgtgcaaatatcccccaagaggacgttgtcgctgatggcatcttcatatctgaatctgacagtgcagttgtctctactcggagtaccgtggctgatagatggctactcgtggcagtttgaggtgctgagttgacgagccgagacctaggacagaagatccttatcttagctcacgcagaaacgacgaggagtgtgactttggtggagagggggccgtgcggattcggcgagactgcactggcgttgtaagttccgagaacgtaggtcttgggcatattgccgatgatgcggccaagttgtgatgatgcttctctatgcttggacaaatacgtgttggcaccacatcagaaagtgtcttgtgttgccacttatgcaccaggagcgcacgacgtcgtcattgccgtgtaacaaatacttacctaaggggaggtgctatttgcctcagtggccagcgaatgcggtgcctgggctaagtagtgtgtgtgcgctgggcccggtggtaccaatgccaatgcgggagcgatgtgttgggtgtgcgccaaaagaggtgctctggcacagacgccggtagtggtatgacgtagtccctcagggagggtacagaagcgtccacggaaaggcgggagccaaacaggcgtgctgtaacccatttccctagttggccaatatgactctaatcggtccggggcaattggtggccccttagagaatcggaattcctcacaaataaaggctgccgaaagaagctcccattggtttgaaacacttgaaggcatttagcgcctattgtgaacagccttcggccttcgcttgaccagccccaccggttaggtttacggcatcaatgcaacgagagagcgtttgttggcctaggggggcaaattccacgaggggttcgaataggacatccaattcaggcctgaggccccactgggggggtacatccccaaaacctccgtggttcaaagccaatgttagaggcccccttaaaagatgcaacacgggacccccccttggtcccgtttgggaagcgccaaacatgtgaggaaccggccccaatcttgcgtgttgggggacatagccccacaaagcgcatgggaaagtctgagcggatatcaacc

SEQ ID NO: 525740 - DNA, 399 bp, Homo sapiens
acctcatgcatggtaacggtgcacacagtcccatcactcgtgtcgacggcctcacctgctgttacacttgttatccgtaaagcgtcctagagggataagcatgccacattcttcagcctccgcctcctgtattatatggatctcaaggacgatagaccttatcaccatcttcgtgccgcatcgcaggatctaatgagcaacctgtctcaggatgatctggaccagagttcgtgcggcattcgccattctggtagtatcgctaaccacgctcgtagtgctgtcgtgcgtgctgcgtgaccgatggacctgttttgaacttgggtgttcccccaaagtccgtctcagggcaacccagtagcgcttcaacagaagaggggaagggcagcacatctaccatca

SEQ ID NO: 525741 - DNA, 363 bp, Homo sapiens
gcgtcgacctgcaaaactggatacgatctaattcctcttggggtagaaatgttgagaaggacatatgccctggtattataatatttttttctagaagaatacattaaaatctgtgatcagttatttgtgggaagaaatacttgggggtaggggagagacagttctggtttttatttcagctttttctgttctatttgcattttaaacacgaacatgtgttactttcgtgctttcaaatgtcagcagggattatccgggcatggggattacatgccagtttcttttctctatgtgctttttgtattatgaaaatcaatttttaaaaattcactgggcgtggtggctcatgtctgtaatcccagc

SEQ ID NO: 525742 - DNA, 141 bp, Homo sapiens
agcgcgtaccgtctgagcagctgggaacgaggagtcagacagtggtcagtcacatgctgagactgctcctggctagataaccacgatggagcccgtgctttgtcctgccatctgttagtgcagatagaatgtgtggcacag

SEQ ID NO: 525743 - DNA, 851 bp, Homo sapiens
  misc_feature (653)..(653): n is a, c, g, or t
attccttaaatggttcctgccatctgtatgcaaatatgtagtaggtataagtaggactctcttactgacatctattaatatatacctatgtatgtataaccttttaaaggacaccctcttcagaaaaaggagctggggaatgggatcagcatatgcagaagaatgaaatggtcccctatctcttatcatatacaaaaatcaatcaagatggaataaagattaaagataagacctgaaactataaaaaaatactcaaagtaaacctgaggaaaatcttctgacattgtctaggtgaagaattcatgataagacctcaaaagcacaggtaaaacaaaaacaatctagacagtgggatttatttaaattaaaaagtttcttgttgcaaaaggacttaggatagtggacaggaggctgaggcaggagattttgtcttgaaccaaggaggggaggtgggagtaagtgagattaccagtgatccagctgttcacaagggagatctgttcaaaaaaaaaaaaaaaaaaaaaaatttttgggggggggaaaaaaatctataaaccacttgtgggggcgcgcgcccaatattaatgagaactgggccaaaggtggcgaaagaacccgggcaacaacgggtgggtttcaccaaaaaaaggggnggggaacgtgttggacaaccaaggggtcggggcctcgggtccccagggtcacggcataaccccccccgcgcgcggaggaacaagacagaagacgaaacaaagcaagaacaaacgcgccaaaaacaaaacacagcaaacaacgacacgacccaccacaacacacagcaaagaaacgaacaacacaaggcacaacctcaa

SEQ ID NO: 525744 - DNA, 394 bp, Homo sapiens
atacatacccggctaccagtagaaatatagagagcgagtataggactagataaatgatgagcggagcgggcatagatgtgcctaaataaatatagtagaatacactatgtaaggacctaaaataatgacacgcatctgtaatttactagaaaaaaacacaaaatatcaggtcctagtacctgccatttaaccacctgcaaggcttagggacatccatttaagtatcacagcttaaatatctgcacctgtcaagtcaggatgcgataaagtactgaggacgtgtaaagtgaaccagagaatatgacaggtatgtaacgtatatacttcattctgcatcattcatacataattgaattattcagtccttcgttgagaacatactacaatgaccaca

SEQ ID NO: 525745 - DNA, 1422 bp, Homo sapiens
aaggatcgcaggcgagattacgaggcgaggctcgcgcgcccgcaccccgacctggaccccacagtgcccacaccggatacggccggcacagacatgtatcaaggcgatccataatcttcaacaaccacgggaagccgcggctctccaagattctaccagccctacagatgaagatacacaacagcaaatcatcagggagaatttaccatttggtatctaacgcgagactgaaaactgtcttgtaactctaccatacaaacgcgccgcactcactcaccctctgcgacgcgactctgaccaacacaacctgcactccacctacgacccacttacatgacaaccgcatcactacctctcgctacatctactgtgatgagaattcattcaaagacaaccatgacccctctcgcgccactacactaagcaatcataaactctacaacgataatccatgctcgcgacaacacaagtctaaccacacacaatcgtctctcgacaaaaatgtcatgtcagccctgagactacctgactatatacacacagctaaccacccaacccgctatcaacacacatactccctacgacagacaacaccggccgacccgccgagcgcgaaacagagaaactacggcaaccacccaaccctcatgaccccttgcaccacaccgacaacacccccaccaaacagaacacgcccacacacaactaaacgaccgcgcaacaacaatccagcacgcgacacggcacaataacaacaaagcacacatccaaagacaccgacgaccgcaccctacagcccgacacacaccacaccctgccaacccccacccgaagaaatacccacaacaaaaataataaacaccccgcccgaacccaccaagaatacaaacgcagcacaaaacaagaacaccaccaataacacaactacccacaccagacaccccacgagccaaaacaacaagataaaaaaacaaaaacaccaacacaaataaaccacaaaaacaaaccaacgcccaagacaaaccaaaacacagcagaaccacaacccctacccaaacgccccagcccaataacaacaacgccaaacaaacacaagctatcacaaaaaacaaataaaaacgacagacaccggtcacgtaccaacaaatcccaccaccccacaacacccccctcaaccaaacccaccctacacgcactcacgcaccccccaccccaccaactcaacgcccacaccaccacaaacgacacaaaacaccacctcaacaacccaagacacaccaaagcacccacaccacacaacaccacaatcccacccaacaccacacgacaccacaaaaacacacacgcacacgacacgacacacagaaaacacacacacatacagagtcacacaaacaaacacaccaccacaccaacacccac

SEQ ID NO: 525746 - DNA, 456 bp, Homo sapiens
  misc_feature (155)..(155): n is a, c, g, or t
  misc_feature (202)..(202): n is a, c, g, or t
  misc_feature (208)..(208): n is a, c, g, or t
  misc_feature (210)..(210): n is a, c, g, or t
  misc_feature (214)..(214): n is a, c, g, or t
  misc_feature (223)..(223): n is a, c, g, or t
  misc_feature (234)..(234): n is a, c, g, or t
  misc_feature (254)..(254): n is a, c, g, or t
  misc_feature (278)..(278): n is a, c, g, or t
  misc_feature (295)..(295): n is a, c, g, or t
  misc_feature (298)..(298): n is a, c, g, or t
  misc_feature (305)..(305): n is a, c, g, or t
  misc_feature (312)..(312): n is a, c, g, or t
  misc_feature (316)..(316): n is a, c, g, or t
  misc_feature (321)..(321): n is a, c, g, or t
  misc_feature (323)..(324): n is a, c, g, or t
  misc_feature (336)..(336): n is a, c, g, or t
  misc_feature (346)..(346): n is a, c, g, or t
  misc_feature (356)..(356): n is a, c, g, or t
  misc_feature (359)..(359): n is a, c, g, or t
  misc_feature (370)..(370): n is a, c, g, or t
  misc_feature (385)..(385): n is a, c, g, or t
  misc_feature (400)..(400): n is a, c, g, or t
  misc_feature (409)..(409): n is a, c, g, or t
  misc_feature (412)..(412): n is a, c, g, or t
  misc_feature (428)..(428): n is a, c, g, or t
tacaaagaattgccaatctttttccaattttgtagtagtctctacacattcagaaattctgctgttaaacaggatttataaaatatttctttcagaaagcatcacaatgctaattttaggcaaataatgttttaaaactgaagtctttgcatggnggtgagctcaaacacccttattctttattgcagtgatgaaataatgngaaacntnaccnttaaactgncttactaaganaacaatgaataagtaattcngtaaacttctcaaattctcctaanattttttattactttcngangcagtantattgcnaggnatcancnnccacactatgtncccaaataanatggtttgtnagntatttaaattntgtttctttgttgcnccccttattgggtgntgtattgcnggngtcttattactctgtnattttttggcacagatcataaactcaga

SEQ ID NO: 525747 - DNA, 654 bp, Homo sapiens
ttgggcgacgcaatgggggacccgcctgtgttctataatagcgcggactcagttgggttgtgcccccgctggcttgtcctccctccgcgacacgcgggggatttcctcgtgtctattaacggctgcagagaaaatttggtgccccgcgatgtgggtgactcaacacgagtccctggctgtcaagcctcactgttcggcggtcggggtgtctctccccacgcagggacaacacatacttgtgcgtagccccgcgagttcttccctctctcaagagcgctcttctcaaggtggtcttctcagtagaccgcagcccacccgccgccccctggtcctcctgatgggtgtcctccttaaaccgtaagtcgtttttcttccctgtctgtgtttacacacctctgccacgactcctcgtaacacaaaatctcttctgtgtcactgttaggccccctgaatcgcctttttgcccaaacacagaattatttgcgaacgcccatctcttctgtgggcgaatgatccaaacgctgtgtgtgaacgcccactccctgtgggcgccaccacccccaaaagggaacaaccactatgacactttttttttctcatattattaaaaatactgcccaaaattttaaaaaaaaaaaggttttttaaaaaaaa

SEQ ID NO: 525748 - DNA, 218 bp, Homo sapiens
  misc_feature (86)..(86): n is a, c, g, or t
tctgcggatctgtagagtcgaccaggctcagcttaatatttggaggtcagcacggtgctcactgtgtcgacggaacttgtacagtnagtgcatgcaccgtggtggtgaatacacgtctgaccaggctccatgcttaacgatatttggaggtcagcacggtgctcacgtgtcgacggaacttgtccagggaggcgatgcagcgatagtggtaaatacac

SEQ ID NO: 525749 - DNA, 1270 bp, Homo sapiens
agacgcaacgacgccgggacctacagcgggagcgtgaggaaagccgatgcgttgcgtttccaaggacatctgtgagcccgcggagtataccacacatgacgcaaagctcaacctacccgagttgacaacacaatttactggaccaacgaccgttactcacttgacacacttacacactggtggcaagacatgtccaacggacactacttgcggggactttgactccctttactgacccctagtgactacgactgcacttggtgtcggaacgactggacgaccctacgctggaccacaccagacaccacctactgcggacctggggggtacctaccgaacgggacaccctacgtacctcctcactgtttacgcaccgaccttggaacccggagtatacacctacactggggctggttacacgacagaagacacaacccaatggatcactcttcgtccactacggggcactgataataacactcttggactggtcaaacattacgggatcattgttaccactttatacaactacttaacgaccttaaaggaataacacttacaacctcataggtacactacgttcacaacacacctcgcttttcttcagcactggttccatggcacatactcggcacctacttcaggactcttccgtatcccaagatatatgtaccttcacgattgcacttttatcacatgggattggacaactcggcattgccacaaggggggtcgtaacttggccatcacacacagggggcacaccggcactccgtccactgcaacacgggcggacacgaaaacaaccacaccatacacacaacacaacagaaccacacccacaccaccgaacgcgcacagacgacgccaacgacaaaagagaatcagcgaccaccatcacacgattgaggacaccacagaacccacccaccgaaggacacggcccaccacggacgcacaaaacaagaaaccaaaaagaaaccctatggcacaacgccaccagcgctcggagcacacaccccacatacaaacaacccacgcgacacaaacaaagaagtagagaaaaacaaaaacacagagaacaggagcaggaacacaaggggcacactacacaacggaaccacagaccccatgcctacatcccagccgcgggagcacaaacaaaccaccaagaggacagaaacgaacacccaatacaagacaggacacgtgcgcacacacagaccacaagagaccgcaccaccacccaccacggcaagacaaaaaacaa

SEQ ID NO: 525750 - DNA, 265 bp, Homo sapiens
tagtgcagacctgtgtcacaatacgttggaggctacttctgttcctgccgtccaggctatgagcttcaggaagacaggcattcctgccaggctgagtgcagcagcgagctgtacactggaggcatcaggcgtatatctccagccgtggagtacccgtcggtcctacgcccacctgagcgtgcgctgcaactactgcatccgggtggagcggggcctcaccctgcacctcaggttcctggagccttttgttctggatcaccagcag

SEQ ID NO: 525751 - DNA, 488 bp, Homo sapiens
  misc_feature (49)..(49): n is a, c, g, or t
  misc_feature (62)..(62): n is a, c, g, or t
  misc_feature (195)..(195): n is a, c, g, or t
  misc_feature (211)..(211): n is a, c, g, or t
  misc_feature (276)..(276): n is a, c, g, or t
  misc_feature (313)..(313): n is a, c, g, or t
  misc_feature (335)..(335): n is a, c, g, or t
  misc_feature (349)..(349): n is a, c, g, or t
  misc_feature (358)..(358): n is a, c, g, or t
  misc_feature (386)..(386): n is a, c, g, or t
  misc_feature (398)..(398): n is a, c, g, or t
  misc_feature (400)..(400): n is a, c, g, or t
  misc_feature (404)..(405): n is a, c, g, or t
  misc_feature (412)..(412): n is a, c, g, or t
  misc_feature (425)..(425): n is a, c, g, or t
  misc_feature (483)..(483): n is a, c, g, or t
ggagactccaggagcgtggggggtggtggtgctgggcaggtgctctgcntcccctttcctcngcacagcgccatcttcaccctcctcgggaaagccgctttggatgcctacacccgcttggtgcttttgctcaccatgcgagtcatatgaaatgcagagctattctgcagtagggtgcagtggagtttggaaggngggcatgagcacagcnacgcgagtcaagacttaaggtgaacttgtggcgaagagtaactagtgggagacctacctaatgcngctcttcgacgcgccaaacgtccaccactatagcccnctacagctgtagcgatctcgtnctcactccctcggnggacttcangaaatgaaagctgacttgaactcgcganaggatgcgtgtngnactnnaaagcgncataaaagcgagnaaggggctcgaccttcactcgggggctccctcccaaatgcgccgctcgacttggcagnagtct

SEQ ID NO: 525752 - DNA, 102 bp, Homo sapiens
gaaagcgctgctgtacgcggatgtggtggagatgactggaagcccgacacggccggagcgtccagaaagggtgctcaccatgcttccaggctaacagtgtct

SEQ ID NO: 525753 - DNA, 93 bp, Homo sapiens
gggggcccccggggttcccccaattttttgggggcccttgccccttttttttttttaaaaaaaagggcctttttccccctttttgttggggga

SEQ ID NO: 525754 - DNA, 744 bp, Homo sapiens
gaggttacctcccttccacacctccctcctggaggcagagagctacaacagactgagacagaaaagaggtaaggaagtgttgggggctggtgacaaccagctccccaacaactcctaggtgtttaaagaaggagggcaggaagacttgtgaagatgggaactatacaagaggcaggaaaaaagacagatgtggtggtcagggagtatgcagaagcaccaggaactaggagctagcccatgagacatggggagttggagctgaaggaggaatggcaggatgaagaattccctagattgcgttcctgaggaggctggcgacttcgtgaagatcctgaagacgcctaaaggagattcagccaggctagctgctaggtacccccaggcactttagcccgtgtgtggccatgcgccccgagtgctgctaagcgtcttgtctgccccgagagttgcggctgagatctgactaaggggcctggagatgatggagcttcagcctaaccagtctgcaccttcctctcctgatggcagttctgacctggagatagaccgaattggagacgaccttcaggactcggagcagctggtagcagtggacatgaattcgaactgggaagatgaactaccccgggcagagggtctgggcaccatgtgagacagctgagaaggctgggccgaggttgtatgtgggatgtgactggagaacgcatggacatcactggaagggtgttccgaatgggaccacgg

SEQ ID NO: 525755 - DNA, 238 bp, Homo sapiens
cccaaacccactccaccttactaccagacaactttaggctaaaccattttacccaattaaaggtatagggcgttagggaatgaaaaccttcggcgcattaggttattaggtacccgcaaggggaaaagatgaaaaatttattatccaaggcataattataggcaaggactaaacccctataccttcctgcataatgaattaactagagataacttcgcaaggagagccaaagctaaga

SEQ ID NO: 525756 - DNA, 221 bp, Homo sapiens
ttcaatttctacactatgtggagtacaattgacagtacctccgaaccattcgaagctgtcatcattggcataagaaacctgtacataatctacagtcgtcccgcttccaacacctccgaaagtaagtccattgatctctttatccggcagaaaagcgtaacccgcatattctattcttacgtatttgaaaaccccgctattatctgcgtgtagaaattgaa

SEQ ID NO: 525757 - DNA, 373 bp, Homo sapiens
gaacgggtatgctggttgggggcatcagagtatcccattgaggtgcccataatccatgcatgaggccctgtgcgatcacggcattggctggactgaagacttgccccctatggtgggaccagcaattttgcccagaacaccatgccctacccaggtgggcagggtgaggcggagcgattcatgactccccgggtccgtgaggagctggtgcgggaccagctgctggagaagcggtcgatgggcatgcagcgccccctgggcatggcaggcagtggcatgggacagagcattggagatggagcggatgatgcaggcgcagcgacagatggatactgccatgtttcccggggagatggctggtggtgagggcctg

SEQ ID NO: 525758 - DNA, 651 bp, Homo sapiens
cactatcaccctggaacagatcgagactccatctcaacaacaacaacaacaaacaaacaaacaaaaacccccacaaacatggcaaagaaagaatgagatttaattgagaaagcaaaagctaacaaatagatgaattgtaagccaaagtctgttaggcagatttgttttaaatacgtggtcttgctctctggggttccaactctgtgccattctttctgctaaaaactgggttctagtgattcctgctcccaccgaggtgttcagagctcagggaagaagcctgcatgtgccctagagatagttgagcttagccgctgctggccaggcctgtgtgtacttgttccaggctgtctagggcctggactatctaggatttatagcaattctagaatttaagtgtcctgaccttgaaaggggacttgctttacacccaaatatttcgaatatgttatcttgtctcttttctttttgttatatagacgagattgatgcataaaatctgtgtttgtatgactgtaattccaagtttagcgaaaattgtcctaggacaacacaccaacggacatgagcttgctcggtcctgcaagcttagtctccgatgctgcccacctgacacagatgtgcttagcttgttgcctctgccaggaactc

SEQ ID NO: 525759 - DNA, 298 bp, Homo sapiens
cgaaaatccgggatcctcccccggcccggtacctaacctcctggtctaattccccatggcacccgcaaggctcaaaaaatgcacttgaaaaacgggtgaaatttaaaaattccctggaaaccccccgtttacccggccccgatttggagccccccctaggccttttccaactaacttgggttccaaaaaaaagggaaaattttttttagggttccccccttcctccccaacacaaaatccaaggggtcaggggcccatcggcctttttcccccttttgtaacagcccccccccccttt

SEQ ID NO: 525760 - DNA, 1007 bp, Homo sapiens
tttcgcgcgaccagaagtggtttgaccgacacgcggatgcttttgccccctgttttatggaagggtcctttttcccgcgccttttgagtgggtcacccctctcttctttgtcatccgatgggtgccccgtattttgggcggtttcttaggtccccgggtggtggcccgccgtgtttgcggagacaaagcgcttccgcgcccgtgatgcgttgacgtgtgagtaggtgctaccactttgctcaggacaccctctcctgggagaatatgtgccccccgctttggtgacacgatattcgtggcgccgcccgcgttttattcccttatgtctcctcttttgtgccccctctccgcgatctctcttttcagcgcgtcccccttgtgacaaatagtacacacacgaccgcgagagatctcccaccagagtccgcctcctcccctttgtcaccctccgccagataccccgatttgtgcgcccccgccccagaggggttacttgaggacacctcttggggtatctccccgtgatttcggcgcgggcatatatttttctccacagtctcttcacaaataattttctccccccttattttctctcttgagaccccggcggagccctgtggagcctccctttgacacggtgtcgccacctctgggtatggactctccccccgttgtaagcccccccctcttgttatataataaattgaccatccccccaaacagttttgccacatccattgaacgtgtcccccacacatttagagcgttttaaaacacacaatagcccatattcccgagcattttttaacacccaacccacattttcacccgcgacaaccgacccgggggtatacataccggtctcatgccttttaaatcttttggagcccaacaccacacgtgttctcatccccctctgtctcctagagaataattctccccttaaaattttttaaatagggccccttttttcccctttgcccccccttttcccccttttgggccca

SEQ ID NO: 525761 - DNA, 597 bp, Homo sapiens
  misc_feature (26)..(26): n is a, c, g, or t
  misc_feature (62)..(62): n is a, c, g, or t
ttgtgcctccttccagacacttactntgataaagaaaggggacattcatgtaccaatcatcntcaagatgtttcttcttaaggcatcaccggtcagcctttcctgagcttccttcatcccctgaacaacttgctcgccactgacataaaatactttgtagctggggtttccattctcattgatgattcaagaatgcacctgcccactgggatccagtcaacgaattccgtgactatcatcatacgtcagggctaccatgcatcctcaggggcttcacattcatcatcactcctctacatcacggagtcatcagaacaaagtaagaactcagccaggctcagtggttcaccagtgtaattgcagcactttgcaaggtcaagtcggcgagatcatctgaggtcagtagttccagaccagcctggccaacatagcttatgtccatctctcctaataatacaagcattagccatgatgtgttggcaagcgcctgtattcacagctactcaggagcgctcaggtagtagaatggcttgaacctgggagctgaaggttgcaatgagcagagtttgtgctgctgcactacagagtgggcagcag

SEQ ID NO: 525762 - DNA, 805 bp, Homo sapiens
  misc_feature (152)..(152): n is a, c, g, or t
  misc_feature (155)..(155): n is a, c, g, or t
  misc_feature (159)..(160): n is a, c, g, or t
  misc_feature (163)..(163): n is a, c, g, or t
  misc_feature (171)..(171): n is a, c, g, or t
  misc_feature (183)..(184): n is a, c, g, or t
  misc_feature (203)..(203): n is a, c, g, or t
  misc_feature (214)..(215): n is a, c, g, or t
  misc_feature (230)..(231): n is a, c, g, or t
  misc_feature (251)..(251): n is a, c, g, or t
  misc_feature (255)..(255): n is a, c, g, or t
  misc_feature (260)..(260): n is a, c, g, or t
  misc_feature (271)..(271): n is a, c, g, or t
  misc_feature (283)..(283): n is a, c, g, or t
  misc_feature (291)..(291): n is a, c, g, or t
  misc_feature (295)..(295): n is a, c, g, or t
  misc_feature (300)..(300): n is a, c, g, or t
  misc_feature (311)..(311): n is a, c, g, or t
  misc_feature (336)..(337): n is a, c, g, or t
  misc_feature (380)..(380): n is a, c, g, or t
  misc_feature (402)..(403): n is a, c, g, or t
  misc_feature (444)..(444): n is a, c, g, or t
  misc_feature (448)..(448): n is a, c, g, or t
  misc_feature (452)..(452): n is a, c, g, or t
  misc_feature (536)..(536): n is a, c, g, or t
  misc_feature (578)..(578): n is a, c, g, or t
  misc_feature (601)..(601): n is a, c, g, or t
  misc_feature (640)..(640): n is a, c, g, or t
  misc_feature (678)..(678): n is a, c, g, or t
  misc_feature (731)..(732): n is a, c, g, or t
  misc_feature (787)..(787): n is a, c, g, or t
gaggactggagcttcccttagattttctcaagttcaaggcaagtatgcgcagctttgcctccctgtcctgggcaggggccacttgttatcctatctactgtgaattcataattcattcaggattggagttgcataggtaacctcccacaccnganaatnngcnatcactcntccccgcttccnnactctcagatattgctccnacctcaggagnngaagaggcttatgcnngtgggggcaggaggagaacngctnttccntcagctgaggnaagaggggctanttccagangganctgantcagtagccanagactcagcttcccctgtccttccnncagtcccttcacttcccctaccctctgaccgtatctctgaaanccaagttatgcgtatgtgtgtnntgcacaagcttgtctttagtgtggtatgtgtatgtgagtgngcangtangcacacacacaggggttaaccacccctcacctagggctccagactccagttgtccctctcctcctacctgtgtctccttgtttnggggtcctgactgaagaaggtgtccagggggcagagtcaggnccaagcactggggtgcctcctcncacctggccagagctctgacccacctactctcagctggngtgaggggcacccctcaaactcagtcatgtggttccanactaccccattccccactccagactctgacccagcctcagtcctaactcctgnngctgggctgaggggaacaagcatttgctgaaacttgaagaaacaaagcaaatcanaaacaggaataactcgca

SEQ ID NO: 525763 - DNA, 900 bp, Homo sapiens
tcctcagcgtgctgttgcgtacgcccattctgccacaaaggttcttcggcccgacaagccggttcgccctaccgccggtttttctgcgctctgggcgttccgtttcccaaaggggcgccattccctctcccccccgggcgcccagaatcctgactgggcggtgacccccaccttgcgacttttcttagaccgtttgcccccaaagtggccgcctcacctctttgcgtgcacaatagcgaacggtcatattctccggaatccatctggtggaggaacgacccacccaaggggttcccgcccctaagccccgggggcttttcagacccacggcgcccggtttctcccccgtctactgcaagaaaagggccacttttcctccggtacagcgcacccagagggacgccgtgtggaaaaacaatgaggaaaatcccactttcgctgggttgcacacctgctggagatgcacacaattctgccagcccgttgttctcaccactgtggttctattggacaaaaaagccgaggaaggagggacttatttcctcgcgggacgtgcaggcagtacatcacaacaggcgctcgccctccgccaccgggggccccctcacatagctttcccagaaaccccccactcttcaccctactgtctttcaaaaacacaattatctcccccaccccatagcttcatcaaagacatccccccttacaaacataactacagttaaataacaccttgtgcattccccagccccccacagtttcacgcgtccttcttacaccccaacgattggtcctctccgcaccaccacagcgccgccgtattatggtgcataaacagcctccctctccccagcaaattaaaaagaggggccaaaaattaaacttttgccccacaaaaca

SEQ ID NO: 525764 - DNA, 989 bp, Homo sapiens
gctgtgaagccggactacgacggcagcggactctatcaaagtcggagccgttgagtttctgctacagttcttcgccaccatgatgtctgcacgccatataagtgatgacgctgcagattcttgggatgaatgcatcagatgaaaaactgcattggagtgatcaagtaacgggcgtatcgtgcccaacgatgcaaggttgaaaggctgattcttctatggtgaacttgaatgactcgtggacgagcagttgcatggtagtcgagggacactgtaactgcgacatggcgctagttcagcagagttggagatgcgctgctaggcgttgggccttatcatggctcacgctccatgcaacaccgcagtgggcgattcgtaggcaacgttcgctaggaccctagggaagatctacgtagctatacccggattccatgagttcccgggtgtcttgcagctcgatatgtccccataatcacacccagagtaaataaagcgttttgtagggctacatttggggtgcgaacaccctttgagcgagcggactgttttagcctaaatcttgagattccgacaacacattggacaagcctaagcaaacgatagatagccccccagagcggtaagggattgttcttgggggttatcgtagctcatccatagccattgtgttggcggtgctccccgagcattgtgaggtgaacaggaaaggccgacattgttaaagcaattgacccttggtcgaaatgacttcccacgtgccatggtaagaacagagaaagcacctgctttgtcccgccagaagccatcagtggctctggcaagccaaccatgttgcccacggattgagcaatgtatgagagaggatccacaaaactcggtgtggtcaagttcccactaaagagaaccatgtggccgcacatcaaactttaggaataagcgcagtggcccttgtacgcacgaaactcgagttgcgatcgcgggacatgggtgtt

SEQ ID NO: 525765 - DNA, 894 bp, Homo sapiens
gaagcagaacaaatactggcaacaggtgtttaccaggcgaaggagatactcaagtcactagaacacgcaagaactacggtgctatctcctctgaagaaataattaagtatgcacataggatcaggtgcaagtaatgctgtatgtgctcgcactgcaacctgggttccagggaccccggagaccctatccaatgatttagagatgagaagtgggttaactgggtcacgatgaacgaatccttccactaagtggcgtgaatggccactttaccaggagatgctacttgcagcgaggaaagattggcagatgtccttgttccaaagtatccatggctacgtcaaatgacagtgtcgatgacttatgttacccacaaatagatagtagtgacttttgttggaatctccctgggacataataggacgaacagtgaagatgatgtagagattatgtcacggggaatcctgcaagaagtagtagtgagtctgattgaaagaccttaaaagaaatatagcagacttgaatactgtacgaattctgtttctttaacagtacgcaggaaatgtaactaacaggtgatcaaaataataaccaaggtaaacactggtgttgctagaactgggcaggtccttaacccgttcaaactgttaggctctctcttttactgccagagacctagttttaggtttaaggcaactaggtaggactttaggggacctaatcacatttactggtgacaatgaggggcatgttgcttctacctgtcgttcacgtgcggctgcgtaccatcgcactagtgcggattcgcgtcctatctcaagtggacatctacgcttaacgctgtacgtcaagaatttgtgagaaaacaacgctgaacactcgtgggactgattcatt

SEQ ID NO: 525766 - DNA, 132 bp, Homo sapiens
tctagaggatcccttcgcggtatataaactccaaccccctcctaatactaactacctgactcctacccctcacaatcatggcaagccaacgccacttatccagtgaggggttggagtttatgataccgcgaa

SEQ ID NO: 525767 - DNA, 981 bp, Homo sapiens
gacgaacccgagccatgttacactactccaatagatgatccccaccatgggactgaagaaccgctcagaaggatcgagagcatagaggacgtcaggtagctgatcgtgctcgtgagtgaggcaaggcactcgagtggatactctcgtgttcctatgcccagatgtgccggagcggctgtgacgattcgctcgttcagtgccccagactcatgactgcggtaggtaggcgaagatgagacaccgcgatccagcgagggttacttgcgctcgtttccctgcattcactacgacacgtgataggaaccagtgagaacacttgatgtgcgtgacagcgtcgttcttgctactaaagcattccgttgccattcttacacggggaagcgcttcctgacctcgcatggctacctaaacacgcggtattacagtgcttggatccaaggcgcatgcgcattgttaggagtggaagacgattgcaaagagaaacagcacttgagggctccacagacaccaggaactgggtcgtacactctaaatccgagggcggaagtcagtacggtgggtacagcccgtcccacacgaggtacgcaggaccatgggtccactttacgcccattgggattggcgcaagttcttggtgtgggcggcgtcgcacactgctcctggtggaccgcctacccccgttgaaggaagctatcccctttttgggacgtaacacgtcagctgggatgcacagtacacgtacgcccagaccacgacagttgagccaccgtaattggagggcgaacagaaacgagggggacggagacgcgtacaaattatccccagtgacccaaagaaattaacgagacgataatccaccctccccggtagcagtaggctaggtagggggaagggatttgcgaatggcggtaattcgaacgcccttacggtccattgcgttttaggacggagtgtctacaacagcaattacccacatccgtg

SEQ ID NO: 525768 - DNA, 375 bp, Homo sapiens
gcagatttacttgagcccaaggagttccaaaccggcctgggcaaaacaatgaatccccatctctaccaaaaaaaaaaaaaaaaaaaatttgggggggctgtgtacacacattcggtatctcccagctacggaggaggcgggggcggaaaatctattggagcccagaggttggaggctgcggggagccattgattcgcaccagggttttctagccggagagacacggtgaaaccgggttctccaaaaaacaaaaacaaaaacaaaaaataaccaggattatggaggtactatgatttgggagttatatgcttgcaggttataattttactggagatttcaaaaaatgtgtttatagctggaggggacgcagaaggg

SEQ ID NO: 525769 - DNA, 409 bp, Homo sapiens
  misc_feature (20)..(20): n is a, c, g, or t
  misc_feature (29)..(29): n is a, c, g, or t
  misc_feature (61)..(61): n is a, c, g, or t
  misc_feature (86)..(86): n is a, c, g, or t
  misc_feature (117)..(117): n is a, c, g, or t
  misc_feature (156)..(156): n is a, c, g, or t
  misc_feature (331)..(331): n is a, c, g, or t
  misc_feature (336)..(336): n is a, c, g, or t
tcccaggttcttcccccggnaaggctggnagactttccacggggaatgacagcatctatgnggagctcccagaaacatgacaaggnggactttcctgccctcttggagatcagaggnggaaatggcagcagaagccgcagctctgcgggtctacgntcagtggcacagatcctgaattccagcaaaagagctattgcccaaccagtttgaagaccgcccccccgcctctccccaagaggaactgaatcagcatgaaaatgcagtttcttcatctcaccatcctgtattcttcaaccagtgatcccccacctcggtcactccaactcccttnaaatncctagacctaaacggctcagacaggcagatttgaggtttccccctgtctccttattcggcagccttatgatta

SEQ ID NO: 525770 - DNA, 345 bp, Homo sapiens
  misc_feature (6)..(6): n is a, c, g, or t
  misc_feature (15)..(15): n is a, c, g, or t
  misc_feature (56)..(56): n is a, c, g, or t
  misc_feature (81)..(81): n is a, c, g, or t
  misc_feature (92)..(92): n is a, c, g, or t
  misc_feature (162)..(162): n is a, c, g, or t
  misc_feature (183)..(183): n is a, c, g, or t
  misc_feature (188)..(188): n is a, c, g, or t
  misc_feature (194)..(194): n is a, c, g, or t
  misc_feature (205)..(205): n is a, c, g, or t
taaggnaaaaacagnaaatgggtggttttcattggatgcaaagagatgtacagganccaattccccaaggggccaacgggntgtgaggggantgaggggcggaggtaggggccagaaagacttagaagatgtcccatatgtttaatgtctttggcctttaantctgatttctctgatgggaanattgnccagtncctggcttttncctggcagggcatttgccgggcctatgtggctttaaccttaaggctgatactttcctttaggtgtcactcttgttagccagacagaacttttgtacccaactacagatggctctgtgcttttagtagaggcattttgcac

SEQ ID NO: 525771 - DNA, 907 bp, Homo sapiens
  misc_feature (191)..(191): n is a, c, g, or t
  misc_feature (205)..(205): n is a, c, g, or t
agcgggaggccgcggaaagcgtaggccatgactgagcgctgatgtgaatccaaaggcctatccccttgccgatgcccagctcaccaagaagctactggacctgggttcaggcacgtcatgtaactataaagcagctccggaataggacgccagtcgaggccacgcaagagacgactcaagcagggccatcntctgatgtccatcngtgactggctggcaggaccgccggagccactgggatgatcatgtctggcacagtgccgctagctgtttgatagacgagaaatgtagccctaacgtgtttgatgcgctccaagtcaggcccatggggagacgcctgatgcgggtctcccaggcactgtcatgcgcactgttctggtcaccaatcaagagaagcgctcgctagcttgaaacgagcaggatatcgaagtgcctattcgaagcgagtccactctgaagacggctcgtataggtactgaacaccttgtggagacctctgcgcacgttgctccgcatgacacaagtgtatcccccactggagggttgtagtaatcaataattattctgtgttcaggcatgttaggtatttcccaggctagctgctcatatcgtgtatacgccaatgtaggtagctaacatctgggtattctggattgtcacgcgtggaacggggttctgtctttaacaggggcttgactatccaccctgtcctgttccttccctcacctctgtccatgccgttcagtcctttggatcgctccctgtatcggaacgaagtggtccagagcagaaccgaagcagggtgggtggcacccgtttgaacacaggcagagagaagcccgggagaaagcttgatgggagccaggagccgagatctggtaccaggtcttcagccaactaagctacg

SEQ ID NO: 525772 - DNA, 810 bp, Homo sapiens
gtgtctgtcgggtagaaataggccttgatgtcctggggctctccatgcaggtggggttatgtgtctgactgaaggtgtgatgtgcagaagagcttgagagagtggatcagagagtactagtgacagttactgcagagctcctaagtcaccactcaaccagtggctgtgtcacaaggatttgagggcacttgcctgtcttgtgaggtctgtgccacaatggtgagtctgaactgactgctccagcataagtgatcaggcagcgttgacgagtatactggtgtcctcagtcacatacacctgtgggaaaacggaccgcttcttggctcctgactcccagggtacagcgcccagtaactcatccttcattcagaggtttgctggccttcccggtttcccaaggagcaagagcatctgtaccgcccttatggcccgcgcctctgctctgactccattttattatacataagaaccaatctgtgtgacacattgggctaacgtggattcggttatacctttgttatatatatttttagcaacttggatttccagtgtgtttacaagagtagtcattaggtagtatgcaaaagagccaagagaagagattcgtatatgcatgagctcaaagccaaagcatgagagacggcagaggagtgctgagcaggggactctccaggctttctctgaccataaacacgccggggtcccaagggacctccgttccttttcccatttggatgcatccgcgtcctccaccacgtaccattgcgcagtgcagctggagcaggaatacgcctcagtgtgagggaatcg

SEQ ID NO: 525773 - DNA, 480 bp, Homo sapiens
ttttatttttttgatgcaaggttgttttccccccgccgcatttataaaacactgtttcctatgcctgcctgggtttctgacggcgattcaaacggtgaatccgaggaatcttttgggacctgcccagggctttttttattagggcccgctgggcaccggaatcaggggtgtacctttaattacgcgggcctaagagccacttacaggaaagccccttaactgcatgggagttttgtgtaaaaaacttctgcttctgccaaagtggccccaagggaatttcgcataaccttaccacttcgtggatctgcccccgctggaacaggtgtgttggtaaatacgataccacttgccggagacattttatagggtaaataatcctttaccaacaagctggatatactttggacttcggggcccaaattctaaaagacgaggctgaggcgtaacaatcttaaggggggagtgggggttcctctcaag

SEQ ID NO: 525774 - DNA, 147 bp, Homo sapiens
tgtagatagggaaactacatctcacagcactgacggtatggggatttcagaagccataagcttacggctctggacttacgtgacaaatacaaagatgttcaggtccttaaaattctagtcagggcagtgattgatgggatgacgcgg

SEQ ID NO: 525775 - DNA, 297 bp, Homo sapiens
ttggtattgtggtgttggaattggaaggaattaaacccccatgaggagttgggagaaattgcagatgtgcttcccagttcccactctcctcagtgttggctggaagtttgacagtgacctggggtgtaccgctgccttcttttggtatgtgctcagattcttcccctccttcactgaacaagcgtttattgagcacctgtgctggggatgtatcagtggaatgtgggattgatgacggatgatggagtgtgcggatgatgataggtgatggagtgtggggatgatgatggcatgtgc

SEQ ID NO: 525776 - DNA, 473 bp, Homo sapiens
cagtgacttgctccaaagtctacacagcggggcatggcagagttcaagatccacattcctggtccggctgactgtggggttcagtgggggttggcggtgcttgagcattgaagacaaagaccttgttgggttgctggctgcttctagagatggatgtggtgggtggatgatggtttgtgttctttccagagtcagatggctgggcagagtcaggacatcctgggggtgttggattcccaggtgtggagtgacaacactggctcatatccattttcagagctcatttctgaggcttcatctggtaccaaccctgtgaggcgaggatgctcctgcgaatccccttgtgcagccaggcttggagaagtcaaggatttgggttggggcacccaggaagcctgagggttagctgggtggacctcctggctcctcggccactgcttttcaccctgcctctatgtcattttcggggatcc

SEQ ID NO: 525777 - DNA, 783 bp, Homo sapiens
gttacacatactccccgaggtcacgtttttcgtagcgaaggcctgggattgggcgaatccgggaaacgcgcagaaccgaggaacgtccgccacggttgatcatgtcagacacgctgtaacggtctagctgtaccatacggtcttcatacagacccagatagccgtcataaatacccattacgttccagaccttctgtcagcgcagaacgaacaaccccgcgaattgcggcgttcatgcctggccgcatcaccgccgcttgtttaacacaccgattatcttaaatcatgactacctctgaactttggaatgcaaatgaaatctgttgccggaagtcttcttgcacatcgaagtgatccaacgaatgtgcacaatagtataacaatcacttcctgctgaattgattcaaggtcaggccaaatggcggtattttatacaacaaaatgcgggtctggctctcttttatactgattcatgaaagcatagaccgtataacacctccctgggtacgacggaacaggggtcctgatggaataattacatccgatcccggaacacgccgtaccgctagccctgctctacctgatccgacaccatatgtgcctgaaccaaaggcagaaagttcttccatcaccacgatgaattctcgcataaagcgggtccggcctgactgcagagtgcgaacatcgtgagcgccgctaacaaccggccaggaagtcacgatatcataatctctgccgactcatcaggcaacgccgacccataatgattgaccgctctatcct

SEQ ID NO: 525778 - DNA, 768 bp, Homo sapiens
ggagagagaactagtctcgagtatatatttttgatatttgggggtctccaacaaaactttattaccaaaacacgggaagcaggcacgttgggccctcagacggtaatcttcccatcactactcttaaggataactcagatgaccgggaggccaatgagggggctggtggcccggtacgtgatctcgtggtgagaagtggaaaccacctcatagggctctccggggagccgcagaggcattaacacaccaggcagaaacacgggcacgtgcgctgggacagttcgtgaccacaggtggctgacacgcagaggcgcaaacacgctgaaggcgtgctgcgagaaataaggcgtgaaccttccctcataagcaacaccaacgggtttaattccaggtcagggccaactccttccgccagtgaatccaatacagtggcacccgtggggggaacggatccttacggggcccctaggagatccctgcgatacgaaggccatgacccaccagacccctctcatggctgagtggcccagtggatagcttctatccgggagtccaaggccagtcttccacccggtgcccttccagggtaaccctcaccgggtgatcgacagtattaacaccatctacctggcacgcttgcacgcacttccccgctccttggggtcgagcgccaaggcctagcacctcttcgggccttagcgggcctgctcacacgctttgccgttgctacctggctccagatacctcttgcctgagcctcgataatcc

SEQ ID NO: 525779 - DNA, 711 bp, Homo sapiens
tgtcactctgcccaggccaaggacctccattgatcaggtgtggatccctgcgggtgggcatgggaaatggcgtcccatctgccattacgccggaagtgctggcctttgggcggcccccagccaaccagccagtgtaccaggtgtcaagagtatgcccggcgctttggtgttcccggtccattgctgatggaggaatccccaatgtgggtcatattgcgaaagcccttggccccttggggcctcccaaccagtcatgatgggctctctcctggctgcccacccctgaggcccctggtgaatacttcttttccgatgggatcccggcttaagaaatatccccggtatgggttctctcgatgccctggaccagcacctcagcagcccgaccagatatttcagtgaagctgaccaaaatccaagtggccccgggagtgtctggtgctgtgccaggaccaagggtccatcccaccgaatgttgtcccctacctgattgctggccatcccacactcaagcccggaccattggtgcccagagcttgaccccagtccgagcccatgatagtactctggggagcttaagtttgagaagagaacgtcctcagccccggtggaaggtggcgtccactagcctcccttcgtatgagaacggcttttctgaaaagggatcccgcacccctcctcggtttttttttccataaaagtttagaaaga

SEQ ID NO: 525780 - DNA, 197 bp, Homo sapiens
gggggggggggggcccccccttttatggggaaaggggggaaatggccccccttttggggggtgggccttttaggaaaaaagcgcgggggggaaattttttggtttttttaacccttttaggggcccttttttttttttgggcccccttggggatcgggctttgctttttttggggaaattttttcccccagaattta

SEQ ID NO: 525781 - DNA, 163 bp, Homo sapiens
ccgctaggaatggcattttctctctcagacaaggcgacagccagctcctgttgagacagattgggagtcattttgcagatctgcgcactgatccgccaaggggacacacagtgagttagcggggtgttgcccgtagcgggggtgttgcctgggtacctgagct

SEQ ID NO: 525782 - DNA, 622 bp, Homo sapiens
ggtggattccgtgggattgttttttacatctcctttttccttccttgaagaaaaattctggctgtcccaaggattcttcatgtatatgcaaaatttaatatattgttcacttgagtcttaagagtaggtcaggccaaggcaggtggatcacctgaggtcagaagttcaagaccagcctggccaacatggtgaaaccccgtctctactaaaaatacaaaaattagctgggcgtggtggtgcatgcctgaaatcccagctacttgggaggctgaggcaggagaatgcttgaacccgggaggcggaggttgcagtaagccgagaccatgcttattgccctccagtctgggcaacaaaaatgaaactccgtctcaaaaaaaaaaaaagtaggtcaattcgtaacagtttatttgggacacaccctgaagctttggtttggaataagaaatgagtttcaggaatggacaaaccatgtgttaaccaaggtgtccgtgggctatgaagaagatttcatttcgggcatccattgtggagtcaaagtcctctagtgaaaggcatagaaattaaagatttactatgcgtgataatatatgaggggctcaagcagataggattattgaagggg

SEQ ID NO: 525783 - DNA, 889 bp, Homo sapiens
gaaacctgcatttctatgcatctgctattccagaacaaaaatgggaatgtattacaggagagttacctcacagtgtcttatgtcgtggaacctgaaacataaccacgtgttttcttatatgatcattctgtgttgatactgcttttatttgagtttatgaacagaaatagaaagtatggtgcttgggtttgccctttcttactcctgaaagttaaatcagaagacactgatttcattcttgtgaaactttagctcagagactattgatctttcgtctccattacatatgaaccaacctattagtacaaacacatagctttaacagccatttctgctgatatctagtaatctattcttttaactgtgacacaactacgactacaatgtcctggagctaattctagcttacatttgccagtatttctgtatgtcacttaacgttcctttcctctaaggcttggcactacacactcttcgttactctttgcatacctgatggcactctatgtcaatgctgattgggtacattatacaatttctgtgctacatttaacacacttcacttttgcctcttaccgtgattgtcctctgagtaatcgatcgtactccaactcgacgtcatagcttgccaactatactatccacatgggtccgtaagtaccactaactaacccacacttgtctgacgacggctacgcaccaccctcctcatccaaaccaatcttctcctaaggaggccagttccactcttcagctctaaggctggacaattctcgtattggctccacatcaccggttcatctaacttaatccttccgggacctagcctggcgaccccacagcacgtcttgaactctcacgctgaactctatcaatattgcggtgatca

SEQ ID NO: 525784 - DNA, 419 bp, Homo sapiens
gaatccagagtgggcggggttgctcaggcatgttccatcagcacgggcacgtcgactgtggcaagagagaggacagcagctccagatcgtctcttaacctgagcccgtcctcgggggctaccttctcaggactggtcgcactgtctccattctccagtaagccacgtggagcttaggcagtatccgtgcacacatgccctctctgagggggtcagaagcaggggctggaggatagttaggaggctcctcaggtctaggtacagcctgtagccgttggcggagctcagccaggcgtcccaaaagagcagtcacatcttcagaggccagagcctgcctggcgcggcctggccagctgatggccctctctgtgaggcactgcagggcctcgccctcgggtagccgcacaggcagtctctgca

SEQ ID NO: 525785 - DNA, 328 bp, Homo sapiens
cccgagctctctctggtggggacgagactgggtgatttatatgaaaagaggtttaatggctcacagttctgcaggctgtatgggaagcatggcggcatctgcttctggggacacctcaggagctttactcatggcagaaggcaaagcaaaggcaggcacttcacacagtaaaagcaggagcgagagagaggtgccacactgaaacagccagatctcatgagaagtcactcactattgcaaggacagcatcaaagagatggtgctaaaccattcatgatgaactcacccccacagagagagcgtcagcgtccccccacagaaagagcgt

SEQ ID NO: 525786 - DNA, 100 bp, Homo sapiens
ccacttttaaccccttcttgctcatccagagaatttaaattgcttttgttcattttccatactactccccacacttcatcgccaggactcaggtggtgtg

SEQ ID NO: 525787 - DNA, 113 bp, Homo sapiens
gatctgtataccggatacctggaccttctacttccttcctcaactccagcctctatcttccaatacttcctacattcaaggacaaacaccaccactaaccgagagaaggtcca

SEQ ID NO: 525788 - DNA, 320 bp, Homo sapiens
  misc_feature (34)..(34): n is a, c, g, or t
  misc_feature (138)..(138): n is a, c, g, or t
aaaaaaaaaagccccagttgggcttggtggctcnacacctgtaaaaacccagcactttgggaggccgaggcaaggtggatctcttgagcccaggagttcgagaccaaacctggggaaagtggcaaagccctgtctctnaaaaaattaaaattaaaattaaaataccaaaattagctgggcgtggtggcatgtgcctatagtcccagctacttggggggctgcggcaggaggatcattgagcctgggaggttgaggctatgatgagccaagattacaccagtgcactccagcctgggtgacagagtaagaccctgcctcaa

SEQ ID NO: 525789 - DNA, 132 bp, Homo sapiens
aaatccacacaaggtatagaatccacacaaattccgccaccccccaccctttcttttttagaaggagccttgctctgtcgtccaggcatggagtgcagataagtagatactgatttgaacaaatactattca

SEQ ID NO: 525790 - DNA, 154 bp, Homo sapiens
ggggtgatctaaggatcccctcgagctgtcgtttcactactgcagtggattccagggcagcgacgcagatctggtgccaagctctccaggaactacctgaagcaaggctacattgagaagacggggccaagccaacggaaggcgttacgtgggg

SEQ ID NO: 525791 - DNA, 419 bp, Homo sapiens
ctactactactaaatgtcggccgcgtcgacggaggttgcagtgagcagagattgcaccactgtactccacctcccgggttcaagcgattctcctgccttagcctccccagtagctggactacagggcacgccaccacgcccagctaatttttgtgtgtttttagtagacacaggtttcaccatgttagccaggatggtctcaatctcctgacttcgtgatctgcccgccttggcctcccaaagtgctgggattacaggcatgagccactgcacccagacttctcaaatttttaaagtggttataaggtcctgcatagcctggtggtagtctccacctcccactctggattcatcccacctgtactcctccttgcctcagggtgccagtgcccctacccttgttgtcgaccggccgcgaa

SEQ ID NO: 525792 - DNA, 1291 bp, Homo sapiens
tgtcgctgcttgcttgtatgtgttatgttatctgctatctcgtggctgtggccggagcgcatgcccgttgttgttgttgctgtgagtgttgtttcactgctggcggtggcgttcttatggagcgctcccgtgctccttcatggtttgggggtttttttttcgggcgtggcccactgattgtggtgtccccacccagatgttggggctctgtccgctttattccccccgttgctcttagcgtgtgaagtgtgggttgttgttagcccgcgcgggttgctcttgtggtttatcgccctaaattgggggcaccttttcctgggtgccccaagcgctctgtggagtggtaatgtatttatcccagtttggggggctttctcatccgggtgttcttactcggtgtggtcacctttcaaggtgtcccaggttccccggttcttaggattattgggggaatctatttaggattttgagcatttagtcccccctagtcccgggtaacttcgtaggtctcacgtacccactggtgcgccccattggatttgaatgtaagggagggatccttgacctcctctgttatgtaaaggatgccttagggattgggaggccatagaggacttaggatgatggccggccaggatagttccagaaccggtttctatttcctcgaggcgcttctgaagaatgttagtatttagttaagttttggttgtgagtgtttatggaaaagggcacaacccgcgattatggaaccacgaataaagggaaatgaattattgaagggcgctgatcactggaaggtgataagctctttctatgataggggaagtagcgttcttgtagaccctataattttaataatcaacaccctcctagccttactactaataattattacacattttgactaccacaactcaacggctacatagaaaaatccacccccttacgagtgcggcttcgaccctatatcccccgcccgcgtccctttctccataaaattctttcttagtagctattaccttcttattatttgattctagaaattgccctccttttacccctaccatgagccctacacaacaactaacctgcccctaatagttatgtcatccctcttattaatcatcatcctagccctaagtttggcctatgagtgactaccaaaaggattagactgaaccgaattggtatatagtttaaacaaaacgaatgatttcgactcattaaattatggatgaatgccctcggccgattgcaaacacccagtcctgcgtactgagcctgatgggtg

SEQ ID NO: 525793 - DNA, 1260 bp, Homo sapiens
  misc_feature (266)..(266): n is a, c, g, or t
  misc_feature (763)..(763): n is a, c, g, or t
ggaggggacgtgtgaggagtgcggaatagacgaggactgcgggaatcggagtaataggcagatggctgcatgcgcaagatgcacatatctaggacttcgaaacagtctacttgtatgatcatcctcatccttggtagcaacagggctagtgagatgtagtggtgcctttatggtacaacttggaaggcgctgtccgcgtgtgtgccaatgatgctcacgcatgggaatgaggtgccttgcgtgcttatctgtaccaaaaggtcgtntcgtattgttaccctagaagtcgattatgccgagttggctacggagcctattccaagggtacccagaaagaacgatatcctgggagtacgtggggttgttctggatacgtcgaaacgcactatgatcgggtgcgtactgagaccacgtggtggggcactggtggtaagatcgtaggaaatcgataatgggcgatcgctccaaatgtaatcaaggcagaagctaccccactgtcttacccctgggagcagaactaggaaggagttcattccgaattctcggttgaaaccttccaaatcgagtgcaacataagattccacaactatgtgacaatgcatccttagcgcttcccattggaggaaacatttgaacagacggttcgagttgttgcaataaaggacccgggaaccttatctaagtaccaaactgtgggatccaaagatggcttcgataagttactagtccgaatgagggttgcggggctgagtgagtccgaggncaagataggtctacaacacggggtgggcgaggtggagatttgtgcaagccctcctgggttctccgaaagaacaccacccaattatatatttaaaccaacgggcgacgagacgcacctatactctaaaaatgggtttgcacaattcgctggtccgaaccgacagttaggtgaccgatcgttgggaaggagatttattatatacattacttcagctggtctgagagaggacatctcggttgggtttacgggaatatgggagtgtggtggccgacaactttaaggtctagcccgggaactttaatgggcaaacgttgagggtccaaattggaggacacaaaacttgagcattaggaggtcccataagaaccccgagtattagagacaaaataggccaaccgtgagaagcaccctccgtttgcatcggtctacgcgttacaggcgcagttctccaaggggaaccatgcaagtgggccgcatcgaagcacagattgagaaag

SEQ ID NO: 525794 - DNA, 182 bp, Homo sapiens
agctctttcaaaaaagctgtaattggccaggtgtggtggctcacgcctgataatcccattcagcactttgggaggccggggcaggaaaattgcttgaggcaagattgcttgaggagtctctaactcctcaagcaggagttaaagaccaggctgggcaacataccaagccctcatttttgtta

SEQ ID NO: 525795 - DNA, 584 bp, Homo sapiens
ttgtctttgttggattgggttaatatcaaagaccaggtctttgaactctgtaatttctttcttctaccatgttcaattctattgctgaggagctttcccaagccatttcgtgtttctaaaagggcatcccaagtttccctaattttaataatcaacaccctcctagccttactactaataattattacacattttgactaccacaactcaacggctacatagaaaaatccacccccttacgagtgcggcttcgaccctatatcccccgcccgcgtccctttctccataaaattctttcttagtagctattaccttcttattatttgattctagaaattgccctccttttacccctaccatgagccctacacaacaactaacctgcccctaatagttatgtcatccctcttattaatcatcatcctagccctaagtttggcctatgagtgactaccaaaaggattagactgaaccgaattggtatatagtttaaacaaaacgaatgatttcgactcattaaattatggatgaatgccctcggccgattgcaaacacccagtcctgcgtactgagcctgatgggtg

SEQ ID NO: 525796 - DNA, 231 bp, Homo sapiens
  misc_feature (100)..(100): n is a, c, g, or t
  misc_feature (215)..(215): n is a, c, g, or t
gccggttttgctgtgttggcccggctggtctcaaactcctccacctcaagtaatccacctccgcctgctcttttcatgtcctaacatggcatgtctttcngtttcattattttcctaccccttgtatgtcaagaaaccacattttgcatggtcttaccgagatgctgttaattgtcccagtgagtgcttttctaatctgcagaccatttacatcntcctggtttgcagcat

SEQ ID NO: 525797 - DNA, 683 bp, Homo sapiens
tgatcgagctcggtaccggccccctggggaattgtctgcccatccgaaggtgtggctggcacaggacagaacagaacctcctagcctcaagttccaaacccacactctccaatagccaggctctcagatgggaagcttcaaagccttgtgacagcctggctgaacctctccagcctggtcaacaggtagtgaatcctgtctctactaaaaatacaaaaattagctgggcatggtggtggacgtctgtaatcccagctactaggtaggttgaggcaggagaatcgcctcaggtgaaccaggaggcagagattgcagtgagctgagataatgccactgcattccagcctgggctacagaatgagactctgtatctcaaaaaaacaaaacaaaacaaaaacacaacagtctgttctgtggaggccttgggcagatgctgggagctctgagcacagactggtccctctgttgggagcctcttcccttcatccctcctggttaacttgactcagcataaaggccatttcttctaagagcctgtccctgactctccaatcggggatgtgtctgttgtctcatagagtgcccaattcctgccaccatttgtcatttccattcgcaacatttctttcattgtttgtttttcagagcctgggtaacagaccgagattctatctcaaaaaaaa

SEQ ID NO: 525798 - DNA, 436 bp, Homo sapiens
  misc_feature (1)..(1): n is a, c, g, or t
nctagaggatctcccggtgctgctgtgggaatgatatgatgtacggagcactgagtaaaggatgaagcagcttttaaatgggcagactagcctgggagccctgttaactcaggcccaattggttgtctcaaggggttccaggattcagtatcttaccacacccataacccactcatgggaagcctgtctctgcaccacaaaatatcaactgattaaccaaaaatattagaaacatatcctttaatgagcaggcagctcagacgtgacctttttcaaaaaaaacttttgttgatttcctcgtctcaggtaaggattttcctagtaaactttcacagaactttgttctcatcataatgtgcatcaaatagcctgtaacttgacagcagacaggaaatgtcttaatttcccccagaatcagacacaaagcttctcaata

SEQ ID NO: 525799 - DNA, 787 bp, Homo sapiens
tataaaacccctgtccttgggggggtggggttttaatcctaattgaaaaaaatttcatttagggggaaaggcccttggaaaaataggccttattttcttttgtcctttcaaacggggagaatttgagaattaaataaaacccccccgtggaatgatacctcgcgggggaaggccgtgttggacaaaaaaaagagaaagttgttgttttcaaaaacattgtaatttactccgaggggttatttttctcataatcttacagatactcatctcaagccgtgatttattatttaaaagaaggtgggcgtttaaaagagtgtggtgacaagtgtgctcttttctgtttttaaagatagttgtgaggagaaaaaaactttttctgtgtgtgtgtgggtgcgccccacaccaatccgccgggggcggcttatgagggagtttgctttcttttccacacagaagacaacgtcgtctttttttattactaaaagaggatatgtaataaacccctggtgataaacaacaaacaccaaaaacaaacaaaaaaaaacacaagaagaggagggggcgggggcgcgcgtctcctcttcctcataagaggatgatatttcttcccctgcctcatcgaaggaagagggggggggcggcgcccacaaatgttttttcgagcggcggtgtggtacccccacaggtgttttttctctttttgtgtggaacaacaaaaggttggtggtggtgccgccccatcatataatgatgggtgaggcggacgtgtgtcatttattattaaagg

SEQ ID NO: 525800 - DNA, 343 bp, Homo sapiens
tgcttctgcctgatctcggaagctaacagcgatcttggtcaaggcagaagcaagaagcaagaatcattgatcaaattggaaaacggaggctgctgagatgggaaagggctccttcaatgtattcccggtgtcttggtgagggcagaagcaggaagcgagaatcattgaaaaattggaaaaggaggctgctgagatgggaaagggctccttcaagtattcccgggtcttggtgagggcagaagcaggaagcaagaatcattgaaaaattggaaaaggaggctgctgagatgggaaagggctccttcaagtattcccgggtcttggtgagggcagaagcaggaag

SEQ ID NO: 525801 - DNA, 147 bp, Homo sapiens
ctagacacccgattagcagtatgttgatctaggcatcgataaatatgtaccacgtgtcatgtcaggcaaatatgataaaaataaagaaaaaaatggaagatataaaaaaaagacctagggccgggcgtcatggctcatacctagtaa

SEQ ID NO: 525802 - DNA, 270 bp, Homo sapiens
agtagcatctttatcttgttcactttttttttttaagatagggtctcactctatccccaggctaaagtgtagtggcgcagcactgctcacggcagcctcgactttctgggctcagttgattctcccatctcagcctcttgagtagctgggacctactgcaagtgccactatgcccagctaatttttttgtatttttagtagagacagggcttcaccatgttgcccaggagtttgagtccagctgagcaacataacaagatctcttttctt

SEQ ID NO: 525803 - DNA, 145 bp, Homo sapiens
agcgttctcctgctcggctcacgaagtagctgggattgcaggtgctgcaacatgcccggctgatttatggtgtatttagtagagacggggatctgctctgttggccaggctggtctcaaactcctgacctcaggtgatccacccg

SEQ ID NO: 525804 - DNA, 143 bp, Homo sapiens
ggccccccttttcccccgggggcccggtcccttttggggggcaaaatttttgggggccccgcccccctttttttcacccccccctaaaggggccccaaaaacccgttttgggccagggacctttaaagggaaaaattccccca

SEQ ID NO: 525805 - DNA, 554 bp, Homo sapiens
  misc_feature (104)..(104): n is a, c, g, or t
ggtcgttcctttgtctactatcacttgggcagactctcagatgctcagattatgtagataaggtgaaacaagctgcagaaatttcaatcatacagtatgagtanctgaactgactgtgaggagggtgacacactgaagtgtggaagaaatgaaggggcgaggtgtgtttgagaggctctggaagaaaagccaaaaaccagaattctctctggactgggcattgcgaatggttacatctggataattcacccagagaaacagtttcttctactgattgtttttgaagcagggcattgagctgagtccttgataacccaataccgtcaaggttcctcttgggcctgaaactgcagaaagatgaataaagaaagctgaaggagagcagttttgttgaagacagccttggaacagtctccttgccaaacagatgttctccgcagtgcagccaaatttacagaacgaaacgggtgacctagacaagctattgaactgtttcacggggtgttgggatcacaccaagaatggctcctctatcaacagatttgggtgtgcta

SEQ ID NO: 525806 - DNA, 233 bp, Homo sapiens
caggagaattgcttgaactggggaggtagaggttgcagtgagctgagactacaccattgcattccagcctgtgtgcgtgcctgtctgttggtgtatctgtgtgtccgtgcgtgtctgtctgtgcccatttgtgcatgtctgcgtctgtgtgtgcctgttgctgtgcatgtctgcgtctgtgtgtgcctgtcgctatatctgtatgtccatgtgtgtgtgcccatctgtgcatg

SEQ ID NO: 525807 - DNA, 328 bp, Homo sapiens
  misc_feature (56)..(56): n is a, c, g, or t
  misc_feature (64)..(64): n is a, c, g, or t
  misc_feature (68)..(68): n is a, c, g, or t
  misc_feature (80)..(80): n is a, c, g, or t
  misc_feature (117)..(117): n is a, c, g, or t
  misc_feature (172)..(172): n is a, c, g, or t
  misc_feature (185)..(185): n is a, c, g, or t
  misc_feature (234)..(234): n is a, c, g, or t
  misc_feature (238)..(238): n is a, c, g, or t
  misc_feature (254)..(254): n is a, c, g, or t
agcaactgctcctttctcagctcctaaatagctaagatacaggcgctgccacacanccggctantttnggtattttagtnagagacgggattcaccatgtggtcagactggtctcgntctcctgacctcaggtgatccgcccacctcgaccttccaaagagctgggattacngacgtgagccacngtgcccagcccgagaccctgtctcttaaaaaaaatccatctccacttcnggtngactgtgttactcagnctctgtctgcttcagtttaattttcgtacttaataatggtattttcttgcagagtgtttgtaaagaataaatat

SEQ ID NO: 525808 - DNA, 391 bp, Homo sapiens
acaaagggcccaaactctacatgctgctcaactcagaatttttggggaagcccaggctggtaactggactgtttctgctgctgagggcacatacccatcccggaggagctgtgagtttctcccccaactgagtagaggaaacagaggggaacaaggagggggtgctttgtaaggcaggtgtaatctggattaaaagaaattgtactccaaatattggatttctgagacctatattggaagagtcaatttagatggctagaaaaggaaaaaaaaaaaatctaaaacagctttcaaaaatactaagaagtggcactaccctcattttacaagataccatcgatcttattttgaggtgaaaaagagccacaaatgggtcctttctgagacacag

SEQ ID NO: 525809 - DNA, 135 bp, Homo sapiens
atatgttatcccaacacaacgagggtagcccaatgactggggcagtgggctgaagatctccaagtctctgatctatataattaaacatgttcatattgtacgggtgttgtttactagtgttgggcgataacatca

SEQ ID NO: 525810 - DNA, 461 bp, Homo sapiens
agagtacttcgggtgctttcctgagctgaggagattagagctgcttactgaagacatggactgtactaaagagctgaaaagattacatattgtgcaaattggctctattaattagaatagaggtagttttaagcagtaacttaattacatgtttcagtactcccaattgttctctgctgaatggctgttgacaatattgggagcagggaggagaaaaccaattttcaactggaccaaattggtaatagggaggggaggtcatgcgcccctttgaaatatgctgctgcattaatttgatgcactgaccttcagttttccatgtaattaggatgagctcatccagccccatgagctggaagaggaggcgtctacagtaggcagcactgatgctctgtggttctgacttttgatgatccagcatcttaacaataggcatgtgatttctagggaaagggcaccgg

SEQ ID NO: 525811 - DNA, 681 bp, Homo sapiens
agtgaccttagacagcctccccacctgctgcggatgttctttgacggccctgtatgacgaggactggtgaaggaggatgccttctacagttgggagagtagcacaggacccccctgagcacagggcaagggtgtggccccctaaatctgtcacagcctttttcaagtggctccctgaacccgaggaggagtctgacaccacccaactggagggctgtgtggggcccggggacctgggagccccacatggacaccaccagatggccccggctagcccgccttggacttcaaggggggccggccaaccaacgggccggttggccaatgggtcgccctgttagtggtgaatgtgtctgaactaaataaaagtggctgaagaggcaggatggcttggggctgcctgggcccccctccaggatgccgccacggtgtccctctcctccccctggggcacagagatatattatatataaagtcttgaaatttggtgtgtcttggggtggggaggggcaccaacgcctgcccctggggtccttttttttattttctgaaaatcactttcgggactgccgtcctcgctgctgggggcatatgccccagcccctgtaccacccctgctgttgcctgggcagggggaagggggggcaccggtgcctgtaattattaacatgaattcaattta

SEQ ID NO: 525812 - DNA, 206 bp, Homo sapiens
taccaacactgaaacactagagttaccctcagagcaggaagcacactgtgccatttctggggatctgattgatccagctgtggacatttggaaggcgaaggaagggaggtggctcctgccgctcatcctttcacaaggctcaagacttcaaccttgcagatgtatctattttcccctccatgttttctccttctaagtctcttttt

SEQ ID NO: 525813 - DNA, 911 bp, Homo sapiens
agcggaggtctccgccctcgcgcgggagctgggagtgctgctgagatccctaccgcagtagaccgcctctgccgaccgcggagcttcccgaacctctttcagccgcccggagccgctccccggagcccggcgcggtagacggctgcaatcagcaagacgtggagccccgacatgtccgcgcgcaccagaaacccgaacgaacgcaccaaacagagaggacagccaccagtgccgcgggcccaattggtgacaaggtgaaccgtaacgaactccggctactagagcccagaacgggaggccaaagaagggacgaggccgcaagaagcggcgcagtgcagagcgctacaatcaataccgccacaccgggacagcacggaaccgcagggtaggactagcaaagggacccaacgagaatcgactggatgggatacacaagaagtacggcgcacaaagcaaggagagcaaggcccctgagcatggatacagagattgcgcaatagcatgagccaacgtcgcggcaaccgttcagagcgagctcatgtagatgagacgtctagacacaagtgagggtagctagcacatcgaccttacagcggcacgaggacgcacaattaaggtgtggagataaccacgaaacaagctagcgattagacaggcggacacaaaccgaagtgctgaacagacaccagagggacatgggaacccacgggatggcaattaagccgtataccagtctacggctggtgggaaagaatgtaaggacaaaagaataggcgaaagtccacgatacgaagggagctctgggcaacttgggttcgagcatggcgtcacgagaagcgagagggggagagaaggctcgcccgtaccatgaggacaggagacaatggacgtaccccaccaaggcgccggtg

SEQ ID NO: 525814 - DNA, 235 bp, Homo sapiens
ggccaggaggcaggggtgcccaaaccacagggagcccctggggaagcctgctccatttttttggtgaccttgggggtccttcactcatttcccctgccccctcaggaaatggtgggccagcttccacacccccacctcccagtttttaacctttccatctgtttgtgtatggcctggagtcactccttcctcagcccccagggcaaaaaaggtcaaataaaaaccagagggctga

SEQ ID NO: 525815 - DNA, 617 bp, Homo sapiens
  misc_feature (269)..(269): n is a, c, g, or t
  misc_feature (325)..(325): n is a, c, g, or t
atactgtcgctgggatatagtgagccattatgaagggcgtcatctgccaacatcattcactaactctttctgttgcctaaaggagaaaattgtgctgagtttgaataggttactgcctattatagagaagagaatggtctgtagaaggggtgtttattctcaccattgactaggtgaccacctgctaaggttgcatggttatggtttcaatgtccctattgtgtacagagttcaagctcaaagaacagcaagtctccaagttagatttnagagaggatgtttttcttctcggtccaagggaaaatgtccgagtgtttccttctgnactggagagcatgcgggatggaagttggtttgctctcctgcgtcacatttcacaggatacaactttgaaagtgagagttcatagtttcttatggtaacttgaacttcaaaataactaagacctcagcataccgtgtcttgggcccactgaatgaattagtggtttttagaccatggcacttaatccaagctcctgttaaggctaatacctccgttaaaggtttccttgccaagcagggaaacaagggcttggccttgatacaccaatgagatgaaggctcaagctctcatat

SEQ ID NO: 525816 - DNA, 112 bp, Homo sapiens
  misc_feature (31)..(31): n is a, c, g, or t
gagatcgtgccattgcactccagcctgggtnacaagaacgaaactctgtctcagaaaaaaagaaaaaaagtcagactactgcaggagctccagtggcttctgcaaatgaggg

SEQ ID NO: 525817 - DNA, 404 bp, Homo sapiens
  misc_feature (262)..(262): n is a, c, g, or t
  misc_feature (293)..(293): n is a, c, g, or t
  misc_feature (310)..(310): n is a, c, g, or t
  misc_feature (368)..(368): n is a, c, g, or t
aaggagcccataggttgaaatacaaggtttggaagaaaatgtgatgcttgctggaatgaccagatgggcaaggatgttgaaaaataaatgaggtgtgatcattgcaattcattcccatcattacgaaatcatttattattaagttacacatggacacactgcagtgccaaggaaaagtacaaatgaaaggtaaaaacaagggacaaatgttgctcatgttgccagtaccttgttttgagtctggaagagaattatttatgtngctgcagccaaacgtctctgaaagaaaatgntcaaattgtaattggtncaacgtgttctctccaatgataccttggatacattcattttaattttgaaggtttttnattccatctcttaatgtttttactttcaggcacctt

SEQ ID NO: 525818 - DNA, 233 bp, Homo sapiens
ggaggtgggggttgcagtgagccaagatcgcagcaccacactccagcttaggcaacagagggagaatgtgtctcaaaaaaaaaaaagtgtgatgagagattataacacaagaacctgatttggattagtaaggcttctcgggaaaagtggactgaagagtgaagggaaattacttaggcaaggggttgaatgtgccaggggcacacattatggaggggtaccggagctcgaat

SEQ ID NO: 525819 - DNA, 221 bp, Homo sapiens
agatcctggccataaaatgaaagatccttgcaataccctgtgtggcctaggaaggaaaacctgcaatggacccaaaacttaaaagaagaggcgtcttaaaggttcatatgtagtcgaactataaatgtatgagtggcagacctgataagcgtttgaggtcaaaacccttaccatgttgaaaacaaaatcttacatgttaataaaagtattcgtttgcttga

SEQ ID NO: 525820 - DNA, 510 bp, Homo sapiens
  misc_feature (284)..(284): n is a, c, g, or t
gagtcctgtggcctctccagtccagactgctcctcgatgaaatgaggcctctgtaccagctggttattgggccagctctcctgagccactaagtaggtggattcccaggcctcacctcctggtgcacatggtcaacgacatgagaaaccctggcctgggtggcctccaggactccctcgagctgtgatacaccacaaatctgtggcaaaacagtgtgggctgtgtcatccgagcagagtgcctctctcatgccttctctctctcttgacccgctcacacttccntctcccgggccaccatccatggcctggccgggatgctgtcccttcacacggacgagctctccacgacactgctgacatgggagcccgaagcagaacaagcgagttcagaaagaagcggagtcgaggctgacattccaacatccagaagcattttcttggtgctcctttaaaataagacaaaattgccatgtatcaataaaaataaataaataaaaacaaaaaaaaa

SEQ ID NO: 525821 - DNA, 152 bp, Homo sapiens
gagctcggtaccggatgcgatacggcgtgctgtaaacgcactccaccatattcatcccatcccccggctcgtgtacgtttcgcgccgcatttgccagaatagcgactgcccggcatagcgcgcccacagcgcctgcgggtagccgttttcat

SEQ ID NO: 525822 - DNA, 1543 bp, Homo sapiens
tccaagtcaaagctgtttaattatcattctcacatttttttcataaaaaaaggaattatagcaaagggctcacggctcagggttgtgtacattaaaaaactccaggtttgtggtggcaagctcgcgtttcttatacattcgtgggaagccggggctgtgctcccagacatctcaggccgcaagcagctgtgcactgtgtgtttcagaccgcccctttgtgacaagattgcacgccctgtggcgcacactgtgtggcacacgcccacaggggcaagacagagacgcaagcagctttttcttggacaagagaggtgtgcgctctttgcgcctctctctttcggctattgtgcgcagagagaccgccgggccgcactgtgtgcgcaggagattgtacaaccggcgcgggcgcgccaggcagaccgcatgtgcgggagtatcccctatggggcgcgctcactccacgtctctgtggagagaccccacatcttcacacaacagcgtgtagagagggcgcctgtgtgtacccccggggtgtgtgtctgacgactctgcgaacgcgctctgagtcttccccgcctctgccccctcttactctgggcttgtgtgcgctctggaggatcatatctgctacaacgagaggggagacaccccgaggtggtgccacaaccgcgcacaaggcgggcagacattatgtgttcatctccacaagaaacgagacaatcttgtcgacatttctcttacgaccgcagatccccctctttagttttctctcacacgaaacatatttcacccacaatagtcgaacaaacacaaaagtcggtgttacccccccacgaaggagagggaggtttcctctccccccccagtactttgtgtagtggggaccgccacaatctcacaagcgagcgtcggcgtcttcaacaacaaaagggacacacaccaaaaagcaccacacaaccacacaaccaaaacgctccagacggaccaagtagctggctgccgcacaactttctttcaacacgcacggtgcacaccagctgctggcggtcgcaccatctaaagtcacgacgggggcgatactagtgcgggcatccggcacataacaaccaaccgtgcttacatttacaacggctacaacatcttcgtacaagcacgaacggacaaagttggcgcgtggcatctgcgggcgagcaacacacccaagagctggtctgctacaaatactcgtcagacacatatcctatacccccacaacgtgggaggggccccacaagcttgcccgcaccgaagcgccctgtgtcgtgactgcatggcatcctccttgtgacgctattttgctccggcacacaggtgtgctgccccctagttgtgccactgtgcgtactcccccgcgtgctctacgtgtggtgtgtccgccccaccgcgagccaaccgcgaaggggtggctccaatttcccacgctgtggttgcaacgacgtctgtggcgtcccgcgccaccaagcgctgcgttggacgcaacacaccctcattctgtgtgcaccgg

SEQ ID NO: 525823 - DNA, 262 bp, Homo sapiens
gcacgaggcaactctaaaaagtttgaaagaagcaattgttccaccagatgtacagataacactgaagtgccaaaagaaacatttaaaagcaaggaaatatgacattaccaaaagaacataataacttgctggtaaaagacatcaatgaaaaggaaataaatgacctatggaaaaggaattcaaactactaatcttaaggaaactcgacaaggtaaaggaaattacagccacaattcattaaatcagtaacctttatgatacg

SEQ ID NO: 525824 - DNA, 302 bp, Homo sapiens
attctgatagatagaataatggtcagccgggcacgtggctcacgcctgtaatcccagcactttgggaggccgaggctggtggatcacgaggtcaggagtttgagaccagcctggccaacatggtgaagccccgtctctactaaaaatacaaaaattagctgggtatggtgattggcgcctgtaatctcagctacttcaggaggctgaggcaagagaatcgttttgaacctggggaggtgggagttttgcagtgagccgggattcgtgccatttgcacttcaaactgggacgacagagtcttc

SEQ ID NO: 525825 - DNA, 984 bp, Homo sapiens
gggctgtgaagggcaggcgtgggacgcggaggggcccggcgctagtggccgcagacagcgcggggctcccagcggtagaggcagcctggcggcaggaccagctggcggcgggcgcctccgaagcgggtgctcatgggagtggtatggcacttgcctctcctctctccattcagctactggctctcgcaaagttcaatggacctacctgggtgggttggggcggcctgtttaactctccacgtggttggggacaaaccgctggaagactcatcgagtctctttttatgagaaagttggctcgcacccctggggcggcgggcattcgtggaagcttccgtcgggcgctcttcggcaacggagatggacctaccgggaccccgtacgaacccccgggggccgggagcacatacccgggcgcgcatgcctttgtggaagcaccgtggagtgccgggcgcggggtcgggactcccggcctggccgagacggacccctggaacggcaaggcccgacctacacttccgcgtcggacggcctggtcctacccggattgcagcatgagcacagagcaggatggagcaaagtcacgaggctgtcaccaacaaagtggcctggtgtggggaacggacagcgctcgtggcgcccggggcaccagatggaggccgtcgcccgagcaagcacggtcagactgtatgcgcacacagacatgggtcacattggggcaagacacatctagcatgggggacaatgccccagaccgagttgagccgaaccggagccggactggtgagcccctagcagcacattggaatggaagcacaccgctggggccgacacagacgcggcaccgggcgactgctgacaaacgggcggcggagcacacgccgattaaccggggggcctcatatcaccacaatacgcgagtggtgatgcgtgcccgagccccaggcccgcagggccgtgcgccacacgtacacccaactgacg

SEQ ID NO: 525826 - DNA, 206 bp, Homo sapiens
acgggttacaaaggataatgattgaagcttgagagctgttactcctaggtcgctgggggaggacagaactattccatgtcatggttctatcaagcagtgggtgtgctcagactctgttgtcctgcggtggagtgtgaagtgagtgtagattggactagcaactctcagggtccttgcagcaaatacgagtgtgcagacttggcgtg

SEQ ID NO: 525827 - DNA, 311 bp, Homo sapiens
gcacgctggccggctatatcagccactccccgttcacttgtcctctactttgttgctcccttatggtcctcccaccgctcacgtgcctttcgtttaccttttcctacctgctcagcatttcacactcggtcctttgactctccctctcgccgtctagtctggcccaattgagctcacctttctctgtgggtcggcgcctgcttgtcctctgcagagaaggcagggcgattgcggtcaccggccttcaccgggcgtcccgttgccggcttgcctgccctgcatctcctgtctcctccccacagagagagcgt

SEQ ID NO: 525828 - DNA, 167 bp, Homo sapiens
cgtacgtccttgttgtgtgtacttagggtgagggaggacaattcctttcaaacacaagtttatatatagaatgggtcatttttaagtgcttgtaataaattttaaagtccaatataatttttcttttccccacttctgataatgtattttggccaaactgaaatgag

SEQ ID NO: 525829 - DNA, 1255 bp, Homo sapiens
cctccctcctcagtttttctcctctctcctcctctcctctttctgttccttctcctctgttcttgccctccctcttcctcttttccctcttctccctcccctctcgttccgtcttctcgtctctgctatccttgtgctcgcctctctcccgtccctccctcttctccccccctatttcttctccctgctttgctttgtcccctcctgctgccgacactctctctgtctctcagtctcgtagcgcgggcccacgactttgtctgttcttctcccttgtattcctggcctcttctctcggtctctttttcttgtcccatcttcttccttcttgtcttctcttcgcttacttgttgattttattccctttcttgcccctccctctttgttgtctgagtgtccccttatttggtcggcccctctcgttctccttccgtccacatctactcgctctgcacactacgctctcacctgcctttgattctagtctatgtctttaagactgcccatcatgctaagacacctgacaagatgctgcacacgacttcaaagcatcctgtatgtctattctcgtctgcacaacgcgattacctactccaaccggtgtcaccttaagacgaacacttattctgttcatacttaaggctatacacgctttgttcagtcataccatcgctggaatgcagtttttatcgagagcgtcacttgcgactgcacaatgatatgcacactaggccatggccaggtatgtctgttccattcgtgtatcttggtaaccttcagttcacatgtaccatgtacggcatatgatttctcatttatctgctggtgagactattattgccctacggtctgctttcagactattcccaaagtaatgaacagttggatcagcacatggatgttctatctgtatacatgtggaatatgtggagcaaaatttaatttgaggataagatatgagatcacattataatgcctaagcatgttgaaaaagaacctgagtgatgtttcgtatctgtacgtaatgtttagatgatagcagataaaagcaccaaagcaaaggatatgagctatttaggaattgattatataagatgatttgttagaaacaaatgttcaaggccctttgtaactttaatatgatttgtttaggattttaagtatctacatttaggtattaaatgtttatcatttttgttgtttcttaatagtattatgttgttgtttagtttttctaagctatgattaaaatttt

SEQ ID NO: 525830 - DNA, 792 bp, Homo sapiens
cctcggctccagcgccatggcgccctccaggaagttcttcgctgggggaaactggaagatgaacgggcggaagtcaggagtctgggggagctcatcgtgtagctctgaacgcggcaaggtgccgggcgacgaccgaggtggtttgtgctccccctatcggcctatatcgacttcgcccggtcagaagctagatcccaagatggctgtgagctgcgcagaactgctacaaagtgactaatggggctttaactggggagatcagatcctggcatgatcaagagacttgcggagccaggtggagtggtcctgggtgcacgtcagaggagaaggcatgtcttaggggagtcacgatgaggctgattgggcagaaagtggcccatgctactggcgagagaggactcggagtaattcgcctgctactgggggagaagctagatgaaatgggaagctggcatcatctgaagaacggtcgtgtccgagcagaacacaaggtcagtcgcaggataaccgggaaggacccggcgcaaggtcggtccctggcgtatgagcctgagtgggccatagggacctgctcggagactgaaacatcgcaaggaggccgaggaagtacaacagagaaagcgccagaggatgggtgaaagccagcgccatcatgatgcggcggctcaagagcacacggctcaggatggcagcgcccgggactggggccaccggcagcgcggtggccaccagcccgcggcggctgctccctggggtgcggcccaccaccggatcgggctcccacgccaaagc

SEQ ID NO: 525831 - DNA, 173 bp, Homo sapiens
agatcaccaaaataccacaaaggaagttcacaatacttagacgtagcgaaaaaaattttatggtaattgcaacaagaagttttccctcctagcgaggcagtgtatcagggtggcatagtaatgcccctttttttttttttggaaacaaagtttccctcaatccccaaggctgg

SEQ ID NO: 525832 - DNA, 953 bp, Homo sapiens
gggagccctacatgattctcccgtgacccacgtggaagcggcactcaaggatgctgctgcctgcgatggtcccgcctgcgccgcgagtacctgtatcctgcaatggcccgtggaggaggctgcatgcgctcagcccaggagcaggaaggagcggctgcggcgcgcgctggaagaaaaccgcactgattcccaacgtgagtttacggcccgagaggcttctgtgcctttacgagggtgtcccttggagtttgatgtatgctggaggtgaatgtgtgaccatgccatgttggatgatgaataccggaatgggcaaggcagtcagaaggtatcccaaagtcgttatgtatccacataagcttccacgcacgacccccaagttccctgcacctctgaagcatgtttgctaaagcgatcgtgcaagctggttgttcccagggcgccctgcggaatgagccgaggtcgacttgaccgtgggggcactggtgcgagcctgcagatgcctgacggtcgtcgaccgtgtcttgctggtcgttcacggagccctcggtggcacacctgttgggcgtctcatcgtcagccaccgtgctcccttttggttcgctatctcggctacgtttcgacgtcgtgctgtcagagtgttgcgttcatgcgggcgatttgacgatcccagtactctgggcaccatgtcggaggccaagccccgacctcatctgcacatcggcttcgccgtcccagctctgggcaagcgggtcctctgacatccttccggataccgtatttccctgtggccgacagatgacaggccaccgggtcatcacgcttcgacaaaccagtgacgacgtaccgttatccttccgggaaccatgttgttatagaagacagaaccaaccgcaacgtggaaggcttcacttgaggttcggggccccgtttgagctgaaagctgtcatggatcc

SEQ ID NO: 525833 - DNA, 279 bp, Homo sapiens
  misc_feature (249)..(249): n is a, c, g, or t
ctccaaagaaattcgcccacgaggcctccccccgagcgccgctccggcttgcaccgcgctttgctccgagttttcaggcctcggtgctaagctagcgccgctcgttcgttctccccttcagttcgccattcatggattatctaccggggcccctcatccaaaccacgttgagaatgttctccgacatctacaagatccggggaagatcgcggacggggttcgtgcctggaggttgaggaggaagatggntcagtaggaccagaaggtaacattcatgga

SEQ ID NO: 525834 - DNA, 166 bp, Homo sapiens
aaaaaattttctgggggtggggggccctgcctggtattcccgctccttgggggggttaaaccggggaattccttttaccccgggggggggggtttccgttgacccagtttgggcccctgccctcccggctggggcccaaggttggggttttttcccccccccccca

SEQ ID NO: 525835 - DNA, 138 bp, Homo sapiens
tggtcctggtgaagaagtatggcggttgtatcaggaagatgctgcgccgggggtggggggtactctgagacgctcagacagccagcaagcagtgaagtccccaccacgtgcttgagtcacctgatgccacccgggcag

SEQ ID NO: 525836 - DNA, 490 bp, Homo sapiens
gcaacatggtgaaaccccgtctctactaaaaatacaaaaattagctgggtgtggcggcgcgtgcctgtaatcccagctacccaggaggctgaggcaggagaatcgcttgaacccgtgaggcagaggttgcagtgagccaagaccatgccactgcatttcagcctgggcgacagagggagactccgtctgaacaaacaaacaaacaaacaactcccggaatgcttggggagactgatttgagtactaggaagtcccagtactttaggaggccaaggtagcgtggatcatttgaggtcgggagttccagaccagcctggccaacatggtgaaaccccgtctctactaaacattagaaaagttagccgggtgtggtggatgggcgcctgtaatcccagcactttgggaagccaaggcaggtgaattatctgaggtcgggagtttaaggccagccttaaactggcgaaaccccgcctctactaaaaatacaaaa

SEQ ID NO: 525837 - DNA, 426 bp, Homo sapiens
cacgaggcgacctggtggttcgcgtgaccggcaccgccgaaggcacccgcatcgacgcgcgctcccagtcccgggtggggcgaagcgacctgggcgtcaacgccaagcgagtccgcacctttcttcgggagctcgcctcccgcctggaagcggagcggcgagcgcctggctgatccgccgcttcaccgatcccgagaggcgttccttctggggatagaaaagccttccgactgcccccaaaatcgcgtcatctcaggacctgtcgaaatccatgcgcgaagaagaaacggccacccaccgggcgagggagcgatacggccactccatcgccttcgccgaggcgctgaaagtctgggcccgggtcgccgccctgagcttcggcgggcccgcgggccagatcgcggtcatgcaccgcatcctggtgga

SEQ ID NO: 525838 - DNA, 108 bp, Homo sapiens
caggccactgctccagttcctgtttagaggaataagcagatctacagcactgagcccaataacttgaagtgcctgcaatttcttcacgctacaactggactgattcac

SEQ ID NO: 525839 - DNA, 792 bp, Homo sapiens
ggggcgaagttgcctggcaggcagaccgggggctgcggggggagggctgggatgggacaagtttgggcgatcctgtgttacgtaacgtgctgctggcatcccaggttgctggtctggatcgggttcccgaagtctgcgccctaggtctgtccagcggcattacccacccgtggggtgggagtgggaggtccctcgggggaagtgagtctcgggacaatgtttacctccactcttggggggagctggggatatgcgaggaagaaaggcctaagtcgtgattcaaagaagatgttgcgagaacaagtgtagcagtggggcttgagtcctgcctagctccgttgggtcttcttccgcgcgatagccgatcgtgcagacaaactttgggcgtgataatgaggcgattcaggttggacccgcttacctgtgtatgaacgaggcatagtcggctcaatcgattgtcgggcggggtcagggggggtgaggtggcgaaaaaatgctgggttgaatctcgagtagtcccgcgagtaaggatataatgggggcctgccttaaaacatgtggctgtgtcaggcaggtggaacaaagcaagttgttaaactcgggaatgttccaggactgcggattcagaggtacatagcaaacagtcttatggatgtgtgttgaactttctttccaaactcgcgcctcccaatttgaaagggtgaacgctgctgggctactttgaaattgctgacgtgtgtgcttctctttaacagtcgggtcatggtgctctgtttcccagctggtggtctg

SEQ ID NO: 525840 - DNA, 119 bp, Homo sapiens
tatcatgcatagactttccttctcagctaattaataaaacatctttaggctgggcgcggtggctcatgcctgtaatcccagcactttgggaggccgaggcaggtggatgcttgaactct

SEQ ID NO: 525841 - DNA, 155 bp, Homo sapiens
agcaactgaaagcatagggctgaaaattcagagagtactctggcttcaacagattttggcgggaggttggagagagctggaagaatggtataacaaatactgaagcgtaagccattacggatgaggtatgctcagcgcggggtaccgagctctcg

SEQ ID NO: 525842 - DNA, 380 bp, Homo sapiens
ggagtgagaatacagcctggagcaacatagtgagtacccctcctctctaaaaaaatagaataaagatttaagtgtataacaattaagtgaaatccggagaaattgcactggaaaccgagccagcagtgcagtcactttggggaaatgcacataactgattatggtctaagtcatagctgtattctcctgttaatatttcttactggttctgcaggggtctgtgtgcctggagtaggtcagtaaagaaaggttagctagatagtggatgtagctgtgagtggtggtaaactagtgccaatccccaggtgatctataccaccggcactaatgtgttccttgaattcttttagaacaaaatcctcttcctccatggtgctaga

SEQ ID NO: 525843 - DNA, 400 bp, Homo sapiens
aggaacaatcaggacgaagtaaagtgcagagagtacagtagcaggagagggcaatcgcactacgacagcatcgtgaggtcagcgcaccgaaactctaggtgtgcaggcttatcctgatgacaagagccatggacctcaccatgtgtctgaaaagcgcaatgttgctacttaaattgctatgcctataatggtgcattaataggatggttaagtagcatattcgcagacttaactctacgtaagtcagctgtgtactgactgtccctcaccactaaaaattcaccaaatctgtatctttacttctttgtaacactgttaaatattggtatatctcagttctcaggtgtgattccagcagctatggtgagagcattgctgctcctgaatctccactttcatg

SEQ ID NO: 525844 - DNA, 251 bp, Homo sapiens
gaacatgaagagcgtacagtctccaggcccggtctgatgacagctctgagaagctgtctctgaacttttaaggggccctagccaccctttctgaggcattctgcactagttgggttattttcaccatgctacagtctgtgcttgtgtcccagactaacgcaacgggagctcttgggagacgtggcgtgcttggccatcctaaccttggagtaggtcagcgtcaagggagagcctggggcaacatggcagct

SEQ ID NO: 525845 - DNA, 166 bp, Homo sapiens
ggatactctaactcagagggtgtgaatctttaatgaaaatgaaattatagctaaatgttttttatcctcaaactctgctttctgtaacctatcagtgttttaatgtttgtgtgttcttcataaaatttaaatacaattcgttattctcgtttccaactgttagtga

SEQ ID NO: 525846 - DNA, 183 bp, Homo sapiens
tgcctcgcagttcccgctgtcattcagtttgcatgtctgccttctgccaggcttgtcggcacatcttctggtgggcactgtgcggaaacttgaggactaaatcagtgactgctgcatgcactttaaaggcatggcctgtctcctcacttcagtgcacggtccatcgaccaaagccctgttctg

SEQ ID NO: 525847 - DNA, 222 bp, Homo sapiens
tcactgctacgacggctccttccacctcttactcaccacaatgctgattctttaagaatcaccatagtactgatggcagctacacataatgctaagagcatcaatgaaccatcattcgtcgtcgcatcgtagatccaacataaggtgtattgaattggatccatatcccgagagaattgatgaggcagaaccatgttttgaaacagccagccgtcgagtgat

SEQ ID NO: 525848 - DNA, 839 bp, Homo sapiens
cctggaccttggagggacgtttccggggacatgtgggtctcaatgcgcagagaatgtttcttctcaagaagtttttcctggccaacgttgcgtggtgcccgccgaattgacccccctatggaagcccctggcgttcacgtgctccaggggattattcctgggaccattcggccctattatgcccgcgctattccccctgtattggatttcccccaccggcgtcaacattgcacaagccaagtttgtctgaggctcgaaggcgaaaggttgatcgcccgttctggtaaaaagctgggaagatggccctaaattcttgaagtcctggtgatgcccccatgttgatatggttccctggccagccccaagtgtttgagagcttctccagacatatcccccctttgggtcgcctttgctgttctgtgatatgagcaccagcaccacttgccggtgggtggtctcatccaaccgccagtggaccagaaggctgctggagctggcacaggtcacaccagtctgccccgaaagctcagagaggctaaatggatattatccctgatacctgccaccccactcttgatccgtggtggaagaacggtctcagcaactgtttgtttccattggccctttaagtttagtagtaaaagactggttaatgataaccatgccatcgtaaaaccctcccgaaggaaaggagaatgttttgtggacccctcttggttttcttttttgcgtgtggccgttttaagttattagtttttaaaatccgtactttttaatggaaaccacttgacccaaaatttgtcaccgaattttgagaccccttaaaaaagttaatgaga

SEQ ID NO: 525849 - DNA, 740 bp, Homo sapiens
cgggcatagaccattagacatggtgcgcgggggcgagtaagtcaggtgaacgatggtcaatagacacagtatttaccttaaggagatcctggatcaatgatgtacttggctatgtgagttcttctagtcggattgtaacaaatagcgccacgtggggacgagtctgacgcggtaactgatatgtaaatcacagatggagattctagatggtgcattaacttggattctactcattgcatgtgagtacacaatgcagactgtcgatctttctcacagttatcgtcgctcgaggacttggggtgcttgaaggttcctagttcatttggaagctgcgacgagctgtagtgactgtgacgctccgtgaagacagatctgggccgttgatcatgggtctaagcagcagacttccattgttatacgatatgtgagcactcaatagcatcgtttcgcagattcttagaactacggcaggaatgtaattaattgtaatggccttaaaagaatcattcgggacacgacccatgaaggactcgcgaagtttgcttcgccagcacatttgcatcacataatgaatgcagtagatttcgccttagattcgcaagtggtagattcccaaactcttccaaccccacgaataccaccggctactgtaacgtagcacgtgttcctatcggagccactttcatcactttatttgtatggtgggactggaactgctattcatccgcccagaagaatgg

SEQ ID NO: 525850 - DNA, 528 bp, Homo sapiens
ctcgttgggccgtggcagcacaagtagcagcgtggggcgggcggggcaggagcagtggaggcagaccccagctactccgacctttggctgcgtgaacctcagcccttccatccaccccgctgatgtctgcagacttgccacataaattcccactctgtgtaatctgctagggccatgaataccagtctgtctgcgaagatactagtgccagtcctggttgtgtccggtgtaagtgccagatccagcatctggcggatatgttactcccctgaccatgataaccccttgactaccaagtttgggtaggtagtccagcatcgaggtggacagtaagagcggtaggcttgtttgcacgtgagatacccagataactccacagtctaacctttggtgacacttaccactccccacgtctgttcactcaatatccgctgtctatataagtgactcggactacctacttctcatatagtggagtgtgccattggttgaactgcactcttcactaggcagaagtgccctcctctc

SEQ ID NO: 525851 - DNA, 253 bp, Homo sapiens
tacgtaatatgtaaccacacctaaacagagtatttttcaggataaggactggactctctccaaggatcatttaaattccaaagagaactacctacaagttaatttctggttcccggatccagtcattctccctagcaatcatttattacccctcatctaatctaatcccaaaccctaaatctaataaaatacttcttaaaatctgcaccccgtaagtgccctcccacacttcaacccattccactttactctg

SEQ ID NO: 525852 - DNA, 596 bp, Homo sapiens
tcagagcatggcctgcatgcagcaattcaaccatcagctaccgaaaagagctttctgtcaagggccgatcacgggtaatgtgcttggtttgcacaagttggtattgccttaattctaattttattttgttcttgacatacaatcaatggaaagccatatcccaatgatccaggaatattgcaaggtttggaaaccttccttcttactagtttcattttaatcaagatggccaattgaataaaaatcccagccatttctgattttggggaaaaaaattgaataattttttaaaagggtactgaaagctttgccttccggaatccctttaagtttgcttgataaagtggaaagtatgttaaaactggggcctttaaaaaaaaattccccccttacatttagaaaaattggcatctcatttggcctaaattggtttgggattcaaaaaccctttccccaaagaaaaaagattaggtttccctggggccccttttaaaaaagggtcaaatgtttaaaaggttaaaaaacaaagcccacttttttttcgcaggtgttttttttttttaaattgagttatgccaaataaaaaattggaaata

SEQ ID NO: 525853 - DNA, 412 bp, Homo sapiens
aattctcttggtggaccgaaatcttacaaattaggtttgtgacaaggctttcgtgtgtcgttcctatctggcaaaacatactagaattcagatgtggaatgaaaccttacaagtgtagtgagtgcagcacgcccttcagtaacaggtcatcccttgtatgccatcgtagaattcatagtggtgagaaaccttacaagtgtagtgagtgcagcaagacgttcagtcagaaggcaacccttctatgccatcgtagacttcatagtggtgagaaaccttacaagtgtaacgactgtggcaataccttccgtcactggtcatcccttgtataccatcgtagacttcatactggagagaaatcttacaaatgtacggtttgtgacaaggctttcgtgcgtaattcatacctggcaag

SEQ ID NO: 525854 - DNA, 558 bp, Homo sapiens
agctgacaagctacgctccttttgggccagctcagtgtgatagctccagagccagattaaatgcgctccaggttaacctggggatggtcaggcagaacaaggaggagaggccagcagtgaagggcagggctggtgggcagtggctgggggtgtcctgggtggggctggccaccctcgctgcctctgacttgggccagacctgcgttaagtggagtggctcctccattctttacaccccaggcccctggcaggtgccctgcctttcctctgcccctctctctgccaacccatcctctccctcccagcccctgcccgcccagatataaatataagagcattttccatgggctgagacagtcgggagggagggggccctggaggacaggctcctagccctactcctcctcaagacccgggtgctggcctgtcccctgcctttgccccgatggggatgagggagaggagatgggtcagggaacagctatggccattggggaaggtgacttggatgcaacctttgaaagagatgcttccagtaaaccccatcggttaagatca

SEQ ID NO: 525855 - DNA, 855 bp, Homo sapiens
  misc_feature (459)..(459): n is a, c, g, or t
agctgacaagctacgctccttttgggccagctcagtgtgatagctccagagccagattaaatgcgctccaggttaacctggggatggtcaggcagaacaaggaggagaggccagcagtgaagggcagggctggtgggcagtggctgggggtgtcctgggtggggctggccaccctcgctgcctctgacttgggccagacctgcgttaagtggagtggctcctccattctttacaccccaggcccctggcaggtgccctgcctttcctctgcccctctctctgccaacccatcctctccctcccagcccctgcccgcccagatataaatataagagcattttccatgggctgagacagaagggaaaacattcagctttattttcggcttgtgaaattcctgtccttcattcccaacaggtgcaatcgcctcatttagatattgggacccagaaatagaanacaatttacaatatagcttcctttagggatctggatgctaccaaacaaacaaacaaacaaaaaaagccctcctgtgagatgccgagacttaatagaaaccgtggttggagctcttgcctttttccaggccggtggagaccctcacccctggcagcctgaccgtgaagcagaggaggcaagagctccgggagacagtcgggagggagggggccctggaggacaggctcctagccctactcctcctcaagacccgggtgctggcctgtcccctgcctttgccccgatggggatgagggagaggagatgggtcagggaacagctatggccattggggaaggtgacttggatgcaacctttgaaagagatgcttccagtaaaccccatcggttaagatca

SEQ ID NO: 525856 - DNA, 918 bp, Homo sapiens
tcgctgccgccgacacgtcaacttccgggccgcaggtggctagaggaagaagctgatatttaggcaaataacaagaggttgcgagtaacatagaatttaaggtgggaaagcagccgccaaactgacaaatcgtcttcgagaccgagcaagaacaatagtagtccggaattaggctaatggcatggcagaaggtggtcgtttttcatagacccttacggcagcaatatctcagtgcaagctcaaagagatcacctataaacttatgcattcaaacgccattgtctggaacagaggtcgtaaccgatttaagtatgtccatctatcagtcctgaacagttgattcatttcatataatcgaactggttatattaatataaaggtacataaacaaatattaccatatatacctccgtcctttaccaatgaatatctgtatagaagcacgctgaccagattgtcaacaaatcagacatacaagggctaccaggattcactgattcactagtcctcggcatgatgagcccagggggtcctacaaaatcatgaccacccagaacgggaccactcattcgtggcaccatatattgggcaatacgtactgtaatcaggtaaatttgacctaaagtgtcaaaccgtagtttaccaaatagcaggcaaagcgtcagcacgatacggcaacgaaaccatgaatgggaacacaatcccccctcagggacacacagaaaggtgtacaacaccattaggggtggaagggacaataacttaccaaactcagtggagaaaacgaaacacggcacacaaagcacaaacaacatgcagggaaagcaatccccgaaccgccaggaaaggaaaactaaacaaaacgcaaaaaccgggaaacagcacacaaaacgaaccaacaatacgggcacaagaacc

SEQ ID NO: 525857 - DNA, 462 bp, Homo sapiens
tcgttagggagtacattacacatgcttcatcacgagataatattccagagttaatcctaagagttatccaccctacagtaaaacaggggaagtgggtacccacttatgacatgttcataaattcccacttttattatttctgaattaaagctagcaatttgctttcttttgataagaggccattttcttaaaaactttttgctaaataaggctaatgtgaacctgtgttcagcaaacttttgacaaacattgcaacactacactccttctcaaagtcagtaccccaaggattttccactcccaggctgagtacctattaaagtaactaggacttcagactgcattttactatatgaattcaatttggactcaactccagtatgtttatctaccacaactattgttttaaataatcagatgactgttttcataacttttattatctcctaaacgagggtaccc

SEQ ID NO: 525858 - DNA, 1315 bp, Homo sapiens
  misc_feature (292)..(292): n is a, c, g, or t
  misc_feature (315)..(315): n is a, c, g, or t
  misc_feature (384)..(384): n is a, c, g, or t
  misc_feature (710)..(710): n is a, c, g, or t
ggtcaggaacacgagtcatcaggggactggacgaggcctgttctgagactacaattcagcccttctgaaggatagacaagtctgacccacgtgtcgactcatacttgtcgcactacactacacataagtatccctatgtgctggaaggagcagtaggcactcctatgtcttagacgattcatcgtcaattgatgaaggatccaagtcgaggaataggatatccgacgaggcatcctcgcgaattagacaagcgttacgacgagcaccacgcatcagactctttacgtccttngagaagcgagctgggcctacttnaacgcttggtcaccagcattcaacaccttagggaacagatgatcgtcagtttgcttcgttcgcatttgntcgccatctctcgtgatacttgcatcgcgaatggttttgatctataggagttcttatcccacacgttccgttctcgtagttcgcccccatgtagtaattggactcgggaggccgtctccacttggtgactgtctatggcagggccttcgtggtgagcattatactcctctagactgaggacacagtcctcgagttgctatcggattttcatctgactagactatcactatatggggtgtagacgtccaatagacttttagcttggtttgagtgcgaaccaccagagtcaacctaccaaaagatacgggaaagccgggtggtgtctnttctgctagtagagttggccaagtggaaacacaacatgaagaagaagaatataccttaggggtgggactcctcagatttgagtgcagtgtgaaaaaccgtaaggaagtcccttgcttgacccacaaactgggaccttgatttcattcaccaggtcttagctaccaatggcccccctgagagggagccgagatgtacccagcgaagattgaggttccccccattacaatgtacctttcatttcccccttggaggatattatacgtcacaagcaggtacagccaattagatacgcctacgcaaagcggcaaaccgctagatcttccttacttggtcttgggccatgggagtttccctgggtgcccctgcccaacttgttggttggccagaaggttgttcccttacttaagaacccaacaattcaggagccccaaatggtcttgggaggaagacaagtccggctccaagagggccctgcaagacaaggatataacttccccaacaagcattagaaaccccaggggtcaccttgtctgtgggggcgaattgaaccatggtttgcctggcttattctcttgcttggtcaggtttggtgttggacggccta

SEQ ID NO: 525859 - DNA, 1485 bp, Homo sapiens
ctagcatcatcttgataccaaaacctggcagagacacaagaagaaaaaaataacacttcaggccaatatcctgatgaacttctccaaaaaaaaaaaaaaaaaaaaaaaaaaaaaaacactgtgtgtgttgcggcgcgcgccccgggcccctcgggaagagagctttttgtgaaaccacctcgcgttgtgggcgcggccggggccccgtgggtatagagggaaccgtgggcgccataagcgggttctccccaaggggagaacaccgggggcccaagaaccacacagagggcgcgggggacattcccctcgacccatatttaaaacaaccgcgccccgcgagggggcacaaccgacgagagcgcgtttccgggacacacaaatatctccgaaagaggagactcttatctgaggagagggtctcaatataacagggggggagatctctatataccaaacagagggggagcagtccccacaagagcgagaagcactcgagagaatttatctacagatatatataagcccccacgcgaatatcgagtggggggataacacatgaccagaccggcgacgtacaacagagctgatcgcagacgagtgtcgtaccacgtacggaacacgaccggaggagcatcatacgccggtccgcacgctacacgacaccaaaggaccacaacaccagtaggagcggcggagcggtggtgcaccgagcacaagccacgcagccagcatggtgccagtagcgagtactcttcctgccacgtacaccctgactgcgacacgccgacgacagtgaccacgtcctccacgcagaccgcgacgcactcaaccacaacgcgcgcaacggcaggcaaacgtgcatgcggaccaccaaaacgcaacacgacgcaggtacccaccgccgcacacctccgaaatcgcgaggagcggagaagcgaggggcagcgacacacgggcgagacagggaggaggagtgactcgcggataggagcgcggggagtgcgccgagggaaactagagccacgcgtaagcaggaggcccgaccccgtgtgaaacgacaacgcacacaagctgaccaaacagacgcgaacagagcagagcgcgagcgaacgcagacgggagcacgagatagaaaaggaactgacgagggaggaccgaaggcagccgtcgaaggcacggccgagagaagcacaacgagcgaagagagaagggaagaagagcggagcgcagcgaagaagaaagggcgtaagaagcaggcgacaagccaggagagaaacaaggcacggcgagagtggcagagcgcggcacgaggcgaagcgggaagagagccgagacagccgagcagcaagagaacggtcgtcgagcagcagagagagaagggagggcgaaaggagcaggcgaggagcagagcacgtatagacagcgagagaacaaaagaaacgaacgcaggcaaacagagcaggcgagcacacgaagcagagagcg

SEQ ID NO: 525860 - DNA, 116 bp, Homo sapiens
gcaaaagaagaaaactgagccctcgaggccaactgtttcacccttgagccttagactgatgggctgcctaagagctgcctgcacggcacagatcgcttacacagccagaagtgcgc

SEQ ID NO: 525861 - DNA, 299 bp, Homo sapiens
cctatgtaaaacgggagggtggagagcagaacaagatctgcctgcaaaccagaaatgtcagcatgtatctgttgtgttgttttttaaaaacccaaggtatcagggtcttgctatgttgcccaggctggagcacaatggctattcacaggcacaatcacagctcactacagccctcaaagtcctgtgctcaagcaatcctcctgcctcagcctccctagtagctgggaatacaggcacaggccacagtatccaagttgtttaaaactggatgaaaaaattacatgtacaagcaggatagg

SEQ ID NO: 525862 - DNA, 654 bp, Homo sapiens
  misc_feature (436)..(436): n is a, c, g, or t
tggaaatgggagtcaaagtctcaccctgtggcccaagggggagtggtaggggttggatctcagcttcactgtgcaaccttcccccttcccaagtttcaagcgattctcgtgcctcagcctcccgaatagcgtgggaattacaggacatccgcgtgatcagtgccgtggactgaatttgtgggtagttttatagttagaagagcgggggttttcacacatctggaccaaacgtggctctgtgaaactctgtgaccttcggtgactccagctgtgccctcggccttctcagaaggtgtggggcattacgggcgtgtgagccaccagtgccgggcctcttgggaatatttaaataagcataaaaaattctttatacacgggtagatttaattgaggtagccgaggagtgtggccccgtgtaagagtttgtgttcgtggncaaacaccttagaaacgtgcgattccttagccattcaggtggtacctttcggcgcctccctggggtcttccttgtgccagttactagttaaaagggtggtgggtgaggaccgctgggcagagtcccaggcgtctggctgtccagctccccagcccgggcctgcttgccgagccatcgtgggcgtccccggtgtggcgagtgtgtggtgcttgaacggg

SEQ ID NO: 525863 - DNA, 208 bp, Homo sapiens
acacttcagttcttatcaaagaaattacccagacttcatcttacatgatacgattatgcccgatattaacagtaaaaaatataagagaaggttatcttaaatagatcttaggcgcaataccagctgatgaaggcctctgatgccttcatactgttcagtcatctcactgactcagtccagcagccagtggaccaggcattcatactaa

SEQ ID NO: 525864 - DNA, 621 bp, Homo sapiens
tcctagtgacttaggctggagtgcaatgatgtgatctcgagctcactgtaacgtcttcctctcaggtccaagcgattctcctgtgtcagcctcccaactacctgggattacaggtatgtgccaccatgcctggctaattttcgtattttcagtaaagatggagtttcaccatgtcggccaagctgttcttgaactcctgacctcaggtgatctgcctgccttggcctcccaaagtgctaggattacaggcataagccaccgtgcctggcccagcagtagttattcttatatcagacaaaacaaactttaaagaaattgcagttaacaaagacaaagagcggcattatataatgataaaaggccttgtccaacaggaaaatatcacaatcctaaacatatatgcacctaacactggagctcccaaatttataaaaccatcactaatagacctaagaaatgagatcgacagtaacacaatactagtgggggactcactatgtcatgacagcactagacaggccatgagacagaagtcacaaagacacatgattaaactatacctggaccttgacttaaacatatatcgacattcatccacactgcgatatctcattcacagga

SEQ ID NO: 525865 - DNA, 1437 bp, Homo sapiens
  misc_feature (557)..(557): n is a, c, g, or t
  misc_feature (563)..(563): n is a, c, g, or t
  misc_feature (605)..(605): n is a, c, g, or t
  misc_feature (607)..(607): n is a, c, g, or t
  misc_feature (609)..(609): n is a, c, g, or t
  misc_feature (627)..(628): n is a, c, g, or t
  misc_feature (638)..(638): n is a, c, g, or t
  misc_feature (652)..(652): n is a, c, g, or t
  misc_feature (663)..(663): n is a, c, g, or t
  misc_feature (688)..(688): n is a, c, g, or t
  misc_feature (704)..(705): n is a, c, g, or t
  misc_feature (1395)..(1395): n is a, c, g, or t
ggaccttcctctctactgctgacctgtgctggtattgcaggcatccgagcgctagtgagcgagctgggacagagtggcaattctggcctgcggggaaagtagtggtggccacagtgcatctgtctgcacaattgtttgtgggccatgtcgcagattacctgattcagtcgatcaaactcgtgagcgtccccctgaattatcggcgaccttcctgtacatgtaccccgagggggactggattcttgaagggaaaccgtgcctcatcatcatcgtcagatgtgtaaatcatcctgacccctcgcccatcatgaaacacttgggactacctggggatacaccagtggtctctctctgacctagcagtgcatgtatattccttgtttcggatcatctagcaagaagttccaacttaggctgtgctatagggccacaatgaaacagcaatggacagtgaagctctcgtgggactccccagaccaaggactcaacagcagctgtgaggcccagatgttcacagttgactcacagatgtcctacacagtgcccattatggcttngctttngtctgccaccctgaggtgctgcccatctatacggagctctgncngncctccaagcgcaggatgnnaggccgtggncaacgtagtccatnggggccatgtnctgcatgtatgggctcaccagcaanctttggatacctcacnnttctacagcagtgtgaaggcggagatgctgcacatgtacagccagaaggacccgctcatcctctgtgtgcgcctgtgcgtgctgctcgcggatgagcctcagtagtgccaggtcgtgctgtatccctataccgccgggaccctgcagcagtctgcatttatcccaggcaaggccttcagactggccacttactatgtggccatagcgtctgatcctgcatggtgtaggtcaatgtccttgtcatctgtgtgccaagcatccgggcatatctttggagttatcggtgtccacctcaggccccaagccgtcatcttcatccatcccgcagcattcttactacctccgcagttgtagccctcttgagggtgggagcctttctataatcctggcccagagatcccaggccgtgtgctttggacgtcctgggaagttcacttgttcattggcccgtcagatctaggcattacattgtttgacaacttgggggccacaatcgccaaagaccggatggtctaggaccacatggatcaaagggcgctgcctgggcacaacgggtaccctagaggcgccaattgacacaatggaagggggccacagggccaggaccccaacgggtacaatactgaacaaaggatgtggcaaggcgggcatggtcccaaagaaagcggaggagaacagaagggcgggagnaacagcaaaagctggaaaccaggacacaagtgacaacaccgc

SEQ ID NO: 525866 - DNA, 390 bp, Homo sapiens
  misc_feature (245)..(245): n is a, c, g, or t
ctgcacaaaggacactcagaaataagacagtggagcaggagaaacaaagagccaacatgtccaatcagaggcaggaggaaaactaggagcctggagaagagtagatcagccagccagagtagatggtggacaaatgagtaattcgggggcaacttacataaatgaatttatctctgccttgcttattatgccttttccctattctgattgatagataccaccaataaggtaaaaatgtatacccnctaatgttgatgcatggagatttataagcattttcttttccttgcttgattttagcattttgttttcaaactataataaatttgcctttttttttctagttctttcctctggctcttgtggtgttttctatggttgctacccaca

SEQ ID NO: 525867 - DNA, 989 bp, Homo sapiens
  misc_feature (261)..(261): n is a, c, g, or t
  misc_feature (270)..(270): n is a, c, g, or t
  misc_feature (288)..(288): n is a, c, g, or t
  misc_feature (295)..(295): n is a, c, g, or t
  misc_feature (678)..(678): n is a, c, g, or t
  misc_feature (687)..(687): n is a, c, g, or t
  misc_feature (693)..(693): n is a, c, g, or t
  misc_feature (745)..(745): n is a, c, g, or t
  misc_feature (812)..(812): n is a, c, g, or t
  misc_feature (844)..(845): n is a, c, g, or t
tgggtcttattctgcttatctctgctctaatctgttattttcttccttttgcttggtttgtcattagtttttttttccccttcaggtgtaatattaggttattgatttgagatatttcttctttttaatttaagcacctgcagctataagcttccctttagcatgggtttgagatctttcttctttttattttaagcatctgcagctgtaagcttccctttagcatgggtttgagatctttcttctttttaatttaagcanctgcagctntaagcttccctttagcangggtttnagatctttcttctttttaatttaagcatctgcagctgtaagcttccctttagcatgggtttgagatctttcttctttttaatttaaggatctgcagctgtaagcttccctttagcatgggtttgagatctttcttctttttaatttaagcatctgcagctgtaagcttccctttagcactgcctttgttgcctcctcctgagtttgggtatgtcatggtttcattttcatttgcttaaacattttttgtcctattgtaatataattttgttgtttttaataaaggtaattaatgaaacacataatgaattgtgcttctatttttataatattttaagcattcttaactcagaaatgtaaattttagaaaaaaattccaggccnggcacagtngtcacncctgtaatcccagcacttgaggaggccgagacgggaggatcatctgaggtcnggagttggagaccagcctggccaacatgtgaaaccctgtctttactaaaaatagaaaaaaaatatanaagttagctgggtgtcatggcgggtgcctgtnntcccagctactctggaggctgaggctggagaatcacttgaatctgggaggcggaggttgcagtgagctgagattgcaccactgcactccagcctgggtgacagaatgagagtccctctcaaaaaaaataaaatttcaaaaaaaa

SEQ ID NO: 525868 - DNA, 470 bp, Homo sapiens
attccttggacttctagcctccttcttctacgcctccattggggaataaagtcatggtgcttctccaaggcagcccagctcttccggtctggatgggcagttgtctctaggacggaactaggggtatactttaagagctgtaatccttgtattctgtagtattacagaatataattctagatgagtcacatcaactaaatcaacggggtcaaaatctcacttctcttatcctacgggttgaaaagtagtcatctttataagcacaaatgagggaatgtggtacagattaaacaaaaagggcagcataccaaaaccacgggtggcatatgaatatatctgatatccgggtaacggacaaaacttcaaaagtattaaccgatagtctagaagacggaactcagaaaaaaaataagtgggccaggcacgggggctcacaccggtaatcttagtacttggggaggccaagacag

SEQ ID NO: 525869 - DNA, 826 bp, Homo sapiens
tatttacaatgggtggcaggcggaatttttctaattaagttctttattaaccatgaagttagtggagggtgttttaaattcataagaatggtgtttagaaagtaccattgttcagcgcgtatttagatgatcttggcctacaataaaccggacccaccgcgcggtagaatttgactgtaggtggaaccgcgcttgtgccccgtcatagttatgcgtgagacaccctctcgaatgagagctgtctacaagaaaaaatctctcgcgggcggggcgcacactctctctcggcaggcacaccaccacttttcttattaccgcacgtggctttacggaactcctttggtgtagcgaccacaccccccttgtgggggagtcatactattccaaaaggtgcagattacatgcatcattatataaaggtattaaaaaaaagaggtgatgcaatagggacctctctgctaggagacatatatgccgtctgtataaacatgcgacgttccgttgctccaacgtatgcgagagttggttacatacatatttcctaccgataggtgttgagtataacaaatcgttaggtaatattgaaatacaccccgtgtctgatgccccgactccactaccgccctcctcactctccacgccaggtgacacacgcacgcgtgccgccaccacaccctctcctcctgtacttctagttcctgcaacttattattatcacctcttaaatctttattctctaatgctactcgtacaaagttctcactgtagttacccacaaaagaaaatatcatcaagaaaaaatttgcggcgggctaaacaaataaca

SEQ ID NO: 525870 - DNA, 824 bp, Homo sapiens
ccagttacatcactcataatcacattgctgctcccacagaaaggtctctagccagttttagcgggcttttcctgactttgcaaacaccattgattagaattagattgaaaatcaaggccagcagttttctgagaaaaacataaagggcttctttgaaaaagtggggagaagagcttttgttgtcagaaaacttgaggtgtttgggacacatggaaattctttggtttgaaggccctcatcagtgtcacctttgcagattgttcttatcaaagtgattcaggagaaggccaagtatgcatttagattaatgatgcagggtttgttggcttggccacccaagcaaggtctgcaccagaggtgattcatctccccagcttactgttctaaagagaaatacatttctgtgtacacctgaaaaattggcagcccatccttagaagatttcattcataaattctttgcttttcatgtatctgttaaaacaaaaaaaattcttttaccaactattcaaagtaatgcagaattgtgggaaccaaattcagtgtgaatctctgaatttgctataacagtagtaatattgtgatagcagcttccaactatggaccatctagtatgttctaaacacagtataagatgctttcatttcaaaataccagttccaacaaatctttggcaaacatttcagttagcctcaggccaggcgcggtggctcatgcctgtaatccgctcatgcctcattttgggaggctgagacaggcagatcacttgagcccaggagttcgagaccagcctgggcaacatggagaaaccctatcaaaagacga

SEQ ID NO: 525871 - DNA, 256 bp, Homo sapiens
  misc_feature (18)..(18): n is a, c, g, or t
  misc_feature (100)..(100): n is a, c, g, or t
tatttctgtataattttnattatgaccataaaaataacaatgtagtcaataacaatttaattgtacattttaaaataattaaagtatataattacactgnttgtaataaaaagtataaatgttagaggtgatggataccttatttaccctaatgtaattactacacattgtaggcctgaatgaaaatatgccatataaggcataaatatatacacatactatatacccacaaataccaataataaatttcaataag

SEQ ID NO: 525872 - DNA, 130 bp, Homo sapiens
ggcgactctacaggatcttgtgtcatcccccttcgtattcttggaagcagaagtgggtttcagcctcctctgccatagatcctgatcctcacacatttggggatccctacttgcccttagttacggcttc

SEQ ID NO: 525873 - DNA, 361 bp, Homo sapiens
cgagctcggtaccctcgtcttttgataggtcttttaccaactattcaaagtaatgcagaattgtgggaaccaaattcagtgtgaatctctgaatttgctataacagtagtaatattgtgatagcagcttccaactatggaccatctagtatgttctaaacacagtataagatgctttcatttcaaaataccagttccaacaaatctttggcaaacatttcagttagcctcaggccaggcgcggtggctcatgcctgtaatccgctcatgcctcattttgggaggctgagacaggcagatcacttgagcccaggagttcgagaccagcctgggcaacatggagaaaccctatcaaaagacga

SEQ ID NO: 525874 - DNA, 773 bp, Homo sapiens
ggacacttcctggtgggatccgagtgaggcgacggggtaggggtggcgctcaggcgggaccatgggtatcacggctcactgtgcctctcatgtgtgatgagcgtgttctgggcttcgtcggcttctgtggtgcctgtggttcatccctaagggtcctaaccgggagttatcattaccatgtgtggtgacctgttcagttggtgctatctctttggtgatgtgcaattctggcccaatcaaccctctcttgtgaccgcaattgaaaaatgaaaccatctggtatctgaagtatcatgtggcctgggaggaagaagaaatgtctacagtgctcagtcttgtgaggtcacgagaaagagaaatgccttctagatgcaaaatcactccaaaacagacattttctgtgactgtgcctgtttgtggccattagtgccttaaacgttaacagcacattttgaatgccttattctacaatgcagcgtgttttccttttgcctttttgacttgtggtgaattacgtgcctccataactgaaatgtgccgatccaaaaagattatgtactcttctgagatagaagatggtgtcttctgaagatacgttactctctccttggaatctgtggatttgaagatggtcctgcttctcaggggaatcagtgaattgttaggaactgtggcagacaaccagactcagtgggtgtcagagagagcagtcgaggaagccttcaggaatgcaatattttcggggattttctttggacttgggaattcctttc

SEQ ID NO: 525875 - DNA, 155 bp, Homo sapiens
agagtatgatggcctgtggtgtatgtaactttaatagtgtaggaagctgaataatttatgaaggagaggggtcaggattgattcgggaggatctattggtgcgggggctttgtatgattatgggcgttgcattcagtagtagttactgggttgca

SEQ ID NO: 525876 - DNA, 449 bp, Homo sapiens
atatatatatatacagttttctttttatggtgaaagtttagtttatttatgtgtaaatatacctgtgtgtatatatataaagttgtttttatggtgaaagtaatatatattcattgtaaaacaaccaaaaaattaagtaaattgtaaattgaaaatggattacttggccaggtgtggtggctcatgcctgtaatatcagtagtttgggagggttgaggtgagtggataacttgatgtcaggagttggagatcagttgggtcaacatggtgaaactccgtgtttactaaaaatacaaaaattagccaggcatggtggcgggtgcctgtaatcccagctacacgggaggctgagacaggagaactggttgaacctggaaggtggaggttgcagtgagccaagattgtgccactgtactccagcttgggtgacagagcaaaactctgtctca

SEQ ID NO: 525877 - DNA, 403 bp, Homo sapiens
  misc_feature (14)..(14): n is a, c, g, or t
  misc_feature (306)..(306): n is a, c, g, or t
  misc_feature (353)..(353): n is a, c, g, or t
aacattaagccaancaaagagagctggaaagtctttgaagagatgattgaaccttatcggcttcatgaaagccacaaagatttgaccactgctgagaaattaaaaagagaaagtccatggaaaattacagatgcagaactggaagcagtcaaggaaaagagttaccgtcaagttcgactgaacgagctcttacaggaacactccagagccgccaacctcatcgtgttgagccttccagtggcaagaaaaggatctatttccggatttgttgtacatggccgtggttagaaatcctgaccaaagaancttcctcctgtgttactggttagaggaaatcacaaaaatgtcttaancattttactcttaaagcctgaaggatgagaaatgttgtgccttggtgtct

SEQ ID NO: 525878 - DNA, 108 bp, Homo sapiens
ggtgaaatgtgaccctcggcatggtaaatacatgagctctgctgtctcttgtaccgtggtcgacgtggttcccaaagatgtcaattctgccattgccaccatcaaaac

SEQ ID NO: 525879 - DNA, 742 bp, Homo sapiens
cgccttctcaggaagaatgatagtatgggcgactggcgctcatagatgcatgagctcgttaagagctgagtgtacacatgagatgtgagtgtttatagaaaggcatgtctaataaataaagccactgtcttcatgggaaaagtggtttttccatttaacatgggaaaagtggtgtattagcgattcatgatgagtgtggattattgaaagtgcatgcggtttgcatcggaccccagccccatgtgtacctcagcttcactgagctccatgagaacccgtctctaatacaaatacatgacggaaaggaaaaatgacaaagacatgctcaaaaaaaagtcctccgcaccatggagagagactggccagtgatatcatgtgtacctcagctcactccagcgccatgtcgggttggaggtctcttattctcatgcaacgtaattcaagccctacatccatgcatttcaataaaccacttttcccatggtccagaaagcacatccatttaacatgtgcgctgggggattttccatttaacatgaggggccgggggtctcatttcgcatggcaacggatgtcaagtttattacatgtcaacatggaaagggcgatgcttccatgagcggggaatgagcacttttcccatgtccttgtggcgcacaagacaatcatgtgtacctcagcactgaagagtccatgtcaaatggacaaacaatgggaccgcatgtcatacacctatcccaga

SEQ ID NO: 525880 - DNA, 126 bp, Homo sapiens
gtgagtcgagtctgagtgaatggcgtcgactggtataggggaaagatatcgaacattagtagtggtcctccgaagtttcctcaggatagtggtgtctcgagactgagcacccagcggcggtacgag

SEQ ID NO: 525881 - DNA, 87 bp, Homo sapiens
aacaaccatttgtcgcttgtacaatcgcagaatggcccaaacgcttagtgttgtgccctgtttttaacataaagtatcttgaaataa

SEQ ID NO: 525882 - DNA, 105 bp, Homo sapiens
ggaggacatgcaacagaaatccaatctagagctgcaccgcatctaccctagctgctcatctgatatctgtggctggagcccagtgcggttcctacagtgagtatg

SEQ ID NO: 525883 - DNA, 134 bp, Homo sapiens
agcgggtgactcagaggatccgacgtaatatgtaactgcattaaaaattaaatatttctctccaaatcaaaacaccacacaatcttatctgttctcatctagttaccttagaaacattgtcatatgctatcagg

SEQ ID NO: 525884 - DNA, 456 bp, Homo sapiens
tgatagcagcgtggtggctcatgcctgtaatcccagcactttgggagtcgaagtgggtggatcacctgaggtcaggagttctagaccagcctggccaacatggtgaaaccccgtctctgctggaaatacaaaaattagtcgggcatggttgcacatggctgtagtcccagctactcgggaggctgaggcaggagagtcgattgaacccgggaagcagaggttgcagtgagccgggatcatgccactgcactccagcctggatgacagagcgagcctccatctcaaaaaaaaaaaaaaaaaaagtaacaaaattatttcgggacatctatttcccaaaattccgggtcccaacactctgggacgctgaatgcgtgtgggaatgaggatgggggaaggcagggcagggtagcagggaacagagactgtgagaatgtgaggctggcctacagcacatgg

SEQ ID NO: 525885 - DNA, 298 bp, Homo sapiens
tgaaacgtccctggtgccaaaaaaggttggggaccattgaggcagataacatctatttttttattgattgactgattgagacagagttttcctcttgttgcccaagatgcagtgtagtgacacaatctctgctcactgcaacctccacttcctgggttcaagtgattttcctgtcttagcctcccaagtagctgggattacaggcgcacaccaccacgcctggctaatctttgtatttttagtagagatgaggtttcaccatgttagcggggctggtctcgaacttctgacctagggt

SEQ ID NO: 525886 - DNA, 191 bp, Homo sapiens
aaggtgcagatagaatcgagctcggtaccataagagcaatgatctcacgccgaaattttcctacaaccaatcataatttgataggaaatttgctatcagaaaatctagcaaaaggtaaaactccattctcatctgtctgattagggttgccccagatttcatgagcatggtcactaatggccaccgccttt

SEQ ID NO: 525887 - DNA, 1017 bp, Homo sapiens
cacaaatgagttgccctctcttcaaagagaatggttgtgattgtgagaccccccgtctgtttctcccaacaaaagattttgtgacaaacccctcttctccccctcctcctcccccggaccacaccaatgtatcgtcttgtgttgttccacaagaggagctcttttttagaaaaatctttcctccttttcaccaaaatcatagatgattgtccctctttgaacatcacccccccggtgttttccaaagagattttctcgcggtgagataatcctcctcgtcttatcctctccccctgcgccgggggttttttccgccgcccaccaacaatgagtgttcccgcttttcgtcaccaacatgtgccgccacgcagttgtgtgggagctgccgctcttggtgggtgcgcaagaatactaccgcggggggtgtatcatctcgttctgcgttctttttcttcggtcgtgggggtttttagtaaaagacgacgcccccgctctcgggattggtgggaggaagcactctctttctttgtgtcggcccccccccaccgcggtggctcgtcccccctcctcggcggcgcgagagagagatatatagatgtgggatatctctcttcccccccgggcggacgaggggcccagcaccccatttccagctctctttaataaaatgagtggtcacaaccaacgatgtgttttctcccacccccccctctgtctagaagaaatcatcattaaaataagtgtttccccactcctatttttcttctcccctccatgatttttctgtttaaaaaatgataaaatttcattagaagaaccccacctcttttattttgttgaaatcatccttgtaatgattctctttttatgaaccacgacttttttttgataaaaacacctctgcgggacaaacccccgcgcaaatttcagcgcggggggggaaggaccccccccccccaaaattttttttaaattcccccctcccaatttgggccaaaaaaaaagtttttttttgta

SEQ ID NO: 525888 - DNA, 109 bp, Homo sapiens
taaagtgttctaaatgcaataatgaaaatgaattttaattgataaaattaaatttaaaataaaattatttagaagtaaataattacttctaaagtaagtaatctctaca

SEQ ID NO: 525889 - DNA, 488 bp, Homo sapiens
atacgacgtacgtaggaggcaggaggcagggaggagacagcacagcccccaccacagtaactagcacacaatagaggcctgctagggagaagagaacatagaatagggaagctaacagaagtattgaaggacagaagaacaggaaaatagggcaggagaggaccggacaggcccggacgagcaggtctgaacttagcaaggtaacataaaggtaccacggttcctagagggactagaacgcacagagccgagaacgtacccggagatagggtaccacgaagggagtatactcatagcacaaccgcagctcggaatattcagcccacacacataccacctagaaaactctagtagtaatcaaggcccctaataggcctaccatagcatcctactagcccgctaccatgagtacgaaggcataaatctaaacacgatagtacacatacgatgaccggaccatactcctacaaacttaggtcgaagctccc

SEQ ID NO: 525890 - DNA, 100 bp, Homo sapiens
atctggaggatcccctccataaggtgtgcccagtgttatgtatgtgaaactttgattttagtttacgtgggggtgtgtatttggcgccgtcgcctacgca

SEQ ID NO: 525891 - DNA, 692 bp, Homo sapiens
  misc_feature (20)..(20): n is a, c, g, or t
  misc_feature (23)..(23): n is a, c, g, or t
  misc_feature (498)..(498): n is a, c, g, or t
  misc_feature (583)..(583): n is a, c, g, or t
  misc_feature (632)..(632): n is a, c, g, or t
  misc_feature (690)..(692): n is a, c, g, or t
ctctgttatacttagggganctntataatcagacacattgatacctaagatacttataaaagcacaataattcacattgaaatccagattatagatatccaggtatatgctttcctctattagtaaagatcagcaactgtatcagttgaagacatacataccagtgccaatcttgccgtggcaacactagtttaagaatacggtttctggggtaaactgctgggtttgagtctgattttatacatgcattacctgagtaaattacttgatatcttaacatagtatttataaacttgggaatttacctcatgtcttctagtataaaccttctcatctacaaaaatggagtaacgaaacaagttcaccaccccctactctaaatctatgggccagatatattacacaactcaaaattttttgaattttgtgaataccaaatatatatataacatcccaggtgaatatagggcagcaactcataatcatacacactaatgnttctgtagcaaaaaataaaaacaatgttgcagatgtaggatatatgacctttacatagcttcatctcacttagttcaggtttttnagccaaattagttgctataaatataggaaaccattttcaaacctttgantttcagaaatgaatatgatcatggatatatagcctacttgccctcgagacagcacatnnn

SEQ ID NO: 525892 - DNA, 754 bp, Homo sapiens
  misc_feature (645)..(645): n is a, c, g, or t
gggaataaagtgaggcaggaaaatgcttctccttgtaaaatcctctccactcctgacacatacacaccttttgaaacccttgcccaataatgtttctttatagacggacttcattgaaatctttgatgatcttgaatcaagtgtgatatcattaaaacattcttttttaaaatattcccactcagcactcatagactcaaaattactgtaagtctcaattaacagcagaatctcagagaaaagctgtttgcaatccaaatccagcctttggaggaatagagatggtcaattaacaatcgactagaggagattaacctatagctactttaccaacttgttgaatcagccttacttacacacacgcaaccaaccatttgttatagcatgactttgaaatgctgactgaaggtcttgatgcttgaacctttgacttgttaaatctaaattgcactccccagtgatttgcctcttacgttctttcttacaattgtcgaggatgactgtacattatagcgattttgaaaataacttgacaaccattgcaagttattttatgttggacgagatggcgcagatgtgttgtagaatggagatcactgtgtgaagttcctagctatttaagtgatgcatacctctagcttatgnatggctttttgagacctgaggtcattcccttgtgatcagagtgcacaagcacttctctgtgaatggctatgagaagatggcagaccgaccacttttcagatgcagctgg

SEQ ID NO: 525893 - DNA, 338 bp, Homo sapiens
aactcaattgattaggctacttactatgtggggagatacaacagtaaaaagacaaaaatctggccgggtgcagtggctcacacctgtaatcccagcactctgggaggccaaggtgggtggatcatgaggtccggagtttgagaccagcctggccaacatggtgaaacccatctctactaaaaataaaaaattagccgggcttggtggcgtactcctgtaatccagctactcaggaggctcagcaggaggagaatccttgaacccgggagcggaggttgcagtgagtcgagatcatgctactgcactccagctggggtgatagacagagactctgtctc

SEQ ID NO: 525894 - DNA, 4234 bp, Homo sapiens
aagcttactggtgaggcaagtgtgcgtctatttccatggcgccctggctcgcggcagcccctggctgggcgaggggtgtgatgtgggagtggggtgggagggggcagcaggcggggcctgccacgtcacttggagagtgtgtgttgggaaggaagggcagagcggagagccgagccgctgcagctgcggcggcggcagcgaagccttgagccgtggggaggtgggtccccggctcgggcgccggggcagccccgggcctctgcgaggcctgcggcgcggctcctagggaggaggtggcggctgtggcggccggaaccgcgaccttggccggacccagccccgcggtggacgcagggcggaggccgagccccgcaggagtctttgccgagccggaggaggcgcatctggcgcttcggtaccagcggcagccgggggtccggagcggctggaggagcgcagtggagaactgggaagagctagcccggctggagggcggacctctgcgtccgggagccggggtctcaaggcaccgctgggggcgaagcacggcgtcttttcgggcagccagtttcacacgcgcctgtgtgccggttccgggcatcccagtaagctctagcacccgggcgcgggtaacgggaagcgcagaaccaaatccccagcgcccaggtcacctccccagacccagccttgcagggaccagggctttagggctcacggacccaacggccaggtcagaccgcgaaccgggagagcgcggccccaccctaaagagggcgcacgggagctggggagcgggtgccgcgctccagagattgtgtcgtgggcgccgtcctagtggcggggagcgcacctccgagggggcatgagatcggagaaatcccttacgctggcggcgccgggggaggtccgtgggccggagggggagcaacaggatgcgggagacttcccggaggccggcgggggcgggggctgctgtagtagcgagcggctggtgatcaatatctccgggctgcgctttgagacacaattgcgcaccctgtcgctgtttccggacacgctgctcggagaccctggccggcgagtccgcttcttcgaccccctgaggaacgagtacttcttcgaccgcaaccggcccagcttcgacgccatcctctactactaccagtctgggggccgcctgcggaggccggtcaacgtgcccctggacattttcctggaggagatccgcttctaccagctgggggacgaggccctggcggccttccgggaggacgagggctgcctgcccgaaggtggcgaggacgagaagccgctgccctcccagcccttccagcgccaggtgtggctgctctttgagtacccagagagctctgggccggccaggggcatcgccatcgtctccgtgttggtcattctcatctccatagtcatcttttgcctggagaccttaccccagttccgtgtagatggtcgaggtggaaacaatggtggtgtgagtcgagtctccccagtttccagggggagtcaggaggaagaggaggatgaagacgattcctacacatttcatcatggcatcacccctggggaaatggggaccgggggctcctcctcactcagtactcttgggggctccttctttacagaccccttctttctggtggagacgctgtgcattgtctggttcacttttgagctcctggtgcgcttctccgcctgccctagcaagccggccttcttccggaacatcatgaacatcattgacttggtggctatcttcccctacttcatcaccctgggcactgagctggtgcagcagcaggagcagcaaccagccagtggaggaggcggccagaatgggcagcaggccatgtccctggccatcctccgagtcatccgcctggtccgggtgttccgcatcttcaagctctcccgccactccaaggggctgcagatcctgggcaagaccttgcaggcctccatgagggagctggggctgctcatcttcttcctcttcatcggggtcatcctcttctccagtgccgtctacttcgcagaggctgacgatgacgattcgctttttcccagcatcccggatgccttctggtgggcagtggttacaatgaccacggtaggttacggggacatgtaccccatgactgtggggggaaagatcgtgggctcgctgtgtgccatcgctggggtcctcaccattgccctgcctgtgcccgtcatcgtctccaacttcaactacttctaccaccgggagacggagcaggaggagcaaggccagtatacccacgtcacttgtgggcagcctgcgccggacctgagggcaactgacaacggacttggcaagcctgacttccccgaggctaaccgggaacggagacccagctaccttcctacaccacatcgggcctatgcagagaaaagaatgctcacggaggtctgacccatgcaggcagggcctgcaggaggggagcactgagctaacagtctcttaggcttccttctcatttccactactcactctagcttcagttgacttcttgactctctcccctacacccactacctggcatccaggaccaaatacctggactatcaaccttgttgcttaatccctgcagcattcaaggttaatccatctaagtgacatttttgaaattccagcggtgccacccaatcatgcccagcttctgtcatatgaatgagatatacatttatatgacagaagctgggcatgattgggtggcaccgctggaatttcaaaaatgtcaaggaacagcaaatgtcaacaggatggaaaccagccctatctgagtcttcgctccctccttagtgttctttgctttgggtcatgtgcgtttcctagcttcaggccacttggtaactggaagaagctggaggacagaagcagtactcaacttgctgttattccagtgccctgtaacaaccactggtcctcctgcagatgacccttggtagagtctttatttgcatagcctcaaaataggttattcgttctaaacttggatggaattagagaatacaatcaaactttaccacttggaggacacggggttagtccaggaccaaagaggccaatggatttttcaaagtgtgccccagcacacagaggcactggtgttcggtctacatttagttctccccactctgatcccctgactctccagcttccaggaaggttccttctcagagccaaatactctttgtgcaagtgccttcctgagcagaagaactggagaaagggaaccacagagccaggaggaatgtctgagcagagtcaagcaactggcttgaccacagtctgaagcaaggtgccacttaaacagatactgttttctcaaaggggcagaggaatcgtgttgcagatggcagccttttctccttcattttccccacattttctctggccctctaccttgcttcctgggagtttgatttaggattgctgttgaaggcttcctcaggcaaactccagcttaaagccctagacaggtaaaagcacacattggatggcagcatgggtttcttcccattttatgggcatgaaatatgtggtttagaataaggaacaagcattattcctttgccaacagcctcactctaagaggcttttttgctgagtcaagcaaacacttgcctgctctgccccttggaggtgcatttgacctgctctcactggtaaggtgacttggtggcgttcccacttgatttagccattttcttccattgtgagaccactgccatctatccacctgcccacctccccttttgtttctcagtaacattgccatttgttttttgcctttgataaactgtgatgtactgttctgagatcttttgggtgcagttctgaaactgaaaggactgttaacatgtttttaattttatatctatgctttcagactctttgatgataatttttttttttaaaaattatctctcgaagagcaacttacgagaggacagccttatgagggtttgcttgagaggcagtgtggcttctgtgactgccagctctaaatctcgatcttgccataactttacagggtaacttgggtccacagtcactctttgtgcctcagtttacccacccattaaatgggaacattactgtcttcccctccctacctcatggggaatgtctgggaagctggggacattgctatgcaaatgtgtgaatcttagtcatggatttgatttttag

SEQ ID NO: 525895 - DNA, 1058 bp, Homo sapiens
gcttcaaccatgccagccctcagtaggggacacagctgtgttcctccggtccagatttcaggtcgatgtgcagcggttgttgccgcagtcatgcccgcatcttcagccccaggcatgggtgggcggccgagcaatcagtctccctgacgtctggattcttgcagggggccgagttcctatgcgcatggtcgagaagaggacgctcccagagaatcctgacccgtggcatggatgccaagcaggcctaccgatggtgatggtggtgacatcccacatggatgctggtcaatgagtgtcatgctgagacattgagtgaccctggtgctcgtgctggggcctgagacgagcctgcgtttctgggcaactgcggacctgggattgagacagtcccgcctggaggagcgccgtcgtgcatcatcgagattccatgtcatcgagcaacatcacatgagcgacccaattggcaagccggcgggctgttgcgtgtggcatcgctgggcgctgccagaatgtcttttcccaccagctgccgcgcatgcctaaggagtatatcgcccgagctcgtctttgacccgaagcacaagactctggccttgatcaaggatgggcgggtcatcggtggcatctgcttccgcatgtttcccacccagggcttcacggagattgtcttactgtgctgtcacctcgaatgagcaggtcaagggttatgggacccacctgatgaaccagctgaaggagtatcacatcgagcacaaattctctacttcctcgactacgccgacgagtaacgccatcggtacttcaaacagcagggtttctccaaggcacatccaggtgcccaagaaaaccggtacctgggctacatcaacggactacgagggaagcgacgcttgatggagtttgtaagttgaatcgccggatcccgtaaacggagttgcccacattattaagaacgcgcaagggttcttcaaaagctgattgccgcaaaaggccaaaccgaggtctcccgggcccaatcttcaggaggtgagcagacccggaaagctcaggtcaaaaag

SEQ ID NO: 525896 - DNA, 939 bp, Homo sapiens
ataggtctaggtacgaggctgggtggcgcggagtaggcagcgcacaccagcctccagctcggccccgcccgccactccaccaacctcgggggccccgccagggtccgggcaggcccgactccgaccccgccgctgcagtcacctcggcccctcccggggcgccgcacccaccccgcaagcagcggggtccctaccacacacctcctcaggccggaggcccgccgctccgccgcgggaagtcccgggccctgggtccaggcctaagcagggcccagtgtcctgggtggtgtcccaaatggctgggcaaaatgcctgggcgggccgaagccaggtggccggcccgggcactcaagtacgcctggcaggcctaccccgaagccgcctgctatcgagcgcggctggtcgagccccgctgtgggtgccgccagcaccatccgcccttaccacctagcgagcatcaccaggggccccccggcccgggcgggcccggcggccgcagcgaggagtaagatctcggacctcggtaggggtttaagagcccatatttgtctcttcttgagggaggcctggcatcacgcaaaagttttcacgacagacgaatgctcggattgtaagggctcggggaagtctaccttgtctggatatcacggagggatgaatgtcaggcagacgtatttgctacaataatggagaaaccgagggagaacgttgttgatcgaccaaaaggcgaccgggagttcgcgagtttagtcaaaggcttgaggtctaccgagctattgggttggaacatgggcccagaaggccgagactgggttgatacacccattgagaggtacaccagcatccgagttcggcttagcgcataaatgcgtggtgccctttctgtccggaatcttcacccttatgttcccgtgacttgtggagaagccttagccattg

SEQ ID NO: 525897 - DNA, 88 bp, Homo sapiens
tataattatttttagcttaaaattaaacagattttaaaataatgtaactttgttaataggtgcaaaaacacaaatgcagtcaatttgg

SEQ ID NO: 525898 - DNA, 165 bp, Homo sapiens
tgatccacgatggggggggaggaccctggatagaggggaggaattgcgaccatttgtcgttgaggaggtccatacgagacattgcaaatgtgtggacatggagttaaattggatccccgttccacagccctcccgccctgagtgaatttcagaatcgctgtaaga

SEQ ID NO: 525899 - DNA, 423 bp, Homo sapiens
gaaaacgatccaacaatgacaatcgtaatacacccggatgactatttcatccttaggtgacagtcaataattagagtcaccctttctgaggccacatacctttcaatctaactgaggatcaggtgctgtactgtttctgcatcaaattcaagtcctagaggagagtctgaacacaagcatcattaaaccatgtgaaaggaccaacctctaagccaaaaactaggcaaattatatgaatcctcagaacaagaaatgagcccagagacctgtgtccccaaacatcctgtaaatctcatagtaaggcaggacaggataaccagaaaaaaacactgtccaactggtgatctggtttctggtctcaatggtaccaaagggatagtcactacctcaatcaaactgagatccaaaacagcagctgctttc

SEQ ID NO: 525900 - DNA, 294 bp, Homo sapiens
ggatttcactctgtgttacatcatcagtttgacacacaggttcatttgtaacacttagctatttgatatgttattttttggaattatcttttcaaaatttggatttctttatataatcatgtaaaatgtgtataaagttccagattcaaatcagcaaaacatgataaaatctatccagagaaggcaaaccttctgtccagtcgccatcctgttcctgcccttccccttatgagtaatcattacgagacaatcgtcggttagtccttacatgtgtatatcttagtacactcttgc

SEQ ID NO: 525901 - DNA, 1015 bp, Homo sapiens
cccgcaggctgcgccgcgtcaggagccgggactcggacgcgtgcctagagtcctggggagcttctgtccaccgtgtcctgcggaggagtctgtttccagcccggctgccccagtgatgggtgagttcaactgatgaagaaggaatcatacagtgtggcaccgctttgcctcatacgtacctgctgttataccgtatcaattgtgctgcttcttggcgtggcatggacccatggcatgtcatgagcacgtgaggcactcttggactgctggccctcaagagtgtacttaccgtcagcctgctggcctcaggcacctacctggaccacagcctacatccctgggtggtggtcggcgctactgtcgtcactggtggagctggggtcttgggctgctgtgccaccttcaacggagcgtcgtgccctgctgcgcctggctcacgagggcgcacgggccactggtgtggcgcggtagggtagcaagcagtgtgggcccagagggcaacggtgtggtcagcctcgactcgtggctgttggaactcgtggtgtccttgacttgttgcatctactcttggtgggggagtggtcaacggatcgcattcactagctgtcggtgcgcttaggtcctggttgggtccgccaacggttctctcgtctggatccagctggaatggggaagaacaggccatttcttcccgctccgaaaggtctctcaaggagagggcttgaggccggtgacctccagacgtcctcaccttggaagttgctcttggcgagtcctgctgtgctgggggaactctgcctcttgatgtggttgcactatggttcttagggcaccataagtccgtcaggatctaaagggggtggcccctttggggcttggccccacccccaaaatacgttccatcccgtggctcccgtgacccattctttcggtgcttggagaatcagtcggtagggaattcgtcgccttagccctacttacttggagactgacacgcgggagctcctggagaacc

SEQ ID NO: 525902 - DNA, 1113 bp, Homo sapiens
agcggggtgggtgagtcccgtgccggagtgcaggccgggactctggtgggtctaggcgcgtgatctggacccaagcaggctctggctggctggcgtgccaggagagctggccgggcgtcagctcctcgacccccgtgtcgggctagtccagcgaggctggacggtgtgctggcgtgctgcccatggtccagagcccaggcatagagacgacatgagtgagacgcgaacagggcatggcagctaggtagacacgaggggcactcggagaggagcattcggccgacgagccggtaggccccagggaccccatgggtcaaagacaagggaacttgcaacgagataggtagcgagcatgaggccccaacacacttgcgggagcaaacccattccgatggaaccattggcacatgacagcaaccggtacagcagttgccaagggccttaccaccgatggaaaccaaccgcatacgccccctaacagccattgttgcaccctaagttcaacaactggaagccgacgcggacatatcccatcttccaacctggtgtcatccaagggcaaattcccagattagcgtcaaagacacacagagccgagaagatcacgacccacttcctcgcaagtcatacaaagctagccgtcggaattttggagcaccgcaggttccccttgaaccaaagccccattggccgaatacaaggggaaaggcacccaaatgcaggactctagagaacaaacgaccacgttcagttacaaaaataggttcgaacaccgggacgcacatgggccaccctacccagacagattcctatgcacaaaacaaggcgaaaacgagacttaacacaacaccttcccgaagtgacaacagaagaccgcgcaactcagcatgggaaccaaaactgaggccacacaacgttcacatatcagcagtttaacagcgatcagacccaatggatacatagcagcccaaaccaagaagcgtaggatcaaccacacccatgacgacagatggagcaaacagcaagatatagccttaaattagtcgtgccacacccaacaccggtagttgacccagctcaatacctagtcccgttaaccacgtaatcgggtac

SEQ ID NO: 525903 - DNA, 151 bp, Homo sapiens
cactgtttaacttgaccctgatgaaaatgtgagcactgttagcagatgcctatgggagaggaaaagcgtatctggaaatgttcccagctactttggaagaaatgagatccctgcatccccagtgttatttggcttggttaaccaagggata

SEQ ID NO: 525904 - DNA, 875 bp, Homo sapiens
  misc_feature (523)..(523): n is a, c, g, or t
gggtatttcttcagcaggtcccaatctactggtaccaatttactgtattagtccgttttcacgctgctgataaagacatacccgagactgggaagaaaaagtggtttaattggacttaaagttccacatggctggggaggcctcagaatcatggtgggaggcaaaagacacttcttacattgtggcaagaaaaaatgaggaagaagcaaaagcagaaacccctgataaactgatcagatctcatgagacttattcactgtcacgagaatagcacgggaaagactgcccccatgattcaattacctccccctggtctgtcccacaacacgtggaattctgggagatacaattcaagtgagattggtggggggacacaaccaaaccatatcagcatcctttcaagaatattagataatgggagctgagtactcaggaacttgaccgtagtagaatactgctagtttcttaattttaattcaccatcacctgaaagtaaaacaacaggtttgccaggtggatgctnttcagtacccgtgacggggcggtggagtccccaatgtttgctccggtgggtccaatactctcaaggcaaacaatggggccgaatttggtgaagaggtccccgggggacaaaaaagatacatgggccggcgacgcggagagttattaaggcagttcaagccccagattaaaggtcgtcaccacccagagtcgggtctctgggggccaccccaggaagaatggtccccgctgggaaggaccaacggggggaacgccgctagtaaaacagacagcagacataggaggttgccccgacgaacgagggccagccgagacctaccccccagctcggacgagcagcggggccaaaatat

SEQ ID NO: 525905 - DNA, 732 bp, Homo sapiens
ggcgggacgggcgcgttacgggctggccgaggaggaggcggcggcgatggagcatgcctcctgccggacgggccgggccgggccgagccccgaggacgctgcggcgacgcctggatcctgcctccgccaggccggactgccttggtgccccgaggaggctgcatgagccccatggccatggtcccctctcgcagagacgtggaacctgggagccacgcccatcgctgcggcggcctgtggagagatgggccagggaccccgagagacccgagccggggatggctcgaccccgaaacccgagagcacccagggccaagaccacggacacgccacacgacaccatagtgtccacaccgacataccagcgcccacgagaggaacgagatatgagacaacatggacgtcaatgaagaacacaagaaatcaccccaccaaaataatgcacgagatgcaccagcacgaggcagcattacacaacgaaatgaacccacagggaagaggaatgcaccacaaccttccgcacctcgctacgtctccacccacttcacacaatcaaccatagccacccctcacagcacctccccttctaacaccagccttggccaaccatacgggatgtacacttgcgaacacccaacaggacgaaaaaagacaactcaccccaactcatctcgaccattcccctatcaacaattacaacccccaatgaaccctacaaggcataaacaacac

SEQ ID NO: 525906 - DNA, 103 bp, Homo sapiens
ggcgtggtgctgaatgccttgtctcccctccctccccttcaccctgtttccttcttaatccctgacagtgtgaggtgaccctgaggctgcctcaatgtaaaca

SEQ ID NO: 525907 - DNA, 154 bp, Homo sapiens
ggctcaagaatttttctgtttgtcagggaaaaggaaaaggggaaaattaaaccatttccgtttagttttgtaaagtcaggaatttttcaaaaaaattaaaaaatgggctggagctttttttttgtgaaaaaaaactggaagccccagtgattca

SEQ ID NO: 525908 - DNA, 1878 bp, Homo sapiens
ttctaatgcagcctgaactccaaagtccatgggcaggtctgtactgatgtagcttctgtggtaaatcctgcatccttccgttgggatggagggtcctcacgtagaggttggggcctgcaaaggggcacagggaagctgcagggacctctgtgcctaccctccatgctgagtccattctcatagccagggtgatgtgtttacagcctagatatgattcctcactaccctgttccatggttcacccccacccctggggctacgtatggcagctgaacactggaagtcctggccagggcctgtggagtcctgtggggcctggttctctctggctctgctctgctctcttgtcttcattgcacctgcagcctcgctgatctccttgccgttctgcagatgttgaatcccttcagtgtcagggctgtgtgcctgtggttctttctctctgcctgggacatcttgtctccagctgtctgtagggctctttctctcacctccttcaggtctcccactctgtgagccttctctcaccattctgtccaaaatagcagccctagctctacccctttgttgcattctgtccttatccgggatggcattcattgctacctgacaccatcctgcatagctacttgtctgttgatttgttgtctgactcctccaattagaactaaagtgctgtgcagggtgggagtggagtgtacccatcgccagcccctgggcagcacctgctcactgtctgtgctcaaatgcaagtacagagagtctcccacttagcgtggttcaacttaagatggtgtaaaagccagatacattctgtagaaactgtactttcagtacccatactgtcactctgtttttcactttcagtccagtagtcaataaattatatgagctatttaatacttaattataaaataggctttgtgttagatgacttttttcccaaccataggctaatgtaaatgttctgagcacgattaaggtaggctaggctacactacgatgtttggtaggttaggtgtattaaatgcatttttgacttatgacatttttaactcatgatgggtttattgggatgtaacctgattgtaagtcgaggagcacctgtatcactcaccatccatttggttcctatgtccacagggccagagagtgtcaggagtttccatgttttccaaattgatttggcttctgaattgcagttagcatacagtaggataaccgcaagggagctatctgaaaatccagatctgctcagttcttgaatttgggtagtgagagttcaagttgggagagtttgagaatttggggaatgagggaaacttctatttgtcaataagagagggaaggtatagtaagacaaatgtaattgcagagctcctagggccattgagtctgaggggacaggagtgggtgtcactgcagctgcccagggctccctgttgccagtttctgttatctggggtgatgacagcagcatctggattcatcactaaagggaccctctgctttagagtacatcgtttaagaaggaaaggaagtaggtaagacccgtttattccgtctcccattgttaaaatacttctgcacttaaaagcagaatctgtgggccgggtgccatggctcacgcctgtaatcccagcactttgggaggctgaggcaggtggatcacgaggtcaggagatccataccatcctgactaacacggtgaaaccccatctctactaaaaatataaaaaaattagccgggcatggtggcacgcacctgtagtcccaggtactcgggaggctgaggcaggagaatcgcttgaacccaggaggcggaggttgcaatgcaccactgcactccagcctgggtgacagagcatgactccgtct

SEQ ID NO: 525909 - DNA, 949 bp, Homo sapiens
  misc_feature (43)..(43): n is a, c, g, or t
  misc_feature (118)..(118): n is a, c, g, or t
  misc_feature (121)..(121): n is a, c, g, or t
  misc_feature (150)..(150): n is a, c, g, or t
  misc_feature (169)..(170): n is a, c, g, or t
  misc_feature (186)..(186): n is a, c, g, or t
  misc_feature (211)..(211): n is a, c, g, or t
  misc_feature (216)..(216): n is a, c, g, or t
  misc_feature (219)..(219): n is a, c, g, or t
  misc_feature (230)..(230): n is a, c, g, or t
  misc_feature (239)..(239): n is a, c, g, or t
  misc_feature (241)..(241): n is a, c, g, or t
  misc_feature (258)..(259): n is a, c, g, or t
  misc_feature (264)..(265): n is a, c, g, or t
  misc_feature (267)..(268): n is a, c, g, or t
  misc_feature (270)..(270): n is a, c, g, or t
  misc_feature (275)..(275): n is a, c, g, or t
  misc_feature (277)..(277): n is a, c, g, or t
  misc_feature (279)..(280): n is a, c, g, or t
  misc_feature (293)..(293): n is a, c, g, or t
  misc_feature (295)..(295): n is a, c, g, or t
  misc_feature (298)..(298): n is a, c, g, or t
  misc_feature (303)..(303): n is a, c, g, or t
  misc_feature (305)..(305): n is a, c, g, or t
  misc_feature (308)..(308): n is a, c, g, or t
  misc_feature (310)..(310): n is a, c, g, or t
  misc_feature (319)..(319): n is a, c, g, or t
  misc_feature (332)..(336): n is a, c, g, or t
  misc_feature (360)..(360): n is a, c, g, or t
  misc_feature (364)..(365): n is a, c, g, or t
  misc_feature (376)..(376): n is a, c, g, or t
  misc_feature (392)..(392): n is a, c, g, or t
  misc_feature (418)..(420): n is a, c, g, or t
  misc_feature (422)..(422): n is a, c, g, or t
  misc_feature (424)..(424): n is a, c, g, or t
  misc_feature (430)..(430): n is a, c, g, or t
  misc_feature (440)..(440): n is a, c, g, or t
  misc_feature (494)..(494): n is a, c, g, or t
  misc_feature (498)..(498): n is a, c, g, or t
  misc_feature (544)..(544): n is a, c, g, or t
  misc_feature (559)..(559): n is a, c, g, or t
  misc_feature (693)..(693): n is a, c, g, or t
  misc_feature (723)..(723): n is a, c, g, or t
  misc_feature (763)..(763): n is a, c, g, or t
  misc_feature (798)..(798): n is a, c, g, or t
  misc_feature (881)..(881): n is a, c, g, or t
  misc_feature (948)..(948): n is a, c, g, or t
aaatacttccaatccccaacataccctttctggtgtaggggangggagggagctccccaccccaatagcaccaggatagcaccatgagaaagatgaggtcacacccggcctccctganacncacggggggtggtgaggggaacatgcctncagacaccccccaaccttnnccccaccgcagacagntgcagagctgagagcgaacccagtnccctngtnagggcagtttntggggagtncnaccccctacattagttnnacctnntnntnaggcntntnntttttgggagatncngtngggtngnccntnctccttatngttttttttcctnnnnnggaaggggtttaggggggtggatngttnntttagtttttntgtttgggcaggggtngggagggcagcaaatggccggggctnnntntnggagtnggggtggttnaggggttagcagttacaaagggttagggcttagatttttgggggtgttcaaacnaacnccattttagggttagagctatgttggagttaagggttatttccctnccagaggtctaaggnctctttctggaggtttgggtagcagctaggagagagaccctctctccctgctgggcctccccgtccggcctgtcacagctcttcaccgccgacatccaggtcgatggagccgtggctgaccaccagccgtaggngttgggtggggagaagggggcgaaggcganggcctgcttcgggatcaggatggggcctggggtccagcangggctggggtagctggtggggctggggcaggcgangaggtccacacgcacacgtaaggcagccatagcgccggcccagtgccagtctgctgaggggccagcggcgtgggggggctggnccagggcaccagggctctcctcgcaggcggagtgggggcacagctcccatcgtgcaggagacccggna

SEQ ID NO: 525910 - DNA, 298 bp, Homo sapiens
tatggagagatgaaagataaataaataattcacacaataacagcggagggtgcaatatcacactttcaatactggatataaaccaagcagaagattactaagaaaatacaagaatttttatcagcttaaggagctttggggccacaactatggggttttctggatataaaatcgtgttgtctgcaaacagagacagactgacttcctctcttcctattttgatgcctgatatttctttctcctgactgattgctctgggtaggatgtccaatactaagttggtagtgaggttccatcg

SEQ ID NO: 525911 - DNA, 149 bp, Homo sapiens
tcggtcctaaaacaaaaaattagcagtagcacacctgttactccagttactcaggaggctgaggcaggaggaggctaagcccaggaggttgaggctggagtgacctgtgatcatgtcactgcactgtgcctgagagacaaagggaaaca

SEQ ID NO: 525912 - DNA, 220 bp, Homo sapiens
cggtagctatccggtataggcgtttgccccgcctattaatgaaatatagatttttgttatttcactcccttctctcctctcctgctcgcgtctgcttagaggtggccggcgcagaggcagattggcaagattgcatcccttggcagggtgctactacccccatggtgcatccgttgcacttccatctatctccttcccataagcagtgcctcctctgtct

SEQ ID NO: 525913 - DNA, 401 bp, Homo sapiens
aggagctgactccactgggttgaggaaaacaagctaggatccactgattctacataatgggggagtggtataattatttcattacatatacaatgtaataataatagaaataacttcaacatacaataactatttctaattaaaaggtctatcacagccgggcgcggtggctcacgcctgtaatcccagcacttggggaggctgaggcgggcggatcacgaggtcaggagatcgagaccatcccggctaaaagggtgaaaccccgtctctactaacaatacaaataatgagccgggtgtggtggtgcatggctgcaatcccagccactggggaggctgagacaggagaatctctcggacccgggaggcggaggtggccgcgagccgagacgatgccactgc

SEQ ID NO: 525914 - DNA, 104 bp, Homo sapiens
  misc_feature (92)..(92): n is a, c, g, or t
actaagacgtaggacgcgcctcgtcgctcttctccgggagccagtcgcgcagcgccgccgcccaggccatcgccaccctccgcagccatgtncaccaggtccgt

SEQ ID NO: 525915 - DNA, 82 bp, Homo sapiens
aacagtgttctttgttatatggcttgaatgagatagagcccttacctattattcctttggacacggttatagattttggatc

SEQ ID NO: 525916 - DNA, 398 bp, Homo sapiens
actagcttcactgtgtctagctccaaggctttacaaactgtctctacgcttaggtctcacattcacatctccagcctggacctctcaactcacacatgtaattatgtaagacacatcaggtatctcaaacttaacatggctcaaatataaaactattgattccattccctccacaagaaaatattcactctcccactagccttccccatttctacaaatggtaatacattctaccagttattattattactattattttgagatgaagtctcactcttgttgcccacgctggagtgcaatggcgcgatcctggctaactgcaacctctgcctcccggatccaagcatttctcctgcctcagcctcccaagtagccgggaccacaggcgcctgccacca

SEQ ID NO: 525917 - DNA, 246 bp, Homo sapiens
acgtggcatcttgggaatctgacggatcggaggcatttgtgaggaggcgcgatcagtagcgggggaagagtcttagacctggcagtcctcagggtgagggccctgaggaagaactgaggacctcccaccatagagagaagaaaccccggcctgtacttgcgctgccgtgagacttgtgctccaggaaccaggtggtgacgaactgggtgtaggggggggtgtggtggggggggtgggtggggggtg

SEQ ID NO: 525918 - DNA, 624 bp, Homo sapiens
  misc_feature (438)..(438): n is a, c, g, or t
  misc_feature (624)..(624): n is a, c, g, or t
ctggtatcccttcctcttttaataagggcactaatcccaccaagggctccatcctcataatctcgctaaacctaattacttccccaaagcctcacctcctaataccatcacatgggggattagggcttctttaactttttaacttttaagttcagaagtacatgtgcaagtttcttatgtaggtaaacttgtgttgtggggtttgttgtacagattatttcattacacactcttaagcccagtacccattcgttattcttcctgatcctctttctctaccctccaataggccccagtgtctcttgttcccctctatgtgtccatgcgttctcatcatttagctcacacttgtaagtgagaacatgtggtatctagatttctgttccttcattagtttgttaaggataatagcctccagctccatccatgttcctgcanaggacatgatctcattcttttttatggctgcataagactccatggtgtatgtaccatattttattttctaccaatgatgggcatttagggtgatttcaagtatttgctatggcgaagaatgctgcagtgaacatacatgtgaatatatccttatgaatgaacgaattgtccctttgggatatcccn

SEQ ID NO: 525919 - DNA, 463 bp, Homo sapiens
agcaacgctcacgacccgcccgggcgactacgataaagggaaaaacattaagcaaggcatacagaaagcacggaaggaactgattagggggcatgggtaacggggctgtgaaaagggacctgggatagaaaaaagtgacaaacacggcaaaaagaaaaaagcagggtgcgttgatgcggcgcggtggaccagtgcgctgccccatgctgcgaccgaaaacagggctgatggtaacagggagaaaatggcaaagaagctacagacctataccaaatacaatttacaattgggacaagggcatagtacaacagaataggggctgcttgaccgtacggacagctacacaattcgaggggtaagtgtggggctgcctgcacccttgaggaaactggtgttacgaatgtgctgaggaaaacatgtgggtacgggcacaattatggaagagcagaccagcggttcgtac

SEQ ID NO: 525920 - DNA, 432 bp, Homo sapiens
gcactttgaaacttgttcacctctgatgcagggggaagttgttatttgattaagtatcaaggcccactactgtaatttaatgctttgctggttcacagtatgcctcaatctatgcgcaataggaagacaggacgcaccggttggaaccagaccgaccatgcattattcccctcgttcagactgtcataaataaaaaaaacagctctcttgagtgagcgcatctccttatgtctgcagacgcgctgtttgttactgatgaactggcatggcaaacttgtggtgccgcctgcgctctgaggatgtggagccttactgtaatccgcggtgcgtttgtaccttagtgctttaagactaaaccccctggttttgcaggaaatatgaggaataaaaaagggactcattttgagtgtgttgagcccatcttggcagttt

SEQ ID NO: 525921 - DNA, 112 bp, Homo sapiens
aaggtttggattgaggggtaaactcatcgtaaccactggcgcatgttgcatgctactctctgccgaccatgccgccgcccgtccctcatgactacagccagggaatgaggct

SEQ ID NO: 525922 - DNA, 890 bp, Homo sapiens
  misc_feature (835)..(835): n is a, c, g, or t
  misc_feature (876)..(876): n is a, c, g, or t
ggtccttgcccgccctggaaaacgccctctgcggtgaaggagagaccacactgccatgcctccctctgggccccgaggaaccctccttctgttgccgctgctgctgctgctcctgcttcgcgccgtgctggctgtccccctggagcgaggggcgcccaacaaggaggagacccctgcgactgagagtcccgacacaggcctgtactaccaccggtacctccaggaggtcatcgatgtactggagacggatgggcatttccgagagaagctgcaggctgccaatgcggaggacatcaagagcgggaagctgagccgagagctggactttgtcagccaccacggtccgcaccaagctggatgagctcaagcgacaggaggtgtcacggctgcggatgctgctcaaggccaagatggacgccgagcaggatcccaatgtacaggtggatcatctgaatctcctgaaacagtttgaacacctggaccctcagaaccagcatacattcgaggcccgcgacctggagctgctgatccagacggccacccgggaccttgcccagtacgacgcagcccatcatgaagagttcaagcgctacgagatgcttaaggaacacgagagacggcgttatctggagtcactgggagaggagcagagaaaggaggcggagaggaagctggaagagcaacagcgccggcaccgcgagcaccctaaagtcaacgtgcctggcagccaagcccagttgaaggaggtgtggggaggagctggatggattggaccccaacaggtttaaccccaagaccttcttcatactgcatgatatcaacagtgatggtgtcntggatgagcaggagctggaggcactcttcaccaaggagctngagaaagtgtacga

SEQ ID NO: 525923 - DNA, 930 bp, Homo sapiens
ggtccttgcccgccctggaaaacgccctctgcggtgaaggagagaccacactgccatgcctccctctgggccccgaggaaccctccttctgttgccgctgctgctgctgctcctgcttcgcatccactcagaggaaggagtttggggacaccggggagggctgggagacagtggacgatgcacgcctgtccctacatcctgatgtgaagacgctgaggctgctttgaacgagcgatgcttggcctgccctgtggcagcgcacgacgctcgaactagcccaatgtgccccatgctgccatcatgaccatgtgatgaccatgatgtgctcctcagtgcgctgtgatccacatgtgggcctgccctgccatgtgctccaagacacgacgaagatgctagcatgcaggctcgtgctagcacactggatgcagctgcgaatgcatgcagccagcagccagcaagcaaggccacaaggccccgagcttgcccacccatgaggggcagctcaagttccacaccagacacagacgatgtaccctgtcccagctccagccggtgaccagaaggaggtggacacttcagaaaagaaacttctcgagcggctccctgaggttcgcggtgccccagcatctgtgatcctccgggaacccagccctcaggacttcctgatgctccacggcgacctgatgggcgctggactgacgtggcacagtcagcttccctgggggccggtgtcctgttgggctcctggggcgagggcacggcatggcatctcacgcattggctgcacccagatcacctgactcaattacacagcatcaagtctgtggtctaccttctgtctccgagggcttgctccacgtgtcagtgagggcccaggatgagtaactataaagcgcacttccattcgctgccaaggttgcctacacgtcc

SEQ ID NO: 525924 - DNA, 1071 bp, Homo sapiens
  misc_feature (711)..(711): n is a, c, g, or t
ggggttcccagtctctccctgatcagactcgcctatcggtagtcgtctgtcctccttactgcacggcagggcgaaccagacgacgaatgtccgaatatgcagacacaagactagacgggggctctaagcttctagggacttcctgacgtgtactccaccctaggggctactaatcccagccagatgagaggctgaatatctgggaaggtacgtagacgcgacacggcacgcttctcattactaaatcagccgtgatggtagtgcggcacagtggccttagtgggagtagcgcactgtcgagtagccacatatgtcccataggacacgtccaggaggtgccgtgtgtcttactgtcacgccatccaatgctctattccatgttccaaaggagcatcactatacagaaagataaatggtacagaccgtacatatccttggttggagcatagcattgggacttgcatcatcgtgatgcatgcaccgatgcatggattgtagcgcatgtgacacaacgtctacgtggctctctggtcttgtacctccggaaacagtcatctggtgttgcactcgtttagcactcgaccaccctgtaggtgcaatgtattccccatccaaggggctaggttcttgaggcttggctttcaaattcctgatgggatgcgtaaaatacattctgggtccaccttgaggattacgactaggtttccttgntccagggcaatcgaaggataaaacggctcgaatgattggttgctcctcacaaggttagcaacgccatctgaattggtccgcccgtgaaactttgtcggttggtaatggagtgaggtacgtaagttatgaccgtttactgagacggtgcttcttacctagtgttggtgttgatttaaagtgttacgaaggtaagggatcaggggaatggggaagtggggggagaggtactggagattcattggtgacccataatccgtgggcagaagcgggtttggaggggcagtgttgggagactagaggcctagattggggaccggtttcgggttgaggcagggaggtcaaaatggttttttttaaaag

SEQ ID NO: 525925 - DNA, 864 bp, Homo sapiens
ccggttgctgcgtgtcgtgcccgagtgtttgtgttcggggccgccccgcctgtttgttggcgagcactggggtggcgccccacgtggtgtcgtgggttgccgcctcgttttcgcttgtgcttctgcgtcggggaaacgtgtgttgagcgaccgtgttctcgcgccgagcccatttgtggtctggttgggagtcgccctcgcccgccccgggttcagtccgccgtaatgttggcgtcgggtgagcggctcctccttgtctacgggagcccacgtcgtgtatgtgcgcgagggatagattatcggtgggtacacgacacggtactcttgcccccggcgagcccccgctaattggtgtccgcgccttcacgttagggatagcgtagccgcgcgctctaagaggaggcgcgttttacgttatatgcaggtagggggcaggaatcttgcgccgattgtgggtgcaccaccaggatcgcgtgcggtgacacacctctgctttgctgtagacaccgcctgtggtggtaggcccacacacatggatttgtgttgtctctgctttggggccaggcatatgtgtgcagcgccttgctgctctctttattgtcagggcatgcgtcttggtggccaaccacacaaccatataaagcacacctcttattagtacgcacaccacactccacagtagtgagtaattctactttacgccattcatatgagtttctgcgccgccatcattggtccccacacattttcataatagaatgcttttgttccgtgcacttatagaatgacacataaattgcatttctcttgtccaccgcggtttttctcatcaacgatattgaataacagccccgcccacatgac

SEQ ID NO: 525926 - DNA, 305 bp, Homo sapiens
  misc_feature (249)..(249): n is a, c, g, or t
caggtcggacatggcatggtgtggatggttgcccaacaatgtgaatggattggtgctctgaacttcacacttaaaaatggtaaatttttgcctgatgcagtggctcacacttgtaatcctagcactttgggaggctaaagtgcatggatcacctgaggtcaggagtttgagaccagcctggccaacatggcaaaatcccatctgtaccaaaaatgcaaaaattagccaggcgttggggcacatgccttntactcccagctacttgggaggctgaggcaggagagtcacttgaacccgggaggcgc

SEQ ID NO: 525927 - DNA, 775 bp, Homo sapiens
  misc_feature (7)..(7): n is a, c, g, or t
  misc_feature (65)..(65): n is a, c, g, or t
  misc_feature (68)..(68): n is a, c, g, or t
  misc_feature (103)..(103): n is a, c, g, or t
  misc_feature (134)..(134): n is a, c, g, or t
  misc_feature (151)..(151): n is a, c, g, or t
  misc_feature (154)..(154): n is a, c, g, or t
  misc_feature (173)..(173): n is a, c, g, or t
  misc_feature (204)..(204): n is a, c, g, or t
  misc_feature (216)..(216): n is a, c, g, or t
  misc_feature (219)..(219): n is a, c, g, or t
  misc_feature (225)..(225): n is a, c, g, or t
  misc_feature (228)..(228): n is a, c, g, or t
  misc_feature (246)..(247): n is a, c, g, or t
  misc_feature (260)..(260): n is a, c, g, or t
  misc_feature (264)..(264): n is a, c, g, or t
  misc_feature (266)..(266): n is a, c, g, or t
  misc_feature (268)..(268): n is a, c, g, or t
  misc_feature (274)..(274): n is a, c, g, or t
  misc_feature (276)..(276): n is a, c, g, or t
  misc_feature (281)..(281): n is a, c, g, or t
  misc_feature (283)..(283): n is a, c, g, or t
  misc_feature (292)..(292): n is a, c, g, or t
  misc_feature (300)..(301): n is a, c, g, or t
  misc_feature (321)..(321): n is a, c, g, or t
  misc_feature (327)..(327): n is a, c, g, or t
  misc_feature (329)..(329): n is a, c, g, or t
  misc_feature (332)..(333): n is a, c, g, or t
  misc_feature (346)..(346): n is a, c, g, or t
  misc_feature (355)..(355): n is a, c, g, or t
  misc_feature (392)..(392): n is a, c, g, or t
  misc_feature (406)..(406): n is a, c, g, or t
  misc_feature (414)..(414): n is a, c, g, or t
  misc_feature (423)..(423): n is a, c, g, or t
  misc_feature (433)..(433): n is a, c, g, or t
  misc_feature (460)..(464): n is a, c, g, or t
  misc_feature (468)..(468): n is a, c, g, or t
  misc_feature (471)..(473): n is a, c, g, or t
  misc_feature (475)..(475): n is a, c, g, or t
  misc_feature (492)..(492): n is a, c, g, or t
  misc_feature (495)..(495): n is a, c, g, or t
  misc_feature (499)..(499): n is a, c, g, or t
  misc_feature (501)..(501): n is a, c, g, or t
  misc_feature (506)..(506): n is a, c, g, or t
  misc_feature (513)..(513): n is a, c, g, or t
  misc_feature (522)..(522): n is a, c, g, or t
  misc_feature (524)..(524): n is a, c, g, or t
  misc_feature (534)..(534): n is a, c, g, or t
  misc_feature (546)..(546): n is a, c, g, or t
  misc_feature (555)..(555): n is a, c, g, or t
  misc_feature (566)..(566): n is a, c, g, or t
  misc_feature (577)..(577): n is a, c, g, or t
  misc_feature (583)..(583): n is a, c, g, or t
  misc_feature (648)..(648): n is a, c, g, or t
  misc_feature (660)..(661): n is a, c, g, or t
  misc_feature (770)..(770): n is a, c, g, or t
cccaccnccccccccccccccccccacccaccccccccccccccccccccccgccccgccccccngcncctcccgtccgtccctccccccccgaccccgaccngaacccccccccccccgtcttcccagagggnccctcccatgcctgccngcngccccgggccgcccctgcntgcctccgggccccccgccggcgtcctcccngggcgcccgccnggnccgccngtngcccggccgtcgggcctnncccccccccccgncccngncntccccngnctgcntncccctcccngccccggnntccgccccttgtggcaaccngccccncnccnnctagaccgtcgtnccgcccccngccgccgccctcccccgtccacccctcctcccgctgnctacaatccttccncttctagnaaacttagnagtacaaganatagctctactacgggtgactgatttnnnnntttnccnnncnccctttcccctaccccngcncgtngncctcngagaganccgggtatncntttccatctnggttcagaggcnatatgaggnggttggggggntggcaggggcntcctcngggttggggggcaggccaagggatgagatggcaaaggacagctttggaatcagatagacgatccngcgtgccttccnncccttgcctgaggtgccagtgaattcgaagagggccgggactcaccattgttttcttttcctaaaccttttgtataggcctgtttgatgtgtcttatgaaacgaaacanatctg

SEQ ID NO: 525928 - DNA, 2080 bp, Homo sapiens
  misc_feature (835)..(835): n is a, c, g, or t
  misc_feature (1215)..(1215): n is a, c, g, or t
tctcccctccccccctttaccatttcccctgggaggcgcttaccccgggcaggggcagagcgggtctacacccgccgcgactctccacgcggccccacgtacgtccagcgggcagaaacggagagacccaacacacacagcggggcctccgcaagcgagcgcgggcccaccagcgccagcagaagcacagcacagcggaactcagtccgcatgccgcgcggaacacataaagggaggagcgcggtaggacgcgagcatcctcgcgccctacgaaagggacaaaggcggccagaggccgccgtagaacggcccggccgaataccgagacgagcacaccacttaatcatcacaatccaaggagacgggaggcccgatgtgatcgcccccagcaggcgcaacgcgagcgcatcacgcagcacaccggaccgaaacaccagagagaggcgcaaacgagagggaccccccacgagactgcaacacaggagagaatggcacaaccgggagtgcagagcccccaaacagcaccctcgaccgcgagaaggacaagagcagtatgaagcgacaacaggcgccagccgacggaacagaggaaccacgacgaacacgagaaaaaccaaggaacagacacaacacgaccacgatcaacgaccgcagacacacgggcccctgtggaaaaacccggcccgaaacgcgggcgacccccgtgcgagcgacagcagcgagctaccacagcacgggaacacacacagagtgcagcacagcagcaccagtcgccgccaacgcgcgcgcccacgacccacacgcaccctgacgagtgcaacgagcagctgcacanatccagcggccggacgatacacacgaagatagcatcttcagcctaaccccatgcagcacgctgcgcacccaccagcacgcgaaagctataggtcatagctccgacgagagcacatcgtcggagtggacagcaactaccccatctgatccatcccgtcgagatccacatcgcccacccactagcacctgacaaagaatgtcagctagcaccacacccattggctctgccatgtgtttgctcgtctcttgtttgccacacgcagaagcacggaactacagcacacatcgcaccaccagccacacacgccacccatgcacgtcgctcccaaacaacgcctaactgaccgacacacaccagacaaccagcacgcgcgagacaancacacaaccaacaaccacggcccaaccaactgcagccagcagcatcagactctaacacgaggtaccagagctgatacacgcgccagagcagctgacgcacagaagcggccgcagcatgcgcagcgtacacggcacgaaaagccaccaggagcgctggcgcgtgcactcgggactagcgagcgaaagcaggcagcgaggacccggcgcaagcggcacccgaccgtgggccacaacaacgtgcccagcgagacaggcaagccaggaaccgacgcggcaagcgcgcaggagagcaaagccaggacaacaggcagcagaagaagagacatgggcacaagactagcagcgagcgtcgggagccggcacagcgatagtgacgcacgcagaagcgcacagagaaggggcaatgaggcagagaagcacagaccgaagcagcgacacgcacgcagcaccgcgcgaggacgaagaagccggaggacatgccacgacacgacagacacagcgacacgacacgaagcaagagagaggacggaagaaacatcaccggcgagacgacggggcgcggcggcgacgcgtgggagagacgaggagtagctatggggcgggacgacaggacgagcaaggctaagagacagggagtgatagacagagacgacgatcacagacgagaaagcggagagcgagccaagcacgagagcgaatagcgcaggaaggcgacggagagaacgaaaggccgagaagcgagggcgcgctcaggagcgcgaaccgcaggcgcagcaggccgagttagtcagagcgggagacgacaggacatacaggcgcagagtgaagacctcacccagccgatcatcgagccggcaccgatgcc

SEQ ID NO: 525929 - DNA, 939 bp, Homo sapiens
  misc_feature (225)..(225): n is a, c, g, or t
  misc_feature (235)..(235): n is a, c, g, or t
  misc_feature (241)..(241): n is a, c, g, or t
  misc_feature (262)..(262): n is a, c, g, or t
  misc_feature (286)..(286): n is a, c, g, or t
  misc_feature (290)..(290): n is a, c, g, or t
  misc_feature (382)..(382): n is a, c, g, or t
tatttatctctgctccttcttgcctggaggagggcagtgccagccctggggttctgggattccagccctcctggagccttttgttccccatgtggtctcagtgacccgtccccctgacagtgggctcggggagctgcatcacccagccttccccttctccgactgcagggtctgatgtcatcgttgacagcctttgcttcgtgggggcctggcagggcccctgcnctccccgganacgccncgagcgcactgcgaaacgccncgtgcccgcgcgcactcctcttcntccncaggcccatccgcctccggcccctgtgcctcttgtcggcccaggccagctccgcaggtccgtcacctgcttgggcctggcccagctccctgncctgagtcctgagccagtgcctggtgtttcctgggctcggtactgggcccccaggccatccaggctttgccacggccagttggtcctccctggggaactgggtgcgggtggagtactgggaggcaggaggtggcccggggaggccttgtggctcctcccctcgctcctcgccctgggcctcagcttcctcatcaatagaaaggatgtgttcggggtgggggcgtcaggtgagaacgtttgctgggaaggagaggactcggggcatggcctctggggaccacccttcctggaactcagaagagcgaaggtcggggccctcgggaagccttggacagaagccctccaacccgctagaccagcgtacggcgtgtgtgggagagaaggaggccccggttgacctcagggagacccgggtgtccgatcttagcaaataactacccagggcgtgcgagaggtggggggaggatgagatcggcagtctggcgcaccgggcgccactcggggcagagagtgtgcagacgaggacgggcggcacgaacgggcttcccagacaaggg

SEQ ID NO: 525930 - DNA, 1534 bp, Homo sapiens
  misc_feature (1519)..(1519): n is a, c, g, or t
ggcatcttttaggaggtacgtggcacaacagcaagcttcagcaaaagcaagttgcgctctatgaccaatgagagatcatttgacaggcagcgcaaaccacaattcattactagcacaaacctgcatgtcctatccatatgacattcacgttcctggctattcgcagcatgctattcactaacgttcacactctgtctcattcccacagtatcacactaggctcgacagactacagacgagttgtacctgtacactgtctcagacaacagaaacactatagggcattcagcaggacgtatgcactctagctccatcgccagcctgcctgcacggactgtatggccacaaaggcactgcacacctgactgaaccaataccttgcaccacaatgttcaccaaggctacctacaacacgtccttcatacgctgacaacaccaacccttggaccacccacaaagcataacgacgaaatagaggaaaaacccctaggcccaacgaactcacagaagccctacgcatgaacaaacccaagacggcaggcaagcaaagaactgcctcactaggcgatccacaatgagcaaacacgcgggccccatcacgcacagcacaaagaccgcttactaattcaattcgttccaggcacatgatcccctttactctgggcaaacatcgaaagcgaacgttaacagaacgacacggttcagcaagccaacaagccaaaaactgtcggaaggtaccttcacgcaggaacacacatcgttcgcggcaaccgtaagctatagacctgcgtactaagttgagagaactaaccgctatcgttggcacattcactggaagcaccacatagcacgctatccagatgaagcgttgctcagtacacattccacgctggcatgccacattagacgcgataacggcgagacacatttaccacaagcgcctagctccagagaaaaatttggccgctaacaaatacatcgcagcgtcacaccagattcacataagcatacagatagacctacaacgcacactgacacgacctgtagaccgcgccgtaaacacaatgagctactgtaatactcagagcatatattcgggcccaaagaaacacatctgaacgtacataaccacatctaacgcggacaactcagaccagcgcctgcagccgagaacccctaaataccgacgatgacaacggaacagctggagggatcatgacaacacgagcatgaagcagcctcgactctgactacacaacgtgacacaacactgatccgacccagccacgacgatgaaactggatgcatagcacaagcagactcagcacaaatgacaacggtagcgacgacaacgaacacgtagatatatcatcacaccaacacgacagctgccagagtagacgacaaacagggacgcgtccaacgacacgaccgccaatacttaacgacgcagccagatcaagagacggagcagagacacgactcactaacatgacgcgagaatcggatgattatagantataatctcaagctc

SEQ ID NO: 525931 - DNA, 1013 bp, Homo sapiens
catcggtctgagtaagtgcgcaatagccgatgctgcgatggtgggtgagtgcaaggggcaaagaagctagatctgtaattattaataaggtcatgtatggagaggacagggtgtgtcttgctgaacatagcggataaaggggcggatggacgaagaggagtccatgtgaagtactctcaatggggaggtggataataggtatacatagtagctagcggactgcatagtgagcatgccgtttgagcatagattcattgactggttgttggtaatgcatccagcataaaccggtaggtgtgtgatagcacataggttggatagatgcccttcatcaagtgcaccacatggagaactagtgagaactcgcagaagagcagataagcttgtgattagggaattgaatataactagtcctggaatagaatggtagaaaatgtctattgtgaggggtcgctaccgggtttatgaagttggtaggagaaagtgtgagagtcgaagtactaggctgggatacgaattgatagatggagtgcagcctcaataagagactaaagacggaaagggctcgtaagggcgactatcacaggggatttcgctagccaatgggggagagaaggaatgggctgactacaatgatttggaatgaaatgcttgatagggataccgcataggacagatgtatcggcgagggaagatcgctccctgatattggctcattgtcctaatcatgctaaggcgaatcgcctcgtcagacacagaaggtgggaagggcaagacgacgaggggataccggggcagcatgcccatagtcgccatgaatctatcgtcgagcggggctgctcgcagcactttgacgcgctcgggccataaagaaaaagaggcaacattcgggaagacacggagccatacaaacggccagcaccagaaagccacaggagaacgcaagaggggcggaaagcgacaggaaaggaacaagaggcaacctaaaacaacgacgacgcacgcaagctacc

SEQ ID NO: 525932 - DNA, 963 bp, Homo sapiens
cacctattgtgattgcccggtcagcctgcataatcaatatactgatcctaaccatggcttacgcgtaataatcatccacataattgtaatttattagctccggcatagaacacacaagaagccatgcggatacgttatgctttggtctgaggctactagtagtactcaaatagagagtatcctatagcggtttcatacgttgtgaatgcctatcaaccattgagtattatataccgcgtatggtagaatacgcactgctaggaaccaaccatcgcacgactatgattatcgaccatccgacgtacccacttaactcgatacgttactccctcaaccggtcgatcggaatgggatatcctactgagctcgtccatcctcctatggaatacactgaattcgacatggattcctgatcggagtcggctctttggagaaccacataatgggatccaactccttgtgtgcttttctctatcactgttagtgctggagtcgttggatctagtggaactaaggtaatatacgtctaacaaaatacattgcacataggaacgaatgcagatacttaatcaacagaagcgatcggtttacctgacagatttgttgagacgcccacgtctcacatcgttatgctccatattcagagtaagtgagcgagtatctaagtctatgcactatggaaggccttctattctacgtgctttgcacccctgatttctgcaaaggctattactctgagagacaaattctaatccaaagattcaatcttcactatttataattcatggggcgtagaatcttaacttttactatgcctacataacatttgtctacggcgtataccggagtgtccccgacgttctctggtctttcctgatgtataaacccttttgattaaatctatcatcttgggggcgtggaggttctccaaacaaggactatttaacctggtttcccggcttg

SEQ ID NO: 525933 - DNA, 1083 bp, Homo sapiens
  misc_feature (958)..(958): n is a, c, g, or t
gtggcacccgtcgatcctggtgggtattggcgcctctgaccccactgttcgcggctccctttgggtccgtcctggtgtggtcaatccacctttctgggggtccctcctgcccgctcccccctgtctttcccttgttcccgtacactttcccagggccttgtggggggctagctggtgcttccgtgttggcatttcccactgttatttcgccttcgcatacccgcgacatcgaggtttgtcttggccgttttcacgtatgccgtgcaacgtgtcaggtcctgatctcccgtcgtgaccacctagttcatgggacacaggcacccagtgactccagtgactcccctgtcgtccctgtgtgctgccattaagctcattctggctcgcagccattgaagtgtcaccaggatctactgactgtgaagtcagcctgttcttcttttccaatgtcgcttaccacggcttctgcctccgtgctcactgaaaccatgcgagtcttgctgcgtgcaggcaggccctgtggcctgctgggctgagggaagtcagagctccacagggcgactcatcgaagtcagccatctgggatacctcctactcccgtcccgccctgtccgtcccccccccaccagtcctgcccccgcatggagcccccgtgattagtagccctgtatgatcacgtagacccacccgaacacactccatgcacactggccccggcccacggcacagcaatcccctgcgcgtggatttcacctcaccactttgtaccagatgattgagtgaccagctctgtaggccctgtgtcgtcagaggctctgtgattaactcgatggcggcagacacagcttagtccaccagcattgggccacggcttacccctgtcctcccatccggttcggctgcttgcaaggctgttcaggacgtgcacttccccaagtcggcactgagtggcccagcaccncctagccctgccaccccactgccctcctgggccttctgctggatgggcacctggggggttctggtttttacttttttaatgtaagtctcagtctttgtaattaattaccttgcattgtgagacag

SEQ ID NO: 525934 - DNA, 480 bp, Homo sapiens
actataaattcagttacacttattaggaaggtgaagacttgtagtatgatatggttatttgagtgtaagatgtagggggaataccattataggtatccagcagttcagaggttcagatagtaataatgtaaatggtatgtcatacgctactatgatgtaataggatatatggtcttgtgggttatgaatactgggcagcacaggggaggggctggcagtcgtattcatggtggtcatagctgccagcaggcattgtagcctcaatcgagtgagacagactagaagttcctagtgatggcttatgatagcaaatggcctcatgtcaaatatctagatgtaatttggtgtaagaaatacagactggatgtaccaccaactactacctgtaatgacaggcctgtccaacacatctcccttttccatgactgtggtagccagcatcggaaagaacgctgatttaaagcggtgtgcataggatca

SEQ ID NO: 525935 - DNA, 288 bp, Homo sapiens
  misc_feature (163)..(163): n is a, c, g, or t
cccacttgtccgagtgaggccgcttggccctggcgcagaggctggataactgtggcgcagacacactgccacagtggccagctcccctgcctccaccgtcgctgcttgcaaggctgttcaggacgtgcacttccccaagtcggcactgagtggcccagcaccncctagccctgccaccccactgccctcctgggccttctgctggatgggcacctggggggttctggtttttacttttttaatgtaagtctcagtctttgtaattaattaccttgcattgtgagacag

SEQ ID NO: 525936 - DNA, 242 bp, Homo sapiens
cactgatttcgttgaaggtgtggttcaggaggatggtctcctgggtcccgtggggtgcttgatgatgcacttcaggggcttgccaggtgtgaagtccttcaggccctgaatggtcaggttgtccacagggtgaatcttgttgtagtcagacgggtcagcgaaggtcagaggcagcaggccctgtctcttcaggttggtctcgtggatcctggacttaagctcgttggtgatgatggcccgga

SEQ ID NO: 525937 - DNA, 105 bp, Homo sapiens
ctaacataggggccctctgtgctcaacactgaattctaaactatcctcaatttcactctctcttgcctgcagccctggggggaaacgtcgggctgcaggcaagag

SEQ ID NO: 525938 - DNA, 193 bp, Homo sapiens
tgtcttacgattcatttgctaaactcaattcctttgaagcaccagaacatgttgcaacgatattgctattttaagtttacgtcgaatgaattaatctatattatcaataacttattacaatatcctatcttctaagactgttagatactttagtgagtatttgccctatgggatacgtaatacatcaccgcgg

SEQ ID NO: 525939 - DNA, 383 bp, Homo sapiens
gcggccgcgtttactccatgaagatagaaataatctctatcttgctgcctgagttttctaagtatgtagcacatggaagcactccataaatatttttaatgagtgacaaaataaatgaatggtggaaggataataaccatacctttatttcaagaaacactatataataataaaaaataatgacaagtatgatcatgttgaaaatgctcagataacatttaggggaaaagatcaaacagtgatgcaaaagtatacccagaaaagatctccaagtaaaaatagatctttaaaaagagaaaatatataaaatattttctttggtaaaatatgagctaaatcatttgctcacattattttctacattttccaaatttctaaaatga

SEQ ID NO: 525940 - DNA, 190 bp, Homo sapiens
tcaaaactgccctttgaggtaggtcagtattattatccccattttaacagaaggaaaactgaggcaccttatagttaagtgacttgcccagggtcacacagcaagtcagtggcacagtggttggagaggcctggcttaaccaccagcataacatggccacctcgcttttaaccttcatgatgacctattt

SEQ ID NO: 525941 - DNA, 864 bp, Homo sapiens
ggacgcgtgtgaaagcacgttgatctggattccaggcacattggcttgggtaacaagtgaacttccagtgacggggataatcacatcataaaaattgaattaaaaggcccagaaaaatacactgtagagttcgacgaagtcaaagatcctgtggctggtaaacgatggtgaatagctcaacaaatagctggccacgcatttcagccacgctgtggcccatcgcagcaggcaactgtgaagctgagcactctgcgagtattcagactgattaccgtctcaagctccattcggaaagcttcatctctgcgagatgctgaacctagcagccaggaacaagaggacaaaagcactattgtcatcacctgaaggagaagaacaaagtatacaatgcaacatcatgatgctgaccctgaaaggaacattatggtctgcgaagtcactattcagcaggagtaagctgagctaacttacaaaagacaggtgtgtgctcatattgtccaagctatacgcatggaagctaccagagtccgtgaagaatgggaacatgctatatcaagcacagaacacatgccaattctcagccaaatgatgaagatgcctcctctgatgcctactgcttatgagctgctctctatggttgttagcactgagtggctctaacgttggccggcaatatctggctcaacagctaaccctgcttcaggatctcttctcgctgcttcacacagcctctcctagagtccagagacaggtacctctttactaagcaagagtttgcctgaagtaaccccctaaatcgtctgggcaaggcatccaacagaagctgacacacccttcaccccccagagatatcaaggcacaccc

SEQ ID NO: 525942 - DNA, 486 bp, Homo sapiens
  misc_feature (187)..(187): n is a, c, g, or t
  misc_feature (207)..(207): n is a, c, g, or t
  misc_feature (241)..(241): n is a, c, g, or t
  misc_feature (298)..(298): n is a, c, g, or t
  misc_feature (458)..(458): n is a, c, g, or t
  misc_feature (477)..(477): n is a, c, g, or t
cttgtataatttcatggacactcacgcatcaactctaagcgaagacttggagcgggcatcagcaccccaggggtacctctgcaacctcggtaaatatagactatcctcaattcgcaggagcatttgtacgtggggtgtacaggcaggaacaggaaagacgctgtggccacccaggagtaggggtggnagccaacacccccggatccncagttccaaggtgcagggagggggcagaggcagntccctccgctctctgccccttgaccttggccttggtgagctctgtccctagactgtncacggtgtctgttccctcatctgaaaagcgtgaggcccacagccgttcactgcacacagctgccgtcactgcacacagctgcctccactgttcgggaagcctccctcctgcccacctgcccaggaaaagctgcgctaggtggccctgggcaagcgccctngctgggccaccttgccttncacctgggg

SEQ ID NO: 525943 - DNA, 444 bp, Homo sapiens
ccgggaacgtacccagaagtagcgggcccaatgtgcaactgacacttatttggcgtcaatcatcacagggttggactcgacaaatcgcgagatgtccctcatgtcactaacgcccatggacaccacattctcaaagagccaaaagcaggggcgatcatctccctcctaggaccgcgcatcatgcaggaggcggtagaactcaaagaagagccggacagtgccctcgtagaggcccttgcgagcagggttgacgaaggagaggtcattgcagggactgcccccaatcaccagatcgaatgggccccactcctggatatgcttctgtgtaacgctgcggacgtacccgaagtacatgaactacccctggtgccgcaccatgcccaacgagatggagtcctcacacacctccgaggcaatgtagcggtccacctgaatgcccagtcc

SEQ ID NO: 525944 - DNA, 248 bp, Homo sapiens
ccatcatcgatgtcgctcgccggtcggtggaaattccgcggctgcgattcatcgtgcgcgatgccaatggcgcggacatctatgcgtggaatgccgtgctggagcagcccgtgctcaatcccggcgagcgggcatggttcaagatacggctggcatcgccgccggccgaaggccgcgaaattgccgtgaggttcttccgcaagcagaatattgcgaccggaggaacctgaatgtctcgcgttttgatc

SEQ ID NO: 525945 - DNA, 136 bp, Homo sapiens
agcgccatctcattatctgtcatacctccatcgtgaacgagggatggttctggtgtccctggtcctcgtgggaatagaagatccatttgtctttgtgtacgagcaggcacgttcaccacctcactgtggaggaggg

SEQ ID NO: 525946 - DNA, 241 bp, Homo sapiens
aggctacagattaacgatatttggaggtcagcacggtgctcacgtgtcgacggaacttgtacagtggaggcatgcaccgaagtggtaaatacacgtacgaccaggatccatcttaacgtatatttggaggtcagcatggtgctcacgtgtcgacggagactatgtccaagggaggcatagcaccgcagtggtgaataccacgtcgagctggaggcattgcatgcatgatcgggtactagaa

SEQ ID NO: 525947 - DNA, 900 bp, Homo sapiens
  misc_feature (11)..(11): n is a, c, g, or t
  misc_feature (79)..(79): n is a, c, g, or t
  misc_feature (113)..(113): n is a, c, g, or t
  misc_feature (144)..(145): n is a, c, g, or t
  misc_feature (194)..(194): n is a, c, g, or t
  misc_feature (196)..(197): n is a, c, g, or t
  misc_feature (205)..(206): n is a, c, g, or t
  misc_feature (216)..(217): n is a, c, g, or t
  misc_feature (234)..(234): n is a, c, g, or t
  misc_feature (266)..(266): n is a, c, g, or t
  misc_feature (286)..(286): n is a, c, g, or t
  misc_feature (292)..(292): n is a, c, g, or t
  misc_feature (304)..(304): n is a, c, g, or t
  misc_feature (308)..(308): n is a, c, g, or t
  misc_feature (323)..(323): n is a, c, g, or t
  misc_feature (349)..(349): n is a, c, g, or t
  misc_feature (363)..(363): n is a, c, g, or t
  misc_feature (366)..(366): n is a, c, g, or t
  misc_feature (386)..(387): n is a, c, g, or t
  misc_feature (429)..(429): n is a, c, g, or t
  misc_feature (466)..(466): n is a, c, g, or t
  misc_feature (854)..(854): n is a, c, g, or t
aggagcttggngtgctcagggacacgggcagagggtgaatacagccgggggctgaaaggccagggcagcgcccaaagancactgagcgaaggaacagggatgagccaaaggancaccatggggatgaagaaaaagagggagtannagtagatgcacacagtctccaggaaggtgtagggccccatgcgctcctngnnacccttgnntcaccgcagnnggtccatagggccaggngcaccagctacgcatagcagttgatgttgttntttgctacggttactttgtngtattnggggctgttgtngttnttggggttcctcctntgggccagcaccagcgtcaggttgcnagttatggctaggntanaggccaatgtggcacagatnnagatggggccatatagatccggccgattccgcagatggtgcngcacaaagttgtggccaggccggggcagcagtgagcntttgatccggtccaggacctgtgaggtgtccacgttaaagaagctctgatagtagctgaaggtccagaatccgcggctgctgctgctgctgctgctcctgcaggagcgcggccttgtcactctcctcctccacctcatcctcggctccatagctgccacctgagcccacggccacagccacgtgcccttgtggggtcagctgatcgcttctgctggtggtggctgcatctggggtgtcagccagaagattagtggcctcctcgaattcatggaaggtcagctcgtcggccgatgccatggtcgttcaggggcgtctccgcatccctcgctggcgaccaactgcacccacggaggcttgaactcgtcgtcccgtccccacaggtgcgcnccgccccccctcaactgaggccacctgggccggcatccggggaatt

SEQ ID NO: 525948 - DNA, 107 bp, Homo sapiens
gttacactgcctttccagctgaggtagtagccctttccagctgaggtagtagccctttccagctgaggtagtagccctttccagctgaggtagtagctctttccaga

SEQ ID NO: 525949 - DNA, 384 bp, Homo sapiens
ttttcttgatgatgctgggggcctttatatcattttctatgtttttatttaaaaacatgacatttggggccaggcgcggtggctcacgcctgtaatcccagcactttgggaggccaaggcaggcggatcacctgaggtcaggagttcaagaccagcctgcccaacatggtgaaacctcatctggactaaaaatgcagaaatttacccaggcacggcggcggacgcccatcatcccagctacttgggaggctgaggcaggagaattgcttgaacccgtgaggcggaggttgtagtgagccgagatcgcgccattgcacaccaacctgggtgacagagcaagattgcatctcaaaacaaacaataataataaataataaaaacccg

SEQ ID NO: 525950 - DNA, 161 bp, Homo sapiens
ttttttaaaaaaaaagggggtagggccccccttcccccggtgttgtccccccgaattaggttttttccccccaaaaagggggggggcctgggcctccccccccccccaaaaattttttttttatttgggggggggccttttaccccctttttttccgggga

SEQ ID NO: 525951 - DNA, 1401 bp, Homo sapiens
cccgagcaacgcactgctgcagcttccctgaggcctattccaggcatgtttgttcaacgagtggctgtcatgaatcatggactgttattatatgcctatgattttctggtcaagaacaacatgagttcgcatggataaccgaatgctgatggtcggtgtttattatgccaagtgctgtgtaggagagcggcgagggcaagcgtagtttgactagcctgagtagcggggaacgaaaaaaggtcgcccgatgcatgtcgaggggccagcggcggcgacggagcgcctggctcagggacagacgaccatggagccatcctcgtcgggtgcacgtatccgagggcgtaccatccttcctgggcagatagttgtggggcgtagcgacacgcacagacaccagcaatggcacgtaagccaaacggagtgccagttgcagtatccagagagctatcgatgcagcggattgcttgtaccgggccttctagttgcctgggcgagcgaggacggaacgagtcatgatcctcacaagcacgtgggctctctgaggtcatccttggagtgcgccggcggccgaggcccgtggccatcacccctgttgatggacgccttccacgcaagagtataggaaccagtctcggtagaatcatcgccagggagccaggtgaataaccgtctgcctttgtcgtgttccatcattttaaaccgctcaaggtccagctattcccttgatgaaaccgacgggcgatacatccttctgcagaagcatattcggcgtcacttcccgagcgagcagtgctgggactcaatggggaccctggactagggcaacacggggggcttcccaccgttataacacactctcatcgacgggtgcttgacacgccccccaaggctacgaacgttgcgtgacgtggcggtcaccttcattcaacaggcgatacaaacttgtaccacgcagaacttggttcccacgccaccaacgtgtgaacacccgttggggcaaacctcttcggcttgtggaggccctcagggtcccttgcgattggaaccccgcacaaacacacccaaactttttgggctacacccattgaaggcggaatcccacctccaagtcagaaagtgggaaccccaccaggggggcccgccatgtccggcgaataacgcggacgctaccccacggcgaagggggaaccagagccccgaaccggcccccccggcgccactgtgcaccaaaggagacccaccgtccacgcgccgcgcaaatccagcaacccaccagccacaaaaaaacaggcccgacgccaataccaccgtagccgcacacgaccacacaccaccgcgcacctggaccaccccgagcaggccgacccaagccacaccagccccgcccaccacccccccacc

SEQ ID NO: 525952 - DNA, 318 bp, Homo sapiens
cttggctgagtacagtagcgctctagtatcccctctatcaacatgctagatgaagattgcaggtataaatgaccctggtgtggaacaaatcaccaactaagcatccctatttttccctaatttccttatttgtattgcttcctaaatattgtatttggcatagctgacaaccagggctttacagtttataccaagggtcttctctctgtgctagagtcaagaggaggaaaagaagaagagagaactgaacttccagtgtttcatcccattaggtttttatgtgtggtgcttactggtgtagaagtggcaatcaagctt

SEQ ID NO: 525953 - DNA, 128 bp, Homo sapiens
aggtactcctccgttgctcggttttccactgcaggtacagtgtttcagccacagacaagtgcaacaaaacctggttactatacacaaagccacgctgtgataattttactcttaaatcaatcattcag

SEQ ID NO: 525954 - DNA, 966 bp, Homo sapiens
atgacgaggctcgggtggaatggccagagccacacgatgacgaacgaacggatgcccgaaggaaacccctgcagcacaggaggtgtggttgctcatagcaggcaggcaagcgaaacagcagcaaacaccagcgcaggctccgcaagcaaggcatgcaggcagcaacagggcacacagcaaggctgcacagtcgcagcacaggcagtcctgcagcacagcagtcgcataggcagacccgaatcagtcgcatccatgcagcaaggcagcaacggcagcccacaaggcaagggcaggcaggcaagtgctgcacaggcaagtggtggcagtctgcagggcggcaacaggcacagcacaaaggtggcagcgggcacattggcgagggcaacctctccaccgcttgctgccgccgccctggccgccgccgccagtgaaagctaagcacttggctgctgttgaggaacaggaagcatcaaatctttggtggccctgctggtggagacccagatgcaaaaagttggagatcaaacttcggcactttgaggagctggagactatcatggaccgggagcgagaagcactggagtatcagaggcagcagctcctggccgacagacaagccttccacatggagcagctgaagtatgcggagatgagggctcggcagcaagcacttccaacagatgcaccaacagcagcagcagcaccacagaacctgccccaggctccaggctatcccccaaagtggttgtgggcaccgcagccatggttggtgtggctcagcctctgtagtcctgtcttgtgcatgggccttcagaagttggcctttgaaagatggagcaggtcatggagggccacgagagaacgtggaaccacaacggggagaccaggagtaccgccggacagaaacagcggacaaaagagccagagcaggaaaaagaaccaaggaaacaagaagcagaaaacaag

SEQ ID NO: 525955 - DNA, 871 bp, Homo sapiens
  misc_feature (6)..(6): n is a, c, g, or t
  misc_feature (13)..(13): n is a, c, g, or t
  misc_feature (24)..(24): n is a, c, g, or t
  misc_feature (28)..(28): n is a, c, g, or t
  misc_feature (32)..(32): n is a, c, g, or t
  misc_feature (44)..(44): n is a, c, g, or t
  misc_feature (47)..(47): n is a, c, g, or t
  misc_feature (53)..(53): n is a, c, g, or t
  misc_feature (59)..(59): n is a, c, g, or t
  misc_feature (66)..(66): n is a, c, g, or t
  misc_feature (75)..(75): n is a, c, g, or t
  misc_feature (78)..(78): n is a, c, g, or t
  misc_feature (108)..(108): n is a, c, g, or t
  misc_feature (120)..(120): n is a, c, g, or t
  misc_feature (124)..(124): n is a, c, g, or t
  misc_feature (137)..(137): n is a, c, g, or t
  misc_feature (158)..(158): n is a, c, g, or t
  misc_feature (172)..(172): n is a, c, g, or t
  misc_feature (186)..(186): n is a, c, g, or t
  misc_feature (189)..(189): n is a, c, g, or t
  misc_feature (192)..(192): n is a, c, g, or t
  misc_feature (200)..(200): n is a, c, g, or t
  misc_feature (203)..(203): n is a, c, g, or t
  misc_feature (209)..(209): n is a, c, g, or t
  misc_feature (229)..(229): n is a, c, g, or t
  misc_feature (233)..(233): n is a, c, g, or t
  misc_feature (235)..(235): n is a, c, g, or t
  misc_feature (239)..(239): n is a, c, g, or t
  misc_feature (247)..(247): n is a, c, g, or t
  misc_feature (250)..(250): n is a, c, g, or t
  misc_feature (253)..(253): n is a, c, g, or t
  misc_feature (255)..(255): n is a, c, g, or t
  misc_feature (258)..(258): n is a, c, g, or t
  misc_feature (261)..(261): n is a, c, g, or t
  misc_feature (265)..(265): n is a, c, g, or t
  misc_feature (291)..(292): n is a, c, g, or t
  misc_feature (309)..(309): n is a, c, g, or t
  misc_feature (312)..(312): n is a, c, g, or t
  misc_feature (322)..(322): n is a, c, g, or t
  misc_feature (327)..(327): n is a, c, g, or t
  misc_feature (329)..(330): n is a, c, g, or t
  misc_feature (334)..(335): n is a, c, g, or t
  misc_feature (337)..(337): n is a, c, g, or t
  misc_feature (341)..(341): n is a, c, g, or t
  misc_feature (360)..(360): n is a, c, g, or t
  misc_feature (371)..(371): n is a, c, g, or t
  misc_feature (377)..(377): n is a, c, g, or t
  misc_feature (385)..(385): n is a, c, g, or t
  misc_feature (396)..(396): n is a, c, g, or t
  misc_feature (402)..(403): n is a, c, g, or t
  misc_feature (409)..(409): n is a, c, g, or t
  misc_feature (418)..(418): n is a, c, g, or t
  misc_feature (434)..(434): n is a, c, g, or t
  misc_feature (441)..(441): n is a, c, g, or t
  misc_feature (444)..(444): n is a, c, g, or t
  misc_feature (457)..(457): n is a, c, g, or t
  misc_feature (473)..(473): n is a, c, g, or t
  misc_feature (480)..(480): n is a, c, g, or t
  misc_feature (488)..(488): n is a, c, g, or t
  misc_feature (493)..(493): n is a, c, g, or t
  misc_feature (497)..(497): n is a, c, g, or t
  misc_feature (501)..(501): n is a, c, g, or t
  misc_feature (522)..(522): n is a, c, g, or t
  misc_feature (528)..(528): n is a, c, g, or t
  misc_feature (534)..(534): n is a, c, g, or t
  misc_feature (536)..(536): n is a, c, g, or t
  misc_feature (545)..(545): n is a, c, g, or t
  misc_feature (547)..(547): n is a, c, g, or t
  misc_feature (558)..(558): n is a, c, g, or t
  misc_feature (561)..(561): n is a, c, g, or t
  misc_feature (588)..(588): n is a, c, g, or t
  misc_feature (610)..(610): n is a, c, g, or t
  misc_feature (623)..(623): n is a, c, g, or t
  misc_feature (630)..(630): n is a, c, g, or t
  misc_feature (654)..(654): n is a, c, g, or t
  misc_feature (656)..(656): n is a, c, g, or t
  misc_feature (658)..(658): n is a, c, g, or t
  misc_feature (706)..(707): n is a, c, g, or t
  misc_feature (709)..(709): n is a, c, g, or t
  misc_feature (722)..(722): n is a, c, g, or t
  misc_feature (729)..(729): n is a, c, g, or t
  misc_feature (760)..(761): n is a, c, g, or t
  misc_feature (765)..(765): n is a, c, g, or t
  misc_feature (779)..(779): n is a, c, g, or t
  misc_feature (788)..(788): n is a, c, g, or t
  misc_feature (793)..(793): n is a, c, g, or t
  misc_feature (797)..(797): n is a, c, g, or t
  misc_feature (833)..(833): n is a, c, g, or t
tccgtntgcagtnttttaatttanccangtanaaaggcaattancanaatttnaagganacttttnacttattanacnaaaaaaaaaactttacaaaaagtttaaacnaaaaaattacancccnaagtgattagggnccccagtaacacaaaaaaaanaaattgaaaagggncattgcccggcaanccncanaaccacanagnagagcncaacaattgtccgtgatcanaaananactncaaaaaancanctncncanatncccnagcattatgccccactagtaaaaggnnggcctatgacaatgccnttntttattttgngtacncnncccnncnattncccccaaaagttttttttncccgcaaaaanaaaaanaaaaggcngtacccccaanaaatanncccaangaagattancccaacagaagccccnacgtttnccnttttcccccgccntccccgaagtcccccngggtgtncccccgcnatttnccancccnttcattgttgattagcccacnaaaagnagaatncnttagcaacncncaaaacaaaanacncaggccaaaacaggccccacaaatacnctttgaaataggtatatttggntacaaacaaaacntccccgnccattattttttctaatgactaancncnaaatttttaaaaatggaagttttcaaaccaacgatgtgttaagcccanncncatgacacattcnttttaanttctcattcagtatgggaaaattttatttcnncccnttgtcttgcagaanaatttaggntcccncccngggcacgattcaccaaatagagtaagaccacagatnaaagtgacaaagaaacacaggcaatgaagaacacttcc

SEQ ID NO: 525956 - DNA, 901 bp, Homo sapiens
tggaaacaaagtctactctgtcgcccaggctgggttgcatgggattgatctcggttcatgaaatttccgcctcccggttttaagcggttctcctgcttcacctcctgagtggctggggattggcaggggctgttatgccaccatggcccagctaatttctggtcatttttatgtcagaaggacagggtttcaccattgttgggtcaggctgggtcatcgaactcctagacctcgtagatccgcccgctctgggctccgaaagtggctgggctattggcaggctgtagacgccactgcgccgggcctagaagctaatttcttctacaaaagctcttcagtttttggtcttgtgtactggtttggttttcttttctttttggccgagggatctctttctggtccgcccagcgtctcggcatgttgccagtgcggcctttgatctcagtgttcactggccaccttctggcctctcgggtgttccacagccgatttctcccctggctcacagcctcccccaaagttagctgggcgtttaactggccgcttcgccacccaacccccagctcatttttggtatttcactcacagatcggtgttccacattgtgtgggtcagggcgtggtcctcgaatcttcaaacctagaggatgaatacgacgttgccttgtagctctcccaggttggttgttatttgtcggcttttagaacatttcgcctcgtgcctcttagacaatcttggattttatttacaaagattcggggcattaaggcccgactattacatagcacactttttgattcagccaaccgggtacaacgttgcacgtgcattcactctactcttacgcaccttttcccactgtgtgtagcggtccccgcgtagtttgttaggttatgcactt

SEQ ID NO: 525957 - DNA, 336 bp, Homo sapiens
acctactgttgccggggagaggaagaaagtatgatgatgagaatcgcccagaaatgtaatatcaaccttctccctttaccagatcccattccttctggtctgatggaagaatgtgtggattgggatgaggaagcctaagctgatgtgcatacatatggtatagcaagtgtaccttaccaaccattaaaaaagcatattcagactatagagagatccctccaatttcaaaaagctcatggtgaccacatggattcctctagaaacaatcctgtatccggactatcagtcaaatctaaaaataatagcacacaatatgcttgtgtgaaaagccactca

SEQ ID NO: 525958 - DNA, 339 bp, Homo sapiens
agcagtatctagtaagcttactctctactaacaaaaacagatagactttccccaaaatacagaaaagaatcagtgtcttgtgcccaataacaaggatgcagaaaagagggagctttatattctcccttttctcaagcagacaaacccttttgcctaaacttagtaaaactgaccagtcagatatgacctccaaaatttcccttgaaaaccttccacgcaccatattctgctgcctattcctggagatagttactgattagtaatcagtatcctatttaatgagaaaagatttctcacagctttctataacatatctcactctacgagtattgtataaag

SEQ ID NO: 525959 - DNA, 215 bp, Homo sapiens
gaccaaaagaggctgcaggtcaaaacctgaaagaggctctcccaggccaggcgacaaccctttaggtgcagacggggaacaaaaggctcagcctgtggtaatgccaattccttctgaaaaaggagaaacgagtcgtccagcaacgggccatgggtaggggcggacggtagcaggggacactgtcccctgcctcagcatgtcctgtacagagggtg

SEQ ID NO: 525960 - DNA, 455 bp, Homo sapiens
  misc_feature (49)..(50): n is a, c, g, or t
  misc_feature (117)..(117): n is a, c, g, or t
  misc_feature (157)..(157): n is a, c, g, or t
  misc_feature (180)..(180): n is a, c, g, or t
cgtagatggggctacctgaccttgacactagtacactgtctgtaccccnnggataccatatatatgtagtgcaggatatcttcctcctgccgctaccaaatgggaacaggcggctantgttgactctctccatagggatcggcagctccctacacgngcggtgaaaagatgggcatgaanatttgctaacgactgagaaacactatgtaaagatgctgagtatgcaagcctctctttccactcgattagctcctcagaaatggttatcatttattttattttatttaactgagatataattcacataacatgaaatttaccagttttaaaatgtacaagtcagtgggttttagtatattcactatgtttggcatccatcccactaatttcagaacgtttccatcaccccaaccagtttttctctttttttaattatgaagaaaattcaaacatgt

SEQ ID NO: 525961 - DNA, 236 bp, Homo sapiens
cgctagtcatggccatccgcttctgcgcgggcgctgcgcttattggctttcgttcgaagcttcagcctgcccttgcacacttcttaccagaaggcacagcctacaccgccttattcccatgaatagttattatctgcaaatagccattagtctagtcatgtccgccgaatagcgcctggggggttcccgtcttagacgctggtaactgttgcgtgctgggccgctcttgagctctt

SEQ ID NO: 525962 - DNA, 319 bp, Homo sapiens
tcatagacaggcacgtaataaatgtgtgatactataaaacaggcatacagatacgaggagtcatcaaacatttctaggaaaatgaatcttataaaaaaactacggccaggcatggagactcatgcctgtaatcccagcattttgagaggctgacgcaaatggatagcttaaacctcaggagcttgagaccagcctacggacacatgtcaaaaccctatctctccaaaaaaatacaaaaattagccaggtgtagtggtatgtacctatagacctagctactcaggaggctgaggtgagaaaagggtgacagaggtagcag

SEQ ID NO: 525963 - DNA, 141 bp, Homo sapiens
  misc_feature (10)..(10): n is a, c, g, or t
  misc_feature (101)..(101): n is a, c, g, or t
aaattcaagncttctaacgaatgtacggggcacatgacacagcaaagacgagaagcaccctatggagctttaatttaaattaaatgcaacacaggtacctnaacaaaccccacagtgtcctaaacctaccacaacctgcat

SEQ ID NO: 525964 - DNA, 369 bp, Homo sapiens
  misc_feature (182)..(182): n is a, c, g, or t
ccaaatctgctccatggaactcttttctccctccaccatgccccatgccagggccgagactgggaccaggagagccaggtctataattcaatggcccatgaccgccagcgataggccaagagcccacttagtatcatgctggctgactccatttccttctggaccaccaataattcccccancacctcccatatgtccagattctcttgatgatgctgatgctttgggaagtatgttaatttcatggtacatgagtggctatcatactggctattatatgggttttagacaaaatcaaaaagaaggaaggtgctcacattccttaaattaaggagaaatgctggcatagagcagcactaaatgacatca

SEQ ID NO: 525965 - DNA, 344 bp, Homo sapiens
gctgactattgaagggcatgcctcagtgcaccttgtgggctggcactggctcctagacacctttggctgcctagggctcaggcactttgagggtggcaggcctcacgcaccttgcgggtggcacggctccttggttttggggatgcactggttcctgacggtggaaggctgtgcaatgctgtttcacctgctgcctgctaaccctagggggctgggactgcagggctgcttctgctgctgaggcaactcctgctgcaacatctgctggctcctgatctcaagagaggcaatacccctgtctttgtccctttcaactggtccggtccatactccagagtcttccg

SEQ ID NO: 525966 - DNA, 400 bp, Homo sapiens
gaccatctagcccctaaccatggaggaaaagctttcggtcttccaccattgaggatatgttctgtggtgagcagatctatgcaaacctgtccccaaagtctgaggaaactgagaggttgaagaaagaggatgacaaatccagtttcttagaaagaaacatttaatatggccttacaaacagaagccgtgtctgtgtctccggtagcagcaagataagatggtggatccctgcaccatcaccctccagacccagggcttatctatcacagggaaggaatgtgtaggatgattgaaaccaacccctcaggaaaaggtattctaatgaagcctgtgaactaaaattttggggaaagcagtttccatggcagattgatttttaaaagcttctttcacccctaaa

SEQ ID NO: 525967 - DNA, 103 bp, Homo sapiens
gggcggtggctatctgatttacgcttattttcacgaccaggcatctgccagttggaacccacgccggctcaaagtgagttgcgccgctattccactgcatgca

SEQ ID NO: 525968 - DNA, 596 bp, Homo sapiens
ccgcttgtgaacacatggaataaaggcttcccattttccttacattcgtagtggtttgtcacctgtatgaattctttgatgttgaatgaggtatgagctacgactaactgccttcccgcagtccttacattcatagggtctgtcaccagtatggactctctgatgtcgtgtgagctgtgcgtgctgtctgaaggccttcccacattccttacactcatagggtttctccccagaatgaattctttgatgtcgagtaacttctgagctgtgaataaagccctttccgcatcccttacactcgtagggtttctcaccagtgtggattcgctggtgtacagtcagctgtgagtgctgtctaaaggctttcccgcattctttacactcatagggtctggcccctgtgtggattctccgatgcacagtgagttgggagccacgaatgaaagccttgccacagtctttacatacgtagggtttctcgcctgtgtgagttctttgatgcagaatcagctgtgaatgctgcctaaaggtcttcccacattctttacattcataaggtttgacaccagtatgaagtctctgatgtagaactaggt

SEQ ID NO: 525969 - DNA, 446 bp, Homo sapiens
  misc_feature (184)..(184): n is a, c, g, or t
ctacacacaaagaaaatgctcactttgggatggggcactagcagtgtcggcgggtgcaaagtggcaacgactagaactgggagtgcattctccacaggctgacagcttcctctctctgcggccagcgccacaagcagagtgactcctggctgatgaatggtgagtaacgggctgcataccccgngttgtccaggaggagcgccggcccttaccttgactgtccggcttcatcagcagcgcgtggcccaccagtgggtaggcgcgggccaccgtggggatgggccgcatctgctgccatttccgcgcgtagctcgccaccctctgcagctggctcaggaccagagtggcgccggccagggaaacggcactcgccgcgccccacagcagcagcttctgccacacgagccccagccagagccccgccattcgccaccgctggcggccgc

SEQ ID NO: 525970 - DNA, 110 bp, Homo sapiens
aggcgtcactagaggatcccgtgtgtcgagataagtaacagaatagaagtcacacataaaaagtaacaagctactgatacataccatgaacataaatgaaccttgcaaac

SEQ ID NO: 525971 - DNA, 1133 bp, Homo sapiens
tccccttggcccataaatttttattgggcagtgtcaggaaaaaacccgggggtaatgggtcccttccttcccatccctctacccaaaagacaccctccaaaggacagctagaagccccaaagcctgttgcctcagaaggaccttggaggcagacaaatggttgtagtgatctccctgtccctcgagcaggctgcggtagtgtggcaatctcctgctccagccgtgatttgatgtccatgacgccgttggtactccgtaattctgccgctcactatcagtctcgacacattcgcccagttgggctacaataccgcttgatcagcgccgtggaatatgcgccagcggggctccaaagcgcgcctcgcgttatctgccaggtgtgtctctccagggcagccttcatgcccagctgtagacttcgcagcctacaatcctcaagaacccttgaaggggttgcgccagaaaggctactagtaaccctcggacctgactcatcttgagaagcatgcctccgtgtgtggccagaggagaccctcccgggtcacaaatctctctcaggctcccggtctgtgtagacaccaggggttcaggaattaccataccgggtatcctgcactcggccattgaacgctccattatggggctttcggacatgtgtcgactccagagactcctgtggcgaaaaattccggtatgccccgagaagctgaatatcccaacctcacagcatgagacacttaggggcctcccacatttggcccccataaggggtaccgtgatatacgcgtccatcaggagtcctatctaccaggggtgcagggcccaagctgacaccactaaaagggcgcatcagaaagcgtggacatcagcccaagggggtgcggtccccgtaggcacaaaggggtcaaggacacaaccagagagacccctgtggcgcaaggcacggtgaaagcacggccaccacccggcacagaatagccagaaaagcaaggtaccagggcctcaaaccatggggccggcaaaggtccactggcgagccaacagggaggtcggcgtgcaactgagaagaaacaaccctgagactcaccacatggctggccgcccagaaagctggcgcgcaaggcacagggaat

SEQ ID NO: 525972 - DNA, 114 bp, Homo sapiens
gagctcggtacccatggtttatatcgtggtcgttaaggactcaatgcccacccattcctctctaagatatcacatactaccaatccgcaatgtctgacccatttattttcggat

SEQ ID NO: 525973 - DNA, 215 bp, Homo sapiens
ggtgcatgccaccacacctggctaattttttgtattttagtagaagacggggtgtcaccgtgttgtccaggctggtctcgaattcctaagctcagggcattccacccaccttgggccgtccaaagtgcctgggattataggtgtgagccaccatacccagccggattttttagatttaaaggttgtctttccaggacgggcaagcttaggcctta

SEQ ID NO: 525974 - DNA, 132 bp, Homo sapiens
ggagttcaagaccagcccaggccacacggcgaaaccccagctatacaaaatctgctgggcatttgtctttgactttctagtccttaaaaaaaaatcagctgggcatggtggcacacacctgtagtcccagct

SEQ ID NO: 525975 - DNA, 302 bp, Homo sapiens
gtcgatttgcataggtgcggggtcggcatggtggtgcacttccacaaggtcaaggagaggtctttaccgccgctacctgcgaatgggtgcatggggagacacgatctggaactccatccccgctgattcgcccaccatgcttcaggtctgaatggctctaaagcgtaaatggcgttagcattcccaccactcggcttaaacagcctgtttttcagatcagggtcgcattgtggaaaagctaaaacgcctccaaagtggaatcgaagggctcgacgctcgtcgacgcggccgcgaatttagta

SEQ ID NO: 525976 - DNA, 1085 bp, Homo sapiens
  misc_feature (639)..(639): n is a, c, g, or t
gcaccagttgtgtttcacatgttcccccccagatcttgtttcctggttgcgtcaactgtcggtttgtttccccacccctttgggggaaaaattttcctccccgtaaagttggtgctgtaaggacccccccgtgtggtgagatgttctcccggaggtcgtccctcttgggagcccccttgctgaaggttacccctgggtgtgaccccccgttaattatgtgtgggaagaaagcgggtctttagatgtttttccccccccgctgtttctctcacagagaattgtcaggggggcctgcccgcccaatctcccccccctttgttggtgccccccccacggcgtgtggtcgctacactctctcggggccctatgagatgccacgcttgagttttctcgtctcgcctccccactcaatttggggggcgctttggagattttgttccctctggaggggctcccacgccttgttgggccctctcctttctgttctctctgatacaccacgttgtggacaccacagtgcgcccgcctctctgttgggcgctttcttgcccccctgggagaatggcgcccccggttgtgtggggttgtggctttgtggtgtaggccctcttggggcgccccctgccccctgtgtggggntttctctgtgccttataaggcgaccacattcttcttctctcacttgtggtgggagagacccccgcgccccactttacacaccctcaccaccgcgtgttttatatgtaaaagagaagaagaaggtgtggggtgtggagggggaaatattagtctgtttcccccgccttagagagggggagaatataaagagagagggctctaatttagatttctctgggacaccagcctcgcgctctttgtgagggagagaaaatatataatagctcttggaacaccgagggagaaagttctataggaaattatcacttgaaacactattaaatgggtattttcttttttcttggagtttccacagcgaaaagccttcttaaattttaatgcttttcttcctgcgagaagtaaatgtaccccttttttttgaaactggattaaaaactcccttttta

SEQ ID NO: 525977 - DNA, 420 bp, Homo sapiens
tgagcttatgctgccatcactgctcagcagcatagaaaccttcttaaccttgagcgccttcatcatgtcaacagcatcttctgcatacctttcagaaaagtctctgaagaactctcgatctgagggcctagaatgtccatagcctcgaggatctcagccgaccaccgtgtagagcttcctattaaggttcctaagctgaggtccagaatcagtctctcagcttcatatcatcccaggaagtagcaggcatgcgtgatctccctatccagtatactggtaatgcagctgatacgccattcgcagtcactttgacagaggtaaccatggtgccgaactcgaccgcgggtccggaccgtgggacgtggatcacgggattcagccctcagataagcagccgcaggcgcaacacgcgccgtccgc

SEQ ID NO: 525978 - DNA, 455 bp, Homo sapiens
tgacaagaatcactgcgtgaaggttcttcaggttcataaagtctccatctttaattccggtcattttgatgatctgcaggtctagcagagttgtgacacacggaagatcctctggcactttgttcagacccaaatcagactactggtgctgtcgaagatggctcttgtcatcgtaaggggcacactaggactaggtagggctcgaaatcgcggtcatcagtagcatcggggcctatcccagaagcctcatcttctagcataaagtctaataagcctctctgttgaaacggtccaggacaggaagcttgtgcaagcagaaggagcatgatagtggccttcatgatttatcgcatgtacttacacaatcagggaaccttacaagatacttgtaaagattaaacaagatagtggacttctctactgtgtccgctggctcatacaggcgagcaggtccg

SEQ ID NO: 525979 - DNA, 123 bp, Homo sapiens
tgctgggatcacaggcgtgagccactgccccggccatcccagggttgtttgctggttaatttttgcacatatcaccttgtgatgtctgtggtagcaactagatgaagagcaggaacttacaga

SEQ ID NO: 525980 - DNA, 102 bp, Homo sapiens
taacagccctagaagtctaatgcctacatttaaaggatggcctggcacccagtaaacgccgattcctgctacacggacttctacgcccattactaggagaca

SEQ ID NO: 525981 - DNA, 520 bp, Homo sapiens
cgagtaaagatcaaaaattagtcagggtgtggtggacgcctgtgagtctcaagtctcagctactcaggaggctgaggcaggagaatcacttgaacccaggaggtgttgcagtgaaccaagatcacaccactgcactccagcctaggcaacagagactctgtctcaaaaaaaaaaaaaaaaaaaaaaccccccgggaaacagcagccctattttccgagtgtgaccttgtgctgtgtgaaaggctaccctggctaccccaccagggccaaagacagccacagtgtgattaagaacagaggcgggatcaaaatttccacagaacaacagttcagctgagggccctgcacacaccggggttgtagagaacccacaattggccgccgagaggcctgccttttggcctggcccaggcttcaccccaactttgggcttcacctcctcaaggaggcctttcccagttacccgaagctcgggtgcccttctcgagggctcccggttgcacctgtgagctgtgtacctt

SEQ ID NO: 525982 - DNA, 293 bp, Homo sapiens
tagaggcatttagtcttccgaatttgggtcgtccattggccgatggtgagttccttgttatttacgtttttcttatttatttattgtaggatatgagttatggcttaatgccaacattcaaggctttaacatcaccaatcatcctgatattaacactacaagttgcattatgctatatatgtagataccattacgtggttatgggattatggggagttaaagttaaaggcttatcttattttaagcattttgtacgaccttataaggctttgttaatactcaatattttcgag

SEQ ID NO: 525983 - DNA, 312 bp, Homo sapiens
tgcgctggtgccttcggcacatgctctgttcctgaaggtgcattgctgcgcatatggacaaggcggagagcgaaagacaatccagaccatcctcagctccagcatcccaaggcctgggcgcaaggcatcctggatcatgacctcgtgtacgggttcggggacctgaccttcggtattgagagctatgatctgcacttgtgtcagtgtttgccatcgagagtgaccagctccatcagctctgggagaaggaccgagctcactagtggccaaagaacacctgtggccaattctgaaggggcttccagagagggg

SEQ ID NO: 525984 - DNA, 863 bp, Homo sapiens
  misc_feature (26)..(26): n is a, c, g, or t
  misc_feature (87)..(87): n is a, c, g, or t
  misc_feature (127)..(128): n is a, c, g, or t
  misc_feature (137)..(137): n is a, c, g, or t
  misc_feature (140)..(140): n is a, c, g, or t
  misc_feature (149)..(149): n is a, c, g, or t
  misc_feature (170)..(170): n is a, c, g, or t
  misc_feature (181)..(181): n is a, c, g, or t
  misc_feature (190)..(190): n is a, c, g, or t
  misc_feature (202)..(202): n is a, c, g, or t
  misc_feature (222)..(222): n is a, c, g, or t
  misc_feature (234)..(234): n is a, c, g, or t
  misc_feature (368)..(368): n is a, c, g, or t
  misc_feature (372)..(372): n is a, c, g, or t
  misc_feature (415)..(415): n is a, c, g, or t
  misc_feature (428)..(428): n is a, c, g, or t
  misc_feature (500)..(500): n is a, c, g, or t
  misc_feature (517)..(517): n is a, c, g, or t
  misc_feature (532)..(532): n is a, c, g, or t
  misc_feature (584)..(584): n is a, c, g, or t
  misc_feature (672)..(672): n is a, c, g, or t
  misc_feature (715)..(715): n is a, c, g, or t
  misc_feature (767)..(767): n is a, c, g, or t
  misc_feature (770)..(770): n is a, c, g, or t
  misc_feature (819)..(819): n is a, c, g, or t
tttgataaaaaattttaggaatcttntcctttaattaactcatcaacctctcatggcaagaatttgagaaagtaaatttatactcangttttaattttaatagggaaggaagaagttacacctcagnncaccatgangtngagacaaanatggagacacctcagccccanctttctgcaangggtaagangattggggaggntgcacaggtcagggtgggangggggtcatggnggacatgggggtggggtggtctccccacctcctcacattatgcctacatgaacacagacacatgcaggtgcctttgcagaaacaaagtcagggttcttcaagtcacaaagggaagggcaggaacaactcttgcntctnagtcccacacaaggcagctgtctcacactttacaagctgtganagacacatcaganccctgggcactgtcactgcttgcagcctgagagtagctccctccttttctatctgagctgttcctcctccanatcacagcagcgaccanagctccagtgatcanagctccaaggagaaccaggccagcaatgatgcccacgatggggacggtgggntgggaagatggctcccatctcagggtgaggggcttgggcagaccctcatgctgcacatggcaggtgtatctctgctcctctccagaangtaccaccacagctgcccacttctggaaggttccatcccctgnaggcctggtctccacaagctccgtgtcctgggtctggtcctcaccatcccgntgncaggtcagtgtgatctccgcaggtagaagcccagggcccagcatctcanagtggcctcatggtcagagatggggtggtgggtcatatgtgtct

SEQ ID NO: 525985 - DNA, 207 bp, Homo sapiens
  misc_feature (185)..(185): n is a, c, g, or t
  misc_feature (198)..(198): n is a, c, g, or t
actagaggactcaattcggccggggcatctcaatgctgttaatccggaggacagtctgcggggtcgtgagattcttttcttcttgaagtttttccttttcctgaatctcataatggattctgggccatgattctggtcttttcaatgactggtggcttctactcggaacaagatcctttccgagngagtggctggcanaagcaagcg

SEQ ID NO: 525986 - DNA, 1429 bp, Homo sapiens
  misc_feature (1379)..(1379): n is a, c, g, or t
tgtacggtcgatcgcctgaagagtggcgctgttaagaagcaacgaacactctcctcttcgtcttccgacagtacaggccatcgggcagtctgtgaatgcagcaagcgcgatgcgtgagttgcttttcccatccagacagtgtgtgccaggctggtggtctagagtgggcaatggcttgactgggtcagctcttagtgccctgtgtcaaccacgtgcagtcgcagagcgcggaatggccagtatgctaaaagtgactgaagaccatggggcgggaggcaggatgagggccggttcaacattcatatactatctacgtagatgacggggggctggaaatgcagtgtactcgacggggctacggggtgttgtagaccgtagtgaacccagcacgttcactcttgactgagggtgaggacaactaggacacacttattctgctcaggtatctctactcaccccgtggcaagtcagacacgtgtattacactactggctaaagagggaaaacgaatggccttgcccaatatttagtcttgaatagctccctgaaaggcggtaacccttaatcaccaccaaatgtagaggctaatgggaacggaaggtcaattctgggtaacaccttccggttagttgtgagtaccccaggtaaattttccggtcataaggtccatagagaactcgagtaacttcaattgattgtgtccaacacacgagtggataccataccctaaggtggggaacgttggaacatatagagcggttagtactcttcacgaaagaaatgacttttttggaggaggcttgtgtgggtggaacaactgtgagatatacaattgaggagtttttacaagcctttctggaacatttggctttgccaattaggggaaaactggattggttgcattctaagatttaggaagtatagttgtggcccaacatggcagacagggtttccccagggaggcaccttggggtaaaggtttattcacaattacgttaagttgtttaaatctcccccggggaggtgtactcccacgaaggggtatttaattcccccaagccacgggacatatggaatagcaggttgtaggaacagagccgcccctgtaagacaagaagtgtaccgccaagttatgcgattcgtaagaacaaaagagtcgaaagaaagcgcgatacctcgcgcgttgagaataggagcaaccattcatgtagaaacttttgggtagtgcgccgttgttcgactgtgtgggataaaggacaacgaaaagatggaatgggggacaccaatatcttagattagaaaggcaaagtttcatgggttccgggtatagaaaaagaaccgtgcgggaaataaattttggagaggacaggatcgccaanagtggcgttaataagcgtagacggcacttggaaaatttaggggattaagg

SEQ ID NO: 525987 - DNA, 952 bp, Homo sapiens
cggtggggcgactcccgtacgtagtgtagttcgttgggccggatactgagagattgggtgtattgcttgaacattattgccactactatgccaataattggcgggtgtacccaaggatcctgggaagggatgttcaagccggagcgtgccggagaagcatttggccctcagcatgatccctatgcatcggcacggttgtgggttcatcaaggatttatgcgcgccatgtcgtgattcgtgaacctctggtggtgtctaatgtaaccagaatgactattcagtctggtgtgggatgtattacacatcgagtagcaagatgcttcagagagagtccacgaagatgtgagatactatcgccacaaggtcaaactgaattgcggtttgatggttagcgccaagagaaaggccgcagcgggggtgaccattggtaaacttgtcgtgaaatgggtttgacatatgagagatattttggtccggggtcacttgagcgtaaagtacaattatctttttcgaaattatgatgctcaggtgttgggggaccactagatggttaccctttcactgttaactatagaattggcgttggtcagaaagtccttaaatgagtgaatttgacttgtgcatgaaactctttctgaacgtgacttttacctaggagtcttaagggggattgcgaaacttggtttttgcaggggttagaaaatgcccttttgatttcagctttttggggacattctgcaatcagatgaaacattgcattcctgggtttaagagagactggcacgtgttatctccgactgttaggtaataacgatgttagacttgtttctctcgtgagagacatcaggtatccacgcactgtgggcgtggcgccatctgcgaacactccctggcgtctggaaattcattcacccttctttacggcatttgtgtaccattggcgggccagtgc

SEQ ID NO: 525988 - DNA, 636 bp, Homo sapiens
ggagcagtgtctcacacctctaatcccagcactttgggaggccgaggtggacagataacctgaggtcaggagttcaagaccagcatggccaacatggtgaaaccccgtctctactaaaaatataaaaattagctacgcatgggccgggtgcggtggctcatgcctgtaatcccagcactttgggaggctgaggcgggcagatcatgaggtcaggagatcgagaccatcctggttaacatggtgaaaccccatctctactaaaaatataaaaaattagccaggcatggtggtgggcgcctgtagtcccagctactcgggaggctgaggtaggagaatggcatgaacccgggaggtagagcttgcagtgagctgagatagcaccactgcactccagcctgggtgacagagcgaaactccgtctcaaaaagaggcaggagaatcactagaagctgcgaggcagaggttgcagtgagctgagattgtgccagtgccctcctgggcaacaagagtgaaactctgtctcaaaaaataaacaaggccaagcattttcccattaacatggtattaagaaatacgtagccataattttaagggtctttataggtggtgatgatttgttaggtcccattttttgcg

SEQ ID NO: 525989 - DNA, 370 bp, Homo sapiens
acatttttcttggccaggcgaggtggtcatgcctgtaatcccagcactttgggaggccaaggtgggcggatcacttgaggtaaagagttgagaccagcctggctagcatggcgaaacccagtctctactaaaaatacaaaaattagccgggtgaaattagccgggcgtggtggtgtgtgcttgtaatcccagctactcgggaggctgaggcaggagaatcgcttgaatccgggaggcagaggttgcagtgagccaagatcaggccactgcactccagcctcggggtcaagagcgaaactctgtctcaaacaaaaagaaagaaaggaaggaaggaaggagggaaggaaggaaggaaagagagaaagaaaag

SEQ ID NO: 525990 - DNA, 306 bp, Homo sapiens
  misc_feature (1)..(1): n is a, c, g, or t
naactttgacgatgatgaaaagcgagggcactgggggttgggctcaacatcttattcactgaacacgaacctcaactggctattcctagacatttcattatgtgagccaaataaacacctattttaagtcaaaaaaaaaaaaaaaaaaaaaaaaaaaaaaaaaaaaaccccccctttttttttttgggccgggttggggacaattttaaaaagggtaggggggggggggaaagggggaaaccccaaaaaaaaaacgggggaaaaaccccctaaagggttgttccctcccaaaagggggaaaaaacg

SEQ ID NO: 525991 - DNA, 177 bp, Homo sapiens
gtcctctgtaggctaaaaagatggtacctttgaattgtaagagtcatccctggaactcagatacatgaccttcaccttaaagcatgtggctctctctttaactcaggctggctgtgaaatttcagcattaagtcgtacagtggatttagtagtagcacaggtgatggcctttgactc

SEQ ID NO: 525992 - DNA, 224 bp, Homo sapiens
gatctctgaggaccccgaacatagcgaggctcgctctccttgccagcgtcaaagatgatgtctctgttgtgcctggatggtggaaatgcttctcagaagatagtaggggccactcggatgcagctcctcttatccagccttcccctgggcagggatggggattccctgctgatcttggccagggatgagtgcctgtgacgcccaggtcttgctgcaaagtttct

SEQ ID NO: 525993 - DNA, 161 bp, Homo sapiens
gtcggacctgcttacttggcgttgcccttttcctaacactcacaaagctacagtaatactaacatctcagacgctcagtgaaatatgaaagcgtctgaactatcctgccctgtcatcatcctagtcttcatcgccctctcatccatacgcccaggtcagca

SEQ ID NO: 525994 - DNA, 1168 bp, Homo sapiens
  misc_feature (187)..(187): n is a, c, g, or t
  misc_feature (308)..(308): n is a, c, g, or t
  misc_feature (341)..(341): n is a, c, g, or t
  misc_feature (353)..(353): n is a, c, g, or t
  misc_feature (391)..(391): n is a, c, g, or t
  misc_feature (411)..(411): n is a, c, g, or t
  misc_feature (470)..(470): n is a, c, g, or t
  misc_feature (478)..(478): n is a, c, g, or t
  misc_feature (560)..(560): n is a, c, g, or t
  misc_feature (615)..(615): n is a, c, g, or t
  misc_feature (648)..(648): n is a, c, g, or t
gcttctacataaaagctgattctgactgcgactctcgaaagctgatctgctaattagtaataacatggagtgagtgacgagataacactaccttgcattccgttaactgtcagtttgcatctcctcacatgcaccagttccaaggggagtctcgtggatcgactcgttcccatcacctccacttagncccgtgttctcgctagcgaatataggctcgttctgacaagagatacttgcgtatgcccaagggtcaaccccagattgcagggaggcgttgaatagatcaccgcatttccctttctctcagnctatcgtggggaagccaatcatacgaagaccangggtcatccagntgcgttcatcgcgagctctccgatgtagtgtgtcaccngaattttggaggtagtggtntgtctgtggacattcttcgattcgccgtatgtatcataccacgctgttcggtaagagtntactgcgngcgttcgtggcatactgttggtgggagattatgtgggtatatgtgtgggccttcgtttgtccataaaagacgtgcctaagcncatttgcctatgtatgtgcccacgtgtaacgtggtcttttatgccagcctatatncatacgccttcccgtttctcttccccatgttgnttccgacccgggactggtttcccgtattcggttactctagaactcgcggtctcttcttacctacacacgtggtttaccaattcacaaaggcctatgttctaccctaacgtaagcagaaatcgagacgaacgataagtttggaacccaggaatttcccttgggacacatatatgggtacttggcggttgctaaatattccccccctaggtaactgtgcaataggcaattggtcgatggtatccctgtccagtttatatacttcattgttagcccatgattgaggttttaattttcaatatacgacttttctaaagtcctccgtctagttttaacttgattaaagtttccacgcatcgttgggggggggcacctgtgttaccgtttcggccctatcttttgagaggaaccaatatccgtaatttcggttgagacctaatctggaattcgcccacggcttctacatggggatgcgtggaatttccctagttggtccagggtggcggcatttccctcgttggcg

SEQ ID NO: 525995 - DNA, 540 bp, Homo sapiens
cactttggaaaactatgtcctacttaagctgaacataagtaagccctatgacccagtaattccatccctgggagtatatcagtatatgtgttcacataaagatatatattattgagtttgtaggtacactatttataatataaaagcactatttataatataaaagagtgaaaattacccaaatgttcatcaacagcagaatggataagtaaattgtaaaacatccccaatgaaataccatattacagtgagaatagattaactacatctacacacaaacataatgtttagcaaaaaatatgcaaggtacttcatttgcataaatacaaaactagataaagcaaatctatacaagatggcaggataatggttacccttggggcaagggtggtgactagatgaagacaggaggagggcttctggaatgtggcaatgtcctgttcttacgaggatgctagttggttgggtgtgttcagtttgcattcttctatatgtatatcatacttcaataaaagttcaaggagaatcatcaaaaaaaaa

SEQ ID NO: 525996 - DNA, 222 bp, Homo sapiens
aagatcgtctcatatacttgggacggctgaggcagagattgcttgaggtcaggagtttgagacagcctggcaacatagtgaaaccctgttgctacaaaaaaatgtaaattagccaggcacagtggcatgtgctctgtgatcccaacctactcggtgaggctgatgagtgcagcgcggatcactttgacgactacggacggttgcaggcttgcagatgcagct

SEQ ID NO: 525997 - DNA, 770 bp, Homo sapiens
cctgtgcctcgcgtctggcgtgtctgggcccttgcgggctgagtgggcgcccgctgccggccgcaggaggcctggggatgacgcggctgagaggggccggcccggcccgcccggagctgccgggtccttggttgggcggcggtgcccgggcgtcccctgctagacactgcagcccgcgtggaactccctggcgggactggttggggctggaggtgaacatggacgccctgctctcgtgcctcccttcccgggcctggcgctgatgggcatgcctgttggttgggtttcagggcctgccttgggcagaagtgtcactgatggactgaggtgctggcactgccccgtgctccccgacgggcctggtctaccagatcttcctgagcctggtgcccggccgactgtgcttggccgccgggctggtgtgccgccaatggcatggcctgttgtcggcgggacgagttcctgtggagggagcagttctaccgctactaccaggtggcccgcgacgtgcccctgacacccagctgtgccatgtcctggtacgaggagttccagcggctgtatgacacggtgccctgcgtggaggtgcagacgctgcgggaacacacagaccaggtcctgcacctcagcttctccataccgggtaccagttcgcgtcctgctccaatggactgcactgtgaaggatctggagcaacgaactgaccatctcgctgcttgcacaggtgcggacatgcgggccctaaaactggagctacacccagtatctac

SEQ ID NO: 525998 - DNA, 96 bp, Homo sapiens
gggcccttcctggcctggagaaggccttttacacacacacaacacatacacacacacacacacacacacacatatcacagttttcacacagcccct

SEQ ID NO: 525999 - DNA, 108 bp, Homo sapiens
ttggttataatggagacagtctcactctgataccccaggactgagtacagtgatgaaatcacggctccctgcagccatggacctatccgggctggtcttgaactcttt

SEQ ID NO: 526000 - DNA, 227 bp, Homo sapiens
ggcagtcgttgtcagccgcaagatatacagtaactgccggtcgtttgtgcctcatactagtaactcactatataggccctacctgcgacaagtactctcatcaacaaccgtctattcaccgtcccatagaatgtactaagtcaaactaacctcaaaacacatgataaccatacacaagactaaaggacgaacctgatctcttatactagtatccttaatcattttta

SEQ ID NO: 526001 - DNA, 238 bp, Homo sapiens
ggcctttgctcatgccttcccccacctgaaacacatccctatggcttccctaggatggctcctcttcattttcagacttaagctcaaaatcacatcctcagtcaggtgcagtggtcacgcgtctgtaatcccagcaattagggagaccgagacaggcagatctcttgaggtcaggagttcaagaccagcctgtccaatatggtgaaaccctgcctctactaaaaatacaaaaaaaaaa

SEQ ID NO: 526002 - DNA, 1018 bp, Homo sapiens
gcttactgagacgggttgtgagaacttaactgtggggggagacagggctatctcagatacctgaatctcccgataaagagagtccatggtgcgcatgtacttgatgtgagatctcctcccgatcccgggcgtgcatcatgttcaaactgtctgagtctacgagctgtggcttagtatatcattgactaagaatcagtttagagataagtagaagttgttgactattttctaggtgcgatgtaatgggatttatttctgggtgaatattctatggcaaccgggtaaatggattatcgagaggtaggttatctgaagctttcatagattgcatttgtggaagttagagcattgaattcaccggtgtagatcctgatagaaatgttcctcattagaatccatgcatagcgtttgagctggttggggcacatggatcgagtgcccctaggaatgggtattcaccttgtgtttctgaagcgggaatagcagagttgtagaggtgggtcctagtcgcatgtctaagagaaaactttcctgtacatatggatgcagccaccaaatgttccattctttttgggcatgaagagatgaagatttaggattaaattccaggaggaaagtactgaattagagagaagatcaggattatgaacttcttcatttgttcgtgcaatgacgttggtgagcatagaaagagagggcctaccaagatctttgtagcgtatactagcttatgcatatgtagtaaattgatgttaaatactgggtttgcacttggaaacaacattaaagaggatttgacaaattacttaattaagccatgttaatgatatggtcatctcaaggtaaaatggaggtggaatgacaactaagcagtgcaatttagtttggtgactgctgatgggaattctccatggggaatcaaacttgggggttaggcattttggcgacggactggagtggggggccagaggggctcgggaaatctcttgggggggggaataacaggagtgggaggaac

SEQ ID NO: 526003 - DNA, 812 bp, Homo sapiens
gccgtgagccggccgacgtctccatgcccggatggttatcggtgactatcgttcctagctccggcacctatccagtcctgggcagcgcgctgagccccagcaccacgccgcaacttctacgcctcgttccccgggcatcgtgtatgacacgcggctcctctgccgttgcgcctagcggagcaagcagtgccccggggttgcggactattgcaaggatctcaggtggacttctcgctggcagacgacatcaagaccgagtacaaggaataccagcaaccaaggagaaggctggagctgccacgagcttgaaatgaccggcgttcggccgaatcttacatctgacgaaggtgtgcgcatttcacctggagtcagcaatgacataatgatccttgctgcgcccgagcgtcacagcgaggtcaaatgggccaaggcaaagttcgcgcctggtgggaaccttctacgaagggaggagattgcgtggtagctgcgcccgtgatatcgttggtaccagccgtaaccaatcgagcaaagcgccgcgtatgaagtgtgaaagcgtggacaaccttggagccaggaacaataatccaggccatccggagggatcaaacattggctagggaagcgaagaatgggctatcaactaggaaacagcgaacagtcggaacaccatgatcatttgctaagtctgtgctaaaacgagaatagtttgacaaattgcgttcctctggggacgggcctggggacctgtaggaacggcgaaattagggaaatcatatgctaagaaagaacattggcctctttgagaagcaaac

SEQ ID NO: 526004 - DNA, 467 bp, Homo sapiens
  misc_feature (10)..(10): n is a, c, g, or t
  misc_feature (31)..(31): n is a, c, g, or t
  misc_feature (58)..(58): n is a, c, g, or t
  misc_feature (68)..(68): n is a, c, g, or t
gttacaaaantttataaagcaaaacctgaantttgtccacttgtaaaagggttataanggacaaattnagaaaacagattttgattcccctaaacccatgtatttcctcaagcctgcctttccttgtgacccattttatacctacttcaggctccctgatttcaaatacatttttaaagcaccctaaataggcccaggcatagtggctcacacctgtaatcccagcactttgggagactgaggcgggcggatcacctgaggtcaggagttcgaggccagcctgggcaacatggtggaacaccatctctaccaaaaatgcaaagagttgggtgggcgtgatggcacgtgcctgtagtcccagctactcgggaggctgagatgggaggatcgcttgagcctgggagatggaggttgcagtgagctgaaatcgcaccactgcactccaacctgggtaacagagtgggacc

SEQ ID NO: 526005 - DNA, 549 bp, Homo sapiens
tgggggaaacgcggagtgagtttttccgtgctgatgtaggggctaacaatggacacccagaaggatgttcaaggctccaatagtcagtcaagcaatgatatatatctgtggagagtgtcacacagaaaatgaaatataatctatgggagtccgaatcagagtggcagagaagtgtggataccgaataatgtacaaagaagaaggactaagagagataggtcgtgttgttgatgctcgatgaatgctgggagagttcagaggagatgtcttcacttatatcttggatttgctctcttcccatgtctgatggtgtatagctttcgattccgcttacaggtagttcccccttatcttcgggcagatacattccaaggcccccagttgagactccttgaaaactcaagacgagtaccgaaacctttatagagcgtgtttttgttccatatatatatacctatgataaagtataggtgtataaattaaggcatagcaagagattaataataatgtaatagaacaatgataacatactataataaagagttatgt

SEQ ID NO: 526006 - DNA, 141 bp, Homo sapiens
ttcagttgagtagttgtctaaactagtacactgaagtttattccatctatgtgaagatatgtgagatatcacaggctacagtatagtgggataatgccagaagtacatttagtgaaaatatgcggcccacatgaaagttac

SEQ ID NO: 526007 - DNA, 598 bp, Homo sapiens
cccgcgggggggggaagccccccccctgttttttcctccaaaaaccccgggggcctttccacctcccgtttttttcttggccgggggggggtattaattttcccggggcacactttccccctttgcctctttttggggcctctataaccaatttgttccaaaaaacagggggggcccgggccggattttccgggatttttttaccccccggggcccccccccggcccctttttttgggccccctaaaaaaacgggggtccccctgggccccccccgggggtttttttttccccccggggggcccctggttttccctttggcccccggggtgggggggggggggcccccttttgcccgggggtttttttggggggggggccccccccccccaaaaagggggcccccctttgggggggtttccccaaaccccccccggggggggggggggttttcccccccggggtttttgggcgggggttttttttttttggaaaccccgggggggttgttttcccccctttttttggggggccccccccgggggtttttggggggggttttttttttttgccccctaagggttttttggggtttttta

SEQ ID NO: 526008 - DNA, 167 bp, Homo sapiens
tccgggagacacaggttgtacgggagggcaggcggtccagccagagggtaggaagaacaggttgtttacctggatttccataggatccaggtctgaatgagtgctgggtggggaaggggaggtgcagggaatgaagaatcctatgcctgctgtcgggctagtcgggg

SEQ ID NO: 526009 - DNA, 1704 bp, Homo sapiens
  misc_feature (297)..(297): n is a, c, g, or t
  misc_feature (385)..(385): n is a, c, g, or t
  misc_feature (1318)..(1318): n is a, c, g, or t
tggataaaatacaagtgtgggccccagaattcttttaacgtcaaggaaatgaataacagcgtgggtcagagaactttccttagtggaaagaaaagaaatttttatagaatactatcattgagggtgtggatagtggataatagaatatattctcagaaatagcagaggtgggtggttatagtcttactccattatcttatagggcgtgcgtgcaagaaaattttatagagggttaatagaaataagagccgtggtgaatattttatagtgccaaagaagctgtgggctctcataggnatatttgtggagcggagcccacaaatatacgaggagaaatttatacaaagaggtggatctgtggggtaaaaattcttacaactagcgnggctcctcgtggttctctctcacaagagtatagagtgtggtgtgtggtgattgtgtggtctcctctcattagcgtggcgaggtggagtatcaaaacagagaaaaacagagaaaaacaccaacaaacatataaattatttaaaagtgtacggtgtctccaagtgtgtggtggggtgaaaatgtgtggggttatatatagaagtgcccaaatataaacacactttataattgtgtgtgtgtgtgcatattaaaaaaacacacacaaaaaagagagggggggcggggcgcgagcgactcaaaaagaaaagaatataccccccgcgaggaggggggccccccaagagactctataagcgcggtagataccccccgagggattctctcgtgtggttcacacacggggggggggctccccaatatatgagcggtgggagggggcgaaaatatataaaaagaggcgcactaagaggacacagcggggggccgcgggagggggtatatacacccaaagcgtgtctcgcggcgggacactgcgtggggcaacaccacgcgggcggcataaaccccctcggggggcggacaccacctcgtggcggggacaccaaggaggaacaccccttttaatactctccggtcggggcgggcgggcgggagcaccccacaacagcttggggggcaccacaaaatctttccatccccacaacaagagagagaattttatcaaaacgacggcgccccaccagcggggggcacacactcatttcaacacaacaacttttctacaccaacccggcgggggcgcaacaacgggcgctcggtggtcaccaccaactcacgcgcgaggcggaaaataatagacctgcaggcgccaggcggttcttgagaaaacaacactatcggcacggcacacaacgcaggcaggaagaagtcaacnctctcagtgagcgcagccactaatttttatacccaggagggcgcgcacaccactatactatcagtacatcatacaaccagcactaaacaatacaaaaataacaaacaacacaacgatcaaaaacaaccgaaagacatgaacgagaagagtgctgaagaaagagataaagatgaatccatcgacgagtcaggatactacaaagagccagacgaagagtatacgtaacaagtagtagagaagcgcgcaagggttgacgaactgcagcgaaggaaaagacagacagcaccaagataaagaaagaaaacaattattaaacaaacatacaaaaacagagaaaatagtaacaaagaagaaaagacacacacaagaagaacaaatacaccaag

SEQ ID NO: 526010 - DNA, 494 bp, Homo sapiens
agtgcttatgctgtgcccttctgctgatctccagcatcttgatggcgtacactgtggctctggctaactcctacggactgcctcatctctgagctcaaactgtcagagagacgacggacggcgcagaataaaggtcttacctggtcacgtgcgcgctcgtggcgtctgacctccgaccaaacctggctcttatgacccccgacagtccactgtcccagctttcatgaccccacgtgcttcagtgcggactctgcaagcactggagcttgtctgcctggacaattgaccacactcgaacgagcttggcgccaatcgaggaaccaacatagtgccgcatccccattgtctacagaagactgaaaggacttgttggtgactgaggaacaagatgtatcccaatgggccatcagtgcggctcagagacagcaaactgtctcatccccatctcaggatgtacttccccatgtcctgctcgatccactggtacatgaagc

SEQ ID NO: 526011 - DNA, 477 bp, Homo sapiens
  misc_feature (27)..(27): n is a, c, g, or t
  misc_feature (36)..(36): n is a, c, g, or t
  misc_feature (62)..(62): n is a, c, g, or t
  misc_feature (467)..(468): n is a, c, g, or t
tttgcctgtttaaaaaactcccccaangtaatgccngaataactgccctaatgttttttaanggcaagaaggctgtgaatgatatgcccttttgtggaaaatacatgtgttagaacaagtttccatttaggcatgagttaatagtgctgctgttcgtgatctcaatattaatgaatcaacaagatagcccaggcatggtgtctcatgcctgtaatcccagcactttgggaggctgagacgggtggatcacctgaggtcaggagtttgagaccagcctggccaacatggtgaagacctgtctctactaaaaatacaaaaaattagctgggcgtggtggtgcatgcctgtaatcccagcttgggaggctgaggcaggagaatcatttgaacctgggaggcggaggttgcagtgagccaagattggccattgcactcccagcctgggcaacaagagtgaaactccatctnngaaaaaaaa

SEQ ID NO: 526012 - DNA, 908 bp, Homo sapiens
cgtaggggcacaatgcgagctgctgctctgtggctgtgccttcaccctcgctgatgtcctcctgggagccaccctgcaccgcctcaagtgcctgggactgtccaagaaatactggggaagatggcagccgggcaaacctgcagtgcttctttgagagggtacagagacagctttgccttccggaaagtcctgtatgacagccacaccaccctgctggcggcgcgtaatcccctttgttgtacgggtgggcaagaggaaatatcgcatcagccttgtgcgcctgctcgccttaaggaatcactgagggggatggtctgcttgcgccgagccaggtgcacaagcagcagtgctgtgcgcgagtggagaacgggaatatggcgtgcggagcggtatgcaagtaaagggacgggtatcgtccggcccacgtgatatttagccgcggagcgcgagtgctcgattcagacctataagaaatctacatgtgctgatattgcatgtagttttgaggtggtgtgtatgagatgcgtattggtgcataaactttagcttgatacgcgaagtagctaggtgagccgacggtcgtacgtcgaagtgtccagcggcgcggtcgctaataatcgatgatttgggcaattctcaatgaatatatgtttgtagagggccggcgcgacgcacgtagaagataggtgagagagcgggccgagtgtgcgggcgcgcgcgtgagatcgggtcagtcagtaatgctggggcggggggagactattatgcggtagctgaggcggagagtgcagtgatggatggaggtactgtgcggtagatgggctgctgcgtagtgcgaaatacacgccgtctgcgcgggtgctgacggtgacgatcaaccgttgaacaagtgtaagctgaacggcgag

SEQ ID NO: 526013 - DNA, 113 bp, Homo sapiens
cccgacacccgacagcatgagggagatggggtaggtggagttgagggagatggggtaggtggagttgagggaactgggcagggcacagtcacatcctgtcgggctagtcgggg

SEQ ID NO: 526014 - DNA, 284 bp, Homo sapiens
gcctcagatacactttctcattcttccaaacatcaggctgggatgccattctgtcacacattttcccctgccctcaggcatgtatacctgcaggcaatcaaggtcacaggcacagcatgtcagccacagtccagcctcatggctttcacgtagctcagcgtggccatggcatcctttcacaggcacagccaggcagcggcagtatggcgcacagcagcagcgcacagggcgtcgcacagtatgactcatcctcttctcacacagcggcagcagctgcatatttc

SEQ ID NO: 526015 - DNA, 221 bp, Homo sapiens
cctgggggttttcctcacctgaggacccttcaaagcccccctttttagtttgcatttcctggggcccacatttaaggcataacagcccattcatccctttggtttggggtttcaggaaaacagtcccatgcaaaaattttttggttttagggcttttttccctttttttaccccatcctttcccataagcacccatgtctttgaatatgaatgtatttgta

SEQ ID NO: 526016 - DNA, 237 bp, Homo sapiens
  misc_feature (40)..(40): n is a, c, g, or t
attcaattggacgaacgattaattcggcgttgcaactttnaaaaatggggtggtggtgtcggcattaacgtgtcgaacttgcgtgaagcaggggctcccacttattgggatcgccccttcagcaggtggcgttgtgcccctcatgaagttgttggaagactctttcacattttcatcacaagttggggcacgacaaggggccgggtgttgtctatttgtcagtgttccctcccgaca

SEQ ID NO: 526017 - DNA, 860 bp, Homo sapiens
  misc_feature (17)..(17): n is a, c, g, or t
  misc_feature (81)..(82): n is a, c, g, or t
  misc_feature (84)..(84): n is a, c, g, or t
  misc_feature (86)..(86): n is a, c, g, or t
  misc_feature (99)..(99): n is a, c, g, or t
  misc_feature (103)..(103): n is a, c, g, or t
  misc_feature (113)..(113): n is a, c, g, or t
  misc_feature (123)..(123): n is a, c, g, or t
  misc_feature (133)..(133): n is a, c, g, or t
  misc_feature (135)..(135): n is a, c, g, or t
  misc_feature (142)..(142): n is a, c, g, or t
  misc_feature (176)..(176): n is a, c, g, or t
  misc_feature (180)..(180): n is a, c, g, or t
  misc_feature (186)..(186): n is a, c, g, or t
  misc_feature (222)..(222): n is a, c, g, or t
  misc_feature (239)..(240): n is a, c, g, or t
  misc_feature (244)..(244): n is a, c, g, or t
  misc_feature (270)..(270): n is a, c, g, or t
  misc_feature (278)..(278): n is a, c, g, or t
  misc_feature (293)..(293): n is a, c, g, or t
  misc_feature (324)..(329): n is a, c, g, or t
  misc_feature (361)..(362): n is a, c, g, or t
  misc_feature (375)..(375): n is a, c, g, or t
  misc_feature (420)..(420): n is a, c, g, or t
  misc_feature (484)..(485): n is a, c, g, or t
  misc_feature (524)..(524): n is a, c, g, or t
  misc_feature (527)..(527): n is a, c, g, or t
  misc_feature (772)..(772): n is a, c, g, or t
  misc_feature (797)..(797): n is a, c, g, or t
  misc_feature (839)..(839): n is a, c, g, or t
ttattgttgtgtatttnctcccctttttgcaatactatctatcgctgagttatctattgccaactagcaccaattctccanntntnagtgtgtgagggnaacncactcgtgcnatcctctttnacagaagatncnccaagtnacctgtctgtcttcttctgttacccagaaataangggncttgangggctgcttggctgggggggtccgggtgggggagcntcctgccctcagtcggnntccntggtgaacagctgggtgtcctgtggnttccagtncaggccgactgctgngttgttgacaagagaccagacattgggggtnnnnnnctcctcgggctgctcctcttccacatttttgnntttcaattctggnaatttcttcagtctgtctttgggcagcgcaacgacgccttgcttnatgatttccaggacccgttccactgacagctcagctccagcttgcagcaaccttgagctaaagnnggggatctccaggtcaattttttgctttttttcctgatntgnaggatgagttcggaattgttcaaagagatcgcgtttgttaagcagggcgttttccaagtttgggttgtggtgaagggaatttgtcaggcaggagttgatgatctctaacatcattcgaatcacttcttcaatgacatttaggtcttgtgcataatctggtagaggaacatcattagaactcagcgaacctctcaaggactgtgtggcttgttccagaactttgttgtgttttttagacagcaaanaaaataaactgatgatcctctgggnagcatactgatggagagaacgaaactgtgccgacatattttnctaagctgccaaacaatttgt

SEQ ID NO: 526018 - DNA, 419 bp, Homo sapiens
gctacatgagaaccatcatcgtagttagtatgctgtctggaggtttgtacagagcatcactctcaccctgcaggtgtgcgtagccctcagctccctgcagagaatcacgctgctcatgaaggttgtggaagggcacgcacccttcagtgccacctcgctgcagaggcagatctaagctagtagcatttgttgcaagcagtccttccgtcatgggacaagaccgaaagggtagagggacatgaaatgcctcatggaaaaagctgttagatactaggggaagctagatcaatatgtgctcctctgacgtgccgttactcagaggtgggtggccgtctcccttcctctgtaccctggtgaagagcggtgcagtgccgtcactcaaaggtgggtggccgactcccttccctgtgtcctggtaa

SEQ ID NO: 526019 - DNA, 234 bp, Homo sapiens
  misc_feature (78)..(78): n is a, c, g, or t
cagataaatcgagccggtaccctgtcgataaaagcaatctcatcatgcaccatcggcatttcgtcagcatggtaagancatgcctcccaagacggggcttatcttctactttaaccggttcatctttgtgagagtgacaggggaggctttggttaacgcttcttgttcttgtttcgctgtgtgttgagtggctcgatctatattagagctgggagaacacgccgccaggctaag

SEQ ID NO: 526020 - DNA, 438 bp, Homo sapiens
ctgagacgctggaagagactgcagcagagatgagcacttgtgagctctgcaagtcatgtatctagaggtatgcgactctgcatgtactaagtgttattctcttcaggaagtgaaccttccctggtttaccttttttctgggaaacagccaactgcactccagtcagtaggaaagtgccacaattgtcacatgaccggtactggaagaaactctcccatccaacatcacccagtggatggaacatcctgtaacttttcactgcacttggcattatttttataagctgaatgtgataataaggacactatggaaatgtctggatcattccgtttgtgcgtactttgagatttggtttgggatgtcattgttttcacagcactcttttatcctaatgtaaatgctttatttatttatttgggctacattgtaagatccatc

SEQ ID NO: 526021 - DNA, 276 bp, Homo sapiens
  misc_feature (99)..(99): n is a, c, g, or t
ccggcaggcaggttgtcgggaggagacagccaaggatagtcaaagcgcgctctcctacgcgcagctgatcgtgcaggcatctcctccgccaggaccggncagctgacctgagcggatctacgccacatcaccaagcatataccctactaccggacggacgacaaaggctggcagaattctatccggcacaacctctctttgacgcgttactttatcaaagtcccacgtcccccggaggagcctgggaaggggtccttttgacgagacctcctgccg

SEQ ID NO: 526022 - DNA, 328 bp, Homo sapiens
gaccttgtcatgtctgcattgtcatgtctatgatgatcccatcgcgaataaggctgtgcagaggaagactgccctggcagtactgtgagtgagacgttggatgctctctcggcacagttcttctctcagcatagtgcaggacacgtcatgctaatgaggtcataaagagaacgggttcccttaagagatgtcatgtcgtaagtcgctctgtctatttggaagctctctacagtccccccaaaatatgaacttttgtgcttagtgagtgcaacgaaatatttaaacaagttttgtattttttgcttttgtgttttggaatttgccttat

SEQ ID NO: 526023 - DNA, 150 bp, Homo sapiens
  misc_feature (39)..(39): n is a, c, g, or t
taatacacacacacacacacacacacacacacacacacncacacacacacacacacacacacacacacacacacacacacacggtcggggggatagacagcaatgtccgtctatccacatatggcccagtgtgtgacctggcagcagtgc

SEQ ID NO: 526024 - DNA, 547 bp, Homo sapiens
cagaggatccccgtgggagagggggtctcaggtttgattgggctctctcaaaatgccaggaatggatttattaaattaatccatcaacctcgcatagcaaatatgggagaaaacaaatttatattcagattcttatttacagtagggaagtaagaagtggcagctcagggcacataaagtggagacagagagggagacatccagccccacctctcgggaacaggaaagaggaggggggaggaaacacaagtcagcaggggaacaggggtcacgggggacaggggggtgggctggtctctccacctcctcacattatgctaacagggacgcagacacatgcaggtgccttggcagaaagagatgccagaggctctggaagtcacaagggggaggcgtgaagaaatccggcatctcagtccctcacaagacagcggtctcaggctttccaggcggtgagagacacatcagagcccggggcacggtcgcggcacgcagccggagagtagctccctccttttccaccggagctcttcctcctacacatcac

SEQ ID NO: 526025 - DNA, 216 bp, Homo sapiens
cgagagtgcgtcaatatgttgtcctaggaagcattgtagtggtgcgggtgttatataataatgtctgttgtatacggctcggcctcctcatctattctagccacctctagcctacccgtatactcaatcctctgcatcaggctgcagcatcaaactcaaactacgcccatgtatcggtgtactgtgagacgtagaccctaaacaatctcatatgaa

SEQ ID NO: 526026 - DNA, 892 bp, Homo sapiens
tatgagggccacgggtctgtgttcgacttcagccctcagggacagacttcttgacctctctttggccacagaggacctcactttgcccacaccagggggcagacccctgtcacagccctcaagtcacctcccaagccccctcctttgtctgtgcactccggggggcacgcctctgtggaggggggattgtgcgtgggagaacttggcgcgccatatcgccggggactctccaagaacccgcaaaaggcctctcccacagcttcacccctgtgtgagggacgggcgcggctctcctcatattatgcacccaggggctctcaccgtgtgtgggaaaccccgcgcatccacaaccacaccacggcacaacaaaataaaagaatcgtgcgcccacaccttcacagcccttcacaaaaacaacaaaaaacaaaaccaaaaaaagaagaaaaagaaaaagaaagagaagaaagacgacagcgcagagagaaaaaaaggcagcgaaacaacagcggcaaggagaagcgaggaagaggagcacacagccggagaggggagagcggcagaaagcagacagagagacaagagcgagcacacagagcacgaagacgacaagcagaagagagagagaagcgagcagcggcgcgggagaggacgacgaagcgagagcagcgcagggcgcggacccccacagcggcaaagcgagagagcgggcgggggcgcggcgggcaggggaggcggagcgcgcggaggaagagcaaggaggagccagccgggcgggcgggtggcgggacgctcgcggggaggagcggactcgcgggctcggggaggggggaggaacgagcgggcggggagcgcgggaggcagggaggggagagggaccggcggggcggggggg

SEQ ID NO: 526027 - DNA, 855 bp, Homo sapiens
tacaacgtgacaggaagaggagggagagggtgacgaacaccaggcattcccaggggctatattccactgttggtggttgcttggtcctgttatatggtgggtggtccatagttttggttgaagctctagcttaagaagaaactttttttaaaaagacggttgggggattcttttcccttattatatactgattctacaaaatagaaactacttcatttaatggtatattatccaagcaccttggttgaagctcaaaaaaaatgatgcctctttaaactttagcaattataggagtattatgtaactatcttatgcttcaaaaaacaaaagtattggtgtgcatgtgtctataatatatatatatacatatatatctttatacacatacaatttatgtttccgtgtggaagttgtattttatgagatttcacccagaacaagagaggcagataaacgaggcattccatagcaggtgctttggatcacttacaaatttttggaataacacaaaatctcattctaccgtgcagtttaatgggcaccagatgctgtgtcgttgagagtatgtatgtcgtgtgtgtgtcgtgtgtgtgttgtgccgcgcagcacgcacgcctttgagccagtcagcatgggcccgtgcttgggagaggtatccctttataaaaatctgcgtcatgtggatttccgtcacaggggctttcaacttggctcgtcgccaaaaacatgggaggccagtccttatcggctaagaaaacaggccgggaatctctcctctctcttctcaccccccggtggcgacccctctgcgatattgccccaaccggggcgtcttggaccccccactaaaggcgg

SEQ ID NO: 526028 - DNA, 942 bp, Homo sapiens
ctgtctgagtgccgacgtgtcagcgcctgtcctcgggctggaaagggcagagcatgtgggtgaggtgagccagaagcccaggtaagcaccattggtgctgggcaggccagccagctgcaggcatcgctttcagtggtgcagaagatccagacccagcctcaaggaatgggatggtccagagtgcctcagtgatggaccatgtgggcattgccaggaggaacacccagtggcgtgcggaaatgaattattatgctaatacttccaaagaacgaacctgtcaaaggttccatgtttccaactgaacccatgttcctccactactacttggcattttcttccaccacggccgttcctgtagactagccaagatcagttcctcctccttctgctcctcctcagacccacgttgacgtgaagacgacgaggatggagaccttgatcgtgccccactcccacctagaatgaatagtctgtagattttctcttccttaggactttcttcataacattttcctttctctatcttactttattataacaaatacagtatataacacagatgcaaattatgtgttaattgagtttttatgttatctgtaaggcttccagtcaacagttggccctcaggagctcagttttgggggagtccccacggttgtatgagtatttttcactgtgtggggatccagtgcccataaacctcaggttatttaacggtctactggtataaagtaagtattgcgctcctaattacaattagcagcttacaattttttgtggccttagcctggtacaagtgcttcatatgctaacaattactttttacccagcccgtcttttgttaaaaacgatccctcatttttttttctgttccccacttacatggcataaacaggggatacccgaggcacaaacaattttctcacctggtgcacaaaaccc

SEQ ID NO: 526029 - DNA, 367 bp, Homo sapiens
ggtcatagctgactctagaggatacaaggacgtccagtagatcttgcctttttcctagacacgtttcctgccgtcctagccaagtagtgggccttgttactctgtgcatgaggtgcatcgtgagtagatcccttctacagacagtattcagtttgggctcaactgcaacatgggacccaagcttcctctcctcctggtactccctactgtgacatcataatctaggaacttctctctgcttagagatcactgaacacatcagcctgagtcatacacttgcctttacccttactattttctctacctaaagtgcttatcttttccttagctgccccattcactaaaagttcacaaatagcaccgattt

SEQ ID NO: 526030 - DNA, 174 bp, Homo sapiens
ggcacgagggcgcgcgccgggctgattcatcgagcccctcccttcactttccgctcgcgttctccggctgggctcccgctccgctgaccgacctgccactcatgactgaacacgccatctgcttcgccaaagacttcatggccggaggcatcgccaccgccatcttcaagactg

SEQ ID NO: 526031 - DNA, 421 bp, Homo sapiens
cctttctttccgtctgaattctgccatgaggaaagccaacacggatgcatacaagtgcatccacgaatctatggggaaagaagcagtgggatgtcatgcgctttcatctgagggcaccctggtaggagtatccgacagctgtatgctctctacagacttgaacgtcctaaccggcctgaataagcgcgctaactgtggtacaaggccaagataggctacgttatacataggatctgtgtgctgcggggaaaaggcgcccagttcctaatggagcaacttactgggagcctgaacatcatggctgtaaacagataatggctactctaaaccttgaaatcgttgatgaagaacgaggtgcacgccacatgggcacgatgacagtccggaagttttactgactgggccatgtgcacagactctt

SEQ ID NO: 526032 - DNA, 336 bp, Homo sapiens
  misc_feature (85)..(85): n is a, c, g, or t
  misc_feature (92)..(92): n is a, c, g, or t
  misc_feature (139)..(139): n is a, c, g, or t
  misc_feature (196)..(196): n is a, c, g, or t
  misc_feature (258)..(258): n is a, c, g, or t
  misc_feature (300)..(300): n is a, c, g, or t
tgtccgaggatctcaagctttacgaggatttggtgtgcttaagagactggaaatgtttttaaagaatggataaagccaaagaacntcagccnagagaagctgcataaatacacataatgcctgctctgcatttactaanttgttcagtttaaatagtaaactttttactcctgtggaaattttgccaaacgtttcnatacatataagattataaatcttaatactaaccctgcacagagaaagaccaagctacttctntttttttttttttaaatacagtatctctacattctatcattntcagacccctcgttaagctggggtcccgagctcgaa

SEQ ID NO: 526033 - DNA, 128 bp, Homo sapiens
cacatagatattggtctgcactctgcgggtcatgatttccatcatcttcttccggattgggcggacctgtagggctgagcataagaggtctgccggtatctgattgtgcgttattattagtaaaacca

SEQ ID NO: 526034 - DNA, 689 bp, Homo sapiens
gtggcttggggattgtaccacgggaccagctcacgtaatgcattgcctgtaacaatgtaataaaaaagcctctttcttcttaaaaaaaaaaacaaaacgacaatcaaacacaaaaatttgttgcggcgggcctcgcggcgctcaagaaaaaaggtttctccagacccccatttctgttgggggcaggcgcgggccccccagttgagttatatgcaacaatggtgggccaaaaggtggtgcccaaggaaaaaaccggtggtctgcaacatgagctggtctggggttttccccccacaataaaaaagaagccgcgggggaggaaaaccaagcagggtggttttcttggagcacaaacacaccccgcagagaggggagcgttcctcacgaggaaacggaccaaaacagggggggatctccaaaacacaagagagggggtgtccccaaacaggaggaaggctcttgcgaaaatcaaccaaaaatataggcgccccgcccgctggtgggtgattatatcatctacacaaagccgcaactcctactagaatagtagaattgaacagacaaccgaatacatagataatacacagcatagcactaatgcacagcacattgactatagaacgaacaatcatctgtaataaaatccataaaaatcaaccacagaacagcactccacatacctacaagcc

SEQ ID NO: 526035 - DNA, 415 bp, Homo sapiens
tgctgctgcacaatcaacctcagtggacagaaagacagtggcatcagtctggagactggcgtgtatgctgccgctgtgctgcctggaagccctgctgctccagactgtgtcccttgctgtgggagacaggatctgttgctgcatcaatggcattgcactggacaacaagtctctgaatgaatgtgaatctctgctgcggagctgccagtgactccctgaccctgtccctcctgaaggtatccctcagagctcctcgtggagtggccagaacatttttgcaaatatcaaagactctgataagattgcttgcgttttctgagcccatggcccggagttcccaggctcatcccaaacggaactggatacagcacaataactccgctcgatgagcactccctggggctcctctagagtc

SEQ ID NO: 526036 - DNA, 283 bp, Homo sapiens
ccggactctcctactgtatctagcacttagggaggctgaggcaggagaatgctgaacccgggatgcgaaagttgcagtgagctgagatcatgccattgcactctagcctgggcaacaagagcaaaactccatctcaggaaaaaaaaaaaaaaaattgcaatcctgttttggccatcttgtggtggacctggtctgtttttaaatttccttccatgactgagttttttttggccatactcaggaaatgcctttcttcatgttccgtgtgtgctaaaaacgcttc

SEQ ID NO: 526037 - DNA, 519 bp, Homo sapiens
  misc_feature (252)..(252): n is a, c, g, or t
  misc_feature (274)..(274): n is a, c, g, or t
  misc_feature (359)..(359): n is a, c, g, or t
  misc_feature (399)..(399): n is a, c, g, or t
  misc_feature (406)..(406): n is a, c, g, or t
  misc_feature (415)..(415): n is a, c, g, or t
  misc_feature (458)..(458): n is a, c, g, or t
  misc_feature (480)..(480): n is a, c, g, or t
  misc_feature (494)..(494): n is a, c, g, or t
gagacggagttttgctgttgttgcccaggctggagtgcaatggccgttctcagctcactgcaatctccacctcctggcctcaagtgattctcctgcctcagcctcccaagtagctgggattacaggcatgcaccaccatgtccagctaatttttttttgtatttttagtagagacagggtttcatcatgttggtcaggctggtcttgaactcttgacctcaggtgatccacctgccctggcctcccaaagtnttgggattacaggcgtgacacncacgctcggctttaattatatttctaaggcaaagagcatcctactaaatctttggggggcaccacagtgctttgggcacccattnactaggcatatatgggcaggttacttcaattaaatatttngttcatntggcaatanttaaatggatccaattaggataaatgttttcccaacctaagtngggtatttaattaagggggccncaaggtttattccntttagtgaggggtaatttttaggct

SEQ ID NO: 526038 - DNA, 1362 bp, Homo sapiens
  misc_feature (628)..(628): n is a, c, g, or t
  misc_feature (1226)..(1226): n is a, c, g, or t
agcatggcgcaagtagcctagctggagaggctcgcccctacggagggagggaggccaccgacctactgggctcgatcggactccctcactggttccctgacgcttggttgccaggcaggtgacagcgcgtccatgcgagccgccgcgagcgtgcggggcgaggcccagggcccaccgttgtacatggtgcccgtggtggctggcggctgtcatgggtcgcatggtacgacttgctaagccacatcaggcacacaacaccagtgctatcatcgttggccgtgtcctcatcttgctgagtcaggcggtgaggaaacgtgtcgcctagcatcagagaagctagtggggcccaacgaacctacaaaggttgcccaacttgggcaccactgaacactgctcctttctgcactgagtggggagggccatcaaagccgtacactgcagggcggtctataatgctgtgacacccccaggtagtcagtctcactctcagtcggtactatgagcccgcttgaacactgggtcccttaggggccctggtacttcacagcgcctgtcgactttccctgacacgtggagacggtgctcctagtggtcaacttggctttggggattgttcgcgcaacgatgnaaactcgttgcgaagtctcatctatggggcgcaagcgacccgggggagagggaattgcctggccaggagacaacggtcgctggggacgtcaatcatcaccgagttccggagatccgacaaagggggacgttgcatggaccagcgcggtgcattggaggcccgcgctctagtaccgggaatcattgggaagtacgcgcaacgtgtggcacaggaaccccgatggttggattggcgagattggcaggccaaaagcataggaggctacgcggaaaccacactaggcgacttcgcttgcgtagactcgggcccgggggatggtaaagttccgaagggggccccccatggagattgatagatgtagggggcgccgaagccgtccagataccgaaccccccattgggaaaccctggggtgggcacattacccccaatgaaaccacaggcacgacattaacggcttccagcaagaagcaacagcgcccaggcagcattcgtaactggacaggctttcatggaacagccttcaccgagcgaaaggcaaccaatggccacggcgtttcacagtaggcatgtgaggacgcaacagcccatggggcggnatatcaattggtgtccaacaggggacaggaatgcaagacgcaccccccgatgggcaataccccgttctcttgatggagcgcccttgtatcatcaaaccgatccaggtatatacgccagggaactggagctaaacca

SEQ ID NO: 526039 - DNA, 280 bp, Homo sapiens
aaaatttttttggaaaaggggggggttaaaaatgttaaaggggggttttttttaaaatttggaggttttttccctatattgggcccatttacccctaccctttttttggggggtttggggtttgggtaatctggttaaaaattgggaggagaaggggtttattttccttttttttttttttagggggggaacggccttttttaaaaaggggtttttttgtggttttggggcccccccttggtaaaaaaaaaaacccccaaaaaaccccttggttccttta

SEQ ID NO: 526040 - DNA, 327 bp, Homo sapiens
  misc_feature (20)..(20): n is a, c, g, or t
  misc_feature (29)..(29): n is a, c, g, or t
  misc_feature (34)..(34): n is a, c, g, or t
  misc_feature (38)..(38): n is a, c, g, or t
  misc_feature (65)..(65): n is a, c, g, or t
  misc_feature (70)..(70): n is a, c, g, or t
  misc_feature (97)..(97): n is a, c, g, or t
  misc_feature (122)..(122): n is a, c, g, or t
  misc_feature (134)..(134): n is a, c, g, or t
  misc_feature (163)..(163): n is a, c, g, or t
  misc_feature (192)..(192): n is a, c, g, or t
  misc_feature (211)..(211): n is a, c, g, or t
  misc_feature (271)..(271): n is a, c, g, or t
  misc_feature (281)..(281): n is a, c, g, or t
  misc_feature (285)..(285): n is a, c, g, or t
  misc_feature (298)..(298): n is a, c, g, or t
  misc_feature (314)..(314): n is a, c, g, or t
gggggtatttcagccccctntttcggtcnttccngtcnagccccagccttgggcttgggctgccnacacntgggccagagcccctgttgtgattggngctccctgggcctcccgggtggatnaagccaggggtngccccctccgggagccctggggtgagccnccggggcccccctgttgccagcctccccngtccccaacatgcatttcnctttgggggttttggttttttattttttgtaagggtcatttgtataactttaaacgcccntgatagtagnttcnaactggaaatagngaaataaaataactcngtttgcagcccca

SEQ ID NO: 526041 - DNA, 939 bp, Homo sapiens
  misc_feature (826)..(826): n is a, c, g, or t
atgtggcccaatattactgcagccccttttttgctgactggttttccagggctggaggcagctcatcactggatctccatccccttctttgctgtttatgtgtgcatccttctgggcaatggcatgctcctctacctcatcaagcatgaccacagtcttcatgagcccatgtactacttcctcaccatgctggcaggcacagacctcatggtgacattgaccacgatgcctactgtaatgggcatcctatgggtgaatcacagggagattagcagtgtgggctgcttcctacaggcttactttattcactccctttctgttgtggaatcaggttccctcctggcaatggcatatgatcgtttcattgccatccgcaatcctttgagatatgcttccattttcaccaatactagagtcatagcgttaggagtgggagtgtttctaaggggttttgtatccatcctgcctgtaattttgcgtcttttttcattttcatattgcaaatctcatgttatcacacgtgctttctgcctccaccaagaaatcatgagactggcttgtgctgacataactttcaatagactttaccctgtaattttgatctctttaacaatcttcctagactctctgatcatcctcttctcctatattctaattcttaatactgtcataggcattgcctctggtgaagagagagccaaagccctcaatacctgtatctcccacattagttgtgttcttatcttctatgttacggtgatgggtttgacattcatttacagatttgggaagaatgtgccagaggttgtccacattatcatgagtnacatctacttcctctttcctcctttaatgaaccctgtcatctacagcatcaaaaccaagcaaatacaatatggcattatccgccttttatctaaacataggtttagtaggtaa

SEQ ID NO: 526042 - DNA, 613 bp, Homo sapiens
tgtccaagcgtagtacccatacgtttactaggaatgaagagtacagaatccaacggactttaactgttctgtccacgtgttgttcacaagttccctactatgtggtgcgagataagacactctctccaagacaaacaggaaatgtgataatggtaattacttacaaactgaatatagtgttgggtactacgctttggcatgccaaagcgtagtacccaaaggaatataaatcattctaacataaagacacatgcaaacatatgtgcattgcagcactgttcacaatagcaaagacatggaatcaacctaaatgtccatcaatggtaaactggataaagaaaatgtggtacatatacaccgtggaatactagaaaagaatgaactcacgttctttgcagcaacatggatggagccagaggccatcatcctaagcaacctcattcagaaacagaaaatcaaaactgcatgttctcacttataagtgagagctaaacatggagcacatatgaacacaaagaagggaaaaacagacaccgggacctacttgagggtggcgggtgggaagagggtgaggactgagaaactacctattgggtactacgctttggcaggt

SEQ ID NO: 526043 - DNA, 195 bp, Homo sapiens
cgctctgaggatcccaaagagtgtcactcaagacgtaggacctgagtgcccaaacctaccctgtgttctattagaaaccttcccctctggatacacgcgaggggctggaagccatgctcaaaaagcttcctcgtgatggcactgttgttccagaaatgccaaccgccccgtcctacgtcttgattgacactcttt

SEQ ID NO: 526044 - DNA, 323 bp, Homo sapiens
ggtctgcaacacattgtagaaaacattggcatggactgcccacggtgactgacgcctgtgtaatctcagcactttgggaggcggaggtgggcagatcacctgaagtcaggagttcgagactagcccgaccaatatggtgaaacaccatttctactaaaaatacaaaaattagtcgggtgtggtggcaagtacctgtagtcccagccactcaggaggctgagacaggagaattgcttgaacccgggaggtggaagttgcggtgagttgagattgagccactgcactccagcctgggtgactgagtgagactctgtctcaaaaac

SEQ ID NO: 526045 - DNA, 1939 bp, Homo sapiens
tggtagtagaatcagtaactgtgtgaggaagatcaatcatgagtacatgcgaagtgacccatttggtgagacttgattctcacataataaatgcagtcaattggctcctaatgccttgtacgtcactgagctgaccactgcgcgcgtgacccaggagtcaatcgagcatagtgcatgacacgatagagcagacaccatgataaccacaacgtgacatttcatcactattccatggttgtactcgtgactacgtcagtgtgtgtcctaggcccaaacctatgcgggtcattaccatttccacgtggctgaaatctcgaaaagagacagagcgaggtcctgtaggccataggtgaccttagacttcggaccagggagtccaactacatacccttctagcataattcttgttaaggatctcgcgtaagagataagcgtgtcccccaatttcacacggtttatcttgcaagtagggccatcttaacattggaactagttgccagcagagaatcagcgtgcaaatgcgtgcgcaattcacacaggcttgcggtagcaatgagctacgtagttgcgatcgactttagatcgcgagaaggacacgtttagtcccaccgaatgtgcgcgtccgaaattcgcaaagacactaggcaaaaggtcaataagagtggtatggggctataccgagtcggaattcaggactggatccagtataggtttgatgtgccaattactctctggagcttccacaaaatcaagagtatggcttataggaaaacctctcactttggaactggccggtcgttaacaacaggtggccctaagagttgctaacagggggcgcaacacctagaacccggcaggggaggagactcccacctgggagggtaaacctctacgtggtcagagtaaatacaccttcgcttttggaatggaagcgtacagtaagcagagttgggaggatgacgggttcgtatttcaaaccggaccgatcacaagcgaggtttgctcattaacgttcctggtagcgatccccagatgtagtaggaggaaaacatgatagagagatcacaggggtctaatagccccttattgtgctctggttgatatagactgatcaccacacgtttagtatggagcggtccattgcagggtaaaggtaagtaacatatagatcagtttagcaagaaaccgttgaggcagttatggaggagacacgtgtataggtatgacgtatgcgggacataagaagttcatgatgtgccactaattgaggacataagcgaactttattatagagaataccagagtacgaacacataaagagtgcacatacagataaaagcgaagaacaatcaagtactcatattatcctattagttactcaaagtatgctatgccatatatgagaactctatattcgcacaaagattatagacactgatatcagttttacttatgaataacatttgtacagcgacacagtcaagttacgtatcaccttcaaagtaaacagctagactaggctataacaacaaacttaccacgattcaacaacgcaactcacacacaaacagtacaataaaaacacactctactaaagagatagacaaaacgataaaccacgcgcaacactaccggtaatacagaacagagaacatgagaatgaacaatcactaatcacatagtaattcagaccaagataaaaacacaacagatgaggaagaaacttgtggaaaatagagtatgactataagataaaatataatcacaaagatatggtaattactaagtacactaataacatatagataacagcatataaggaaccaactataagtaatcacacataaggacaggatatcagagcgaccacagtatgattagaaacaaacaaacagcccatctttctttctcatctctaacacaaagaaacaaatagagg

SEQ ID NO: 526046 - DNA, 234 bp, Homo sapiens
  misc_feature (73)..(73): n is a, c, g, or t
  misc_feature (97)..(97): n is a, c, g, or t
aggcccatgccccgtccggaggcccatggggagcgaggtttttcaggattcaaggatcctggtggaagacganggttctattgagagggccgggcangagaggtgaggcccgctgcgcgccgggctggcggaggagctgtgctttatcccgcagcgagaaggagctcgtgaaggctctgaggctgggagtggctggatgaaagtcgtgcttctcggccattcgttagtaatcag

SEQ ID NO: 526047 - DNA, 182 bp, Homo sapiens
atgcaatcaggcgatgctctacattcgagcttgccggcttcccgggtgtgtactggtcgtcgtatgaagaagacacaaaactcttcaaactccttttatctatggccactctgccaagctctattctttttgaagtttacacatttatttaaaggttcacatttatgttcccaataataaaa

SEQ ID NO: 526048 - DNA, 316 bp, Homo sapiens
acagtaagaacacatcttctatccttggaattgtgaagaaggaaaaagatatttgctagttttgctgttgcacctcaaactgcaaaagttaccaccacggttcatgcaaagtgcttagttaagatggaaaaggagttacatttgtgggtgcaagacatgaacagagaggcattccaatcaatagcaatcaggttcagggggtaccttcctcagtttcaggcatccacagggggtcttggaaagtattccccatggaggggggccgggagggctactgtactccatacttattctaataaaactttttagaaatctc

SEQ ID NO: 526049 - DNA, 573 bp, Homo sapiens
tttcctctcacccagatttgccttcgcaagcctagggtgatcccctgcctcgctctactgcaccctatggggggccctctcccaggacactgcctcttctgcggcagaaggcccctccaggcggatctgctccaacaagaatagaagcccctccccgcaacttctaacgacagcatgaagttaggacgtgctatacctcctaaatgctgggacccccctaccctgttactctccgctagaggtccccagttccttgggagagtggcacccctcaactgtcactttatggactgatccggtagcaattacagtccacgcaaagagcccgtgatctcgcgggtgtacctgaatggatgaggaccgctgggggaccactgctgaagcatttctgacctcacgttcatgtcatctgcttctcccctgttggggctaaggaaggagataggtggctcttataagaggaggccatcttcttcacccaccccttcctcttcggcacagctactcctggtctgcggctggggccttgggggtctgcgactggcatccataaaccgcctcagcccagccagg

SEQ ID NO: 526050 - DNA, 172 bp, Homo sapiens
ctatatgggcgagctctaactcagggcgagctgtactcagggcgagctgcataaggttacttcatttgtcaacgcacacacaactagtagaagtggagccggagcgggctacaggcagtctgctaacagagtctgcgcaatgctgcctctttagtaagcaaggacagaaaaa

SEQ ID NO: 526051 - DNA, 106 bp, Homo sapiens
cgggtgacacgtataactactgaattctcttctggcagtgtgggtcatatccacggtctgggatttcaaaatgcctcttcatgtgtaaggcgaggtgggaggagag

SEQ ID NO: 526052 - DNA, 343 bp, Homo sapiens
caattagtctttggttgcattaagctgcatacttttcataagcaaaccaagcaagcaaataccaaaacccagagaattcagtgtgaatagagtgaagaatagttgctccagggtcttaacagtacctatgtggtttttttcttgtttttttgttttttttctttttttgtgagacagagtctcactctgtcgcccaggctgaagtgcagtagcatgatctcagctcactgcaacctccaccttccaggttcaagcaattcttgtgcctcagcctcctgagtagctgggactacaggtgcatgccaacaggcacagctaatttgtgtatttttagcagatatgg

SEQ ID NO: 526053 - DNA, 318 bp, Homo sapiens
  misc_feature (18)..(18): n is a, c, g, or t
  misc_feature (249)..(249): n is a, c, g, or t
  misc_feature (292)..(292): n is a, c, g, or t
  misc_feature (317)..(317): n is a, c, g, or t
ccctggtaatcccagcanttttgggaggctgaggcaggtggatcacctgaggtcaggagttcgagaccagtctggtcaacataacaaaaccccatctctactaaaaatacaaaaatattagccaggcgtggtggcgggagcctataatcccagctactcgggaggctgaggcaggaaaatcatttgaacccgggaggcggaggttgcagtgagccgggatcgcgccattgcactccagcctgggtgacngggtgagactccatctcaaaaaaaaaaattatttgtatatggnttcccttatttctttgaacatattng

SEQ ID NO: 526054 - DNA, 138 bp, Homo sapiens
acgcaggcggaccgtttgtctacacctgcaatgaatgcaagcaccatgttgagacacgctggcactgtactgtctgtgaggattatgacttggtgtatcacctgctataacactaaaaagcatgaccacaaaatggag

SEQ ID NO: 526055 - DNA, 432 bp, Homo sapiens
  misc_feature (192)..(192): n is a, c, g, or t
  misc_feature (332)..(333): n is a, c, g, or t
caatagtgctctacctcagcactgttggcattttggactggaaaattccttgttgtggtgagagccacctttttgcactgtagaatgtttgcaacatttgtgatctctatctacaagatgccattaccgtcttccaagtcatgatatccaaaaatgtctgtaatagcaaaaaggtggaagcaagtaaaatanccatcagctgatgaatggataagcaaaacatcatctagccatatagtaactcttattcagccataaaaaaatgaggtactggctgggtgcggtggctcatgcctgcaatcccagcactttgggaggctgaggtgggcagnncacttgaggtcaggagttcaagaccagcctggccaacatggtgagaccctgtctctactgaaaatacaaaaattagctgggcatggtggtgtggatgcc

SEQ ID NO: 526056 - DNA, 575 bp, Homo sapiens
gggtccttttgagaaaattcctaggacctctgctctggagatagcacttgcccaatcttataggcccactgggtctaatttctttggactgagacacctgagggcttctcagtctggaaggagaggagctgggggctgataatctaagtccataatggaggctccaccccttcccgctgcttctgtatcttgacaggaacctagggaagtgtggtgttcgggtatcctgtcttggcctaggtacctgggtcacatttggttctcagatctcagatgagacagcagaggatgtgctgactgtagcctatgagcatggtgtaaacctgtttgacaccgccgaagtgtacgcagcaggaaagtaaggactggggtgaaagagctaagctccatttggaaggctgagaggaccccagggattatcttctcgttttccctctaaagaaccctgggacttctgagaacgtgaagttccaaccttttggcggagggacccgaaagcactgtaggagctacagtcccaacattagtccctctctggcttagaagtcaatgggcgtactgtgcagctacattaa

SEQ ID NO: 526057 - DNA, 1215 bp, Homo sapiens
atgcaggtgtctatcgcgtgtaccgagcagaaccttcgcagccggagcagtgaggaccgtctgtgtggaccccggccgggccccggaggcggtaatggtgggccggccgggggggggcacgggaatcctccggggggtggagggtctggccccaaggcccgagctgcagtggttcccggacccccagcgcccggtggggccgtccgagagagcaccggccgaggcactggcatgaaatacaggaacctagggaagtgtggtgttcgggtatcctgtcttggcctaggtacctgggtcacatttggttctcagatctcagatgagacagcagaggatgtgctgactgtagcctatgagcatggtgtaaacctgtttgacaccgccgaagtgtacgcagcaggaaaggctgaaagaaccctagggaacatcctcaagagcaaaggttggaggagatcaagctatgtcatcactaccaagattttttggggaggacaggcagaaaccgagcgaggtttaagccgaaagcacatcattgagggcttgcgaggatccctggaacgcctccagctgggatacgtggacattgtctttgccaatcgctcagaccccaactgtcctatggaggagattgtgcgagccatgacctatgtcatcaaccagggcctggccctatactgggggacatcccgatggggggctgcagaaatcatggaggcctactccatggccagacagttcaatctgattcctccagtgtgtgaacaagcggagcaccatctgtttcagagggagaaggtggagatgcagctgccagagctctaccacaagattggagttggatcagtcacttggtaccctctagcctgtggtctcattactagcaagtatgatgggcgagtcccagatacttgcagggcctccatcaagggctaccagtggctcaaggacaaagtgcagagtgaagatggcaagaagcaacaagccaaagtcatggaccttcttcctgtcgctcaccagctgggctgcaccgtggcccagcttgctattgcgtggtgtctccgcagtgagggtgtcagctctgtcttgctgggggtgtcgagtgcggagcagttgatagaacacctgggcgcgctacaggtgctgagccagctgaccccgcagacagtgatggaaatagacgggctcctgggaaacaagccgcattccaagaagtag

SEQ ID NO: 526058 - DNA, 358 bp, Homo sapiens
gcgttgtatataagcgcacaatgaaaggcttcccaaatacatctacccctccatggacatcaaagcccacagcaagatttaatgtgtaatgtccgaaatgagacaatttaaagtgtacacaggaaaaagaaaaagagagaaaccctcacctcaccttcgataacactgcagctggtttcactacttctcttagaagagaaatgtcggtagagacagagtggacaggctccccacctgggctgcttctgtatctctgacatattgttctctgcacctcgcagctcaggaaagtccagcgtggtaccatcaaactcaggcttggaggtagactacactttctcgcactgactcctggatt

SEQ ID NO: 526059 - DNA, 750 bp, Homo sapiens
ggccgggcgcggtggctcacgcctgtaatcccagctctcagggaggctaagaggcgggaggatagcttgagcccaggagttcgagacctgcctgggcaatatagcgagaccccggttctccagaaaaaggaaaagaaaaaaaagaaaaaaaaaaaaaaaaaacatgtgtgtgtggggcgcgcccgcgggccccggagaaaaaggtttcataaaacaccatgcgggtgggggcgcggcggggcccacagatgaggagaacagtagagaacatgtggggcgcaaaagcggtggtgtctccaagagagagagacactcgcggggcacaagagagacaatagggcgcggggagatctctctctaactaatatagaaaaaaaaagcgcgccgggggggagaacacccgagaggcgtgtctctggagagacacaatatctccacagagaggggagagcggcacccagggaggggcgccacaataaacgggggagagctctatatatacacacaggggagagggtccacaaagggggaggacggctgcgagagagatatctctataaatatatacacgcccccgggggcaccggaggggggtggacaacaaagaggaagcagaaagagaagagaagggagatgaacaaaagcaggacacaacacacaaagagacgacaacaaacggaaagagcaagcacaacaaaagaagagagcaaaaaagagcaagcatgacaaaaaatacaagaagaaaaacgt

SEQ ID NO: 526060 - DNA, 822 bp, Homo sapiens
agcggttcggatgcttggagtcatgagccgggagggcgcgggggcagcttggtagccgaggtgatcaaaggaaggaacatgcaatttttccatttcagatcgccttgtttgccattctctacagcagaccaaagagtgcatcaaatggtacatatattagcagcatagatgaagagaacttgagatatgagaacgtaccaaggcgaagagtagaagaaagcactacaatacaaagcaaaaaagaacggaagaatgagaagcagagaacaaaaataaaaaaaaatgccaaaagcaaaatgaaaagaaataaaaagaagcagaggacgaaggcacagaacagagaagacgagcaagaaacaaccaaccgaagagagaagaacaactaaagatagaaagaaaaaagaataggaaccccgattaaaaatctataaaaaaataatggaacatatagagaaataacatactcaagaagactcgaagactagaggaaaggaagcgcgaaaatagagaaaaacataaatgcaagcataatactaccgatacaaagacaataggacataagcatttaaaaggaatgatcaaagagcaatgaaaatcatacctagaaggagactacacataagaatccaaagaaaaagaaaaaatgtcgaataaataaatgcatgaaagtaggagataaagaagagaatcaaatagaccgaaatcgaaaatagaggtctgcaagaaaaaccacaaacaataaccagacggaagaataagtaaccaacagtcaatccccgaaaaacagaaaacatgaatgggaggcaacaaagaacaaccaaa

SEQ ID NO: 526061 - DNA, 106 bp, Homo sapiens
tccttatcttgacgccaactaatacagtgataggacagagcaaaatcttcttcctgtactggctgtcctggcccacctagaggaggagcgagatttgaacgatcac

SEQ ID NO: 526062 - DNA, 291 bp, Homo sapiens
ctcaacgctttatacttcacatataatattacttccatgagcaatattatatgtgaagtgtctaatagcagcattaggcacctagataagttgcttaatagagatgtcagctagtattgattattttatctaaaatcgacacatgtatagtagtaatatttaagcaatttaatttaaaaatctgaaagtttaaagcagtctgtaaatacccatctgctatgggtagattgccatgtgtaccattataaatgaatgtttatttctttttaaatgtatattttgtttcagact

SEQ ID NO: 526063 - DNA, 299 bp, Homo sapiens
ctggatcgcaccatatctgactcagaaaactaccacactgaagcagactctccccaggtcacagctctggacggggagggagatcagactgcttaggacctaaatggcctcatgtggctagacagatcctgacagaatggagcttggggctcacaaacctgtagcacataactggtaagaccaagacatcttgggggggatggcgcagagtagcaggggacaaggagtccacttagtaacgagaggacggactaatctagatatcgacatgtaatagcacatatttcctctagttctta

SEQ ID NO: 526064 - DNA, 664 bp, Homo sapiens
  misc_feature (44)..(44): n is a, c, g, or t
  misc_feature (86)..(86): n is a, c, g, or t
  misc_feature (111)..(112): n is a, c, g, or t
  misc_feature (114)..(114): n is a, c, g, or t
  misc_feature (128)..(128): n is a, c, g, or t
  misc_feature (161)..(161): n is a, c, g, or t
  misc_feature (164)..(164): n is a, c, g, or t
  misc_feature (170)..(170): n is a, c, g, or t
  misc_feature (176)..(176): n is a, c, g, or t
  misc_feature (179)..(179): n is a, c, g, or t
  misc_feature (181)..(181): n is a, c, g, or t
  misc_feature (188)..(188): n is a, c, g, or t
  misc_feature (193)..(193): n is a, c, g, or t
  misc_feature (196)..(196): n is a, c, g, or t
  misc_feature (200)..(200): n is a, c, g, or t
  misc_feature (203)..(203): n is a, c, g, or t
  misc_feature (232)..(232): n is a, c, g, or t
  misc_feature (247)..(247): n is a, c, g, or t
  misc_feature (252)..(252): n is a, c, g, or t
  misc_feature (262)..(262): n is a, c, g, or t
  misc_feature (268)..(268): n is a, c, g, or t
  misc_feature (272)..(272): n is a, c, g, or t
  misc_feature (298)..(298): n is a, c, g, or t
  misc_feature (302)..(302): n is a, c, g, or t
  misc_feature (318)..(318): n is a, c, g, or t
  misc_feature (326)..(326): n is a, c, g, or t
  misc_feature (368)..(368): n is a, c, g, or t
  misc_feature (370)..(370): n is a, c, g, or t
  misc_feature (374)..(374): n is a, c, g, or t
  misc_feature (378)..(378): n is a, c, g, or t
  misc_feature (380)..(380): n is a, c, g, or t
  misc_feature (386)..(386): n is a, c, g, or t
  misc_feature (389)..(390): n is a, c, g, or t
  misc_feature (393)..(393): n is a, c, g, or t
  misc_feature (401)..(402): n is a, c, g, or t
  misc_feature (406)..(406): n is a, c, g, or t
  misc_feature (434)..(435): n is a, c, g, or t
  misc_feature (442)..(442): n is a, c, g, or t
  misc_feature (446)..(446): n is a, c, g, or t
  misc_feature (493)..(493): n is a, c, g, or t
  misc_feature (557)..(557): n is a, c, g, or t
  misc_feature (643)..(643): n is a, c, g, or t
gggccgggcggactcggggaccggcggaggacgccgggcgcgcncggcccgaggctgggggagcggggcctacatgcgctttgatntgccgcggccaagggtccagcgcanncnccaccttcagagcnctgttactgctccgctacgtggtggcgcgggtnatntgggcngacatnctntncatcgcngtganctncttnttnacgctgtgcctgttccccggcctcgagtntgagatccgccactncttcntgggcgagtngctgcncatnctcatcatggctgtgttcaacctgtnaganttcgtgggctagatcntggcagcnctgctcgtggactggcggggcacccacctgctggcttgctcntncttncgtntngtcttnttnnccntttttttnntgtncgttttctccagcggcttgctcgctctnngttactncgcntggttctgcttcttctttttgcttatgggcatttgctacggcttttnggctgcgtgttcttgttcctggcggcaggcaaagtgagctccaagctgcgggagctggcagggnaaaccatgaccgtgtcctacatgtcagggctgacgctggggtctgccgtggcctactgcacctacagcctcacccgcgacgctcanggcagctgcctgcacgcctcc

SEQ ID NO: 526065 - DNA, 309 bp, Homo sapiens
acaaacttgatagaccacgagcaagactaataaagaaacaaagagcgaagaatcacatagacacaataaaaaatgataaaggggatatcaccaccgatcccacagaaacacaaactaccatcagagcatcctactaacacctctacgcaaatgaactagcaactctagcagacatggataaattcctccacacatacactctcccaagactaaaccaggaagaagttgaatctctgaatagaccagtacccggagctgcccttgtggcaataatcgagcgttaccaaccaaaaagagtcaggaccagat

SEQ ID NO: 526066 - DNA, 266 bp, Homo sapiens
tatatcgtgcggcgccgcgtgtctgacgagacgggagcggggtagtatgttgaaggagggaggtggagaggatgatcgcgggcgtgtggacttgccgagccatcatcactcgcgatacacgtccggccctctccaccagacccagaaccccccggagtccagaataatcaccaccaacttagccacctttaccgcgccctaccgctccaacccaacagcctccgccgcgccccaggcctcgcacctccgatacacaagccgcttca

SEQ ID NO: 526067 - DNA, 427 bp, Homo sapiens
ttagcaatacacggatcatacgtacaatagtacatgacacagcctctattactgtgtcccactgaagtccagtgctcgttacgacacttatgcaccatggcagtggtataaggggtgctttccataaccatcttctatgcagatctaagtctagttaagagtacctgctcttccatgtattcatatttatgcatgctccttgatcagacacatgtatgtcactgcagacattggcagtggctgatctgatctcgaattcagacagaatagtcattagatattcggcacggtgcgcagcaaacccatgtccttgaacagtagaaggagttggttcctcatgtagtctcacggcagcgtcctcttaatcagtcaggctggcaccatgaatcaaggctcctcgtcgagtactggatacactacagtcgat

SEQ ID NO: 526068 - DNA, 320 bp, Homo sapiens
  misc_feature (220)..(220): n is a, c, g, or t
ccctactcagcctctcaagtggctaggactataggtatgtgctaccatgcccagccaattttttttttttaaatttatgttttgaaatggagtccaggctggaatgcagtggcatgatttcggctcacggccacctccatcccccaggttcaagcaattctttgcgtcagcctcccaaagtgctgggattacaggcgttgagccaccgccaccagcctgnttcacccattttttaagccagatttgatgggatttgtttttttttccttgtgctatttggttgtgagtctccctttctcagatctcgcggaattactcgt

SEQ ID NO: 526069 - DNA, 524 bp, Homo sapiens
ctccatgaggacatcgtacatatcatatccgccatccaaattgaagcaaatggtatccattgtcacagctgttccctgtggttaccacactcatcaatatcttcacacgattctccacttggtgaaaacatcccattgtcatggtatccatctctgcactcacagtggtaccatccaggcaggttaatgcaattagcacgactgtcacattgaacaaaaccatcagagcattcatcaatgtccgtttcacagctgggtccagtgaagccttgtgggcaggcacacacattagcggcaatacaggctcctccattcctacagccatctttgcaaaatgctttgcatgtcgttccattccctgtatagcccggcttgcaaacacagttgtgtcctccaacagtgttgaagcataaagcattttcatcacagttgtgctgatttgtgatacactcatcatgttctgtacatgaataatcatcaattctgatgtatccagttttgcagatgcacataaaagaacccgg

SEQ ID NO: 526070 - DNA, 890 bp, Homo sapiens
tgaaccggcgcttattggctcggcgcggccgctgcaatccgtggatggaagcgcgccggcgagccaccatcatgcctgggcgtcttacaggaaggcttcggctgcgtggtcaccaaccgattcgagccaggttatttgacagacgaatcggaccccttcgagggctgctgaaggcagcagagaacaagaaaaaaggaagccgtgcgggtggcgggtcgttgtgtgggtcccgtgggtgcgcgaaggaggcgccacgtgtcaggcctgcgtgaccagagcaactccaatgcggcaggcagaatcatgctgcgcaatggagtctccagagaagaccgcaagaatcccgctggccctccagcgttggcgtggttgacggagaaagaggagaccgcacgccgctccgtgggtgctttaaatggaaagaatggagtaagacgacgttggaacgacgacctgatctaacaacttacagggtgaaggggacaccataccttgactagaagaccaagagaaaggcgatcgacgctcgttgaaacgactgattcggggaaaaggcccactttggacaaggaaacagcggtgtgaaagggaaggcgaacatcttgcaagtgggattgagacccggatttaattgggacgctgagcgttattcccagagggtacagaagagagggtcctttggtacagaagtggtcgccgggggggcccgtgaggacagttgagaaagggggcccggcgggaagaatgggaaatcggagtcctacgttgccgaagccgtgactatagacatagggcatacctgggagataagatcaaactctggccatgagcaggaggaccaaacgtgagtaatgactccacaactgtggaacgggaaagacgaattactg

SEQ ID NO: 526071 - DNA, 2862 bp, Homo sapiens
  misc_feature (2854)..(2854): n is a, c, g, or t
gccgcccaggattccacgagggggaaggattctctattcttttttgcgacaaatctggtaacaggatttgctgtgctgttttcgtccgtgtgtgtgtgcgtgtgtgtgtgtgttcgtgtggatgcacgtgtggccccgctggggtgccccctccagtgtccccggagctgaaagatcgcaaagaggatgcgaaagggatggaggacgaaggccagaccaaaatcaagcagaggcgaagtcggaccaatttcaccctggaacaactcaatgagctggagaggctttttgacgagacccactatcccgacgccttcatgcgagaggaactgagccagcgactgggcctgtcggaggcccgagtgcaggtttggtttcaaaatcgaagagctaaatgtagaaaacaagaaaatcaactccataaaggtgttctcataggggccgccagccagtttgaagcttgtagagtcgcaccttatgtcaacgtaggtgctttaaggatgccatttcagcaggttcaggcgcagctgcagctggacagcgctgtggcgcacgcgcaccaccacctgcatccgcacctggccgcgcacgcgccctacatgatgttcccagcaccgcccttcggactgccgctcgccacgctggccgcggattcggcttccgccgcctcggtagtggcggccgcagcagccgccaagaccaccagcaagaactccagcatcgccgatctcagactgaaagccaaaaagcacgccgcagccctgggtctgtgacgccaacgccagcaccaatgtcgcgcctgtcccgcggcactcagcctgcacgccctccgcgccccgctgcttctccgttacccctttgagacctcgggagccggccctcttcccgcctcactgaccatccctcgtcccctatcgcatcttggactcggaaagccagactccacgcaggaccagggatctcacgaggcacgcaggctccgtggctcctgcccgttttcctactcgagggcctagaattgggttttgtaggagcgggtttgggggagtctggagagagactggacaggggagtgctggaaccgcggagtttggctcaccgcaaagctacaacgatggactcttgcatagaaaaaaaaatcttgttaacaatgaaaaaatgagcaaacaaaaaaatcgaaagacaaacgggagagaaaaagaggaaggcaacttatttcttaactgctatttggcagaagctgaaattggagaaccaaggagcaaaaacaaattttaaaattaaagtattttatacatttaaaaatatggaaaaacaacccagacgattctcgagagactggggggagttaccaacttaaatgtgtgttttaaaaaatgcgctaagaaggcaaagcagaaagaagaggtatacttatttaaaaaactaagatgaaaaaagtgcgcaggtgggaagttcacaggttttgaaactgacctttttctgcgaagttcacgttaatacgagaaatttgatgagagaggcgggcctccttttacgttgaatcagatgctttgagtttaaacccaccatgtatggaagagcaagaaaagagaaaatattaaaacgaggagagagaaaaataatattaacacaaaaaaatgccacagacaatgatttctctgagaaattattatggcaaaactgtctggactgctgacagtaaattccggtttgcatggtacttgtattccattgatggtgtgtcttcctcccacccccttatctcccatgcactcactccattttcatcttcactatgaaaaacaataccaaaagtatctggaaattgatatatatatatccacatatatatatcatatatttgccatatatatatatatatatatatatatatatatatatatatatatatatatttgccctgtctttgatcctggggaacaaaagaaaaaagtcagaaagggaaaaaattacactcattgccctaagaagacagaggtgggcagaatatgtggggaaaggaaaaagaaaacaagaccaccaaatgaaataatgaaggtacagcgcctcgctgtgccagacacagtaggcgctcaatcagtattagttcccaccattccccttttcttgtgttccttcttgttggtttcctgaagtcctatttgaagacagtggtttatttccccctctctatcccgtcaaattcaccttaaataacacccagctagatacaggcactaggtttgtgtaagatatgttgatacacacgaacaaagtttattttgactataatgtgtggactgactttcaacatttgcattttatctcacaaaggtgtatctattcaagtaacctttttttttttgtttgtttgtttcttttttgtttttttttttcttttggttgtttgtttcaattcatgtagctatttaaactgggataccttggactaagccagtctgtatcccaattcgctagcaagcctaagtttgtggggttttgtttttgtttttgttttaccttctaatttacaagaaagaggaaaagctcttctaactgaactttggtatgcggttgagctttgtaactatttgttctccatgaaaacaaaattatttatatttgacatatttttttctagtgtattaagttattttaaacaaaagatgttatctcatgacgtgttgtcagtacaaaatgtgtcgcctccaattctgttaaaccttttaaataagtgccaagttattaattgaagacactttgcgatcaattgaatgaaaatatcgtttcatttgatggggttcgagtcatctttgttcctgttactattaaaatatccgggatagtctttccnaaaaaaaa

SEQ ID NO: 526072 - DNA, 388 bp, Homo sapiens
agctcacgccgtgtgcgcttcagtcactctccaccacacaggtacagcatcgctcttctggtatcgcccttagtgtcttgctggatataatagtacaggtgacttgccgtactcttctctgtgaattcagacctaattttcaacatgtccacttcactgcgggagaccatgattctgatcaggaccttatctcgcgtccccttgcccttcatggagtcatacagccgatcagcaaaatacaggggcttgttctgaatgcactgaaccaggttcaggaaagcattttccaggtctcctttaacctctttcctgatgctttccaacatgtcataagggctgtaactcttgtacctatcaaatactttctggaggtggggcacgctccgca

SEQ ID NO: 526073 - DNA, 1668 bp, Homo sapiens
gccgcccaggattccacgagggggaaggattctctattcttttttgcgacaaatctggtaacaggatttgctgtgctgttttcgtccgtgtgtgtgtgcgtgtgtgtgtgtgttcgtgtggatgcacgtgtggccccgctggggtgccccctccagtgtccccggagctgaaagatcgcaaagaggatgcgaaagggatggaggacgaaggccagaccaaaatcaagcagaggcgaagtcggaccaatttcaccctggaacaactcaatgagctggagaggctttttgacgagacccactatcccgacgccttcatgcgagaggaactgagccagcgactgggcctgtcggaggcccgagtgcaggtttggtttcaaaatcgaagagctaaatgtagaaaacaagaaaatcaactccataaaggtgttctcataggggccgccagccagtttgaagcttgtagagtcgcaccttatgtcaacgtaggtgctttaaggatgccatttcagcaggttcaggcgcagctgcagctggacagcgctgtggcgcacgcgcaccaccacctgcatccgcacctggccgcgcacgcgccctacatgatgttcccagcaccgcccttcggactgccgctcgccacgctggccgcggattcggcttccgccgcctcggtagtggcggccgcagcagccgccaagaccaccagcaagaactccagcatcgccgatctcagactgaaagccaaaaagcacgccgcagccctgggtctgtgacgccaacgccagcaccaatgtcgcgcctgtcccgcggcactcagcctgcacgccctccgcgccccgctgcttctccgttacccctttgagacctcgggagccggccctcttcccgcctcactgaccatccctcgtcccctatcgcatcttggactcggaaagccagactccacgcaggaccagggatctcacgaggcacgcaggctccgtggctcctgcccgttttcctactcgagggcctagaattgggttttgtaggagcgggtttgggggagtctggagagagactggacaggggagtgctggaaccgcggagtttggctcaccgcaaagctacaacgatggactcttgcatagaaaaaaaaatcttgttaacaatgaaaaaatgagcaaacaaaaaaatcgaaagacaaacgggagagaaaaagaggaaggcaacttatttcttaactgctatttggcagaagctgaaattggagaaccaaggagcaaaaacaaattttaaaattaaagtattttatacatttaaaaatatggaaaaacaacccagacgattctcgagagactggggggagttaccaacttaaatgtgtgttttaaaaaatgcgctaagaaggcaaagcagaaagaagaggtatacttatttaaaaaactaagatgaaaaaagtgcgcaggtgggaagttcacaggttttgaaactgacctttttctgcgaagttcacgttaatacgagaaatttgatgagagaggcgggcctccttttacgttgaatcagatgctttgagtttaaacccaccatgtatggaagagcaagaaaagagaaaatattaaaacgaggagagagaaaaataatggcaaaactgtctggactgctgacagtaaattccggtttgcatgg

SEQ ID NO: 526074 - DNA, 230 bp, Homo sapiens
gctgagtctatggaattaacaagaggtctcctaaaaaagaagaagaatcacactggcatcagatgaggcacagcgaaatggagggagaagacaacagagcaagaccttcaaagttatgaaaggactactatatccagtcaaactgttaattaaataagaaaacaaaaataacctattttgagacatgtgaaaactgcagaggtttacctctcatgcagccctttccatag

SEQ ID NO: 526075 - DNA, 335 bp, Homo sapiens
cggcctgttatagcacaataaggaagggtcccaggtttaggagagccccaagttgagaacaataatgaacaattatgtatgaacaatagttagagacagctaatcacaaacaaactgcgggcacaatgacctcattccacacgtagcacccttcagcaggaccctataaaactttcctccagcccttgcctctttgcaggtagccccttctctgctgagctgcccactacaacatattttcacaatttctctaataaatctgcccttctttacctacaactatcttggtacatggctttaccacctgcaaaactgaccctaggttgttgctaccc

SEQ ID NO: 526076 - DNA, 278 bp, Homo sapiens
gaagaagtacctgtcgtagggagatttgggtgcaagccctcatgctgaggtttgaaatgggaagaggggggcacgaccgctgctgcggaagagaatgcattgagccaggtgcggctgccagtacccacctggcatgggtagttaacgcctgcactctcactactctaggaggtctacgccggagaggctggccaaggcacggtgaccatattggaatactcgaggctggacggtacccagtagcggattctgtctagtgtgccctatgcggaatttat

SEQ ID NO: 526077 - DNA, 126 bp, Homo sapiens
taaggacccaattctgagtccccggccagccgaatccaagccgtgtgtctgcgtgctcgacgtgcccacagtcctgctaaacttcgccaactccgcgcgttattgcctaatgcgggtaccgagctc

SEQ ID NO: 526078 - DNA, 2042 bp, Homo sapiens
ggcacgaggccacctccctctcctcccccacctcctgtcccattgatgtgttattattgggggggctggagcagtaaaaaaagaagaaggaaaaaaagagcggggctctgctggcagaggttgagcgccgggctgacgtgcggcggcgatggaagaacttacggcgttcgtctccaagtcttttgaccagaaagtgaaggagaagaaggaggcgatcacgtaccgggaggtgctggagagcgggccgctgcgcggggccaaggagccgaccggctgcaccgaggcgggccgcgacgaccgcagcagcccggcagtccgggcggccggcggaggcggcggcggaggaggcggaggcggcggcggaggaggcggaggaggtgtaggaggaggtggagcaggcggaggagctggaggagggcgctctcccgtccgggagctggacatgggcgccgccgagagaagcagggagccgggcagcccgcgactgacggaggtgtccccggagctgaaagatcgcaaagaggatgcgaaagggatggaggacgaaggccagaccaaaatcaagcagaggcgaagtcggaccaatttcaccctggaacaactcaatgagctggagaggctttttgacgagacccactatcccgacgccttcatgcgagaggaactgagccagcgactgggcctgtcggaggcccgagtgcaggtttggtttcaaaatcgaagagctaaatgtagaaaacaagaaaatcaactccataaaggtgttctcataggggccgccagccagtttgaagcttgtagagtcgcaccttatgtcaacgtaggtgctttaaggatgccatttcagcaggatagtcattgcaacgtgacgcccttgccctttcaggttcaggcgcagctgcagctggacagcgctgtggcgcacgcgcaccaccacctgcatccgcacctggccgcgcacgcgccctacatgatgttcccagcaccgcccttcggactgccgctcgccacgctggccgcggattcggcttccgccgcctcggtagtggcggccgcagcagccgccaagaccaccagcaagaactccagcatcgccgatctcagactgaaagccaaaaagcacgccgcagccctgggtctgtgacgccaacgccagcaccaatgtcgcgcctgtcccgcggcactcagcctgcacgccctccgcgccccgctgcttctccgttacccctttgagacctcgggagccggccctcttcccgcctcactgaccatccctcgtcccctatcgcatcttggactcggaaagccagactccacgcaggaccagggatctcacgaggcacgcaggctccgtggctcctgcccgttttcctactcgagggcctagaattgggttttgtaggagcgggtttgggggagtctggagagagactggacaggggagtgctggaaccgcggagtttggctcaccgcaaagctacaacgatggactcttgcatagaaaaaaaaatcttgttaacaatgaaaaaatgagcaaacaaaaaaatcgaaagacaaacgggagagaaaaagaggaaggcaacttatttcttaactgctatttggcagaagctgaaattggagaaccaaggagcaaaaacaaattttaaaattaaagtattttatacatttaaaaatatggaaaaacaacccagacgattctcgagagactggggggagttaccaacttaaatgtgtgttttaaaaaatgcgctaagaaggcaaagcagaaagaagaggtatacttatttaaaaaactaagatgaaaaaagtgcgcaggtgggaagttcacaggttttgaaactgacctttttctgcgaagttcacgttaatacgagaaatttgatgagagaggcgggcctccttttacgttgaatcagatgctttgagtttaaacccaccatgtatggaagagcaagaaaagagaaaatattaaaacgaggagagagaaaaataatggcaaaactgtctggactgctgacagtaaattccggtttgcatgg

SEQ ID NO: 526079 - DNA, 188 bp, Homo sapiens
gcgttccttgcgttgcactgaaggggcttctacggatggggtgagggatgggtgcaggatgcgtcgtgactggtgcaaaaacatggttcatagcttgtttccacagtggtcgcgcatcctgcagccatcctcacccctccgtaagccctcgtgcaatgcatgaatggacctcctgtcaatctgcaaga

SEQ ID NO: 526080 - DNA, 855 bp, Homo sapiens
  misc_feature (17)..(17): n is a, c, g, or t
  misc_feature (26)..(26): n is a, c, g, or t
  misc_feature (33)..(33): n is a, c, g, or t
  misc_feature (77)..(77): n is a, c, g, or t
  misc_feature (83)..(83): n is a, c, g, or t
  misc_feature (94)..(94): n is a, c, g, or t
  misc_feature (100)..(100): n is a, c, g, or t
  misc_feature (124)..(124): n is a, c, g, or t
  misc_feature (127)..(127): n is a, c, g, or t
  misc_feature (136)..(136): n is a, c, g, or t
  misc_feature (142)..(143): n is a, c, g, or t
  misc_feature (159)..(159): n is a, c, g, or t
  misc_feature (163)..(163): n is a, c, g, or t
  misc_feature (167)..(167): n is a, c, g, or t
  misc_feature (192)..(192): n is a, c, g, or t
  misc_feature (198)..(198): n is a, c, g, or t
  misc_feature (214)..(214): n is a, c, g, or t
  misc_feature (221)..(221): n is a, c, g, or t
  misc_feature (232)..(232): n is a, c, g, or t
  misc_feature (234)..(235): n is a, c, g, or t
  misc_feature (238)..(238): n is a, c, g, or t
  misc_feature (242)..(242): n is a, c, g, or t
  misc_feature (273)..(273): n is a, c, g, or t
  misc_feature (286)..(286): n is a, c, g, or t
  misc_feature (291)..(291): n is a, c, g, or t
  misc_feature (300)..(300): n is a, c, g, or t
  misc_feature (324)..(324): n is a, c, g, or t
  misc_feature (337)..(337): n is a, c, g, or t
  misc_feature (343)..(343): n is a, c, g, or t
  misc_feature (363)..(363): n is a, c, g, or t
  misc_feature (370)..(370): n is a, c, g, or t
  misc_feature (372)..(372): n is a, c, g, or t
  misc_feature (399)..(399): n is a, c, g, or t
  misc_feature (406)..(406): n is a, c, g, or t
  misc_feature (523)..(523): n is a, c, g, or t
  misc_feature (546)..(546): n is a, c, g, or t
gcagggctagcactgangtgtctctnggcggantgctgtgagtggaacgcgctgggccgcgggcagcgtcgcctcangcgganagagctaagcngaagcnggacccggagcacgaacagcagcngcnatggcaatnaaatanntggaagtaatcaagcncttntgtntaatcatgcaggaaattcagaagcnagaaangaagattcaatttaangagaaantactgtggacngnnatnaccntctttatcttcttagtgtgctgccagattcncctgtttgggatnatgtnttcagattnagctgaccctttctattggatganagtaattctagcntctaanagaggcacattgatggagcnagggatntntcctattgtaacgtctggccttataangaaaatnttggctggagcaaagataattaaagttggtgaaaccccaaaaaaccgagctctcttcaacggagcacaaaagttatttggcatgatcattactatcggccagtctatcgtgtatgtnatgaccgggatgtatggggaccnttctgaaatgggtgctggaatttgcctgctaatcaccattcagctctttgttgctggcttaattgtcctacttttggatgaactcctgcaaaaaggatatggccttggctctggtatttctctcttcattgcaactaacatctgtgaaaccatcgtatggaaggcattcagccccactactgtcaacactggccgaggaatggaatttgaaggtgctatcatcgcacttttccatctgctggccacacgcacagacaaggtccgagcccttcgggaggcgttctaccgccagaatcttcccaacctcat

SEQ ID NO: 526081 - DNA, 1921 bp, Homo sapiens
  misc_feature (318)..(318): n is a, c, g, or t
taggagaaaggcacagcgcctggagggcgggagtggggcttgctgcagacggctgtctcctgcctccttggctcttgcactgccaggaacacgctctccccaacacctccatggctcattccccaaattcaagcttgtagttggttgaattgtggccccagagatgggattaaggattttgagattatgccagattatctgcgcgggcccaggatcatatgagtttgtctcttctcccgtattagttttgtccgcgctcggccgccgtgcagtcggtcgttccacttccgccttcgcccacgtggtccggctccggcncacgcgagccgcgtcgcgaatggggcaggagcgagcctctctggtcccgacgcgggtggcccgggtctcctcgactcctgaggaaagcccaccgggcggggcgggagctcgccgcgcatggccgggaacgcggagccgccgcccgccggagccgcatgcccccaggaccggaggtcctgcagcggccgggccgggggcgaccgcgtctgggaggacggagaacatccggcgaagaagctcaagagcggtggcgacgaggagcggcgcgagaagccgcccaagcggaagatcgtgctgctcatggcctattcgggcaagggctaccacggcatgcagaggaatgtcgggtcctcacaattcaaaacaattgaagatgacttggtgtccgccctcgtccggtcaggctgtattcctgaaaatcatggtgaggacatgaggaaaatgtccttccagcgctgcgcccggacagacaagggtgtgtccgcagccggccaggtggtatccctgaaggtgtggctgattgacgacattctagaaaagatcaacagccaccttccctctcacattcggattctgggactgaagcgggtcacgggcgggtttaactccaagaacagatgtgatgccaggacctattgctacctgctgcccacgtttgcctttgcgcacaaggaccgggacgttcaggatgagacctaccgcctgagcgccgagacgctgcagcaggtcaacaggctcctggcctgctacaagggcacgcacaacttccacaatttcacctcgcagaaggggccgcaggatcccagtgcctgccgctacatcctggagatgtactgcgaggaaccctttgtgcgggagggcctggagtttgcggtgatcagggtgaagggccagagcttcatgatgcatcagatccggaagatggtcggcctggtggtggccattgtgaagggttatgcccctgagagcgtgctggagcgcagctggggcacagagaaggtggacgtgcccaaggcgcccggactcggcctggtcctggagagggtgcacttcgagaagtacaaccagcgctttggcaacgatgggctgcatgagccgctggactgggcgcaggaggaaggaaaggtcgcagccttcaaggaggagcacatctaccccaccatcatcggcaccgagcgggacgaacgctccatggcccagtggctgagcaccttgcccatccacaacttcagtgccaccgctctcacggcaggtggcacgggcgccaaggtgcccagtcccctggaaggcagtgaaggggacggagacactgactgaggcgatgggagctgcccaccagagtgcctctgagcagctcacagtgtgtgcccagatgtgccacccctgtgggcagcaagaagctgggatcgctgcagccatgttttcccggccatgccggcgttgtaacctcaggaccttcccttgtaggaacagcctttctcgaatctgttttcagctcttgcattgcatagatgaacctcagcatgtaaagaactatttttttaaagaagtgattttcttattaaacaagtacaaattttgcttagtcaaaaaaaaaacaaag

SEQ ID NO: 526082 - DNA, 3258 bp, Homo sapiens
  misc_feature (3250)..(3250): n is a, c, g, or t
ggcacgaggccacctccctctcctcccccacctcctgtcccattgatgtgttattattgggggggctggagcagtaaaaaaagaagaaggaaaaaaagagcggggctctgctggcagaggttgagcgccgggctgacgtgcggcggcgatggaagaacttacggcgttcgtctccaagtcttttgaccagaaagtgaaggagaagaaggaggcgatcacgtaccgggaggtgctggagagcgggccgctgcgcggggccaaggagccgaccggctgcaccgaggcgggccgcgacgaccgcagcagcccggcagtccgggcggccggcggaggcggcggcggaggaggcggaggcggcggcggaggaggcggaggaggtgtaggaggaggtggagcaggcggaggagctggaggagggcgctctcccgtccgggagctggacatgggcgccgccgagagaagcagggagccgggcagcccgcgactgacggagggtagaaggaagccaacgaaagctgaggtccaggctacgctgcttctcccgggcgaggcgtttcggtttcttgtgtccccggagctgaaagatcgcaaagaggatgcgaaagggatggaggacgaaggccagaccaaaatcaagcagaggcgaagtcggaccaatttcaccctggaacaactcaatgagctggagaggctttttgacgagacccactatcccgacgccttcatgcgagaggaactgagccagcgactgggcctgtcggaggcccgagtgcaggtttggtttcaaaatcgaagagctaaatgtagaaaacaagaaaatcaactccataaaggtgttctcataggggccgccagccagtttgaagcttgtagagtcgcaccttatgtcaacgtaggtgctttaaggatgccatttcagcaggatagtcattgcaacgtgacgcccttgccctttcaggttcaggcgcagctgcagctggacagcgctgtggcgcacgcgcaccaccacctgcatccgcacctggccgcgcacgcgccctacatgatgttcccagcaccgcccttcggactgccgctcgccacgctggccgcggattcggcttccgccgcctcggtagtggcggccgcagcagccgccaagaccaccagcaagaactccagcatcgccgatctcagactgaaagccaaaaagcacgccgcagccctgggtctgtgacgccaacgccagcaccaatgtcgcgcctgtcccgcggcactcagcctgcacgccctccgcgccccgctgcttctccgttacccctttgagacctcgggagccggccctcttcccgcctcactgaccatccctcgtcccctatcgcatcttggactcggaaagccagactccacgcaggaccagggatctcacgaggcacgcaggctccgtggctcctgcccgttttcctactcgagggcctagaattgggttttgtaggagcgggtttgggggagtctggagagagactggacaggggagtgctggaaccgcggagtttggctcaccgcaaagctacaacgatggactcttgcatagaaaaaaaaatcttgttaacaatgaaaaaatgagcaaacaaaaaaatcgaaagacaaacgggagagaaaaagaggaaggcaacttatttcttaactgctatttggcagaagctgaaattggagaaccaaggagcaaaaacaaattttaaaattaaagtattttatacatttaaaaatatggaaaaacaacccagacgattctcgagagactggggggagttaccaacttaaatgtgtgttttaaaaaatgcgctaagaaggcaaagcagaaagaagaggtatacttatttaaaaaactaagatgaaaaaagtgcgcaggtgggaagttcacaggttttgaaactgacctttttctgcgaagttcacgttaatacgagaaatttgatgagagaggcgggcctccttttacgttgaatcagatgctttgagtttaaacccaccatgtatggaagagcaagaaaagagaaaatattaaaacgaggagagagaaaaataatggcaaaactgtctggactgctgacagtaaattccggtttgcatggtacttgtattccattgatggtgtgtcttcctcccacccccttatctcccatgcactcactccattttcatcttcactatgaaaaacaataccaaaagtatctggaaattgatatatatatatccacatatatatatcatatatttgccatatatatatatatatatatatatatatatatatatatatatatatatatttgccctgtctttgatcctggggaacaaaagaaaaaagtcagaaagggaaaaaattacactcattgccctaagaagacagaggtgggcagaatatgtggggaaaggaaaaagaaaacaagaccaccaaatgaaataatgaaggtacagcgcctcgctgtgccagacacagtaggcgctcaatcagtattagttcccaccattccccttttcttgtgttccttcttgttggtttcctgaagtcctatttgaagacagtggtttatttccccctctctatcccgtcaaattcaccttaaataacacccagctagatacaggcactaggtttgtgtaagatatgttgatacacacgaacaaagtttattttgactataatgtgtggactgactttcaacatttgcattttatctcacaaaggtgtatctattcaagtaacctttttttttttgtttgtttgtttcttttttgtttttttttttcttttggttgtttgtttcaattcatgtagctatttaaactgggataccttggactaagccagtctgtatcccaattcgctagcaagcctaagtttgtggggttttgtttttgtttttgttttaccttctaatttacaagaaagaggaaaagctcttctaactgaactttggtatgcggttgagctttgtaactatttgttctccatgaaaacaaaattatttatatttgacatatttttttctagtgtattaagttattttaaacaaaagatgttatctcatgacgtgttgtcagtacaaaatgtgtcgcctccaattctgttaaaccttttaaataagtgccaagttattaattgaagacactttgcgatcaattgaatgaaaatatcgtttcatttgatggggttcgagtcatctttgttcctgttactattaaaatatccgggatagtctttccnaaaaaaaa

SEQ ID NO: 526083 - DNA, 1415 bp, Homo sapiens
  misc_feature (318)..(318): n is a, c, g, or t
taggagaaaggcacagcgcctggagggcgggagtggggcttgctgcagacggctgtctcctgcctccttggctcttgcactgccaggaacacgctctccccaacacctccatggctcattccccaaattcaagcttgtagttggttgaattgtggccccagagatgggattaaggattttgagattatgccagattatctgcgcgggcccaggatcatatgagtttgtctcttctcccgtattagttttgtccgcgctcggccgccgtgcagtcggtcgttccacttccgccttcgcccacgtggtccggctccggcncacgcgagccgcgtcgcgaatggggcaggagcgagcctctctggtcccgacgcgggtggcccgggtctcctcgactcctgaggaaagcccaccgggcggggcgggaggtgaagaggctggggaagtcagagctcgccgcgcatggccgggaacgcggagccgccgcccgccggagccgcatgcccccaggaccggaggtcctgcagcggccgggccgggggcgaccgcgtctgggaggacggagaacatccggcgaagaagctcaagagcggtggcgacgaggagcggcgcgagaagccgcccaagcggaagatcgtgctgctcatggcctattcgggcaagggctaccacggcatgcagaggaatgtcgggtcctcacaattcaaaacaattgaagatgacttggtgtccgccctcgtccggtcaggctgtattcctgaaaatcatggtgaggacatgaggaaaatgtccttccagcgctgcgcccggacagacaagggtgtgtccgcagccggccaggtggtatccctgaaggtgtggctgattgacgacattctagaaaagatcaacagccaccttccctctcacattcggattctgggactgaagcgggtcacgggcgggtttaactccaagaacagatgtgatgccaggacctattgctacctgctgcccacgtttgcctttgcgcacaaggaccgggacgttcaggatgagacctaccgcctgagcgccgagacgctgcagcaggtcaacaggctcctggcctgctacaagggcacgcacaacttccacaatttcacctcgcagaaggggccgcaggatcccagtgcctgccgctacatcctggagatgtactgcgaggaaccctttgtgcgggaggccctgaagtcgcggggaccaagggggagggccacacagtactgcgcgatagaccggaaaatgtggcccggggtggccactggacaggttatcccccctaacgtgtgaccgagtggcacacaaaaggcgagcaaagacaaccgactacgtgaagccgccaaaacacacgtagacaggtagaaacggtaggagtacggccgccatcacaacggtgt

SEQ ID NO: 526084 - DNA, 1649 bp, Homo sapiens
  misc_feature (4)..(4): n is a, c, g, or t
cgtnggttttcccacatggtggtgccaaagaatcttagaatgtttgtgttttaaatttttaaatttttttttgtgtgtgcgtgtgtgtgtgtgttcgtgtggatgcacgtgtggccccgctggggtgccccctccagtgtccccggagctgaaagatcgcaaagaggatgcgaaagggatggaggacgaaggccagaccaaaatcaagcagaggcgaagtcggaccaatttcaccctggaacaactcaatgagctggagaggctttttgacgagacccactatcccgacgccttcatgcgagaggaactgagccagcgactgggcctgtcggaggcccgagtgcaggtttggtttcaaaatcgaagagctaaatgtagaaaacaagaaaatcaactccataaaggtgttctcataggggccgccagccagtttgaagcttgtagagtcgcaccttatgtcaacgtaggtgctttaaggatgccatttcagcaggttcaggcgcagctgcagctggacagcgctgtggcgcacgcgcaccaccacctgcatccgcacctggccgcgcacgcgccctacatgatgttcccagcaccgcccttcggactgccgctcgccacgctggccgcggattcggcttccgccgcctcggtagtggcggccgcagcagccgccaagaccaccagcaagaactccagcatcgccgatctcagactgaaagccaaaaagcacgccgcagccctgggtctgtgacgccaacgccagcaccaatgtcgcgcctgtcccgcggcactcagcctgcacgccctccgcgccccgctgcttctccgttacccctttgagacctcgggagccggccctcttcccgcctcactgaccatccctcgtcccctatcgcatcttggactcggaaagccagactccacgcaggaccagggatctcacgaggcacgcaggctccgtggctcctgcccgttttcctactcgagggcctagaattgggttttgtaggagcgggtttgggggagtctggagagagactggacaggggagtgctggaaccgcggagtttggctcaccgcaaagctacaacgatggactcttgcatagaaaaaaaaatcttgttaacaatgaaaaaatgagcaaacaaaaaaatcgaaagacaaacgggagagaaaaagaggaaggcaacttatttcttaactgctatttggcagaagctgaaattggagaaccaaggagcaaaaacaaattttaaaattaaagtattttatacatttaaaaatatggaaaaacaacccagacgattctcgagagactggggggagttaccaacttaaatgtgtgttttaaaaaatgcgctaagaaggcaaagcagaaagaagaggtatacttatttaaaaaactaagatgaaaaaagtgcgcaggtgggaagttcacaggttttgaaactgacctttttctgcgaagttcacgttaatacgagaaatttgatgagagaggcgggcctccttttacgttgaatcagatgctttgagtttaaacccaccatgtatggaagagcaagaaaagagaaaatattaaaacgaggagagagaaaaataatggcaaaactgtctggactgctgacagtaaattccggtttgcatgg

SEQ ID NO: 526085 - DNA, 1186 bp, Homo sapiens
  misc_feature (318)..(318): n is a, c, g, or t
taggagaaaggcacagcgcctggagggcgggagtggggcttgctgcagacggctgtctcctgcctccttggctcttgcactgccaggaacacgctctccccaacacctccatggctcattccccaaattcaagcttgtagttggttgaattgtggccccagagatgggattaaggattttgagattatgccagattatctgcgcgggcccaggatcatatgagtttgtctcttctcccgtattagttttgtccgcgctcggccgccgtgcagtcggtcgttccacttccgccttcgcccacgtggtccggctccggcncacgcgagccgcgtcgcgaatggggcaggagcgagcctctctggtcccgacgcgggtggcccgggtctcctcgactcctgaggaaagcccaccgggcggggcgggaggtgaagaggctggggaagtcagagctcgccgcgcatggccgggaacgcggagccgccgcccgccggagccgcatgcccccaggaccggaggtcctgcagcggccgggccgggggcgaccgcgtctgggaggacggagaacatccggcgaagaagctcaagagcggtggcgacgaggagcggcgcgagaagccgcccaagcggaagatcgtgctgctcatggcctattcgggcaagggctaccacggcatgcagaggaatgtcgggtcctcacaattcaaaacaattgaagatgacttggtgtccgccctcgtccggtcaggctgtattcctgaaaatcatggtgaggacatgaggaaaatgtccttccagcgctgcgcccggacagacaaggtgggtggtggccttctctgcccctcccccgctgctatgagcagcacgtggcccactttccagctcagtgttctggcttgttatgctgtttctgagcacataatgatgtacaaatcaaactagcctacgccttatgtaggtgagacgtccaggagcctggtcggctcaggtatagctggatctagatgctccctgccagtgggactctgtgttctctctggtctttgctttctcttgtgttgattctgttctcagggacacacattcttgcaggtggcacagtggcggccgcaatgtctgctttcgaacctccaatcaggctcactctgaggcagatgtacttgtgtggctgccaagggccagagagcca

SEQ ID NO: 526086 - DNA, 1132 bp, Homo sapiens
  misc_feature (318)..(318): n is a, c, g, or t
taggagaaaggcacagcgcctggagggcgggagtggggcttgctgcagacggctgtctcctgcctccttggctcttgcactgccaggaacacgctctccccaacacctccatggctcattccccaaattcaagcttgtagttggttgaattgtggccccagagatgggattaaggattttgagattatgccagattatctgcgcgggcccaggatcatatgagtttgtctcttctcccgtattagttttgtccgcgctcggccgccgtgcagtcggtcgttccacttccgccttcgcccacgtggtccggctccggcncacgcgagccgcgtcgcgaatggggcaggagcgagcctctctggtcccgacgcgggtggcccgggtctcctcgactcctgaggaaagcccaccgggcggggcgggaggtgaagaggctggggaagtcagagctcgccgcgcatggccgggaacgcggagccgccgcccgccggagccgcatgcccccaggaccggaggtcctgcagcggccgggccgggggcgaccgcgtctgggaggacggagaacatccggcgaagaagctcaagagcggtggcgacgaggagcggcgcgagaagccgcccaagcggaagatcgtgctgctcatggcctattcgggcaagggctaccacggcatgcagaggaatgtcgggtcctcacaattcaaaacaattgaagatgacttggtgtccgccctcgtccggtcaggctgtattcctgaaaatcatggtgaggacatgaggaaaatgtccttccagcgctgcgcccggacagacaaggtcaggatctcattctgttgcccaggctggagtgcagtggcatgatcatggctcactgcagtctcaaactgctgggctcaagcaatcctcctgcctcagcctcccgagtagctcgtgcttcagtctcttgcctcggcacctgggtggcttaccgcccacaaccaacgtttggcagacgggggacggcagagccggtgagaacagatagctttctgtgcccgtatgaggcatccgtgacgtgattctgtcatcttggccttcgagtgctggtcgtacctggtctcggtgcgaggttgggccgttgaaatatttgcgc

SEQ ID NO: 526087 - DNA, 721 bp, Homo sapiens
ttgttgtatcccgcgccgccccaattttgggccccgtgtgtcttctccccccccgccctgtcggtcgtcggtggcccctggaagctccgtttgtgttcccgggagtagatcccggcccccgataaatgttctgtgtgtgtttgagcgcggcgctcgctcttgttactcgcaggtggtttctcactcatgttgctcgcgggtgggctcctgcgcgacatatattcgccccgcggggggtttctcgccggcccctcttctcgcgcgccgcggcggccctttggtgtcatactcccgcggggagtgctcccccgccgactgtcttggtgggtggcctgctgcgctcgtcgggtggcatctcctggtaggccaccagcagtgggttgtccacactcccccggcttcggcgcgccacactctgtgggcgatcccccggtcttcccctcgagtgtactacccccacgttctttccccgcgcgttgctggtggtgcgacgccgccggttcagtccccaccaaccgcttctcgcgcggaggcttgtggtgcccgcgaggagtttcacctgtggagaaccccgggggccaccaggggtcgcgccagtcccgcgtgggtgtgacgccccgtcggtgcgcccccgctctcgggctcgccacaggcctcaacttttgttgctcgcgaaaacaaaacaacccacacaaacacccaaactaacaaacaaagacaa

SEQ ID NO: 526088 - DNA, 199 bp, Homo sapiens
cgcttccgtgaactccgtgagactcactactaagtttcttgctgtcatttagctacatttttacgtctagtaatctggcatgaccagaagctcctcaaagtcaaacacaaaattccatactactttcagacaccccaaaggccaagcacagtgcctaccatgaaaagtggctagagatggattatgacagtttcttatt

SEQ ID NO: 526089 - DNA, 1034 bp, Homo sapiens
  misc_feature (318)..(318): n is a, c, g, or t
taggagaaaggcacagcgcctggagggcgggagtggggcttgctgcagacggctgtctcctgcctccttggctcttgcactgccaggaacacgctctccccaacacctccatggctcattccccaaattcaagcttgtagttggttgaattgtggccccagagatgggattaaggattttgagattatgccagattatctgcgcgggcccaggatcatatgagtttgtctcttctcccgtattagttttgtccgcgctcggccgccgtgcagtcggtcgttccacttccgccttcgcccacgtggtccggctccggcncacgcgagccgcgtcgcgaatggggcaggagcgagcctctctggtcccgacgcgggtggcccgggtctcctcgactcctgaggaaagcccaccgggcggggcgggaggtgaagaggctggggaagtcagaggttaacctgggcgtcaggggacgttggagttgatccgtcagggtcccggggcggtctgggggcagtagagacggggcttgggcgcggggcctgagaggtcaggggtcagcctcctgagtcactgggattaaaagcatacctaattatttatttattgatttattttggagacagagttatcctctgtcacctaggcgggagtgcagtggtacattatcagttgcactgaacctccatcttcccaggttcaagcgattctcctgcctcaagagtcccgggacaagcacggctaatttgggtagttgagtagagacagagtttcgccagtgttggccagactggtctccgaaactaccgtgatctcaagtgatccacctgctcgggctctccataagttgctgggattacagtgttgttgagccactgcagctgggcatagattgagtttatagtgcagatgtgtttctgaacaaggtatacggtcagcacccaacggcaactgcattttgtacactgacacgattgtgggacgcacgggtgttgccccaggttacaaacaacctgtggttgatcaatccgaaaaca

SEQ ID NO: 526090 - DNA, 2337 bp, Homo sapiens
  misc_feature (318)..(318): n is a, c, g, or t
taggagaaaggcacagcgcctggagggcgggagtggggcttgctgcagacggctgtctcctgcctccttggctcttgcactgccaggaacacgctctccccaacacctccatggctcattccccaaattcaagcttgtagttggttgaattgtggccccagagatgggattaaggattttgagattatgccagattatctgcgcgggcccaggatcatatgagtttgtctcttctcccgtattagttttgtccgcgctcggccgccgtgcagtcggtcgttccacttccgccttcgcccacgtggtccggctccggcncacgcgagccgcgtcgcgaatggggcaggagcgagcctctctggtcccgacgcgggtggcccgggtctcctcgactcctgaggaaagcccaccgggcggggcgggaggtgaagaggctggggaagtcagaggttaacctgggcgtcaggggacgttggagttgatccgtcagggtcccggggcggtctgggggcagtagagacggggcttgggcgcggggcctgagaggtcaggggtcagcaggagtgaggctggggcgtccaggtccgagaggtcaggggtcagctggagaggggctggggcgccggtttcccggaggtcaggggtcagaaggaacagggctgcagcgtcagggtccgagaggttaggggtcggcagaggcggagctggggcactgggggtcaggggtcggggatcagggcggggtcgggtgcactggtagcctgcgcatgggcctccagcttcgcgcgctgttgggagccttcggacggtggaccctgcgcctgggaccgcgtccgtcctgctcgccgcgcatggccgggaacgcggagccgccgcccgccggagccgcatgcccccaggaccggaggtcctgcagcggccgggccgggggcgaccgcgtctgggaggacggagaacatccggcgaagaagctcaagagcggtggcgacgaggagcggcgcgagaagccgcccaagcggaagatcgtgctgctcatggcctattcgggcaagggctaccacggcatgcagaggaatgtcgggtcctcacaattcaaaacaattgaagatgacttggtgtccgccctcgtccggtcaggctgtattcctgaaaatcatggtgaggacatgaggaaaatgtccttccagcgctgcgcccggacagacaagggtgtgtccgcagccggccaggtggtatccctgaaggtgtggctgattgacgacattctagaaaagatcaacagccaccttccctctcacattcggattctgggactgaagcgggtcacgggcgggtttaactccaagaacagatgtgatgccaggacctattgctacctgctgcccacgtttgcctttgcgcacaaggaccgggacgttcaggatgagacctaccgcctgagcgccgagacgctgcagcaggtcaacaggctcctggcctgctacaagggcacgcacaacttccacaatttcacctcgcagaaggggccgcaggatcccagtgcctgccgctacatcctggagatgtactgcgaggaaccctttgtgcgggagggcctggagtttgcggtgatcagggtgaagggccagagcttcatgatgcatcagatccggaagatggtcggcctggtggtggccattgtgaagggttatgcccctgagagcgtgctggagcgcagctggggcacagagaaggtggacgtgcccaaggcgcccggactcggcctggtcctggagagggtgcacttcgagaagtacaaccagcgctttggcaacgatgggctgcatgagccgctggactgggcgcaggaggaaggaaaggtcgcagccttcaaggaggagcacatctaccccaccatcatcggcaccgagcgggacgaacgctccatggcccagtggctgagcaccttgcccatccacaacttcagtgccaccgctctcacggcaggtggcacgggcgccaaggtgcccagtcccctggaaggcagtgaaggggacggagacactgactgaggcgatgggagctgcccaccagagtgcctctgagcagctcacagtgtgtgcccagatgtgccacccctgtgggcagcaagaagctgggatcgctgcagccatgttttcccggccatgccggcgttgtaacctcaggaccttcccttgtaggaacagcctttctcgaatctgttttcagctcttgcattgcatagatgaacctcagcatgtaaagaactatttttttaaagaagtgattttcttattaaacaagtacaaattttgcttagtcaaaaaaaaaacaaag

SEQ ID NO: 526091 - DNA, 246 bp, Homo sapiens
acatgatacaactcgagctcggtacctgaacattcgtgtccgaactcctgactcaagtgatgctgcctgctgggcctcctaaagtgctgagattacagatatgagcctagtgtgcccaggtcctcaccttgagccactcttaaaatattttctactaaatttatatttgtcagtggttttatccattcgttttcttgtttctctttttttctttttttttttttggggagacacagaatggtccag

SEQ ID NO: 526092 - DNA, 1945 bp, Homo sapiens
  misc_feature (318)..(318): n is a, c, g, or t
taggagaaaggcacagcgcctggagggcgggagtggggcttgctgcagacggctgtctcctgcctccttggctcttgcactgccaggaacacgctctccccaacacctccatggctcattccccaaattcaagcttgtagttggttgaattgtggccccagagatgggattaaggattttgagattatgccagattatctgcgcgggcccaggatcatatgagtttgtctcttctcccgtattagttttgtccgcgctcggccgccgtgcagtcggtcgttccacttccgccttcgcccacgtggtccggctccggcncacgcgagccgcgtcgcgaatggggcaggagcgagcctctctggtcccgacgcgggtggcccgggtctcctcgactcctgaggaaagcccaccgggcggggcgggaggtgaagaggctggggaagtcagagctcgccgcgcatggccgggaacgcggagccgccgcccgccggagccgcatgcccccaggaccggaggtcctgcagcggccgggccgggggcgaccgcgtctgggaggacggagaacatccggcgaagaagctcaagagcggtggcgacgaggagcggcgcgagaagccgcccaagcggaagatcgtgctgctcatggcctattcgggcaagggctaccacggcatgcagaggaatgtcgggtcctcacaattcaaaacaattgaagatgacttggtgtccgccctcgtccggtcaggctgtattcctgaaaatcatggtgaggacatgaggaaaatgtccttccagcgctgcgcccggacagacaagggtgtgtccgcagccggccaggtggtatccctgaaggtgtggctgattgacgacattctagaaaagatcaacagccaccttccctctcacattcggattctgggactgaagcgggtcacgggcgggtttaactccaagaacagatgtgatgccaggacctattgctacctgctgcccacgtttgcctttgcgcacaaggaccgggacgttcaggatgagacctaccgcctgagcgccgagacgctgcagcaggtcaacaggctcctggcctgctacaagggcacgcacaacttccacaatttcacctcgcagaaggggccgcaggatcccagtgcctgccgctacatcctggagatgtactgcgaggaaccctttgtgcgggagggcctggagtttgcggtgatcagggtgaagggccagagcttcatgatgcatcagatccggaagatggtcggcctggtggtggccattgtgaagggttatgcccctgagagcgtgctggagcgcagctggggcacagagaaggtggacgtgcccaaggcgcccggactcggcctggtcctggagagggtgcacttcgagaagtacaaccagcgctttggcaacgatgggctgcatgagccgctggactgggcgcaggaggaaggaaaggtcgcagccttcaaggaggagcacatctaccccaccatcatcggcaccgagcgggacgaacgctccatggcccagtggctgagcaccttgcccatccacaacttcagtgccaccgctctcacggcaggtggcacgggcgccaaggtgcccagtcccctggaaggcagtgaaggggacggagacactgactgaggcgatgggagctgcccaccagagtgcctctgagcagctcacagtgtgtgcccagatgtgccacccctgtgggcagcaagaagctgggatcgctgcagccatgttttcccggccatgccggcgttgtaacctcaggaccttcccttgtaggaacagcctttctcgaatctgttttcagctcttgcattgcatagatgaacctcagcatgtaaagaactatttttttaaagaagtgattttcttattaaacaagtacaaattttgcttagtcaaaaaaaaaacaaag

SEQ ID NO: 526093 - DNA, 2447 bp, Homo sapiens
  misc_feature (318)..(318): n is a, c, g, or t
taggagaaaggcacagcgcctggagggcgggagtggggcttgctgcagacggctgtctcctgcctccttggctcttgcactgccaggaacacgctctccccaacacctccatggctcattccccaaattcaagcttgtagttggttgaattgtggccccagagatgggattaaggattttgagattatgccagattatctgcgcgggcccaggatcatatgagtttgtctcttctcccgtattagttttgtccgcgctcggccgccgtgcagtcggtcgttccacttccgccttcgcccacgtggtccggctccggcncacgcgagccgcgtcgcgaatggggcaggagcgagcctctctggtcccgacgcgggtggcccgggtctcctcgactcctgaggaaagcccaccgggcggggcgggaggtgaagaggctggggaagtcagaggttaacctgggcgtcaggggacgttggagttgatccgtcagggtcccggggcggtctgggggcagtagagacggggcttgggcgcggggcctgagaggtcaggggtcagcaggagtgaggctggggcgtccaggtccgagaggtcaggggtcagctggagaggggctggggcgccggtttcccggaggtcaggggtcagaaggaacagggctgcagcgtcagggtccgagaggttaggggtcggcagaggcggagctggggcactgggggtcaggggtcggggatcagggcggggtcgggtgcactggtagcctgcgcatgggcctccagcttcgcgcgctgttgggagccttcggacggtggaccctgcgcctgggaccgcgtccgtcctgctcgccgcgcatggccgggaacgcggagccgccgcccgccggagccgcatgcccccaggaccggaggtcctgcagcggccgggccgggggcgaccgcgtctgggaggacggagaacatccggcgaagaagctcaagagcggtggcgacgaggagcggcgcgagaagccgcccaagcggaagatcgtgctgctcatggcctattcgggcaagggctaccacggcatgcagaggaatgtcgggtcctcacaattcaaaacaattgaagatgacttggtgtccgccctcgtccggtcaggctgtattcctgaaaatcatggtgaggacatgaggaaaatgtccttccagcgctgcgcccggacagacaaggtcaggatctcattctgttgcccaggctggagtgcagtggcatgatcatggctcactgcagtctcaaactgctgggctcaagcaatcctcctgcctcagcctcccgagtaggtgtgtccgcagccggccaggtggtatccctgaaggtgtggctgattgacgacattctagaaaagatcaacagccaccttccctctcacattcggattctgggactgaagcgggtcacgggcgggtttaactccaagaacagatgtgatgccaggacctattgctacctgctgcccacgtttgcctttgcgcacaaggaccgggacgttcaggatgagacctaccgcctgagcgccgagacgctgcagcaggtcaacaggctcctggcctgctacaagggcacgcacaacttccacaatttcacctcgcagaaggggccgcaggatcccagtgcctgccgctacatcctggagatgtactgcgaggaaccctttgtgcgggagggcctggagtttgcggtgatcagggtgaagggccagagcttcatgatgcatcagatccggaagatggtcggcctggtggtggccattgtgaagggttatgcccctgagagcgtgctggagcgcagctggggcacagagaaggtggacgtgcccaaggcgcccggactcggcctggtcctggagagggtgcacttcgagaagtacaaccagcgctttggcaacgatgggctgcatgagccgctggactgggcgcaggaggaaggaaaggtcgcagccttcaaggaggagcacatctaccccaccatcatcggcaccgagcgggacgaacgctccatggcccagtggctgagcaccttgcccatccacaacttcagtgccaccgctctcacggcaggtggcacgggcgccaaggtgcccagtcccctggaaggcagtgaaggggacggagacactgactgaggcgatgggagctgcccaccagagtgcctctgagcagctcacagtgtgtgcccagatgtgccacccctgtgggcagcaagaagctgggatcgctgcagccatgttttcccggccatgccggcgttgtaacctcaggaccttcccttgtaggaacagcctttctcgaatctgttttcagctcttgcattgcatagatgaacctcagcatgtaaagaactatttttttaaagaagtgattttcttattaaacaagtacaaattttgcttagtcaaaaaaaaaacaaag

SEQ ID NO: 526094 - DNA, 321 bp, Homo sapiens
  misc_feature (23)..(23): n is a, c, g, or t
  misc_feature (68)..(68): n is a, c, g, or t
  misc_feature (273)..(273): n is a, c, g, or t
  misc_feature (307)..(307): n is a, c, g, or t
atttcagttcatccagatgtttntagaacattgaatagctatgaatggactggatgcggtatgtgtgngaaaaaaagaggactcccaaggtttgtgattgaatattaggaagaacagaattgctgtgaattgagatgtggaagaatgtagaagtagcaggttttgaggggcagggaaattcaagagtctggctttggtcatattaattttgagatgcctgtttgacatccaaaagacatagtaggttagtatctggagttcagagagaggtcnggcctgaaaatatacagtagttgtcagcatatanatttgaagttgtgg

SEQ ID NO: 526095 - DNA, 2236 bp, Homo sapiens
  misc_feature (318)..(318): n is a, c, g, or t
taggagaaaggcacagcgcctggagggcgggagtggggcttgctgcagacggctgtctcctgcctccttggctcttgcactgccaggaacacgctctccccaacacctccatggctcattccccaaattcaagcttgtagttggttgaattgtggccccagagatgggattaaggattttgagattatgccagattatctgcgcgggcccaggatcatatgagtttgtctcttctcccgtattagttttgtccgcgctcggccgccgtgcagtcggtcgttccacttccgccttcgcccacgtggtccggctccggcncacgcgagccgcgtcgcgaatggggcaggagcgagcctctctggtcccgacgcgggtggcccgggtctcctcgactcctgaggaaagcccaccgggcggggcgggaggtgaagaggctggggaagtcagaggttaacctgggcgtcaggggacgttggagttgatccgtcagggtcccggggcggtctgggggcagtagagacggggcttgggcgcggggcctgagaggtcaggggtcagcaggagtgaggctggggcgtccaggtccgagaggtcaggggtcagctggagaggggctggggcgccggtttcccggaggtcaggggtcagaaggaacagggctgcagcgtcagggtccgagaggttaggggtcggcagaggcggagctggggcactgggggtcaggggtcggggatcagggcggggtcgggtgcactggtagcctgcgcatgggcctccagcttcgcgcgctgttgggagccttcggacggtggaccctgcgcctgggaccgcgtccgtcctgctcgccgcgcatggccgggaacgcggagccgccgcccgccggagccgcatgcccccaggaccggaggtcctgcagcggccgggccgggggcgaccgcgtctgggaggacggagaacatccggcgaagaagctcaagagcggtggcgacgaggagcggcgcgagaagccgcccaagcggaagatcgtgctgctcatggcctattcgggcaagggctaccacggcatgcagaggaatgtcgggtcctcacaattcaaaacaattgaagatgacttggtgtccgccctcgtccggtcaggctgtattcctgaaaatcatggtgaggacatgaggaaaatgtccttccagcgctgcgcccggacagacaaggggactgaagcgggtcacgggcgggtttaactccaagaacagatgtgatgccaggacctattgctacctgctgcccacgtttgcctttgcgcacaaggaccgggacgttcaggatgagacctaccgcctgagcgccgagacgctgcagcaggtcaacaggctcctggcctgctacaagggcacgcacaacttccacaatttcacctcgcagaaggggccgcaggatcccagtgcctgccgctacatcctggagatgtactgcgaggaaccctttgtgcgggagggcctggagtttgcggtgatcagggtgaagggccagagcttcatgatgcatcagatccggaagatggtcggcctggtggtggccattgtgaagggttatgcccctgagagcgtgctggagcgcagctggggcacagagaaggtggacgtgcccaaggcgcccggactcggcctggtcctggagagggtgcacttcgagaagtacaaccagcgctttggcaacgatgggctgcatgagccgctggactgggcgcaggaggaaggaaaggtcgcagccttcaaggaggagcacatctaccccaccatcatcggcaccgagcgggacgaacgctccatggcccagtggctgagcaccttgcccatccacaacttcagtgccaccgctctcacggcaggtggcacgggcgccaaggtgcccagtcccctggaaggcagtgaaggggacggagacactgactgaggcgatgggagctgcccaccagagtgcctctgagcagctcacagtgtgtgcccagatgtgccacccctgtgggcagcaagaagctgggatcgctgcagccatgttttcccggccatgccggcgttgtaacctcaggaccttcccttgtaggaacagcctttctcgaatctgttttcagctcttgcattgcatagatgaacctcagcatgtaaagaactatttttttaaagaagtgattttcttattaaacaagtacaaattttgcttagtcaaaaaaaaaacaaag

SEQ ID NO: 526096 - DNA, 446 bp, Homo sapiens
tgacaccatcgaggagtgatggtcttatcagtcaggctcttcatgtaagtatctgcatcccacctgctagtagacggatgtaccacggtgcaaggtggactctttctggatgttgtagtcggacagggtacgaccatcttccagctgttttccggctaagatcaacctctgctgatcaggaggaatgccttccttatcttggatctttgccttgacattctcgatggtgtcactgggctccacctcgagggtgatggtcttgccagtgagtgtcttcacgaagatttgcatcccacctctgagacggagcaccaggtgcagggtggactctttctggatgttgtagtcagacagggtacgcccatcttccagctgttttccagcaaagatcagcctctgctggtcaggagggatgccttccttatcttggatctttgccttgacat

SEQ ID NO: 526097 - DNA, 1392 bp, Homo sapiens
gtgatatttccagtcatgtataaagaatcaaatagggccattagcataatatatccatcactccaagcatgtatcatttctttgtgttggagacattccgtatcttctcactattggaaaattacaataaatggttgtaaattcagtcaccttatagagcactgcacctgtccctcctgtccatcgtcctcctgtgcctgttccccagcctgtggctgccccctccccagagaagccgatgcttgctggagcttggtcggtgctctgggtaaggagacgctggggctcacgccgtgctcaggctgctccctggtcatccaggcacttctcacctgcctttctcctccctgaccacctcccccctaggactgaagcgggtcacgggcgggtttaactccaagaacagatgtgatgccaggacctattgctacctgctgcccacgtttgcctttgcgcacaaggaccgggacgttcaggatgagacctaccgcctgagcgccgagacgctgcagcaggtcaacaggctcctggcctgctacaagggcacgcacaacttccacaatttcacctcgcagaaggggccgcaggatcccagtgcctgccgctacatcctggagatgtactgcgaggaaccctttgtgcgggagggcctggagtttgcggtgatcagggtgaagggccagagcttcatgatgcatcagatccggaagatggtcggcctggtggtggccattgtgaagggttatgcccctgagagcgtgctggagcgcagctggggcacagagaaggtggacgtgcccaaggcgcccggactcggcctggtcctggagagggtgcacttcgagaagtacaaccagcgctttggcaacgatgggctgcatgagccgctggactgggcgcaggaggaaggaaaggtcgcagccttcaaggaggagcacatctaccccaccatcatcggcaccgagcgggacgaacgctccatggcccagtggctgagcaccttgcccatccacaacttcagtgccaccgctctcacggcaggtggcacgggcgccaaggtgcccagtcccctggaaggcagtgaaggggacggagacactgactgaggcgatgggagctgcccaccagagtgcctctgagcagctcacagtgtgtgcccagatgtgccacccctgtgggcagcaagaagctgggatcgctgcagccatgttttcccggccatgccggcgttgtaacctcaggaccttcccttgtaggaacagcctttctcgaatctgttttcagctcttgcattgcatagatgaacctcagcatgtaaagaactatttttttaaagaagtgattttcttattaaacaagtacaaattttgcttagtcaaaaaaaaaacaaag

SEQ ID NO: 526098 - DNA, 146 bp, Homo sapiens
ggtggagcaggaccaacaaaaactataactgctggtccagatcaaacagaaatgactattgaaggcgtgcaggcccagaggggagtatggtggttaggtctatgctcagaatccaagcggagagagtcagcctcgggttcagactg

SEQ ID NO: 526099 - DNA, 979 bp, Homo sapiens
ccctcaaaccatatataatggattaaatgataacatctctcccaaacttcatgtaatataaggatagagagcatctgaatgactagcttcttacaggacatttctagtgaagtaaaccccgcgtcagcgatgaaacagattcatcctctgctccttccaagagaacgaggtgggaggcagcgcaccaacacaactactactatctttcaagccagtaatgcagaaattactgtcatgatcacgttgatcgtagcgaagtcagctgcccgtggtatgctctccaggtgcactgtctattacaccagcaacttcccaaaaggcatgttactgtcgcatgtagtttgtgcacgttctatagacatgggaaaattattgaagaagaagctttcttggcttggaaagaagatataacccaatgagtttccgggaaaaggcaaggcttatgttccaggtgaatcagtggctaacctggttagaaactgctgaagaagaagaatcagaggaacgaacgctgagctaaagaagcaggccaacaggccttaaattgtgcaaaacatactgttgctatgatgtacactgcatatgacctaaccactgtcgaaaattcattccgctgttaactgttttcacgggttatttaacagcagaaagcacgctccgctccagagaatattgcgtgtccaggccataaagggttacactaggtaagttggtaaatggtcccctcaagttaatatggtccaaacccagtcgaaaattaattttgtcacggaggtttatccttcacccgggtaaagaaatattggtaatcattaaagcacagacttgttcgaaacatacaatgcaataacgttttctccacaagccgagagagccacgcccacaaaatgtgaaggtgaccttcctgtcaacagcccagtatatcacaagaccgtaataaaggcgtgacagcatgatcatttatacagcgccactacga

SEQ ID NO: 526100 - DNA, 160 bp, Homo sapiens
cgtactttgcaggatgcggaaagtcacgatagtaaaccatctaccatcacatccatgatagccatccgtccatcaccctgtatctcaggaacaaatgtacaatagattacctttaaagcatgcatagtacatttgttcctagagatacaggttgctggac

SEQ ID NO: 526101 - DNA, 346 bp, Homo sapiens
ggcgctcggcgccgttatgcgaaccgcgtcacccactacgtcaaggacggcctcgctggacctcggtccgaagggcgcggcctggtgtcacggttggtaccggtgacgggggcatccccgacctggacaagctgcccgcaccgttccgtacggtcgtggagagcgcctacggacacggtgtcggcgacgtcttcctgttcgccgctccggcggcgctgatcgccttcctgatcacgatcttcatcaaggaggtcgcgctgaagacgaacgccgcgaacgacgccccggcggaggccgaggttcctgccgcggtgctcgccgaggtcccgtccggtgccgccgcgct

SEQ ID NO: 526102 - DNA, 306 bp, Homo sapiens
gagagtataaataatggagagcacagaattgagacagtaaaggagactgaaaggaaacaaaagaaccaatttgaggagagccagggataagctctatctagctgaagatggggtctgccagttccggagattggaggacctggccttgaatttctcctgagtgcaaagtgagaagctgaggacactgaagaccaataattccactgtcctttcaggtttcatgccaaaccccttaaatgacaattgtatatcaaatgccctctgacttttttgatctctctataaattgcaactcatatcttcaaa

SEQ ID NO: 526103 - DNA, 199 bp, Homo sapiens
cgtgcgacctcttagcaggataactactctcacccgggagtctccgtagaccttaccatctgctccttacacctagcaggtgtctcctctatctctaggggccactcgaatttcatcacaacaattatcattataaaacccccctggtttaactctgtaccccacaaccctcttcgtctgatccgtcctaatcacagca

SEQ ID NO: 526104 - DNA, 118 bp, Homo sapiens
  misc_feature (62)..(62): n is a, c, g, or t
gcggccctgcacgttacctaggaccgctcaccggtcgcttgtgctcctctgtctttcctccncccggtgccatcatgcggacgggccagtcagtgctcctgggctccgttcaccatcc

SEQ ID NO: 526105 - DNA, 366 bp, Homo sapiens
ccttgcccagaggctctgcggagggctcagggaaggaaacgcagtccgcccctgtccctgcggctctgggttggaaactgtgagaaaatgggtcaaagtgggtctgtaggagtgtccacccgccccgccggataaagcgccgctcccccgtagtgaggatcacgctcttggggagagttgaggccccaagaaagtccataaccactgggctgggggtttccacgacggtatagaaaccactcagatcacacacatcagctgacacacacagtgcgctcacgtggaaacaccacggaatcaagtgagcaaatggacttttccctaaagccagaccacaggctgcggaatcctgccttccgcagggac

SEQ ID NO: 526106 - DNA, 219 bp, Homo sapiens
  misc_feature (8)..(8): n is a, c, g, or t
  misc_feature (83)..(83): n is a, c, g, or t
  misc_feature (182)..(182): n is a, c, g, or t
ctgtcggncggagacggatcgagggcagtgaggggcgcatatgatctaggcataatattcggagtatacgtagcggtaagtanaacgtactctagaatatagtagcatggcaattaaaggtgaatcgatcgcgcgcagatctgtcatgatgatcattgcaattggatccatatatagggccngggttataattacctcaggtcgacgtcccatggccat

SEQ ID NO: 526107 - DNA, 1660 bp, Homo sapiens
  misc_feature (555)..(555): n is a, c, g, or t
  misc_feature (1236)..(1236): n is a, c, g, or t
  misc_feature (1468)..(1468): n is a, c, g, or t
cttgtttcgacaggtttcttgtgctctcatctggtggttgtcctcccctgctcggtcgcggctcccccaagtgtgctggtgaatttacaacagggtgttggggaccacccacacgaggcccccttgtgtggccacaccggatgaataaaattgttgtgttgacaaacgagagggggatggggcacccccaagttgggtgtgggagaagaccgcacggatggcgggttgtatgtcccgtttaaaattcctgtgttgcccagcctgtcaccacgttgcgcccgggtgttccccccttatcggtactcccgtctctgttgtgaaagtcgtgtggtgaaaaagaaaaacactcgttgttgggccccgtttggtgggagaagaagccctgttgtggttggccagacgtttgggtgctcccgcgtgaggagtcctccccccccctgcgaggtttgttcctgggaccccacacgggtctgctgttctcccacagggttttgtcctcccgcccccaaaacgccgccccgccaagtgttgtgaagattgtggtaattataaggngcgtttttggcgtcctcacattggcgccgcttttcccaaattattttaaaagtggtaaacaggaccgcccccctatgtgttgtttttaaaaagttgtgtaaagagggttattggtgatagctcccacggaagaaagaatctgttggtgctagaatttttctccctcttatagtcctctcacggcgagaataacactatacggcgttgttcccaccccgcctctgtttgttgtgcaccacacctcgcccacgcccacatatattatcgcaccgcttcttacacctcatagcgccttttatattgtataaaaaatgtctaacacacccaacaatgtttgcctcttcttttgtgtaaaaaatgtttatatccccacgggagatatatatatcttagaggttttggtagaggtggtgagatattttgttctcacgcgcacagagttatttcccacgctgaaacacctctatttgtgtccccgccgctcttatattattatgtgggtacccaccacatgtgttatagacagcttctcccacacatttctccgtcgtataccacctccgcgtgctatagtgatatgtaaaattgtcccacagcgtgagactctaaacgaacactcttatcagagagtgtatagtgtttttatgaagagcgccccactcgtctctatatgatcttctntgagagagagcccactcagagatagtgtgttgtggagagatatgtgtgtcacacactcacacacagtttggtttcgagatatatacgctctcgagagcccacacactctgcgcacacactcgtgagatttgtttattaaaatgtagaaatatgagatatagaggttctcttttgtgagagtataatattatgtatactgccacctcgcctatttttggcttgagatatatanggaaatgggtcccaaagtgttaactaatatttcccacgtacccacaaacactactggagttacccattgagggaatgttgaatacgcactctcactgaatggctttgttttggtttggggcacgctgtcacccacagctaaagcccaatgttgctttaaattagctccattaaaatgtcttttaaaagtata

SEQ ID NO: 526108 - DNA, 369 bp, Homo sapiens
aaaaccccaggttcaatttgctattcctttcacctgcccctagaaggggcaagaggcgggtgagcaggacagatggggctattgaaatggttgctagaggaattacaaaaatacactctgatgtagcaacaggggtggggtgaaacatgccagggggctggggaggctcaatcagccgggaaggttcttgggggcaacgaaggcttgcggggatctgcagggcgcttaagaggcctttgggggaagtaagggattacctggatttccccagggcggccagggatcttgggggccttggaagcaacaattgcctggtttttgggggggggaattccatccctttgggtacttgacaccttgggggcgtgg

SEQ ID NO: 526109 - DNA, 544 bp, Homo sapiens
acaccaccacatcagtgctgaggacaaggccaccataagtcagccccctcgtggcgtagtgggggcacagcgtgtgctccaatgtggcaaggtaggacggcatggacgtgtggagagaggcagcaggcgctgaaggactggacagagccctgggaggcgggcagaaggctacgcaggactgaggatgaagatgcagcccctggatggtcccagactctcccgacatgcccagctcaggagcttcgagccacaggcctggcctcatatggcatgagggggagctggcataggagcccactccctgctgtggtcctgccctctgtcctgcagactgctcttagccccctggctttgtgccaggcctggaggagggcagtcccccatggtgtgccgagccaccgcctcaggaatcaggaggccagcctggtaccaaaaggagtacccagtgcctggtacccaggcccactcgagaatggtctctggactcaccttgagacggcggagctgctgggcctaaagaccactcctgggggtctcctgctgc

SEQ ID NO: 526110 - DNA, 135 bp, Homo sapiens
gcacctatcggggtcggcccaattcgcaaaaagacggaaggaggagagagcttctgaagcttcttccaggcattctcaaggcccagagacggcttcacaccagtggtcgcagcagagatcttcacacacgttaga

SEQ ID NO: 526111 - DNA, 1061 bp, Homo sapiens
gggagtcggaaccctgaacggaagcgggctctcgccgtacgagtgtgcctgctggaggaatgccgcgtccgatgccggacagatgatgactacgaggactacgtgccctttgtgccgttaccgggcagcgccggcagactacttgctccatcagagctgctgcagcgaagcactgccacggggactctgcgagacggaagacgtcacgcagcgacacgcggctacgtgaatgcccggtgatcactgagtgatcgacatcccttctaaggcccttcagatcctacgtcagcctcctggatcatttctcagcacctttcgatgacaaggctgaatacgtcgcaaacgaggtctgcccatggagcatgcagcgtgaacgcgaccgaaagagaagatcctgtggaggagttgttgccgtagggaccgtcgcattggtgtcacgatgaagggagtctggtgtacgcgggcaatcactgccctgtggcttgaggcgcagatccaaagcgcccgcggcattggagaataccgtgccaccagtatactggttcattgtcgcctactgagtatggaacgaactcctacattgaggcccgcggattgcctcgtactggtaaactaccctatagtcgatcgcatgcgaaggcgcgtaggacgtgcagtatggtcagacccgcaagtaaatgcatctttaacagggctcccgtagagagatctttctttgcccaccaggcccttgagtatagccctcgacgaaacgcaatttgggctaacagcgcaatcgggtcaagccccgttgacacaattccgagggtccatttcgtgacacgctcctatctcgtccattcgttccttccgtaagctgtacgcagggcaccgcgttcccgggctgttaggcgttgctgttcccccgtggccccgtggcttctcgcacctgcctggtccgcagcgaggacgttcgcgctatgctcgggtgcagccggggggcccgtctggtctcttccccctgccgctggagggagggtgcgcccggtggcccctttagcggtttggggaaccttttggcc

SEQ ID NO: 526112 - DNA, 353 bp, Homo sapiens
gctcgacctggcggctttgaaacgactgactttcttcactttgccatccctttcttccataagctccccgatgccttcgtcttcgttgcccgttggactttgaagccgccttgctccctgaccatctcgttgcgccggcgatagtagtctgcagccagctcacgacgtgcaagaaggggatcgtgcgagtctgtcgaaggcgcatggtaggcgcggcggcgggtcgctcgacaagcgaatcagctaaaatcgggccctctcccgcagccggcgcttcctcctcgtttgtagcgcgagagcttcggctttgaatcgcgaaggtctggccggctttggggcagataccgtcgacg

SEQ ID NO: 526113 - DNA, 314 bp, Homo sapiens
  misc_feature (20)..(20): n is a, c, g, or t
  misc_feature (33)..(33): n is a, c, g, or t
  misc_feature (100)..(100): n is a, c, g, or t
  misc_feature (115)..(115): n is a, c, g, or t
agggaagagccccccgggcnagttcttgacctntttaagatctgcatggaggaactcttccattaccagttccttcttgcagaaggaaggggaaaccttncatttatcatgccantctgtttcatgcaggttttttggttccttacttgcacaaataattgcaccaactccttagtgccgattccgcccacagagagtcctggagccacagtcttttttgctttgcattgtaggagagggactaagtgctagagactatgtcgctttcctgagctaccgagagcgctcgtgaactggaatcaactgcttcagag

SEQ ID NO: 526114 - DNA, 706 bp, Homo sapiens
gtaagaagaggaggaggaagatgaggaagaggaggaagaagaggaggaggaggaggaagaagagcctcagcagagagggcagggagagaagtcagaccacgccctcacggaagattctggaccctaacactggggagccagctcccgtgctgtcctccccacctcctgcagtacgtctccagccggttcctggcttttccctctccatgagaagcgtgcgtgcgccgtagggcccaagagctccgctgctgagtagcccagcgagactgacaagcgtctgaccccgagaaggtggtctctggacttcctaaaggtgtcatctgtgttcaaggacgaagctacctgtgaggatggcagtgcaggatgcagttagatgccctgatgcagaaggctttcaactcctcgtcgcttcaagtccaacagcttcctcaccaggctgtcgtgacacatgggtctgctcaaagagtgaagcagacaggtacaagagcatatgccaagccatgtactggaacgcactgatggctgactgaacgcaacgatggtggcaggaacggactatttaacccaagggcccttgcacccccatgaatgcatggcgtacgtgacacaaagaaccaaacagagcactggaaatactgactcacttcgacgagacaagatctgtgcgaaccgctgtacacaggctctagaatcaaagccacatcca

SEQ ID NO: 526115 - DNA, 539 bp, Homo sapiens
ataaggaagtaaagaatcgctgggactatcataatcttgtgcagaacctgatgcgtgaaaaggccaagaacacatgataaattgggtggagaagccgtggtgcaaagcatctccccccagcaggaaaaggagacaattgccaagtgcattgcggccctaaagctgctggcaaagaagggtcaagcccagccagttatgtaaatggatttatcccaattgagacagctagaaacagttggctgactaaatggaaactagtctatttgccaaagtctttttgggttggggtctactgaagttatagtttccccttcctaaaaatgaaaagtttgtttcaaatagtgagagaacgaaatttttatcggccagtcagatgttttctccccctttttggccccgcctttgggggggcccggggtccacttttgaaaaagcggttggcctttataaaaacttggggcctgactaaaaattaacagggtatagtttaaatttggaattaattttccccttttgcaaaaaagggcccattgaatgga

SEQ ID NO: 526116 - DNA, 495 bp, Homo sapiens
ctttgttcacaggacaagtacagagaaagaaaaagggggcccaggtgaccggtgttcagcatacggaggatccacgatccacgctggcctctgagttcccttagtatctattgatcattattgggtgtttctcggagagggggatgtggcaggatcataggataatagtggagagaaggtcagcaggtgaacacgtgaacaaaggtctctgcatcatgaacaaggtaaagaattaagtgctgtgctttagatatgcatacacataaacatctcaatgccttaaagagcagtattgctgcccgcctgtcccatctccagccctaaggcggttttcccctatctcagtagatggaatatacaatcgggttttacaccgagacattccattgcccagggacgggcaggagacagatgccttcctcttgtctcaactgcaaagaggcgtgccttcctcttttactaatcctcctcagcacagacccccctgtggaaaag

SEQ ID NO: 526117 - DNA, 284 bp, Homo sapiens
ttctatagacgctatcccctatatagaagagattataacttaatgatacgcctcataatcatataccttatctgctacctagtactgtatgccctttacctaacatcacaacacaactaactactactaccatctcagacgctcaggacatagaaaccgtctgaactatcctgcccgccatcatcctagtcctcctcgcccttaccacgcatcctattacataccagacgcggtcaacgatccctcccttaccatcaaatcaattgaccaccaatggtactgca

SEQ ID NO: 526118 - DNA, 279 bp, Homo sapiens
ttagctgatctgcgtaccctttgctcggcgcggagtggctggctgtacgctgcactctaagtgactccactcatactctcctcctataggcgcaagggggattctcgtcctcatttacagcccttcttcgagcatcctgattgctgtcaacaaacatattcaggaacgtctttagtcctggtgcaggatagaaaccttcaactagtttgctgttatcaacaagactataggcaccatcccgtattgccacaacacctcgactccagcgtgctgatacaa

SEQ ID NO: 526119 - DNA, 267 bp, Homo sapiens
  misc_feature (3)..(3): n is a, c, g, or t
  misc_feature (50)..(50): n is a, c, g, or t
aancagcctttccagcatgcggaagaaggaggaagaggagctggttgccnttatgagcgcattgagcggcgccggtcagagagagtcgagcaacaaccccttcaaaactgagaaggaacgcgaacgtcaggctaagctggcggaggagaagatgaggaaggaagaggaagaggccaagaagcgggcagaggatgatgccaagaaaaagaaggtgctgtccaacatgggggcccattttggcggctacctggtcaaggcagaacagaa

SEQ ID NO: 526120 - DNA, 161 bp, Homo sapiens
  misc_feature (92)..(92): n is a, c, g, or t
agtaatatagaggatactaaggcactgctaaggatagaacaggtaaaagagaggggcaggcagttacaggaggctaatagggaaagtacagngcagaggggagggccctactacagtaccccctatacccacgctaaaccgcccgctacagtaacacacgg

SEQ ID NO: 526121 - DNA, 322 bp, Homo sapiens
agagtgctacaggcccataataatcataaattatacatacccttacgaaccaaaatgaactacaatttgtccgcttcattcattgtccccataatccttggcctacccgccgcgatactgactcattctatttccccctctattgatccccacctccatatatctcatcaacaaccgactaatcaccaccctacaatgactaatctagactaacctcaaaacaaataatgtccatacactacactgtgcggaatgtgtatcgtacttttattgactctgtgcatcaattttaggagtattatcttagccatctgcccctggt

SEQ ID NO: 526122 - DNA, 1161 bp, Homo sapiens
  misc_feature (455)..(457): n is a, c, g, or t
  misc_feature (535)..(535): n is a, c, g, or t
tggaaaaacaaaatcagggagggtctttaatggatgcgcccacagagccacccacaattgggaaggcatgtgagtgatgtgtctcaaatacagataatctcatctcaccaaagcaaatttaaaatatacaaagttttatctcgtgcaagcggctttggcaggtgacatgtgagtgccttcaataaattataaggaaacgtgtggcacaccccgtgtcacacagaggggctctcaccttctcaggggtctcttctcacacagaaaatcttcttctcccccttctctgtgtgagagtgagaggcgcgcttctcaggctctgcgggagatgtgtgcactctctcagagagaactcacactcttctctctctctctcataaagagagagagagagacactatgtgtgcgcgcgagagtcgccccagaaggtgtctctatctctctgcgagagtgtcgcnnncttttttctccacacagaggcagagcaagagagcgcgtgtgtgtgtgagagaagcagagtgagggctcacatatctcncgggtatctcactgtgtgtgagcactcttatacacagacagagagaacacacataatctcgcacagcaacacacactctgtctctctttatctcgcatatctacagtgtggggcattccacacacagagggggagaaaaaagaaacaacaagagcgcggggggcgcgcgcggcgacatatagcggccacagtgggagagagagggggggtggccccagaaaggccgcgtgggctccgcggggcattatagcgccttgagatgcaccaccaccctccgcggtgcgcgcggggcctctcgcggtgggagatctcgcggaccccgagtgtgtgagtgtggctgtgtttccgagggcgtgggtctccccgtggggggacacaaagtctctcacacactgtggggggggggggtgtggccccactgtgggagaagaagagacaaactaccaaggcggggggagagaagtcgggaagtggggggcgtccatttccccacaagagactatgggggcccccaaaccacaaaaaagtggtgaaccgaggggggaaaagccgtgatgtggaaaccctccggagaggcccggtgggaaatccacaaaaaaaccccccttatacaaggccccccgagg

SEQ ID NO: 526123 - DNA, 902 bp, Homo sapiens
atccaagatgagatcagcacaatcttcgaatgattatatcccatatgtttataaatggtagaaagacaacctatgcctctaatcttcataagttcattgacttgattcataacacgagcttcaggaagcttctacaacgagttgacaggcagatccgactcaataacattagtggcccttcgtgaaggaatatactgatccaacgtactagttggctggacagtgatcatattatgaacgtctgacagagtgtgatagtcggtctgatcacagaacctgttacttgctcttaaggactatccattctgaatatattgtacagatgtcctctatattttacttcaccagactctcaggtcaagttgaggcaatttctggcgcagaaattattcaggaatatcttgagcatccttgccgatccaggatggtaaccagggatacggagcgaagatagtagagtcttactgtccactgctcagcgaagtgattcatcagccgggccatgtcgcacgcaggaatacaataattgtgcgtggtattgacccaccgagacaagtttgaggatcattacaccaactgctacacgatttttttcagaagcaactctctgtatttactgaagttggaccacaggaatttagcgtcttgaatccacatagaattgattgagctgttccatctcaatattatctcacatttctgatatacgatcgacggagtgactgggaaaagctgcagatctaaccgatagtcatgaaccccctacattgaagcttgctccaggagaacttactaatcattcctcctaattggtaaaagaaagtcttcatgattccttcttttcaattggaactttcagatagcaggaaaaaaattcaattgctattttgataaaacatgcg

SEQ ID NO: 526124 - DNA, 223 bp, Homo sapiens
ttagatcgactctagagatccccttaaatgggcacagcaattggggagataggggaggggagggacaagctgacccaactatatttcaaattggatgtgggcagaggggcagattacacagttaggatcttactttaaaacgtagatacttagctctaatcccactgagacgtgtactaaaagcagaaaataaatttcacatactacatcagcacaggttcaa

SEQ ID NO: 526125 - DNA, 758 bp, Homo sapiens
cggctgggaaggtcagttcgttctctcctctcctctcttcttgttttgaacatggttgcgcgcactaaatgcagacatgttgttccatggcacttactgaacacgtgggttggcctgctcgatgcccccagacacacggtgctctggttccttccgacctcctgccactaatctcgacatcacgtctcatctgaggaaatgctgcaaacataaatatgccaggagggaaccccggttgtgcgtgcgcccaactcccaagtggcaaaaacgggattggacgaattctttagcgtagtcccctaacgcattctgaaacaacgacgaactcagattcctgaagaggcaggaagcagtggcttagtgaaacagcaacagacgcaacagcatgtcctttgcaacctgatcacacaacatgatgcccaccgactagaacctcctcattcatctccgacgtaaccgtctccttgattcaaccctggctatactacgaactgtcacacttacactaaactgatgtaggtcccaacttatcgcttaggttgaacaggcatctaagtcaacaacatccacggttctccactctacgatcggttcccaacgtacgtcgctgacactctgccgaacactccgcaacacctaacccactgcctaccctcaacccccaacacatccacctcatcctccctcggcctggccttccccacccccacctcaccaagtccaacctccgctcctccacatccacctcccgccattgc

SEQ ID NO: 526126 - DNA, 402 bp, Homo sapiens
  misc_feature (73)..(73): n is a, c, g, or t
gtctccaagataattaattccatggcctccccaaaatttcctctgcctcctagcactgattcttaaccccacncagcactttctatttattagggaaattaaaaaaaaaaaaaaaacccaggccaggcacagtggctcacacctgttatcccagttacctctgggaggccgaggcaggcagatcacttgagcccgggagttcaagaccagcctgggcaacatagtgacactccactctctaccaaaaaactatttaaaaagccgggcgtggtggtaggcacctgtagtctcagctacttgggaggctgaggtggaaggatcgcttgagcccaggaggtcgaggctacagtacaccatgattgcaccactacactcaagcctgggcaacagaatgaggctttg

SEQ ID NO: 526127 - DNA, 403 bp, Homo sapiens
  misc_feature (4)..(4): n is a, c, g, or t
  misc_feature (34)..(34): n is a, c, g, or t
  misc_feature (74)..(74): n is a, c, g, or t
  misc_feature (94)..(94): n is a, c, g, or t
  misc_feature (117)..(117): n is a, c, g, or t
  misc_feature (191)..(191): n is a, c, g, or t
  misc_feature (195)..(195): n is a, c, g, or t
  misc_feature (220)..(220): n is a, c, g, or t
  misc_feature (283)..(283): n is a, c, g, or t
  misc_feature (386)..(386): n is a, c, g, or t
  misc_feature (390)..(390): n is a, c, g, or t
  misc_feature (398)..(398): n is a, c, g, or t
aacncgaacaccgaaaatcggccggttttgcggnacgttcggcgaagcatcgccccgaggaagacgatcactcngatgtcttcggcgagggcgngatccatgatctctgcggtgaantgcgccagctgcgtgacggctccgtgccgagcagtaggaagatattgcccgcgttgtagccggtgatatcgagnttgncgtcgccggcgagcgcataccccgnagcgcccgggtcgcgcgggacccattcatccaggcgacggccagaccagcggcgtcggccgtnctcgtcggagacgacagggcggttgaactggaagtcgaagtacagctcagggtccacttcggcgatcgggacgacgtcgagctgctccttgagtgtcctccanccgnccgcttgngcctc

SEQ ID NO: 526128 - DNA, 513 bp, Homo sapiens
ccccccccccggggttttggggtttttggattttgccgggccccgggggccttaattttttttgcccctttcccccccttttttttttaagtttttttccccctttttggccttttttttgggttttcttttccccccttttccggtgatttgttcatttcccgggaaacgggaaagggggcccatttgcccaccccccctccccggggggggggggttttttttaaagggggggggcgccggggttttccccttttaaaaggcccgttgggcccccgggttttttttttttttaaaggccctttgggccccccctttttttttttgttttggttccctttttggcccccctggtttttttttttggtttttcctttttcccccgggggggttttttttttggtttccgctttgttggggtttgccccttttaaaaggaaaaaaaataggagaggattcccctttgggcaaggttaaaaaaaaagggggtcccccccccggaaaaaagattta

SEQ ID NO: 526129 - DNA, 197 bp, Homo sapiens
gcaagagcatgctgatggaccaacgtcggtcttgaactcttgagcttttcccagaaggctggacgagagaccttctgtacccgggccagagggggaacccttgcactgggccagcagcctcttctctgaggctccatgtaccagagttaaccagtgccaggactgagaaaggctccccaagaggcctcttgtgggct

SEQ ID NO: 526130 - DNA, 338 bp, Homo sapiens
ctaattggttcttcgatgacgaacatttggtatcccgccctgcctgcccgccacaccccacgtcacggtgcttcgactggccctcgcatcaaaagcgcagctcgaactgatgctggcgctgctgagtgatacctgccatcgcccgattgacggggtgttgagcgaaaaccagcacctgtggtgcctgagcctatcgaaggcactgaatccaaacacggtactgtcccacgacgacgatccactgcagctactgcgtgcgtgggtcgaacccactgtctggcagcgacttcgcctgcgctttgcgcgtcatcgaagaaccaattaggaataccgagctg

SEQ ID NO: 526131 - DNA, 750 bp, Homo sapiens
  misc_feature (442)..(442): n is a, c, g, or t
tggagatggagtctctttctgtcccccaggctggattgccgtggcccgatctcggctcacgtgcaaccctccggcctccgtgagtttcaagagattctccgtgcctcagcctcccgagttagctgagactacgggcgctttccattttgcccagctaatttttggtacttttagtagagacggggttttcgccagtgttggccaggcctggctctcgaactccttgacctcagttgattccacccccccttccgcaaggcctccataaaggtgcgtgggttaacaggcctgagccaccaaacccggccatgggaggcattttactcagtgacgtgctttaaaccttttttcaaatcccttgaattccttggccatctgagggttggtacctattcattatctttttaaaaaacaccttttaacagactttatttcctaaagncatttttgttcaaggcaaaattgagcccaaagtcctgagaggtcctatgtttcctctaccccttctccaaattgcggcagcctcaccaatgtgtcacctcctatttacggcgtccctgggttccccatcatgcccttaacctggaccttttttttgaccagagtccatagtttaccttgcggtcccccgtgatgttggctattcttgtaactctggcacagtctctttctgcctgtttccccttatagtttctcacggattgttttgtgacccccaaagccttgttttcccctgtttatccctattgc

SEQ ID NO: 526132 - DNA, 660 bp, Homo sapiens
  misc_feature (16)..(16): n is a, c, g, or t
  misc_feature (25)..(25): n is a, c, g, or t
  misc_feature (37)..(37): n is a, c, g, or t
  misc_feature (45)..(46): n is a, c, g, or t
  misc_feature (49)..(49): n is a, c, g, or t
  misc_feature (51)..(51): n is a, c, g, or t
  misc_feature (54)..(54): n is a, c, g, or t
  misc_feature (58)..(58): n is a, c, g, or t
  misc_feature (64)..(64): n is a, c, g, or t
  misc_feature (75)..(75): n is a, c, g, or t
  misc_feature (83)..(83): n is a, c, g, or t
  misc_feature (86)..(86): n is a, c, g, or t
  misc_feature (90)..(90): n is a, c, g, or t
  misc_feature (93)..(93): n is a, c, g, or t
  misc_feature (96)..(96): n is a, c, g, or t
  misc_feature (101)..(101): n is a, c, g, or t
  misc_feature (110)..(111): n is a, c, g, or t
  misc_feature (114)..(114): n is a, c, g, or t
  misc_feature (130)..(130): n is a, c, g, or t
  misc_feature (140)..(140): n is a, c, g, or t
  misc_feature (154)..(154): n is a, c, g, or t
  misc_feature (156)..(157): n is a, c, g, or t
  misc_feature (159)..(162): n is a, c, g, or t
  misc_feature (164)..(164): n is a, c, g, or t
  misc_feature (167)..(167): n is a, c, g, or t
  misc_feature (176)..(176): n is a, c, g, or t
  misc_feature (180)..(181): n is a, c, g, or t
  misc_feature (199)..(199): n is a, c, g, or t
  misc_feature (201)..(201): n is a, c, g, or t
  misc_feature (204)..(204): n is a, c, g, or t
  misc_feature (206)..(206): n is a, c, g, or t
  misc_feature (234)..(234): n is a, c, g, or t
  misc_feature (237)..(237): n is a, c, g, or t
  misc_feature (245)..(246): n is a, c, g, or t
  misc_feature (252)..(252): n is a, c, g, or t
  misc_feature (258)..(259): n is a, c, g, or t
  misc_feature (261)..(261): n is a, c, g, or t
  misc_feature (269)..(269): n is a, c, g, or t
  misc_feature (443)..(443): n is a, c, g, or t
  misc_feature (479)..(479): n is a, c, g, or t
  misc_feature (484)..(484): n is a, c, g, or t
  misc_feature (549)..(549): n is a, c, g, or t
  misc_feature (552)..(552): n is a, c, g, or t
  misc_feature (586)..(588): n is a, c, g, or t
  misc_feature (595)..(595): n is a, c, g, or t
  misc_feature (649)..(649): n is a, c, g, or t
cacagctgtgtttggntgcaggganaagagagctgtnaagaaganncanangcncccntccagnagctgaattcntgaagctnagnagcngcngcnagagnaggaagaanngcnaatcgcaaggcacctntgagaaattnaggatgcagatgtntnnannnntnaantgcatagtnatgnncatgaaaattgtatttgntnaangntatgatgtgaaaaataaaaaataataantgnaaaaaatnnaataanaattanncntcaccctntttaacaacctccacaaccaataaaaccaaacaaaactccttttataaaaatatcccctccaatacctcttccaaatcataaacatcaaaaaaccaccacaaaaaaacaacaacattaaacaacatatcccattaaacattcatcaaaacccaatccaaaaacaaataaccaanatctaaaaccacataatccccgaatccaaaaaccancacanatacaaaaaaacaacacatattactgaacacccatgtgaacatgctgaacccattgatgaaaatngtngacctgtggaaccacaaccgaaacaaatgccatnnngaacacngccacacacaaacatgatgatgaatgcatgcccgcaacaaaaaaaaaaaaccgngctgaacaaat

SEQ ID NO: 526133 - DNA, 307 bp, Homo sapiens
  misc_feature (43)..(43): n is a, c, g, or t
ttttctttttaggttttccttaaaaaaaattcccatctccccnctataaaatcaaaaaaaggggtttttttttcccccccctttaaccttttttggggaagacctttttggttttcagaaattaacataaaatcccaaagcaagattccgtaaattgaaaactttgggcagttgatcagctttccctaaggggctttgcccttaaataaagggggggatgggaaattatttcaaaaatggatggaaaactgtttcctgacccataaaagggatggacggggccgaaaaaaaaactttttttatatta

SEQ ID NO: 526134 - DNA, 177 bp, Homo sapiens
aagtttccaaaattttattgggatgaaatagaacatggattgagataaaccctcaaaacaatttttaaaaaaccaaaaagtacacaaaaaaacctgaatacaaatcttaacttttgaccagctcctaaggaagtactgacttaggaggctataatagatgccaatcagtaattagca

SEQ ID NO: 526135 - DNA, 551 bp, Homo sapiens
gccgtagtggcactgttgcgctggttagcgcccgtgagttctaaaactcaagttactgtgcagatatatgcaggatcgaggtgctgtgcttcccatcagagtccacacaattgttatatctgtgcagcatgatgaagaggttcgatctttgatgatatatgatgggaatgccctaagaggagaaagtcatcaagagcatgttgtgcctgcgaatatacctttgagtgagtgatacaagtctaccatgctacaggccaagtggcagagttgttatgggtgggcctcagggtgactgctggttttgactggaccgcacagatattcactagtggacacttatggcggttggggtgctcatggaggaggtgccttttcaggaaaggattataccaaggtcgaccgttcagctgcttatgctgctcgttgggtggcaaaatcccttgttaaaggaggtctgtgccggagggttcttgttcaggtctcttatgctattggagtttctcatccattatctatctccattttccattatggtacctctcagaagagtg

SEQ ID NO: 526136 - DNA, 1981 bp, Homo sapiens
gcaagttattgcactggttggcttgattgatcctgattacaaggaaaaattaggtcactactccaaatatgtcagcaaaccaaaaagattacctaggatgcctccaagtccaactgcaaagattaatggaaaattatatgtgtgtgcgtgtgtgtatgtgtgcatgcatgcatgtgttatatatatgtatatatttatatttatatatgttatacatttatatatgtaaaaccactgaggatttgaggattcagatatcctaggagtaaagatttgagttcattccttttttccaaggacaaaagacatatgacattgataataaaataaagaagtgaaaaattctactgtagcttttgttattaactataaaataaaaactctactctgcatatttttatcatatatttgggtatgtgagtatatatgtgtatgtatatgtttgtatgtatatgtatgtattgactaatttctttttctcttccctcatttcatttattattttatgtaaggcttggtggtggtggcttacattaggatttagtcttgaggttgcagagtattccagtgggactgtaactgaaatagaggactactgaacatcactagacaagtataaattatggtcaattagagatgaatacgtgagagtttagcttttataccacccttgttagggagaaggtgagagtgatttcatttatacagctatacatttaacttgttatatggcagcataaaactggtattgttttgaatggaagttcaagtacgtatacatgaccaccaaggatgaactgtgtcccaaagccactcttatatactcttcttggagaggctgagcctgaggatctgagaactaccttctcttttcagctgttagttttacctaattggggacactgaggaaaatgaaaaggcagggagaaaaattttgtttatatcaacatcattctagcagatggtgtttcacacaatcaaactgcagttggtttacatctcaagctggtatagtcatttccagaaccagccttgatgtgcacacacagagataccaaaagcagatgggtagtgcctgctcccagaggcctcagtcccaggtcacaatgtctaatctccacaagcttgaagtaccatcattagccaagcatcacaccatcctcagagatctgagcctcagctcctagtgtgctcctctctgaatttctcaggtacaagaattagtcaaatatatttgggttctcaagagaaatagaagcaacagtatatatacaggcacacctcattttgttgaggttcacttttattgtgtttcacaatgcaattttgttgtttttacacactgaaggtttgtggcaacaaccctgtgttgagcaagtctatctgcactgttttttcaatagcatgtgctcacttcaagtctctgttacattttggtaatcctcacaatatttcaaactttttcatcattattatatttggtatggtgatctgtgatcagtgatctttgatgttactgttggagttgttttgggacacccggaatcatgcctacataagactgttgtgtgcgttctgactgctccatcgtcaggcccttcccctgtctctctccctgtcctcggaccttcctattctctgatacaccacaaaactaaaattaggccaactaattaccatacgatagccactaagtgttcaagtgaaagaaaaagtcacacatttctcaatttaaatcaaagactagaaataattaagcttagtgaggaaggcatgttgcaagttgacataggctgaaagctaagcctcttgtaccagttagccaagttgtgaatgcaaatgtaaagttcttaaaggaaattaaagttctactccagtgaatccatgaatgataagaaagcaaaacaccagcatggcacatgtatacatatgtaactaacctgcacaatgtgcacatgtaccctaaaacttaaagtataat

SEQ ID NO: 526137 - DNA, 426 bp, Homo sapiens
  misc_feature (41)..(41): n is a, c, g, or t
  misc_feature (43)..(43): n is a, c, g, or t
  misc_feature (76)..(76): n is a, c, g, or t
  misc_feature (108)..(108): n is a, c, g, or t
  misc_feature (136)..(136): n is a, c, g, or t
  misc_feature (149)..(149): n is a, c, g, or t
  misc_feature (162)..(162): n is a, c, g, or t
  misc_feature (210)..(210): n is a, c, g, or t
  misc_feature (220)..(221): n is a, c, g, or t
  misc_feature (224)..(224): n is a, c, g, or t
  misc_feature (226)..(226): n is a, c, g, or t
  misc_feature (260)..(260): n is a, c, g, or t
  misc_feature (277)..(277): n is a, c, g, or t
  misc_feature (288)..(288): n is a, c, g, or t
  misc_feature (297)..(297): n is a, c, g, or t
  misc_feature (303)..(303): n is a, c, g, or t
  misc_feature (305)..(305): n is a, c, g, or t
gacaagggcaagaaaaatgctggaaatgcagaagatccccncncagaaacccagcagccagaagccacagcagcancgacttcaaaccccagcagcatgacagacacncctggtaacccagcagcaccgtagcctntgccctgtaaaantcagactcggaancgatgtgtgctttagggattttagttgcatgcatttcagagactttangtcagttggnnttnantagctgcttggtatgcagtacttgggtgaggcanacactataaagggctanaaggaaatgangctttctcnatatcntnctctgtacaataagagtgcttgttgttgagagttaccccttgctgtgtctcagcctgctactggacccacactgttagctgggtgtcactgctttgagcctgactgagggtaatggactat

SEQ ID NO: 526138 - DNA, 642 bp, Homo sapiens
  misc_feature (25)..(25): n is a, c, g, or t
  misc_feature (30)..(30): n is a, c, g, or t
cctcgtgggcaggtatagccgcacnacacncccggcgtatacggtgataaagaacaggccaaatgccgcgacaatgagaatgcccgacagcaggatgaaatcctgaggccagaacgtgcgccgaaaataaagaatttacgctccggcaggttccaccacaccgcctggtgaccgccccaattcagccacaccgtgccgaagtacaacaggaacagagcggcaccgccgaccatgcgcaagttgcggaacaagccagtgaaggcgcgggtgtagatcttctctctcgaagcgtagaggtcgacggtcttggcaggcggggtaacgtcatgtaccggtatctggtcgctcatcattgcatcccacggcggtggagatttgcctcggccagtacgtgccagccggggtcaaattaagggtgttgcagtggcctaatgatacgcccccgatggtgcgcaaagggtgcgacctttggtcgcgttgggggaaatcaattgatggtgtacgtgacctggatcaattgacttggcaagtatggacggtttttgtcggtaagccggtcattcgtcccatggattgatcagtgcaacgccgctcgattggaagtcgctgatgttgcgcgtgacgacggtgagcccatgaacc

SEQ ID NO: 526139 - DNA, 226 bp, Homo sapiens
tcaccttcatcgctggtgcagaagaggcaccacacccggctcttctgcactgacatgaacgagcgggttgggaaaagtggaaacattccagcaggcacgactgttgacgctgaaaatcacccaccccactgagttcgacttctacctttgtagtcccgctggcctcctggggacaagcaggccttcgctctatcacgtcctctgggacgactatcgtttctcctct

SEQ ID NO: 526140 - DNA, 676 bp, Homo sapiens
  misc_feature (102)..(102): n is a, c, g, or t
  misc_feature (115)..(115): n is a, c, g, or t
  misc_feature (146)..(146): n is a, c, g, or t
  misc_feature (221)..(221): n is a, c, g, or t
  misc_feature (224)..(224): n is a, c, g, or t
  misc_feature (234)..(234): n is a, c, g, or t
  misc_feature (240)..(240): n is a, c, g, or t
  misc_feature (242)..(246): n is a, c, g, or t
  misc_feature (248)..(248): n is a, c, g, or t
aggatgtctgcctcgctcagagaagaggctggcgtcgatccgagaaaccgccgatgtacaagcaggtattctgcgcctccgccgacctcgctcgatcacgcngagccaccgcatntgccgactcactcaagaggcgaatatcttgntgcgctcctcgatggagattcaagggcgtgacatccttggcccgcaatggcgcctcttgctgatgccagacgtantanaaaacattgncaaccntnnnnntnaaaacagccagcgcataatcacctcaagacaaaggacacgccatcgccaaaccaacaaacaccaggtccgggaccagccgagcctgcggcgcagcatccctgaccaggtcggcatcgcctccagtgaggaagaccgtgaaatcctccccccaatagcctcgcgccaactcgagctgagtcagcacgaaacctctaagcatgagcgtacaaccacgctcgacggcctctacggtcgtgcgacctggagagagacgctccagcgcccgctcagcggccgcgtcgtcgtagcgtatcttgcgagtatgggttcgcagttgattacgcataagcggcatacccggaaaaataaaactacctcaggtagctacccactggttggatcggttacgaagaagcaggtcagcgttcaccaaattacgtatgctctt

SEQ ID NO: 526141 - DNA, 117 bp, Homo sapiens
tatcaacgaaatgtgggatgtcaaaataaacagcttcatattcctctatgtacctagacatcaacaacatcgtagagttacttcaggaagtcggagtccaagttgattgttcctgct

SEQ ID NO: 526142 - DNA, 242 bp, Homo sapiens
cccgagagaatacctgctgctcccgcgagaattcctagctgcacccgcgagaattcctgctagctcccgcgagaattcctgctgctcccgcgagaattcctgactgcccccgagagaatacctgctgcgcccgagagaataccagctgctagggctgcaataatgaagggcacgatgaagtgaaaggtaacagactcgtgtaagggtgggactgtctactgagtagcctcctcagattcatt

SEQ ID NO: 526143 - DNA, 426 bp, Homo sapiens
ttccaccaatcagtcaagccaggtgcatcaagattatgagtagcatggtaaggccagtgaattccatgagcaaaagtccattgtcacacttgtttgagtttgaagtaagttccttagtcagaaggaatgctgtgtggaatactacgacagtggataaggcattctgtaagtccaaggatgacatttttggaagaaactttgcatacagggaacataaatctatgtccagggtaagtgtctgtttcagtaagaacaaaactctgtcccttccatgatggaatcagtccaatgtaatcaacctaccctcaggtgtctaactgatcacctcagagaatggtgtcatattgtgggctcagtgttgttctctgctacagccagattgggcattcagaggtggctatacaaataaattatatatcagtttta

SEQ ID NO: 526144 - DNA, 107 bp, Homo sapiens
agcagtccccgtgcaccctgtctctggcccatgtaggggctgcagcactgtgggcgcctagtagcacagattaaactctcaaacccacggtgtatcctctagtagtc

SEQ ID NO: 526145 - DNA, 188 bp, Homo sapiens
gttcccatcaagacttactcgatctggccaccaacaacaactacagcatgtggatagcttacagaaaatacagcctgctgtggaaatctctagccattcctctggcactcccttgatgtgaggttcttctgatcgtcttggagtgatggtgtcgatgttgccattttccaaagccacaaaatccccgt

SEQ ID NO: 526146 - DNA, 350 bp, Homo sapiens
  misc_feature (37)..(37): n is a, c, g, or t
  misc_feature (280)..(280): n is a, c, g, or t
  misc_feature (320)..(320): n is a, c, g, or t
tgtacctcaaaaaatcctttccgaattgtgcctaagnctccttcagattgtcccccttttaaaatttgaaattagcccagatgtggtggcttacacctgtaatccccagcattttgggaggctgaggtaggcagatcgcttgaactgaggagttaagagaccagcttgggcaacatggtgaaacctcgtctctacaaaaaatacagaaattagccaagtgtggtggtccacccctgtagtcccagctgctcaggaggttgaggcgggaggatcgcttgcncctgggaggtcaggactgcagtgagccatgcctcaccacntgtaatccagcctgagttacagagtgagac

SEQ ID NO: 526147 - DNA, 977 bp, Homo sapiens
  misc_feature (39)..(39): n is a, c, g, or t
  misc_feature (48)..(48): n is a, c, g, or t
  misc_feature (262)..(262): n is a, c, g, or t
attcacaaatcacaccatacatgcgcgtgtgcatgcganacgagcgancacacacacacacacacacagtccagcaccctcatcagttctctggtttaggttaggtccagatctgatgggactggtcaagaaggggatggtgggggctcctgaagcatttgccctttcttgcctcttgagaccttctttccattggcaattcaaaacaggctgacatacagagggctagcactctaatttgatgtggactcagccactcagnacctaggtctcaggctgcagcttatcctagctcagcaaattgcttcttagaatctttagcttgatttctgtcatttgagcccagggatctacccacttactgaaatctaaattttaaaaaatcagtgatgaaagtaattttcaggatttccctatttaaaagcatccatgaaacagttcctttatgccttctgtttaggatttccagaattaggaagggaaaccaggcttgtgccttggatccaaaagcagcaaaaatactacacttgccaaaagcaaactgaggaatgagcattggccagtcctagtatgaagtcaagaggtggacttttgttaagttagcccttaccatttagtgcttactgaatgccaacaatgcacttagaaaaataagggagacaagaatttacagaccataccctaaactggaaggtacaggaaagacacatctcctagagctgggaatgtgtccctaacatttcaagaagaagcagaaagtaggagagatcacgatctcagtctttttaggattccaacacaaaatggaagggagccctctgtggggtgatattacaaagggtttttcttgtctttctttaaaaaaaaaaggcattccttactggcttgctaccagcaattgaactgtattctttatatagctagagctgtttgtgtcttcttaaaataaactttttctgttaaaatcaaaaaaaaaa

SEQ ID NO: 526148 - DNA, 447 bp, Homo sapiens
  misc_feature (8)..(8): n is a, c, g, or t
  misc_feature (25)..(25): n is a, c, g, or t
  misc_feature (50)..(50): n is a, c, g, or t
ccaatttnccccaactggcgaaaanggggatgtgcctgccaaggcgattnaagttggggtaacgccccgggttttcccccagtccacgacgttgttaaaaacgaacggcccagtgcccaagcctaaaattaacccctcacctaaagggaataaagccttgcggccgcaggaaagacacatctcctagagctgggaatgtgtccctaacatttcaagaagaagcagaaagtaggagagatcacgatctcagtctttttaggattccaacacaaaatggaagggagccctctgtggggtgatattacaaagggtttttcttgtctttctttaaaaaaaaaaggcattccttactggcttgctaccagcaattgaactgtattctttatatagctagagctgtttgtgtcttcttaaaataaactttttctgttaaaatcaaaaaaaaaa

SEQ ID NO: 526149 - DNA, 368 bp, Homo sapiens
cgagcggccgcccgggcaggtacaatggaatggaatggaatggaatggaatggaatggaatggaatggaatgatacggaatagaatggaatggaacgaaatggaatggaatggaatggaatggaattgaatggaatggaatggaatggaatcgttccgagtggaataggagggaatgtattcgagtggaatggaaaggaatggaatcaaccagagtggaatggaaaggaatggaatggaatggaaactaatagaatggaatcaacccgagtggaatggaatggaaaggactggaatggaaaggaatggaatggaatggaatggaatggaatggaatggaatggaatggaatgaaatcaacgcgagtgc

SEQ ID NO: 526150 - DNA, 897 bp, Homo sapiens
  misc_feature (39)..(39): n is a, c, g, or t
  misc_feature (48)..(48): n is a, c, g, or t
  misc_feature (262)..(262): n is a, c, g, or t
attcacaaatcacaccatacatgcgcgtgtgcatgcganacgagcgancacacacacacacacacacagtccagcaccctcatcagttctctggtttaggttaggtccagatctgatgggactggtcaagaaggggatggtgggggctcctgaagcatttgccctttcttgcctcttgagaccttctttccattggcaattcaaaacaggctgacatacagagggctagcactctaatttgatgtggactcagccactcagnacctaggtctcaggctgcagcttatcctagctcagcaaattgcttcttagaatctttagcttgatttctgtcatttgagcccagggatctacccacttactgaaatctaaattttaaaaaatcagtgatgaaagtaattttcaggatttccctatttaaaagcatccatgaaacagttcctttatgccttctgtttaggatttccagaattaggaagggaaaccaggcttgtgccttggatccaaaagcagcaaaaatactacacttccatttagtgcttactgaatgccaacaatgcacttagaaaaataagggagacaagaatttacagaccataccctaaactggaaggtacaggaaagacacatctcctagagctgggaatgtgtccctaacatttcaagaagaagcagaaagtaggagagatcacgatctcagtctttttaggattccaacacaaaatggaagggagccctctgtggggtgatattacaaagggtttttcttgtctttctttaaaaaaaaaaggcattccttactggcttgctaccagcaattgaactgtattctttatatagctagagctgtttgtgtcttcttaaaataaactttttctgttaaaatcaaaaaaaaaa

SEQ ID NO: 526151 - DNA, 794 bp, Homo sapiens
caagatggccgcccccgtggatctagagctgaagaaggccttcagcagagcttcacagccaagagattattgacactcaacatgaaggtgaagctcgcagacagtacagattgaacagctaaacagaacgaaaaagcatgcacatcttacagatacacgagatcatgatcgttgtggtagatgagactagaccatgtactgaacggtgtacggaaggaactgtcttcatctacttgcatgttgccaagggtagaggcatattcagcacgtcacgctcgttagagaagcagacatacatagcagaagaacacacagattaaagaactagaacagaaaaagtcctacctggagcgaagcgttcaggaagctgaggacaacatccgggcggatgctgatgtgcactgaagggcccaggtagggagcctctctgggaagctcttcctcctgcccctcccattcctggtgggggcagaggaagtgtctgcatgggaaagcagcgttctgcctctgctcccgatgggagtgcttctatcttcgcgatggcctggcaacatgcacattatttcgtgcatcaccctagagacccccattatgcttccccagcccgtggcagttatctacccgacctttgaccatgccacgctctggccaggaaacgacttgccgtctcgggatgtgtgatgaacgcccaggagcagggaatgatgggagccagggcatagataggaatgctctgccgtgagctttccagctaggcacgccagtcagagcaagtaaaaagcgtctgttccagt

SEQ ID NO: 526152 - DNA, 222 bp, Homo sapiens
cgagctcggtaccccggcaactgcttcggatgctcaaaaaaaaaaaaaagaaaagaaaagaaaccagtgcagtggctcatgcctataatcccagcactttgggagactgaagtaggcgaatcacctgaggtcaggagttcaagaccagcctggccaacatggtgaaaccccgtctctactaaaaaataaaaaagttagccagttgtgggggcgtgcgcctgt

SEQ ID NO: 526153 - DNA, 172 bp, Homo sapiens
ctcactcccacccccagccaatattctgcataagcaaaaattatggttaagctaagctgaatggggtatattcaaagtaagtacagacggcaaataggcaggcaaatacaggaatactttacaattagcccaccatggactattttgagtctctccatgggttccataattc

SEQ ID NO: 526154 - DNA, 925 bp, Homo sapiens
ttatttgctgaaataggtataacacttaaataaaaattaggcaaatgtagaatatctccttccatgaaatagagcagcaagagatagcaagtgtgcgggagaagtcctcgaagccatgatatgcctgatgaatcggtgaagaaggaacgtgaacctccggccggggggattcgctcatatagatacctaaagcagctgcactttacctagggcgataagacagcaacaagcggagcacaccgcgcagcgagctccgacgaacatgcagccaacgaatccaatagagaagaagggaagcgaaaaagcagcgaacaaagaacaaagcaaaaaaaaaaataaaacgaacaaacacacggccaagcaacgcccaaaacacacgacaaaagaacaacacgagcacacaacagacccataacgacaaggagaacgaacacgcgacacatacagtcagcacgcacacacaaacacaatgagcacaaaatatcgcaccaaagaaagcaaagaggaagaagaataagcaacaagaagagcaaagcacgccacggcccacagaacagacaacaacacacacacaaaacacaaaacaacaagatgagccaggaaggacagccaaaaacagccacgacccgcaacaacacacgccaacacaacaaaccgaaccacgcgcgagaaagccagcagcaacaaacagaacaggagggcaaggacgagaggcacgaaacacagaaatgacgagcacccggccaccgaacggacgagacgagaagagcacagagaaagacgacagacaacaagaaaagcagagagaagaagggagagacagatcgacgacaaagagacagacaagaaaagaacgacaaggaaggacgaagacaaggaccaagaggaagaaaaaagacaaaaacagaagaggagagagaagcag

SEQ ID NO: 526155 - DNA, 146 bp, Homo sapiens
acttttccctcccatctcatcttgtgactctcaccagccatggtgagagaatcgaccctcaggggggtgtactctcttataccctcctggtacagcacttggtgaggtcggatatgggatggtcttatcatggcaggagcgtgtgg

SEQ ID NO: 526156 - DNA, 770 bp, Homo sapiens
  misc_feature (290)..(290): n is a, c, g, or t
agcgggttggtgatctgtggatgttctggttagctagtacacgaagcgagagtatgaggtcgagctccgagcccgggctgcgtgccgggcattgcagggtgccgcaggagcacagcgtgctgttcatcccaggcatcataacgacttgcgaccactggaaggcccggacgcgcggactggtgcctggtgcgagctcgggctgttgaacacgggatgtcgcagaatcctgagaagaaaagagactaactgcttgaccttcgtgatctcacaggttggtctacgatgcatancttctagactccgggaagacgatttcctctccgagctgaggaatgtcctatgctgatgacctcttggtctaaactaactgcttcgatatactcgaccacgatccatggtgcccatccaatggggtctaggctgatagccaaggacactccatagtaagaaagcaaccttcttggctctgagatttgctcatacgcgctgagcgaaacgtgctctatcgggtactgtgtaatgctgcctgcgtaccttgaccgctgcatgcgggggtctcaaattccgttaccaagacggtaggacgaggggtgggcgcccctcgcattcccttggaacgccttgcggtcccgatccgttcaacggctcaagagacagctccagcgtcactcattaattcgagggacgcgggggaacttacgtttaactgggtacggtgggcgtgttcgtcgtccagaccgtctctttgaggaggggcgtacatggtttgc

SEQ ID NO: 526157 - DNA, 1029 bp, Homo sapiens
  misc_feature (101)..(101): n is a, c, g, or t
tgtagtggtcttccctcgcacacaggccctgggcggtttgctgtcctcttcgttcgtcgcgcctcgcagtgtttgggggccccaaaaggtgtttgggtaanttatggaagctcccagcccgtgttgtagttttgcacagagctggtacaggccttctcctttggggggtgtaccgccttcccttttagtgctcttggagaaatctcggaaaaaagtgtccgccgcgccaaccggaagttcccagaaggaggaacctgtgtcggcgaggccggggtagaaaataaggagatttccgtgagagactggatgttcaaaggcttctgagcctttaggtaagataagcctaatatcccggactgatgaaaatgctcttttctggaaatgaggaactacccgtcccaaattaagtgtgataaggagaagaacctgctgcacatgtcacacgagccccggtttaggaatgacccacgaggaagagttggtttaaaacccttggtgacccactagccccaattctgggacccaggcgagtttttaaacccaaatgactgaagcaccacggaagatggcccgtcacaacttctgaattgattggccacactttggtttcgcgtttctattccgccctctccttgtaccacgataaggttattgtcacacttcactaccacccacccaccgaatactcacgccaccacttctgggaattctgaactccacactgagattttcctgtaattgctgaccccagaggaaaccactcttaggacggggaacgcaccaattaccccttgtctttaaaagaagaagcatcttgattacccttgaattggacaccaatttaaaatctctgtccaaaaaatattccccagttctataaactttcctatttatgtatggagccagccagactgaaactgttgaggagcccctggaggaagaagaacgccagccccaagaagagaaagaagaatttgatgatgaagctgcagtagaggaagaagaagaagaaaagaaacccaagactta

SEQ ID NO: 526158 - DNA, 329 bp, Homo sapiens
ccccccaggggggggtccccccccgggggggcccctttttttaagggggcctttgggggggtttttcccccccccttttgggggggcccgggcccccttttcccccccccggggttttccgggggccccaaaagggggggcccccttttcccttttaaatttttttttttcccccggggccccccccccccccttttggggggcccttcccccccgccctggggggggttttattttgggggggggggttttcccctccttttttttttggggggggggcccccaattttttttggggggggggggtttttttttttttttaaaattta

SEQ ID NO: 526159 - DNA, 90 bp, Homo sapiens
  misc_feature (50)..(50): n is a, c, g, or t
atgttaattagcttgttttaatcattccacattgtatacaaaattatatncatgtcaaaacatcacactgtatgccacaaatatatgatc

SEQ ID NO: 526160 - DNA, 935 bp, Homo sapiens
ataatctcccatattgtaactgactactccggaaaaaaagaaccattaaggatacagtaggtatggtctgagctatgatatcaattggcttcctagggttaatcggtgtgagcacaccataatattgtacagtgaggaatagacgtagacacacgagcatatttcactccgttaccataatccatcgctatcccaagcggtcgtcgaagtattcagctgagtcgccacgagtccacggaaagcaagtatgaaatgatctgctgcaatgctctgagccctaggactacatctatctgtaacaccggtaggtggcctgcactggcacttgtataagcaaactcatcactagacatcgtacatacacgacacgtactaaccgtagtagctcacgtaccactatgtactatcaataggagctgtatttgccattcataggaggcttacattcactgatttcccctatatctcaaggactaaacccctagaccagaactacgccaaaatccattatcaactatcatattcatcggcgtaaatctaacttgctgcccacaaaactttctcggctatccggaatgccccagacgttactcggagtacccgatgcatacaccacatgaaagatcctatcatactgtagggctcatgccattgagtctaacagcaggacagtatcaataatatcatgactctgagaggcctcggtacgaagcgaaaaggtcctaaaagtagaacaaaacttcacataacgctggagtgacgataagggggaagcccagagctacacaacatacgaagaaacccgaaaccgtaagatctaggaagagaaaaggacaggaccgaaccccaaaggaggaacaaggcaacccatgcacacgaaataacaagaaagaaaagacaaaaaaaacaaagaggaggacgacctaaaaccaaaa

SEQ ID NO: 526161 - DNA, 365 bp, Homo sapiens
gcgtcgactatgaagttctccaaccaccatggaattaagccagaaatgaacagaagggaaagttgggaaatccatacatattcagaaattaaacaacacgactggacacagtggctcacgcctgtaatcccagcactttgggaggccaaggtgggcagatcacgaggtcaagagatcgagaccatgctggccaacatagtgaaaccccgtctctactaaaaatacaaaaaaatagccgggcatggtggcgggcgcctgtagtcccagctactcgggaggctgaggcaggagaatggcatgaacccaggaggcggcgcttgcagtgagccaagatcacaccactgcactccagcctgtggtcgacg

SEQ ID NO: 526162 - DNA, 132 bp, Homo sapiens
  misc_feature (86)..(87): n is a, c, g, or t
gataacatgggtggatttattcttagattgagtgcaactaaacagacaacagctttcatcagatacacaatctaacatctgcatcnnttacagagtcaatatgatactatatgtactgcatatatttcatca

SEQ ID NO: 526163 - DNA, 265 bp, Homo sapiens
gtccacttcagtctcttcagcagagaacatggctcattcactggtctctgtttgtttcttcattcaccccaaaggtcgcgattaatattattgacctctctctctatcatgccacaatatctcagtgcaattcagacaattgtgtcacacaatcttctgtatttgactacagcagtcataacaacaaggttgtcggaacgtcggcaggtctaaaggctagtaaggtattcacaggggcttccaattaggccactcaggtttgtag

SEQ ID NO: 526164 - DNA, 913 bp, Homo sapiens
  misc_feature (355)..(355): n is a, c, g, or t
agcgggtgggtggatcggcgggtgctgacgagtgcagccatggacaccgaggtgaacctcagccgcgctgaagcggttggatctgcgcgaccctgcgagctcttttcgagaggcatggagtggcaggagatccgcgggctggagcgccgggttccgagtgcctggaggatcgatgcacacatgcaaggagtgatctgccgagcagagtggtgggcgacaacggtacctgcagaccttgatctgtaggcgggacgacactcgatcggacgagaatgcgccgaatgctgcgcgtgggagtctagtgtagcgccgatgaataggcacatcgatactagtatcatgcagtccgcgactnctccgtgctaggaccagggcgtcgagcctgacgcccacggcttcaaccgttggcgccctggtcgggcactcaaggcaaggcatcccaaagagaatgttgtaccatgcattggagtagtgctcagattctaacgctacctcttatgacaagttccggagtaatgattctggaagctcgagtaaggagagcactctacagttgtcttccacgccataacagagttatatccgtgcatccgttgcggaccggacctccagcaggctcgtgctccaggctgtgatatgctgctaggtttagccgaataacagatcgacgttgctactcaccgggtttccatattactcaatccgagtgcaggatggtcggctcggcattcacactgtccgtgtacaagctattctgtcttgacaaagcaagcatgttggctcaagatgccagagggtgtgctctgcacgaggcatggtggcacgaggtgccttgtgtctctataattgctccttacgaaagggagttttcactccttaaggcctccaccagactttcctggctgggctgaaa

SEQ ID NO: 526165 - DNA, 322 bp, Homo sapiens
tcactctcatgtgtgcacgcatgacatttaggcacttttaaatccagtacgtagcggaatagatgatcttcattagactcatggtgtatctgagctctgctgccaaagggcctatagatgattttgcctccagaaaagctcttcgtttccaaatgcttcattactgagagacgtgcttatatccagaccgaagccttctttttgcctccaaggcataataaatgggaatcagggacatgagaacagaagcgactcccatttctgtcctaaatgaactagatggctattctaagatgtccgacttccgtattgtcagtgagca

SEQ ID NO: 526166 - DNA, 246 bp, Homo sapiens
aggtttgacctttgggaggtgataaggttgtgagggtagagccctcatgaatggcatcagtgcccttacaaaacaagccacagagagctccctttctgccttctgccatctgaggacacagtgagaagacagctatctgtgaaccagggggttggccctcaccagataccaaatcttctgggactttgagctaggacatcccagcttccagaactgtgaggaataaatttcagttattgataaaaa

SEQ ID NO: 526167 - DNA, 148 bp, Homo sapiens
tgctgggattacaggtgtgagccactgtgcctggccagtttttcaggtttcttgggcatcctcttggccaagggggaagggtctattcagtgggtggggggtgcttaagagtcactttgggtttacataccgtatcaatggctgtgta

SEQ ID NO: 526168 - DNA, 271 bp, Homo sapiens
tgccgttggggctcgagagcggttggcccaccctggctcgggcagctctgttctgctgcattctcccgtctgcctgtcgccacttgtcctgcaggtgccgtctggccccgcggcagtgtcacaggacgtgggcagtggagacgccatgtctgcccgtgggcgctctggagtggagcctacctggcttcttgcgggccttggcgcttctccagctaacctgtgggttctactgagactgcagtacgggctggatggtccgacgagagcgata

SEQ ID NO: 526169 - DNA, 448 bp, Homo sapiens
  misc_feature (1)..(1): n is a, c, g, or t
  misc_feature (352)..(352): n is a, c, g, or t
  misc_feature (376)..(376): n is a, c, g, or t
  misc_feature (388)..(388): n is a, c, g, or t
  misc_feature (428)..(428): n is a, c, g, or t
  misc_feature (437)..(437): n is a, c, g, or t
naaaaatggtcaatatagtcttcagttgtttaaaggcattatttttactcattttctacaccccttcctttttatattactttagtcatgtcaaagaatttttagaaaaagttgcttcttctgttatttttaaatgatgtcttatttttcagtgataattttaatataattttaaattatatatcctcctgggattctcatcaaaattattttgtcaagtatgccacaattgtcagaaggcacaaaatacaaatagttatggctccataggacataaaggaataggacctggctaggttttatgatctgggcattcttcatttcagtaactgtgtgaggtcacctactgggnatggcctccatttttctaggcggntaaaattagggntaatggcatttttggtaaagggttccaaaattccctggantaggggtgngtttgccatat

SEQ ID NO: 526170 - DNA, 89 bp, Homo sapiens
ctttaccttttctataaggtggaccaaaacatccccttaagttttttgatttggacccattccttcaaaataaagaaatttggtaccca

SEQ ID NO: 526171 - DNA, 140 bp, Homo sapiens
agggggctgggggggggggggggggggggggccagggggttttccccccgggacccccggggggggggggggggggggcccctttagggccttttttcccttgtttcccccttcccccaaaaaatatttgggttttccca

SEQ ID NO: 526172 - DNA, 982 bp, Homo sapiens
  misc_feature (588)..(588): n is a, c, g, or t
aactatggtctaggtcgaggctggttgggagcggagagcggaccagagagcctagcagccacgccgcgcggcttagttcccatcacaccccgggaggagccgcagctccggagccggcccagtcaccatcaccgcaaccatgagcagcgaggccgagacccagcagccgccgcgcccccccgcgccccgcctcaggccgcgacacaagcccggataggaggggcaggagcggtgcccgggcggctcacatcggcggcgcctgccggcggggacaagaaggtcatcgcaacgaaggtttgggaacagtaaaatggttcactgtacggaaccggatatggtttcatcaacaggaatgacaccaaggaagatgttttgtacaccagactgccataaagaagataaccccaggaagtaccttcgcagtgtaggagatggcgagactgtggagtttgactgtggtcgaaggcgacacaggggtgcggaggcgcaattgttaccggtcctggtggtgtccagttcagggcaggtaattcagcaggaccgtaaccattatgacgctatccacgtcgtagcgggtcctccacgcanattaccagcaaattccagaatagtgagagtggggaacgaccgacgggctcggagagtgctccgaagggccaggcccaacagagcccggccctaccgcaggcgaaggtcccaccttactaccttgcggagacccctattggcgttcgacccacagttttcccacccttctgttcagcgcgcagtgatggcggctgctgacacccaggtgctggagaccgggtacaccacgtgggccgcactattttcgggtctgccccggactcggggggcctcttgcaagaagcctaagaggacgcctgagcgctagacactccgggttgacccaggtgcgccctagtggtcccgcattttgggggggcgaactacagtggggaaggccccggatccccgcggg

SEQ ID NO: 526173 - DNA, 277 bp, Homo sapiens
gggggggtaaaattttttttccccggggggccccctaaacccccttcccccctttttggaaggcttggggcggggggatatcccctttccaaaagggggaggttttagggggggggttttttttcccctttccccccccagggggggggtttcccccccaacccctttttggaaccccccttttggggttttttttttgggttaaaaattttgggggggggccccccccccccaaaaaaaattttttccccccttctgggggggggggtccccccca

SEQ ID NO: 526174 - DNA, 329 bp, Homo sapiens
ccctcaggagggtccctgctcctgtttgaggtgacaggtggtgggaaaggagctggagcttcctgctcagacccacaacattggtcatcagcaggctgcacttttcctcagttccagggtggatagagggtcaagttcttgaccttagctctgtatcaaaattgcctgagaaactgcttaagaaaccatatgtcatgctgagccgcggtgggtcacgcgtgtatttccgcaccctttgggaggtctgggtgggagcattgtttcaggttttgagttccaggccagggtgtcctaaatagtgagaccccatttttgtttttgaaaaaaaa

SEQ ID NO: 526175 - DNA, 244 bp, Homo sapiens
atctcaggcagggacgacgtctttcatctatctctcctgcattgtgctgtttggggcctgcattgaaggcgtggtcttacgagataagttcggggaggccctgcagggaacctggtcatcggcatgctggcctggccctccccctgggtcatcgtcatcggctccttcttctccacctgcggtgccggcctgcagagcctcacgggggcaccgcgcctactgcaggccattgcccgtgacggca

SEQ ID NO: 526176 - DNA, 1173 bp, Homo sapiens
cggttggcaagaacaagcgccttacgaaaggcgtgcaaaatagggagccgaagaagacaagtgtgttgatccattcttctaagcaaagattggtatgatgtgaaagcacctgctatgttcaagtataagaaatatgggagaagacgctcgatcaccaggcacccaaggaaccaaaattgcgatctagatggtctgcaaggagtcggtgctgttttgcaagtgcagtcttgcttgcatttgcgagcaatgcatgcacgagatctgccattctcagcacaacatctccaaggcgtgccattactgcacagcatggttccacgggtcacacaacagcttgcctgacataaccttccagtggaccatggactcttacaccgatgaacaaacagtgtgattccagtggctcaataaacatgggcagacagatgacttgaaggctcactgttgcatgtcgaagactaccggatggttactttgcttcgttctgttctggtgtctggttttacatacaaaagacgcaacagatcagatagcggaacgacctcttcatgctcagacagcacacaggtccgacaaatccggaagaacgatgatggcacatcatgacccgagaggtgcagacacaatgacttgaaagaagtggtcaatcacattgattccagaccagcattggacgcacgacatataacacggcttgccaatctactcaagtcctacttccaagaaagcaacgcaggaagaagcgtaaacaactgcttgaagaaagctcccacgcgtcgacattgggcacagcgtcacgggacgctcccagggtgaaaagccagaatcctgcgaaacgagcactcgcggcacaagaccggggacaacctagcacgagccgcggaataacaccaacagtccaacaatcgccaagcgcaagactcccccgtagcccaaaacaggcgaccggaggagccacaaacaagaaaaaccaccgacaacaaacggggagcagaaagcgctccccacgccccagcgaaaccaaagagaccaagccaagaggaaaaggcaacaacaggacgtaaccgccgcaccacgcaagcggaccagcagcaacaacacaaacccagcaaacagcggccaaacccgagccacagcacgcaaacccagtagcgaaaacaacaagacagcaga

SEQ ID NO: 526177 - DNA, 314 bp, Homo sapiens
actggatttggggtatatgggaactctttattttcataatagaatttcatactactattggaaagacagtttattcctgtaagagataattcatgcaattatcataatagtatttcataacactattatgaaaatagtagagttctataaatcaaaaactattttaaaataaaaaaaaatttttaatgtttatgtccctaacaggtgggagagaaggtgaaaaagaccaaggaaaccctcaaggtttcaggttctaggtaatgacgaggaactctgctcaggggacgggagggctgggctctgtacccgcacag

SEQ ID NO: 526178 - DNA, 278 bp, Homo sapiens
  misc_feature (15)..(15): n is a, c, g, or t
ctaactccttctgtngcctatgccttcttcctgtgactgatcagcccttctttcccttcctccaaaaaacttatttcactccatactggtgtgccacccttgtcttcagatgagaatggagtctgaatggccttcctgagaacgagttctacccgttcctttgtttccttgcaaccacccttgttcctgactcagataacaatctagcctttgtggaatgtgatctacctgatgcgacccttagttctccccagagccttctcttgccccaccagctt

SEQ ID NO: 526179 - DNA, 114 bp, Homo sapiens
tggcagcaacaagtgtttcagaaatgtttaggtgccagcacaagcacaaggcagagaaaacatttcccgactgagaggaattaaggctgctcttccaagaagcttactgaaatg

SEQ ID NO: 526180 - DNA, 629 bp, Homo sapiens
gtctgaatgttatgaggcttccattcatgagaaagttaatattgaagaatttgagtttagccaaatcttacctgtttttttgggacaaggttgaacgctgttatttcttctttgagtgcttttggttgggaaccacaggccccagaacaaagggaagccttgagggattgggacgctggttggcagtttttggctataatgaaccctgcaaaattgatgggtgggcccaaattggggattattgctttggtttaatattggtgtggaaaaataattggtgtttatccctaaagaaaatgctttccctgaatctttatacaacagaggcaccagaaggatgaatgatattctgaatcacaagatgagagaattctgtatacgactgcggaacctggtacacagtggagcaaccgaaaggagaaatctcggacacacaggacgtcactgatggaggagatattccgagtggtgtgcatctgtttgggtaatccaccagagacattcacctgggaatatcgagacaaagatcaaaattatcagaaaattgggcccataacacccttggagttttacagggaacatgtcaagccactcttcaatatggaagataagatttgtttagtgaattc

SEQ ID NO: 526181 - DNA, 579 bp, Homo sapiens
agcggaaggaggtggcgtcctccgcggcattgcgagcaccgccagtctgcgccgccaggcgtaggcggggtggcccttgcgtttcccgcttccttggaaaaacccggcggcgagcgaggcttgcgggccggcgctgcccttccccacactccccgccgagatttctcggtgggcccaacatggcgggtggccgctggggcccgataagggctcctggccgctggatcgcggctggggggggaaggcaggccccgaggaggccggcgccgccggagacagcagccgggtccagcccaattgaccgcctccaaatgtgaacgctggtcgatcaaaggggccagattagacgatggcttgacattatctaccgcccccaatgggatataccaatcctgccaaagacaagaactgaattccaataaactggggagaaggctttttcgaacaagtactcgtgtgagaattaactttcaaaattcaactctgtggcgcgaaacggtaagcattgtccaattacatagaaaccaacactttaggaagagcccgctcacttaggcaccaactcctcccaaattttca

SEQ ID NO: 526182 - DNA, 245 bp, Homo sapiens
ggccaggagaggtgtcaagcctgtaatcccagcactctgggaggctgaggcaggcagactgcttgagctcaggagtttgagaccagcctgggcaaaatggcaagacaccatctctacaaaaaatacaaaaaattagctgggggtggtggcatgtgcctgtagttccagctactcgggaggctgaggtggaaagagggaaagagacagaaagaaagaaagagaaagaaagagagagagagagaaag

SEQ ID NO: 526183 - DNA, 134 bp, Homo sapiens
aaccatttaccccaaataaagtataggcgatagaaattgaaacctggcgcataagatattgtacccggcaagggaaagatggaaaattattaccaagccataatatagcaaggactaaccccaatgagagattt

SEQ ID NO: 526184 - DNA, 1088 bp, Homo sapiens
gtaaatactggcacggactgatggccgtggtaacctcgaccgcggctctctctctctctctctctctctctctctctctctctctctctctctctctctctctctctctctctctctctctctctctcgtggcgtgcgcgggggtgcgcgcgcgctgtgtgtggtggtgtgtggccgggggcgcgcgcgctctctgggggttggggggcggggggtggggtggggtttttggcttccccgatcatgtggtcatcatcatcatcgtatcaaaatataatgctgcagcagcatcatgtgcgaccaccacaaccaacagcagcatcatcatcactcagtgatgatgattatgtgagcagcagcactcagacgagaagaggatgagatgaggagggaagacagcagcagcaggcagacaactaatcgatcaaatgtggtgtagagcaggcagatgcgactagtattgtatttactgataatagtaggttgtatgtgtgctgccactcagtagtggtggctcgaagccgcacgcagcacagtgatgcacaaaacagcgtgcgtgcatccatcgtccttcttcgtctgtacatagagaagcaacgcagcagctagtagttgcttgcagcgaggatgtgtgggtcagtcaataaatataactaagctatgttcatcactgttgctgttgctcatactgcttggttgacgtcacagttgttggtgattgaatggctggtttgataggtatgcgaagaatagagaaggcaatcattcaatccaatccatcaattccatggtcgctgggtggattgcgatagatagttgagataaatacgattaacttagtgaaaaaaagaaaggaaacaatacaagcagacgaagacagacgaacgacagatcatacatcaatacatacatgacaaaacaaagaacggagaagagggaggcagaagacagacggggagacgacgaactacaagagaagcaagggaagacgacgacgacgacggaggaggacaaaaacaacatcaacaaacgaccgcgaagaggagcagcgacgacgacgagacgcgaagagaagaaacacaaacaaa

SEQ ID NO: 526185 - DNA, 204 bp, Homo sapiens
  misc_feature (1)..(2): n is a, c, g, or t
nntttagtttgcatagcacggtaagcgaacctttgtgagacagaacatgtcttatatctggcactgatatgaagagggatgtcagctatcacttgatcctcaaaccagtaatagggagagtttcttttctctcgtcaaattgcttaaaggattctagttccgtttggcgcggacactcacatttgaattctaatactctatgtg

SEQ ID NO: 526186 - DNA, 304 bp, Homo sapiens
tagtcctgatttggctccttctgacttctttttgtttcctaatctttttgtttgtttgtttttgagatagtgtcttgctctgtcacacaggctggagtgcagtggctggcacaatcttggctcactgcaaccttgacctctggggctcaagcgagcatcctgcctcagcctcccaagtagctgggactacagggtgtgccaccatgcctggctaattttgtatattttttgtagagatgagatctcagtatgttacccagaatagactcaaactcaagcctgatgacacaatgagactatgtct

SEQ ID NO: 526187 - DNA, 1136 bp, Homo sapiens
  misc_feature (9)..(9): n is a, c, g, or t
  misc_feature (99)..(99): n is a, c, g, or t
  misc_feature (212)..(212): n is a, c, g, or t
  misc_feature (362)..(362): n is a, c, g, or t
  misc_feature (373)..(373): n is a, c, g, or t
  misc_feature (485)..(485): n is a, c, g, or t
  misc_feature (488)..(488): n is a, c, g, or t
  misc_feature (496)..(498): n is a, c, g, or t
  misc_feature (603)..(603): n is a, c, g, or t
  misc_feature (645)..(645): n is a, c, g, or t
  misc_feature (731)..(731): n is a, c, g, or t
  misc_feature (748)..(748): n is a, c, g, or t
  misc_feature (769)..(769): n is a, c, g, or t
  misc_feature (774)..(774): n is a, c, g, or t
  misc_feature (779)..(779): n is a, c, g, or t
  misc_feature (815)..(815): n is a, c, g, or t
  misc_feature (847)..(847): n is a, c, g, or t
  misc_feature (850)..(850): n is a, c, g, or t
  misc_feature (880)..(880): n is a, c, g, or t
  misc_feature (934)..(934): n is a, c, g, or t
tgctgcttntaactgcttgttaccaatagattgacctgtatggatttcctggagatgtggtagctacttttcctattttgaagccattttcgtagaganatatccttcactataatcaaataagttttgtcccatcaattccaaagatgtttccagtggtgctcttgaagaggaatgagtaccagttttaaattgcccattggcattgaagntagttgagtatgtgttctttattcctagaagccactgtgcttggtagagtgcatcactcaccacagctgcctcctgagctgcctgagcctggtgcaaaaggattggcccccattatggtgcttctgaataaatcttgccaagatagacanacaatgatganactcagatggagcttcctactcatgttgatttatgtctcacaatcctgggtattgttaattcaacatagggtgaaactatttctgataaagaacttttgaaaaactttttanacncaaagtgnnnctcaaacaaaagaaagtcataagactcctgaatttaatttccccacctaagtcgagacagtattatcaacacacatgtgcacacagattattttttggctccaanactggattgcaaaagaaagaggagaagaatattttgtgtgtncctggtattcttttataagtaaagtttacccaggcatggaccagcttcagccagggacaaaatcccctcccaaaccactctccacngctttttaaaaatactnctactcttaacattaccttanggctncctcnactgccccaaatctcttaatagcttctagtgctgcnacaatctaagtcaggtcaccagagggaagagnacntggcattaaaagaatcacatcttcagaagngaagacactaatattcttccccatatacatgatttcagaagatgacataagatncctcttaaagaggaaatgtcaggaatcaagccactgaatccttaaagagaaaagttgaatatgagtcattgtgtctgaaaactgcaaagtgaacttaactgagatccagcaaacaggttctgtttaagaaaaataatttatactaaattagtaaaatggcttcttattcaaagcatcaataattaaaagaattattttaatg

SEQ ID NO: 526188 - DNA, 135 bp, Homo sapiens
  misc_feature (4)..(4): n is a, c, g, or t
  misc_feature (6)..(6): n is a, c, g, or t
  misc_feature (8)..(8): n is a, c, g, or t
  misc_feature (35)..(37): n is a, c, g, or t
  misc_feature (110)..(110): n is a, c, g, or t
catncncnccaaggccacacctgtttctctggccnnnaacaaaccagtgaggatgtaaaggtttgttgaggtggaggaacagaagtgaaatgagcaatctgctccatttngaagtcagtcgcttcggctgttcat

SEQ ID NO: 526189 - DNA, 296 bp, Homo sapiens
gagatggagtcttgctctgtcacccaggctgggatggaagcaggccccctctgtattcgtttgctggggctgccataacaaagtctcacacactgagtgccttaaacaacatcaatttcatatcttacagttctggaggccagaaggcaaagatcaaggtgcgggtggggttggtttcttctgagggtcataagggagggatctgtctcaagcctctctccctggtttatagacggccatcttctccccatgtctttacatggtcttcatttctgtgtgtgtctatgtcctaatct

SEQ ID NO: 526190 - DNA, 151 bp, Homo sapiens
  misc_feature (14)..(14): n is a, c, g, or t
  misc_feature (53)..(53): n is a, c, g, or t
  misc_feature (141)..(141): n is a, c, g, or t
ggaagcctccctgnccgacttctgttctgactccattgaccataaccacgatnaacggcctcctgctgctgcggggaggtggggcgggggggtctggggttgaaggtttcgcctgctggtctcaactgtgggcaagccagngagaagggac

SEQ ID NO: 526191 - DNA, 180 bp, Homo sapiens
atcccccggccgcacagcttctcctctcctctcctcttttctctctctcctctctctctctctttctttcttaacatgagcgctcgctttgtctgcccaggctggacgtacatgtggcaaaatctctaatctcggctcactgcaagctctccctcccaggttcaagcaattctcctgcct

SEQ ID NO: 526192 - DNA, 1081 bp, Homo sapiens
tcagacccgacccagatgtcccccccgactgcgccagtgacttgcagatagcatagcttcaaatttcctcacctggtctggggcggtgaacagtcaagatggagagtgtcaagagagacttttgctttgtctatgatgtttttatatacacttgctaattaaatgaacgcatatgtttcctgtgtaattttgtataggggaataggggccgtgggaactggaagtaaacagccagtgtgccagcagctcttgactctaggtggtgggaataagtgccgttgtaaccacagtaccagcccaaacggggcttactctgtttgtaacaatgttgagttaccttgcaggtataacagagccaaaaactcttaagtcacaaagcccaggcatgcaccatagaaaaagatttgatctctaacaaacatccagaaccaactattcgtctccttggaacgaagaagactgggacatgactggaacccgaacattcgaactctcagaagggaagggtctcttggcccagaagataggggctaaaatccacctcaacataccgtaccataaatggccaaatttgaaggccttcaaacagatcctgcccagccaacatttctaagtcctttcctttgccctctgcttccttagaacttgccccagaccccaaatcagggaggaagatttgaacctgcctcctgtctccttgctggctggtcttgcaataaagtctttcttttctcaaaggcagtaccatggtattgcttccgtgtacattgagcagtgagcctgaggcaggaaaatagggtcaggaggcagggaacataaggccaattcacacttcggctgtaacaggaaatatccactccatagggcgtatgctgtaagtgactttgtaactttacttcatcctctgcatttacgtagagggtaagtgaagtaaacaatggaatcatctaggggatatttaaacttccaaaaattctgtaacggggcctttgagcccctatgttcgggccgctcccacactgtggaatgtaatttcgttttcaataaatcccttcattccttccttaaaaaaaaaaaaaaa

SEQ ID NO: 526193 - DNA, 1099 bp, Homo sapiens
  misc_feature (277)..(277): n is a, c, g, or t
tttgtgttcgttttggtctgttttgttcggtaggaggtattaaaggagtgtaaaagaagccgaaacatatgatcgtcagacatttgccggtgtgatttttcctctgtcgtgatggtcccgcatctggcttcatctgtgttgtggtgtaataccccgttcttccgtcctccgctgtggagcaccctcttccctggggtacccccgaagagcacagtccctaatacgtggccctaattctctttttttggggcgcctccccccttcgcctgtttcgacngctcggcggcccgtttggcccaccccatttggacccgcgtggcccgccgagccgcccacggtggggaccattagccttttttttctctggccctggggaccaactttctgggcttcaccctgggcgtctcacgggcttcttgtctttgggaacacaaacccggtgcccatgggccacaccacggggccttaatgctctgtcgccacttgagggcttgggtctatcacccaccaaaactgacccggtccctagggttgaaaaactctaggactcctccttagggagaaaatgagggcccacccgtgtgcccttggagaggaggatatataggagcctcttggtggatcacaaatagaggcgttttaactggggtcagccccaggccctattccacagaggacacaagctgtgtgagtgagaaccaagacctgctacttctcaggccattttagacaccaccgtgggtaataaccaagaccaccactgggggcactcttgggaaaggagtttggaaccaataatcctccaagtgggaactgtgtttcgtttaggtcttaaacccctgaccgaattttgtgatttccatgttagcaccatcttgatgtttttggatgttttatgcaccagtccacgccatttctttgtgaatccaggaaaatatttagggtataatccattctataaagtgtttgtgtattgtaaaagtacagccaaatgaagatatatgtagatcctccccctataagtccaaaagactgtagctcttttctctccccccctgagtccataaaggactgatatttactaacccttttatagcca

SEQ ID NO: 526194 - DNA, 111 bp, Homo sapiens
tgtcatggagccgtattctggtacgtgcctgccacagcctgcacatccacattccagtggctgtgcaggctgtggcaggcacgtaccagaatacggctccatgacactgca

SEQ ID NO: 526195 - DNA, 480 bp, Homo sapiens
tcgctgtattaataggttaaaaccaggcttctagaaagaataaacttacatatttatttttaggacatgaaaatagcaatattcttggagattgataaccatagcattaatacagcccattatggtcatttacatcggggtctatttcagcaaacttgtgacatctatctttacagacaacgaacatactgtatcgggaagttactgttacttgcataccaactgtttctaacaacgaagcaactgttataaacgttagtttcagtgcattatctacttgtgtagatcctatgcaataacaagtagtgttacatgtatcaagacctagatgttctatacagcatgccatatagtggtatgagccaggctgttcgcatgcgaattctcagtagcagctacaaatggatagcaagtggcatcaagcatatccattcagaatgacgtgccttagatatagcacagaaggcttttggactaaca

SEQ ID NO: 526196 - DNA, 232 bp, Homo sapiens
  misc_feature (46)..(46): n is a, c, g, or t
  misc_feature (96)..(96): n is a, c, g, or t
tctctagcacgatcccccacacttcgatcgcggagaataatgtttncatatttacttatactaacattagcttcttctatagcggttgatagattnggtccatttgtgcgtagtagaggagttcagtctatataattatgggatataaataggtagttgagtgtattagcttgtaacgctattctataattaggtcggctgcttttagcgcctacatatgaggtgtttaaat

SEQ ID NO: 526197 - DNA, 1157 bp, Homo sapiens
aggtgtcgtgcaaaactacccctaaaagccaacaatggtgaacgcgaaaagactcatatcaacattgtcgtcattggacacgtagcattcggcgcaagtccaccactactggccatctagatctatacaatgcgtgttggcctctgacaaaacgaaccattgaaaaattctgacgaagtgaggctgctgagatgggaacgggctccttcaacgtatgcctgggtcttggataaacctgaaacgctgagcgtgaacgtggtatcaccacttgactactctcctttgtgcacacttagagacccagcaccctactatgtgactatcatttgatgccccagtgacatcagagactattatctaatagaaatgcttcaccgtggcacatcttcagtgctgcactgtgcttgttcctgatttgtctgctgctaggtgtctgtgtcgcatctctgcctttctgggtactcctccaccgactctggtgcctcgatccccggtacgtatgttttgctcctttcgtggtcttatgctctgcttcgggtgttcgcttgcatatcatcggcctcctttttgtcctggcctcgtttcgtcccctctactcttgcgcctttccccatcttgctgtacccttctccgtgcccctgcctcctccatcttagccatactgatggtgtccatcttttggtgtcacttgcgacttctctctctcctctcttcgtctattcttgctgttgtaatttttggtgtttattcttttttctcctggatctatcgctcgttcgcctatctccttggttgctcctgcctcgcctctgttcttttgattgacatttgaggtcaggaattcaaaacataactagtaccgttggcggatgggccaccacgtattgtgtcgcgactaaaactgttatattcacgccaccatctgtggatcattattctcttcggttcgtacttggcgccccgcttctttcctgcttccgcgtttttgtggtggccttttggtgctcccgttggcccttcctacttggtattggtcttcactgtgcgcttgtcgccggcctctctgagtgcttatgtgttggttactctttgcctgtttctcctgtctgccgatcctctcacccttccgtgccccctcacgcgtttgccgcttccgt

SEQ ID NO: 526198 - DNA, 344 bp, Homo sapiens
tctacaggatcttagttactggcatttgttggatgcatatgtgggtaggttagtgaatctaaggaaaactacacccccaagctggagaggttgagagacagctccaggcatattgggaagagaggctggacaggagaaaaggcaactggtgctcaccagcccctgctacattcctcgctaaccctggtctaatgctcaaggtctttgtactgcagccattgaacctaagacctgggcccagtcctggtgccaccttcagtggctgtgtgactttaggcaggtcccttcccctctccaagctcagtgtcttcagcttgggttgtgagagtctaatgccatagagg

SEQ ID NO: 526199 - DNA, 662 bp, Homo sapiens
aagcattctcagaaacttcttggtgatgtttgcattcaaatcccagagttgaaccttcctttgatagttcaggtttgaaacactctttttgtaggatctgcaagtggctatttggaccactctgtggccttcgttcgaaacgggtatatcttcgcataaaatctagacagaagccttctcagaaacttctctgtgatgattgcattcaactcacagagttgaaccctcctatggatagagcagtgttgaaactctctttttgtggaatctgcaagtggatatgtggacctctccgaagatgtctttggaaacgggaatatcttcacataaaaactaaacagaagcattctcagaaacttctctgtgatgtttgtgttcaactcccagagtttcacgttgcttttcatagagtagttctgaaacatgcttttcgtagtgtctgcaagtggacatttggagcgctttcaggcctgtggtggaaaacgaattatggtcacataaaaactggagagaagcgttgtcagaaacttctttgtgatgattgcattcaactcacagagttgaaggttccttttccagcagtttccaatcactctttctgtggaatctgcaagtggatatttgggcctctctgaggatttcgttggacacgggatcgcacg

SEQ ID NO: 526200 - DNA, 107 bp, Homo sapiens
aagcaggtccgccttgggcaggcctacgttgtggtgcagtgcgagacccaggctgggcaggcgcaggttgctttatcagcgcatgaagttacatagagtgacgcgca

SEQ ID NO: 526201 - DNA, 159 bp, Homo sapiens
gtctggtgctcttgagtcatgcatctaacacacatgcaggacatcaagaaatacttgacaaatgagagactggtgtggcagctgaggatctctgctcttcaagtgcacatggccaagctctacacacacagaactaccgtgcacttgcccgtgtgtttg

SEQ ID NO: 526202 - DNA, 133 bp, Homo sapiens
cgacggccgcccgggctggtacgggatgctgatcacatgcatcatgttcatgacgcttgtcaggatgccatgccagagcccgacgtccttcttgaaatccagcacattcacaatggtttcagcttccgtgtag

SEQ ID NO: 526203 - DNA, 258 bp, Homo sapiens
  misc_feature (230)..(230): n is a, c, g, or t
  misc_feature (240)..(240): n is a, c, g, or t
ccttcttcatatgttaaaatgaaagggagatacttccagggtgataaccatgtctaatcgtttggaaatggagtttaagaccttcaataggtccgggtttttaaaaaaaggcaccaagacttgactgattttgttttctcacacttaggatttctattacttaccaacttattcatatttttaataaggcaggttagcactcctcattcgtttgctcaatgagcactggnaggcatcaancacatgcatgcaccccgg

SEQ ID NO: 526204 - DNA, 747 bp, Homo sapiens
  misc_feature (629)..(629): n is a, c, g, or t
gcggcagaggctcctaacctatgaggaccacggggcaccctttgccggtcacctcccacgaggtgtcgccgtgaccacgcgggagcccacgccgcgcctgcaagagggtgagtggcgtgtgcatgggcgtgagtggggtgggcgcctgtctggagaagctgtgcctccccatccaccattagcttaccttgcacctgggatatgactggcacccgatttccaccacatacgaaccacctgcaggcccgtgtgctttgtctacgattccaaaccctgtacagctccttgccacctcccagatcaccgtggtgtctcacctagcttaccgcacgcccctacatcttactgctgtaatccagtctgccagctacccggatactttctgtgcatatcatattattgcactttcctggtttcatccttctagcaacttcacacattttgctatggccttgtggcgcctgcctgatggggccctgcctgcctctcattcaaccggattgctacgtgctccacagacccagactctgtgccctctgtctctatgttccatggccatgctgagctaggtcaattcactctttgctggtggcctttgcgtggctactactctctgtctgccatgtccncgccttgcagatctgtactgagagggtctcttccatccctgaagtctttgttgacatattacatacttggagaggcttctccagaccccctatctgagttatatacatgctgcacttg

SEQ ID NO: 526205 - DNA, 434 bp, Homo sapiens
aatgtgcgtgttcccgatggctggtgatgctgaatacctttccgtgggctgctttgacatctgcttgttgtcttccgtgagacgtctgctcgtgtctgttttctcactggagtgtttgtacttctaacaattgagatttgagagattgcagtacacattctggatgccagtcctctggtagcatatgtggtttgtaaaacttctattccagtctgtggcttatcttttcctccactccaagtgggtgtttgcagagcaaaagtctttcattgatgaagtcccttaataacttctaataacctgtgattttacctccagaatttccctggaatgcacccactttccccatctccacagacgcgccttccagggcactgctcacatgctggtcggtagcatcccctccattccccctgggggtgttggtggaactc

SEQ ID NO: 526206 - DNA, 369 bp, Homo sapiens
tccatgagcaggtacgattccatgaaataccccttagtaacagataacattaccattgccatccagtgaaattactacaaaaaagccaatcacacccttctttggggaccaggatttaccacaagacatatatgatactacaaaaactgcctcccacagttcctgcttcttcaatctattcccaagtacaatccctgtgtgaccttgaatagcatgctatgttgtcctcccctggtgtgtgagtatatgtgtctaataaactgctgctgatttcttctgcccagggtcagatgtcatgggttcagccatccccataagtcgagggtgagaagctctttctcattgtaaagcagcctggaagggcatttt

SEQ ID NO: 526207 - DNA, 165 bp, Homo sapiens
  misc_feature (3)..(3): n is a, c, g, or t
  misc_feature (16)..(16): n is a, c, g, or t
  misc_feature (28)..(28): n is a, c, g, or t
  misc_feature (38)..(38): n is a, c, g, or t
  misc_feature (44)..(44): n is a, c, g, or t
  misc_feature (90)..(91): n is a, c, g, or t
  misc_feature (132)..(132): n is a, c, g, or t
  misc_feature (140)..(140): n is a, c, g, or t
  misc_feature (142)..(143): n is a, c, g, or t
  misc_feature (161)..(162): n is a, c, g, or t
  misc_feature (165)..(165): n is a, c, g, or t
ttnatgccccctttgnggaaacatgtcnaggtgatttnatttanaggagctacacccaggctccctcattcctaggaaggaaaaagaccnnaaactcacaaggtctgctaaaggccaaagactatttaggcnaaaaggantnntgcaaccaaaagattgcnngan

SEQ ID NO: 526208 - DNA, 200 bp, Homo sapiens
gacagtgaacaatgaaccacattgcctctgcctatgaacacaatctcttaaaagtttagtcgcaggactccagtactcaaaccataaaagaagtggcctatggaaataagctttaaagccacattccatgaacccaaaggacctcttaagcttgggagtggatagtgggcacagcagccccagctctccctctcagttga

SEQ ID NO: 526209 - DNA, 199 bp, Homo sapiens
  misc_feature (65)..(65): n is a, c, g, or t
  misc_feature (79)..(79): n is a, c, g, or t
  misc_feature (120)..(120): n is a, c, g, or t
  misc_feature (129)..(129): n is a, c, g, or t
  misc_feature (151)..(151): n is a, c, g, or t
  misc_feature (162)..(162): n is a, c, g, or t
  misc_feature (174)..(175): n is a, c, g, or t
  misc_feature (182)..(182): n is a, c, g, or t
acagctcggacccccaccacctgagtccttgcacaaagattgtgttgttatctgaattatcagantctgaatcagcatntgttctgggtccataatccctgtgaccaccaaaatttttgnagccaccgnggtcaccaccacttgatcctgncataggacctnttccatccttgnnatatccnccacgccctctacctcc

SEQ ID NO: 526210 - DNA, 905 bp, Homo sapiens
  misc_feature (298)..(298): n is a, c, g, or t
gtcgctcccttggggtgttcgggtcgccacagggacgtttgtgatagttttcccccccggcccgggcttggtctgtgtaaagctaacaatgggcgcttggcgccctcgtggaaacccacttgcgttgtttgctggatacgaaaaagtcgacgcctcttgttgttcgtttctccgctgcccgcgaattaccttctctctgcctgtgttgggggcaccctcgcgcgcaccctcgtgtttgttgcacgcacgagccacgacgcgttggtaccgacactcctcgggagacagtcatgcctcnccttgggtgcgctactatcgagcatacatactagcgctatgatatagcggatgaatggctctcccccgctctttcatctcgatatgttggttccaccccaaacagttcctccttaaatccaggtctatcacgtttccaccccacccggatgttacacaaatattgttggttcccatggttacccgtgcattataaaaaacgcccccccttacctcttgtggtcccctaactacaatcaacaaagaggtgctatgaacttctcctcccctcatgattttatatacacgggtgcagactccctctttgtatcgactcctaaaacatggtcgtcgcccctaactcggggcaccctctgttccccgccccccacatttatgcggcaatacttcatgcaggacccctacatattttctaatgcctcccagccactaattcgttagaccatacctgaccccaccctcttccctggtcaatatatatataatgccaatgatcatccccacacgctgttaatcaccgagcaatactgctctgaccactatcagtcttgtgttattactttttattgcccctaaaggcccaatagttcttaagcccccacaaaaca

SEQ ID NO: 526211 - DNA, 193 bp, Homo sapiens
gggtgttctggaggatcccccagagctggttggatgtgtgagtatgaagccagagaagcccgctcatgagcagtgactccccaggccctgtgacctccctccggtcttgcagctcctccgggcaccagtccccagggctctcctgtgggtagttcctgcttttcttctgggaaattcctccggtccctctcca

SEQ ID NO: 526212 - DNA, 803 bp, Homo sapiens
aaattaatctgaaaactggacaaaaatctgaataggcatttctcgaaagaagacatacaaatggcaaacaggcatatgaaaatgtactcaacatcattgatccattagagaaatgcaaatcaaaactacaatgagatatcatctcaccccagttaaaatatcttctgtccaaaagacaggtaacaacaaatgctgaagaggatgtggagaaaagggaaccctcgtgcactgtggaagtgtatattagtacaaccactatggagaacagtttgtaggtacctcaaaaactaaaaatagagttaccatacaatccagcaattccactggtaggtatataccccaaagaaaggaaatcagtatattgaagataaatctgcaccatgtttactgtagcactactcgcaatagccaagattcggaagcaatccaagtgtccatcagcagatgaatggataacataaaatatggtacgtatacacaacggagtactattcagccataccaacagaatgagaatcctgtcatttgcaacagttatagatggaactacagatcattaacgtgaacatacgccagggcacagcaagacagacatcacatgtcctgacttatatattgggagctcaccgactgaaacacactgaaagttctagagatagagaggtagaagaaggtataccatgagtgctgggcaaaggtacatgcggagcattgttgacgggggtaattggggaatgctacactgggctcattaaagggttatacttgataagaagctaggtatatggatagtagaaccatgg

SEQ ID NO: 526213 - DNA, 154 bp, Homo sapiens
agatgacgaagggaacgtcatcgttttgaaagcgtcgcaataagacgcacacgttgtccgccgctgttgctctaaggcttaccaccttcagaagtcgacctttggcaaatttggctacctttccaaggcaaagaaaaggtttaactggattcca

SEQ ID NO: 526214 - DNA, 365 bp, Homo sapiens
atgctgatgagtcatggcacaattgacttccctgcacattactgacaatgatggcgagaaaacaatgaacgacacagacagtgaagcagaaattagagaagcactccgtgtgtttgataaggatggcaatggctatattagtgctgcagaactacgccatgtgatgactcaccttggagagacagttaacagatgaacgaccgttgatgaaatgatcagggaagcagatattgatggtgatggtcaagtaaactatgaagagtttgtacaaaatgatgacagcaacgtgaagaccttgtacagaatgtgtaaaattacttgtacaacatcgtatattagccttttctttgttcgtaacttatctg

SEQ ID NO: 526215 - DNA, 220 bp, Homo sapiens
  misc_feature (76)..(76): n is a, c, g, or t
  misc_feature (106)..(106): n is a, c, g, or t
  misc_feature (161)..(161): n is a, c, g, or t
atttttatttttattttgagaggagtcttgcctgttgccaggctggagtgcagtggaccatctcagctcactgcangctcacctccaggctcaataagtctcctanctcaccctcccaatagctggggacacaggtgcatgtcaccacccccagctacttntttttgttttctgtagagacgggttttgccatgctgcctgggctggtcttgaataccta

SEQ ID NO: 526216 - DNA, 211 bp, Homo sapiens
ataataacagcctggaggcactggaagctggaaataggcgaggagggatcctcccctgtgaggctttggaggatgacatagcccttgttgtaaatttgttttccggaaaactggccaaaagtgaaataatacatttctattcttttaagccaccaagtttgtgggcatttgttacagcagccacaggaaaataacattggcccttatcgag

SEQ ID NO: 526217 - DNA, 902 bp, Homo sapiens
gcgaacccacctccaccttactaccagacaaccttagccaaaccatttacccacatataacagtatatgggcgatagtaaattgataggaccgttggcgcacactagactatagtaccgcaacgggaaacgatagaaacaacttataaccaagcataatatacgcaaggactaatcgcgctcgtatacgctttctgctctacatgagattaactagaagaataactttgcataggagagcccaagagtctacggaccccccgaaaaacaggacgagcgtaacctaaggagccagctataaagagccacaacccggtctattgtaggcaaaagataggttgcggacaaggactcttactcaggcgtacgcacggcccgaacgaaccactcttaccactggacggacgtgcggtcgacatacatcgatgggttcggctccacaggagtctacggaacacttcgttacgatcatgcaaacactattgacagaattctcggcgccgcatgacatcccctcatacaaatccccactttcgttaaagacttcgagagcgatcgtggaggatccccacacattcactgggccccacacgcacatacatatggagggaacgcacattaatgcgagacacaaataaccgttggctcctcaaggcagcacgcttcagaggaaactcttaacgcaccccccaatcagcatacagacccatacaaccacgccagatatcccaccgaaatttacaaaaaacgcggcctccaaaggctctcaccaccatcccaactaaacccctactaataaatgccacaaaacaacttattcaaaccttgcaaacaatccttccaacaccaccaaatatgggcaccccaaaatcctcaataccacccccctaatacccaaacgac

SEQ ID NO: 526218 - DNA, 628 bp, Homo sapiens
  misc_feature (593)..(593): n is a, c, g, or t
tgcgtcccaggaaaaacctcctctagtcatgcccagatctgcctggtctaaaaaccacaaaaatagcaggactttccactgagtcaatgcttgtcacgtctagagacctggatcgagctgtttccttccattcacagagccgtcctgcaggagagatgttacttttaccatcaatgtaaaaactgagccttaaactgcttcagaaactgtttagattcattcaactgaatattcacactggagtttgaatcaaggcctacgtggctttagaaatttaagatccaaaccgtaccactgtggtacctgacatccttcgtgcacctccctcatcttcagagaaacaattctaattcttcactttaaagcaaggtagtgtgactttccaatgacttcagggcattcggtaaagaacagcttggttcaaagtaagttgatgagcacagcaatttcttcataatggcaacctggttaaaaaaaaataaaataaacccatacctggctttgggaaggaagttgtttgttttaatgttttgtatttggacttgcatcacatagagtggagatttttttcaacattttgtgtgtcacttaanatttttaaaaataaagtcttacaagctgtgaaaaa

SEQ ID NO: 526219 - DNA, 518 bp, Homo sapiens
ggcctatctgtgtcgggttgcattttaaactggggatgtctggatagattccatgtgcaccagaagggacttaccttttcttccaggtgtgaggttgaatagttgacagaagtgaggctgccttttcctagagttagtttccctagagttagagtttccgtaggctaaaacccagtgatctattcctaatgctcctgccagttaggtccctgcaccgccttccccaggtgtgtgactcaagttgtcacaatctgtttacgaggctggagagaactggtcttattgccctaggtggtcagaaggtgcctagcttctccctcaacacctcccatcggcccttttccctttgctgtatgcacccccatccctacctccctgacccctctcctcagtgacctcctctctgtggaattgaagagaggaccactcagacccgtgtccctggcctgactgcatctgcatgtgctcccacactcccagtgcctccctggacatctctacttggtctcccaaccccg

SEQ ID NO: 526220 - DNA, 743 bp, Homo sapiens
gtatcaacgcagagtggccattacggccgggagtgcgccccggctcgggccggcccgaggggggcgccgacggagcggggtcggggcgaggccgagctccaggccaaccctttctacgaccgctaccggacaagatccagctgctgcgcagggtcagacccagctgctttgtgagtcccgcctggagaaacgcagtgaatttcggaaagcagccagtggggcattccagggcaaggtgatttttatcaaatgtgtggaaaccagaagacagatggcctgtgcggggaaaaacaagtcgtgtgaaccagaggattcactagggacaaagactctcagttcaaatctttaacatttgagatggtaaaaggaaaaaacctgcagaagaaattaaaaccagattgtggcagcaatattgtgcagcaaagggatacagtctacgcagttattccgtgcagaaaagttgggattctgatcgtgaaccggggctcagtcctgtccaacatttctattgtgctctgccaaggaagggaaggtcattgagttctggtagggacaattggaccaggtacgtgaatttccatttcaagtggcatttattaaattattcagacccgaggggaagctgaggcaagccagctggatttatattactatccgtgaactttaaggaaggaaaggggcatagtgctgatgactggggaaatggtttccacaattcttgaattgtggtggaggccagggtc

SEQ ID NO: 526221 - DNA, 503 bp, Homo sapiens
tctctttcctcccgccgcccaagttgccgaagggaaagagggccagggaaagaaggtggtctccggccccagttgtcgtgaagaagcaggaggctaagaaaggggttgaatccccggtgttggagaaagggcctaagaatttgggcatgggacaggacatccagcccaaaagagacctcacccgcttgggtgaaagggccccgcaatataagagttgcagcggcaggagagccatcctctaaaaggcgggcgtgaaaggtgccatccggggaatatacccaggttcacccaggcccgggaccgccaaacggatactcagcgtggcttaagcgggtcccacaagttacagaccagaagaacaaagcaagaaaaagaaagccagaaaacgtggtgggcccgggggccgaagaaaaagagggctggcgggacaaggggggacgtcccaacgaaaaggaaccaacctggtccttgcgagacagggggttataccacgcgttcacaca

SEQ ID NO: 526222 - DNA, 290 bp, Homo sapiens
ggggctcatgtggactaccatggggcccggctaaagcccgctaaaatggtttttaaaacgcttaccctacgcgaacccccgggggaaaccctgtggtttacctttgaggtataaaaagggtttttattcccttttttttccccccggggtgtgggaattttcggggcgccccccttgggtgcccccttatataaaaccggttatataagggggggggagaaagggtgttctcaccccccccccccaccaaacaaaagagtggttaaaggatgggggagaaaacccctccc

SEQ ID NO: 526223 - DNA, 1365 bp, Homo sapiens
  misc_feature (882)..(882): n is a, c, g, or t
acatttataaaaaaggggcccacaccgccccctgtccgtatatagcgcaaaattggggggtacaacaatcccgggtataactccccctccacccactggggggagacccctctgggggagcgcctctgttctgcgccaaacaccttgggggtgcaacaatatatttggggcaacacggaagaggttccttctgcgccccgcttcgtgggaggacgcctttctagtaagtttgtcccccttggcggggaaaaaaaaaaactgcgggcgggacaaaaccacacgtatattacaacacgacggggggacgcacacgcaaaatataatttggggggaccccttgcgagaaaaaaatgtggttgtggcgaaaggcaacaatattatagaactcccgccccctaatggggccgcctccgcaaccacaaccgttagaagggtgcccgtaaacatgggggtacaaaacatgggggccgcctttcctgggttaataccccctggggggagaaccaccttaatgaagaaaagtgttgtggccctttttatcaggtaataaaaacgcgggttgcaacacaaagaagttttctctaataacccctgggcccctcggacaaaaaatataaaagggaattttcttcccggcggttaaaaaaaaaatctgtgtgtagcgcgccaccttgtcccgccctcagacaaataaatgtttttcccgcctcggaatttgggagagaatttgtaaaaggagaagcgcggagaatacctcgcccccccacagcacacagaagatttttggtatatatggagatggagaatacacgcctcgttgtttacacaggcccccgggggtgggccgcccctctgttaagatgtaacacacatatgtggccnctaaaacacatgacttttggagagacacttggatcacagagacacctcgtaaacacatatatctctctcgttggagagcctctttcgaatggaggccccacgagagtgaatatatatcatcttagcctcccccgcgaaatccacatatctctgtccccttgtttcttatgtgcaccacaccgcaaagttcacacacacacatggtcaattctttgttacaaaggggcaatataagatatatattgcacgtctagatatcccccacttgaaattttgtctaagaaaaattacccaccacttaaaaataatggaggttaagtaagattgggagtattgctcgaaattcggtttgtggggcataattagcccaaataatttcttaatattgtgggaattcgattcttttttacgaaataatttccccagttattttaagatgtctgtaaaattaacttttattaaagtctttgtcaatctttgtga

SEQ ID NO: 526224 - DNA, 117 bp, Homo sapiens
agtgctacctccacgaaacagaagccaccacacatgaaatacacctacacacgcagcacatcaaagataaaccacacacaaaatacaccacacacattccacgtgggttatacacgg

SEQ ID NO: 526225 - DNA, 555 bp, Homo sapiens
tgggttaagaccccctgggatgcgcccccgccaaaaccattgagctttccaattttaggggaggcccttttctacaggtaaattattctccgataaaaagtaaaaaaaacttttcgacctagtcaaaaatttggttaaaacataaaaaaagtcccaagtagattgggtattacagggggcttgttgattaaagcccccataatagaacaagggggttctctctttagcccagggctttttagcaaatcatgtcatgaggagttacccaaggtttttttttttaaccccataaaattttttcaagggaaattcttaaattctcttaaacctttttctcgggtataaaaacatgttgaacaatctcaagttttaaggattgcagtattgtccccccaaattcatgtattttgggacccaattctttaaaccttctttgacagatccctttaactggcccatgtttcttttttttcaaaaagggaattaatgtgaaccccccccgctttttttttttatggggcccaaaattgaatatcccagccaatatagttgttt

SEQ ID NO: 526226 - DNA, 388 bp, Homo sapiens
  misc_feature (380)..(380): n is a, c, g, or t
caaaattctaattgaagtaaatgaaacaccaaacagtagcaggaaaaagttccatcagcccttaacacctacaataaatgtacagtaaaaagcctcaagatacatatctaaaaatagcttgtatccaaaaatacaattcgttctctctttatgcaagaacctccctcattgaaagatggggactatccctgcagtccttcatatatgactggcctgtgacttctctgaccaacacactaagatagaattgctactgtgtcagttcaagacctaatctttagctttatgcttcttggaacctaagttgtaatataagaagaatcacagataggaggtggggccaagatggcggaataggaacagctccagtctacagctcncagcgtga

SEQ ID NO: 526227 - DNA, 101 bp, Homo sapiens
gagcggtctggtctttctgattcccatcatggtcctgtccctatacttcattggcacagagggtgctggttagatttaaaatgacagagaccgctcttacc

SEQ ID NO: 526228 - DNA, 277 bp, Homo sapiens
aaacggatttttttttttccccccgggggtttcagggtcctggggccaaaaggcccccccccccccccttcccaaggccccgccccagttttggttttttccccccccccccaccccccccaaagggttttaccccttttaagaaatgcccttccaaaaatgggtttggtgggggggcccattttttaaaggggaaaatgtaaattcccccccaaaattttttttcccccctcccccccaactaaaacccccaaaaaggggggttttgggggcccca

SEQ ID NO: 526229 - DNA, 222 bp, Homo sapiens
tgaagtatggtgacgcaatcgccctgccttctctgcagaggacattcattgctgggagccgtcgcaactcagaaaggactgcaaactcctggtgaaggagccctcaaactgctaggagccaaagactcgagggaccccgtgactatttccccctacccctatacctgagaacatggaatagggaagtccagacatccagacccaagacacatccgactcacc

SEQ ID NO: 526230 - DNA, 249 bp, Homo sapiens
ctctaagacctgtgctcctcttcatgttgagcttgcggaagttcttggggtagtcaatatatgagccaagtgtgctcactaaggagtaaggaaaaaaatagttctgaaccccagaagaagagaagtattcacaggcaccatttatctgtatttgtctggtctcaccctggttataaagacttacttagactgggtaatttataaaggaaagccgtttaatggactccccattttccccattgtaaggga

SEQ ID NO: 526231 - DNA, 306 bp, Homo sapiens
  misc_feature (220)..(220): n is a, c, g, or t
  misc_feature (248)..(248): n is a, c, g, or t
  misc_feature (256)..(256): n is a, c, g, or t
caggctggagtgcagtggggcgatcttggcttactgcaagctccgcctcccgggttcacaccattctcctgcctcagcctcccgagtagctgggactacaggcgcctgccaccacaccacacctggttaatttttttttgtatttttagtagagatggggtttcaccgtgttagccaggatggtctcgatctactgatctcgtgatccacctgcctcggnctcccagagtgctaggattacaggtgtnagccagtncgcccggccaacagcacacttctaattcaggaggtagtgtcttcatatgg

SEQ ID NO: 526232 - DNA, 682 bp, Homo sapiens
  misc_feature (3)..(3): n is a, c, g, or t
  misc_feature (91)..(91): n is a, c, g, or t
  misc_feature (128)..(128): n is a, c, g, or t
  misc_feature (134)..(134): n is a, c, g, or t
  misc_feature (136)..(136): n is a, c, g, or t
  misc_feature (144)..(144): n is a, c, g, or t
  misc_feature (150)..(150): n is a, c, g, or t
  misc_feature (161)..(161): n is a, c, g, or t
  misc_feature (165)..(165): n is a, c, g, or t
  misc_feature (172)..(173): n is a, c, g, or t
  misc_feature (182)..(182): n is a, c, g, or t
  misc_feature (235)..(236): n is a, c, g, or t
  misc_feature (243)..(243): n is a, c, g, or t
  misc_feature (264)..(264): n is a, c, g, or t
  misc_feature (268)..(268): n is a, c, g, or t
  misc_feature (285)..(285): n is a, c, g, or t
  misc_feature (292)..(292): n is a, c, g, or t
  misc_feature (294)..(295): n is a, c, g, or t
  misc_feature (319)..(319): n is a, c, g, or t
  misc_feature (324)..(324): n is a, c, g, or t
  misc_feature (328)..(328): n is a, c, g, or t
  misc_feature (340)..(340): n is a, c, g, or t
  misc_feature (345)..(345): n is a, c, g, or t
  misc_feature (354)..(354): n is a, c, g, or t
  misc_feature (461)..(461): n is a, c, g, or t
ggngccacttctgtggcctgcctcctcagggtcattaactgtttcctccttgggtgtagacttcttcctcttgggaatactggtgctgccngcggtctcttcaagatcgttactcatcatactcctcntttggnanaagatttntttttnttgggtttggngaangagatanntgggtcttntattctctttctcctgggggatctcctggggcttttggtttttgttttttttnngtttttnactcatctcctcacactcctntggngtacttttgttgttttntgaagangnnagggcaagtgcagccagccgtttnttttncttntttaagcgtttnttctnctgtttctncagcttcctagtaatctcagcagccgcttcctctgcctgaaccattgcttccttcatgacatccagattctttcgtggtatctctccagtctcatagaaggacagtngctcttcaacttgttctcgaagcttctccccgaatacactcgtgggcacctcagagaagcaatcgattcgtgaggcaatactgcatttgtttgccaggtatcgggagatgcggcctttgttcttggcagctgctcggccaatgaaggtggagtggaaaatgagtccatattttggggtgttaccccttgtcttcagggctctgaacagggccttttcagcc

SEQ ID NO: 526233 - DNA, 773 bp, Homo sapiens
  misc_feature (365)..(365): n is a, c, g, or t
  misc_feature (491)..(491): n is a, c, g, or t
  misc_feature (586)..(586): n is a, c, g, or t
  misc_feature (603)..(605): n is a, c, g, or t
  misc_feature (618)..(619): n is a, c, g, or t
  misc_feature (629)..(629): n is a, c, g, or t
  misc_feature (650)..(650): n is a, c, g, or t
  misc_feature (662)..(663): n is a, c, g, or t
  misc_feature (666)..(667): n is a, c, g, or t
  misc_feature (714)..(714): n is a, c, g, or t
  misc_feature (718)..(718): n is a, c, g, or t
agtgaaggctgggcgcagcggctcacacctgtaatcccagcagtttgggaggccaagggggacagatcacttgaggtcaggagtttgatacctgcctggccaacatggtgaaaccgcgtctctaccaaaaaatacaaaaattagccgggtgtggtggtgcacgcctgtaatcccagctactcgggaggctgaggcaggagaatcgcttgaacccaggaggtggaggttgcagtgagctaagatcacgccactgcactccagcctgggtggcagagtaagactctgtctcaaacaacaacaaccaaaagaatattcagtgaaaaaaaaatctccctcccactcctgttctgtagtccctcagtttngctcctatcttagtcaacctatgtgaccagcttcctttttgccttgtcagaaataaagcgagctcctgtatttgctttaattttccatgcaaatgaccacattttatttacactattctgcatttngctttcttcatttacttcattactccctgtctgggaggtccattccatattattgagggagaggacacggtcctatcttcagcagcttctttatnttctttcttttcttgtnnntcttctttatgtnntcatttgatnaatatttccccccaagatttnattgtgaaagtnncgnncaggcgtggtggtcacatctgtaatccagcactttgggaggcaaagntggnagatcacctgaaggtcaagagtttgagaccagcctggcaacatggtgaaaaccca

SEQ ID NO: 526234 - DNA, 140 bp, Homo sapiens
agcgttgtagaggcatcttctaatctgagacatggaacttcattcccggccagactttccgggccctagacacacagaccccatgcgacgacctcccagggtttaacttattcagttacctgtggaaccagatttggaca

SEQ ID NO: 526235 - DNA, 392 bp, Homo sapiens
  misc_feature (59)..(59): n is a, c, g, or t
acagtggacattactaaattttccatctttttcagttttccatgccatatttcatgtcntaaagtttgtatttcttattttccgtgattttcaggtttctcgccatatgccaggtccttcagtgtgcatttctcatttttcacgttattcagtgattttgtcattttaaaagtagacaagtggatattccacgttttccatgatttacattttacttgccatataccacgtcgtttagtggatatttctaaatattccacctttttcaatttatctcgccatatttcagttcctaaagtgtgtacttttcattttccgtgattttcacttttctcgccatattccaggttttcagtgtgcatttctcatttttcacgtttttcagtcgacgc

SEQ ID NO: 526236 - DNA, 133 bp, Homo sapiens
  misc_feature (5)..(5): n is a, c, g, or t
  misc_feature (64)..(64): n is a, c, g, or t
actcntgaggatcccctcatcaaaccctaccgcacgttcgtggggaggtcatcgaaaccctatnattgtgtgaacaatccaacgcttggtgaattctgcttcacaatagggtttgatgaccagggtttgatga

SEQ ID NO: 526237 - DNA, 488 bp, Homo sapiens
tgggatggatgctggctcaatcgcccagactggggtgcagtagagcaatctcgggtcactgtaacctccacctcccaggttaaagcaattctccacctcatcctctcgagtagctgggactacaggtataggtctgtatacctgagattacaggcgcccaccatcatgccagagctaatttgtgtatttttaggagagacacagtttcaccatgttggccaggctggtctgaaacgcccaactttcagtgatccacccatcccggcctccaaaggtagctgggggttatagtgtgtgaggcacttggacccgggcgagtcaatttcttttttggtggctgattggatttcggtttggtgttaacaatgggcttggctggctagaaatgtccggaggttacaaaccatctggggtgctcgcgtgtctaaagaaacggtggttaaagatttgagatggggtagcttgcaagggaacgtgaggctagtttg

SEQ ID NO: 526238 - DNA, 150 bp, Homo sapiens
actgcatccaacgccgccatcacgcccggtgtaattttgtcgaattgttagtagagacggggtttccctgtgtaagccaggactggtctcgatttcctggacctcggtgatccggcgcgcctcggccctcccaaagatgctgggtattac

SEQ ID NO: 526239 - DNA, 203 bp, Homo sapiens
agagacagatacgaatcgagccggtaccgtaagagcttacccacggtcggtagtcgattggtgagtctaaagtcatgaagagcgcaagcggacagcttgcagctggccggtgtggggaatcattctggataactgtgagcgatgactcttttttcaacataaaaaatcaaaaggccatacatcactttaacaaagggcattgg

SEQ ID NO: 526240 - DNA, 462 bp, Homo sapiens
tccaactctagcaccgcggcgatgcagatcactgggtaggcagattctgcccccaaatcctgtcctaaccagttgtttgatcacgagggggtactagagtaggggcagcacggagatgccactgaacagcttccccgtagcacagcacagactacagacatgagtgcctctggggctgcagacactgcatacggacggacagacagatcgacaacagctggaggcttggcccggccatagggctctctgcgggacagtcccagctgctagtgtcgctgttgctgctactgacccgtgtccagcctgggacagacgtggctgccccagagcacatcagctatgtgccccagctctcaaacgacaccttggcggggaggctcaccctgtccaccttcacgctggagcatcctctaggccagttcagcagccacaacatctctgacttggataccatctggctgg

SEQ ID NO: 526241 - DNA, 338 bp, Homo sapiens
  misc_feature (100)..(100): n is a, c, g, or t
  misc_feature (217)..(218): n is a, c, g, or t
atatccaccacacagtgtgctagtattaattacttcagatacaaaataaaggtatcaaaataattctttgacatcaactttttacctaaaacccattagnagctgtcagccacataacacagtgtgaacaagagggcagctgagaaacaaaggcttgggccctcatgccgttttgaggcctgcagctctgaactaatgccttgtgccacttcgtggnnagcatgccagggcagctgctgttagtgggtcttcatggatgtacatgccacaggatttgtccaaaaacaaaaacaatttgtctgaatgtaagtgaacttcaaatgaataccataactaca

SEQ ID NO: 526242 - DNA, 1702 bp, Homo sapiens
  misc_feature (72)..(72): n is a, c, g, or t
tcctatagggggggtagtctccgccgcccgacacgcagaagagagtgttttttgttggtggcacaccacacncaaaggtatatatgaactgcccttccgcacaggcggcgtccttctttgtgttttgtatgtaaataataacatgcctcgtgtcgctcctggtgctcggcccccaccaccgaggtgtttgggttatactgcttgtttgcttttatatcgacccgcgcgcggtgtttctcctcctccttcttaaataaaggggggttgtttttatctgtgccgtggagaggaggccctcacctttcggtggtggttttggtgcccgcggcagaaaaaagtctttctggggcgccacaccccgagaaagatggggaggggcaccaccacacaaagggtgttggtctgttgctccccccccctacctgggggtatggttattaatatggcccccccacacatttggtgtctgccacaggagttttttcttccggaagagggctcttgtctctctcccacccaacggagaatttttctctgcctttcgtggaaatatagagcgcccgccccaacacaacttagtgggggcgcccggccgaaggataaagtaatgctcccccgcgcggttatacgccggacaagcgatttttttctcggcagaatattttttccccctggcgtcacaaaatttttcctttcgtcccacacacacgagggctcttcctcttttttcttccttcgggggggaagaacgtcttccgtgggaaaaaggaatattggaatatcactcttcttccgggggagcacccctcttcctccaaaaaaggggtgccttcatcataccgcgtccctcctccaccggcggggaagagctccttcggagaaattatgatttattctcggcggcacaacggcgtcctcataagaaggggaaaacaatatgtggtagaagaagtttgtggtggtttgtggcgtgttgtggttcctggggagaataaagcctttaaatattctacaatagaatattcttctgtgttggtgttgttctccccacgtgtttcctctcgttcactaccctctgatgaaaagatcttggtttcctccacgagagatataaaattcttcacacagattcttcacgggtctttatagttatactcgcgcgagatatttgtgagagagataaaaatagtgtctctacagatgggggagaaacgcgacactgtgtcttgttctcttttataatcgcgctctctacagagagagagagagatatttctgtgcgctcatagagccccacacactctctgaataaataacgctcgctacacacaacaataatatatgctcacaataaggcgcttccacacgggagagtccgctatactctctcgacacacgcctcgttgccaccagaatgtccactccctctgagaggagactctggttctttcccacagggcaaattgtgggcccagaagaatatccgcgcgttcacaacttagataggcacaccgggcttcataaaaggtttcactttggaccaagcacccgccaagaaacacatattggaaccacacacggttgaaacttttttctggtgtctataagaagctcaccgggcaagagatgttaattttgaattccccgagtttccattgtaacacccaaaatgactaaattaaaagtaattattccaccagta

SEQ ID NO: 526243 - DNA, 134 bp, Homo sapiens
acacacactacaccctcacacctacacgttttgcactccggcaactgtcagagggtgtacagagcacagacagactctaggttgcctagaacaggcaacacacagtgcgagtcacctcccaagggccccctttt

SEQ ID NO: 526244 - DNA, 375 bp, Homo sapiens
actaaattcgcggtcttgtcttcttgagagagaagtgggcctgtagttcagaaatcaaagttgggaattggggcctggcacagtagctgatgcctgtaatcccagcactttgggaggctggggcaggtggatcacctgagcccaaaagtttgagaccagcctgggcaacatgacgaaacctgtccctacaaaaaacacaaaaattagctgggtgtggcggtgcacacctgtagtcccagctacaagggaggctgaggtgggaagatcgtttgagcctgggatgtggaggctgcagtgagccatgatcatgccattgcactgtagtctgggcaaaagagtgagactctagcaaaaaaaaaagtcgacgcggccgcg

SEQ ID NO: 526245 - DNA, 942 bp, Homo sapiens
  misc_feature (417)..(417): n is a, c, g, or t
cgcgtgtggggtctccacatctcttctcgttgtctccaaccacggggacacccgttggccccgggtctctcagcctgtgttctgagcgataccccttctccggggtccccccctcctatgtgcgcttccccccccccacatggaactgtgggcggttccgaactcgtgttggactttgttcccttgattggggaaagacttccgtggcgaaggagggtcaacctctgatgctgtgcgtgcccccgtaccgcgggtccagttcaccccacgcgtgtgaagccgtgacgacgcctctcccttttgggtggcttccggaagtgtcaccacctcccttttggtcgcgcgataagtagccggggtgtgtcccccccccggcccccagtagtgttcttgtgcggcattctaggtttttctttnttcccaggccgctccttagatcttggtctggtgtgtccacccgtcggcacccaggctgggtggtgggtgaaggcaccccccacgcccacgcggggtcttcccagcgccccgtgtcgccagacctcgctctgggtcgtatgtacccggcttcatgttttgtagcgataatcaaagagacccgggcgacacggtggccggttggctccttccttgtctcccgcacccctctatggctgccacagcgtcggcgccatctcatccacgttccccggtatgcacccactctttctggctccacacgccgtcgaaacccgcttgcttcctcgtatctgagaatcttcgtccattgtagcgcgcccggaagatggcagcgcgctgcttctttcgccgccgcgtccgggaccgcggaaccgtggaatccttccaccccctgggagcccggcgtcatcctctgccacggtcaggccccaacgaccgaccccgggcagcgctaaccactatcccaaataaaaaactaaaaccaac

SEQ ID NO: 526246 - DNA, 266 bp, Homo sapiens
caggccccgaacaatcagacagtgagagggtggatacaaaggtgtgtggctaaagagggattttgctgtttctgagaatgttttatttctttaaaaaacatctgcatggagttcccgttgtggcgcagtggttaacgaatccgactaggaaccatgaggttgtgggttccatccctggccttgcaatcggggtgaggatctggcgttgtcatgggctgtagtgtaggtcacagacccattgttcggggcctggggtaccgagctcg

SEQ ID NO: 526247 - DNA, 484 bp, Homo sapiens
agacgtgtgtgtgggaaaggagaggtaaaaaccaaataagctgcagcactgttatacaaactgaagaagttacgaacagaagacatttccaaggtacagtgacagttaaaagtactgggaagttgtgaggtaacacaaactcacaaaagcaaagatgacaataaataggtttatctgagaacttttaaaatgattatataactgatgctcataaaaaaatgtcaccatgtttcatgcacactatcattaggacaattctcttaatatttacatagtgtactatttattagcatgacattctccccagacatcacaacagcaccattagactgcgcttaagccatacctttcagacaaccagggggcatctggaatgagttccttgtatccaaacgctattaagcccaagcaataggtaacatcaatcatattaccaaacacctataccagatataaagcaagtaaggaaatatgagtatctgat

SEQ ID NO: 526248 - DNA, 844 bp, Homo sapiens
  misc_feature (256)..(256): n is a, c, g, or t
  misc_feature (269)..(270): n is a, c, g, or t
  misc_feature (281)..(281): n is a, c, g, or t
  misc_feature (290)..(290): n is a, c, g, or t
  misc_feature (323)..(323): n is a, c, g, or t
  misc_feature (333)..(334): n is a, c, g, or t
  misc_feature (336)..(337): n is a, c, g, or t
  misc_feature (348)..(348): n is a, c, g, or t
  misc_feature (360)..(360): n is a, c, g, or t
  misc_feature (423)..(423): n is a, c, g, or t
  misc_feature (437)..(437): n is a, c, g, or t
  misc_feature (476)..(476): n is a, c, g, or t
  misc_feature (484)..(484): n is a, c, g, or t
  misc_feature (531)..(531): n is a, c, g, or t
  misc_feature (538)..(538): n is a, c, g, or t
  misc_feature (542)..(543): n is a, c, g, or t
  misc_feature (545)..(545): n is a, c, g, or t
  misc_feature (552)..(552): n is a, c, g, or t
  misc_feature (567)..(567): n is a, c, g, or t
  misc_feature (575)..(575): n is a, c, g, or t
  misc_feature (595)..(596): n is a, c, g, or t
  misc_feature (701)..(701): n is a, c, g, or t
  misc_feature (703)..(703): n is a, c, g, or t
  misc_feature (756)..(756): n is a, c, g, or t
  misc_feature (843)..(843): n is a, c, g, or t
catcgccatcccctatgcagagggacaaaggaaaagaagaaatacaattcatgaattcaaaaaatcagcaaagactaccctaatcaaaatagatccagcactgaagataaaaaccaaaaaagtgaatactgcagaccaatgtgctaatagatgtactaggaataaaggacttccattcacttgcaaggcttttgtttttgataaagcaagaaaacaatgcctctggttccccttcaatagcatgtcaagtggagtnaaaaaagaatttnnccatgaatttnacctctatnaaaacaaagactacattagaaactgcatcattngtaaaggacnnanntacaatttaanattatctatcantaatattttcatcaaatttcatccctttatttccattataccacactaacacatcttttttcnttctatctatcttnttaaatacctacattaaaactactttctaaatcctctantttaatantttttacccttttttttcacaatcaatccatatttactctactaatncttttanattnntnatttttnataatttaaataaancttaattncattttttccattctattcnngctatttttataactttaactcacattaaattttaacatcaactaatcaatcataacaaatatttttttcattcaaattcaactacaaataattatttaaacatntntatacaatttttttaaaacttttttattatcaccatattaattcaaataacanatctatttatcatttttaatttcaacacttccttatacatccctctgtgtgaaattaaatatatttttacttactactttctttatnt

SEQ ID NO: 526249 - DNA, 464 bp, Homo sapiens
  misc_feature (29)..(29): n is a, c, g, or t
  misc_feature (77)..(77): n is a, c, g, or t
  misc_feature (92)..(92): n is a, c, g, or t
  misc_feature (107)..(107): n is a, c, g, or t
  misc_feature (116)..(116): n is a, c, g, or t
  misc_feature (171)..(171): n is a, c, g, or t
  misc_feature (174)..(174): n is a, c, g, or t
  misc_feature (190)..(190): n is a, c, g, or t
  misc_feature (220)..(220): n is a, c, g, or t
  misc_feature (263)..(263): n is a, c, g, or t
  misc_feature (365)..(365): n is a, c, g, or t
  misc_feature (377)..(377): n is a, c, g, or t
  misc_feature (399)..(399): n is a, c, g, or t
  misc_feature (402)..(402): n is a, c, g, or t
  misc_feature (440)..(440): n is a, c, g, or t
ggcctccctagtctccagatcgtttttcnttttctgatgtgcttgttcactcaggaaatgttccttatgtgccagcnctgggccagcgaccncatgctgcttttgtnataagaaanagtgatcggcgaagtgataacgtgactgttgtcatggatctgtggtttgttgtcntgntttccctgctgttccngggttctaggtgcccacgtggtcccctcgnggatcttcttttcagaacaaacaattcctccgtccgctatgtntggcgggcggcacacggtgaccatgatcccaggggttggcatcgggccagagctcatgctgcatgtcaagtccgtcttcaggcacgcatgtgtaccagtggnctttgaagaggngcacgtgagttccaatgccgangtnagaggacattcgctatgccatcatggccatccgccggntaccgcgtggccctgaagggcaac

SEQ ID NO: 526250 - DNA, 134 bp, Homo sapiens
gtctacattttgctttccctagatctcttcgtgtccttcctaaagacatacacatgaggcagatggctgagtggcatgcatcgcacgttagtatagcagtatcctcctttaatgcaatctagaaagttgatctt

SEQ ID NO: 526251 - DNA, 455 bp, Homo sapiens
  misc_feature (34)..(34): n is a, c, g, or t
  misc_feature (258)..(259): n is a, c, g, or t
ccccgcccttttttgtgcccccccggttggcggngggggcccccccccccgtgtttttcccccctttaaaaccccgggggcgtctccccccccgggttttttttttgggggggggggggggtaaaatttttccccggggccccccttttccccttgggcctttttgggggccccttttaacccgttttttccccaaaaccgggggggggcggggcgggatttcccggggaattttttttaatttcccccttttgtttnnaatttggggtttttccgggggggggggggggggggccttttttgggggggggggggcccccctttttttttgttccccccggttttttccgcccccggggattttttgggtttttttggtttttttcggttcccccccccttgaaaaggaacggggaattttttgggtttaaaataaattcctccgttccccccca

SEQ ID NO: 526252 - DNA, 154 bp, Homo sapiens
ggtcagtggtacctattccagttttcaagatgaaaatagttctgccgatagatgatgttgatgtttgcacaacagggtgaatgtacttgagggcactgaactgtacacttaaaaatggttaatctgcagggggtgggtggagagcgggggtacc

SEQ ID NO: 526253 - DNA, 484 bp, Homo sapiens
cctggattgtccatgacaccaacgagctggtggccgcgcacatcaaggtcaagatgcagaccatccacctgatcgagcgttatgccatcggcgacctgtccgaagacatgcagcagttgcccggcgagaaggcggacatcaccgcggcaatgaaccaggtcaagcacaacctgtcgaccatgaacaccgagatcaagcagctggcgcaggctgcggccaatggcgacttcaccgcgcgcggcgatgccgagcagttccagttcgatttccgcatcatggtggaaagcctcaacaccttgatggccaccgccgacggcaacctgcaatcgctctcggccttgttgcagtcgatcgctgccggcgacctcaccgcgcgcatgagcggccaataccggggcgtgttcgcgcagatgcgcgacgatgccaatgccaccgccgaacaactggccagcatcgtcggccgcatccagatcgcggccgatgc

SEQ ID NO: 526254 - DNA, 416 bp, Homo sapiens
ttaagcacgaatgtcatggatggcgcgtggcggcggccccccaaatcactggcggattacgggcacaccgagcctaagcgaggtgccgagtggtggggcaagagccctttggttactttgggctgggccggcattccggcttttccaaagtgacccgccgtcagggcggaaccctaagtggccgttaccgcagcaatggatatgtacacaatccaactgtgttgactgccaggcagccttcgcgagcaagcccgcttgtttggatagcgcggcgtcaggtagataggtgtcggctttcaggccgtcatcgcaggcaagcccacatagggattgcggcgcgccagagagataggcatcggctgtcaggccgtcttcgcaggcaagccagctcccacagttggatctcgccgcacctg

SEQ ID NO: 526255 - DNA, 293 bp, Homo sapiens
gatttcaagtgtattttcagcagcgagtaccgtatacaccagctcaagtactgtaatcacccaggcaccatcctctaacaggccaattgtccctgtaccgagtgcccatttcctcttctgtaacatcttcctaatggacaaaccatgcctgttgctattcctgcatcaattacaagttctgctgtgcatgtaccaggtgcagtcccactcgttcgaccagtcaccatggtgcctagttgtaccaggaatcccaggtccttcctctccccaaccagtacagtctgcgacttgat

SEQ ID NO: 526256 - DNA, 341 bp, Homo sapiens
ctcgagaagtttgaagtggcgcttatctgcccatgaaattgaagaacttcatcgccaatggaaagagttagacgaacaagtggcgacccaccagcgagaagaactgtcgcttgcggcaacgatgcaaaaagaagaagcagcagtagaacagcttcgggaacagttgacgggcgctagaatgaattcgatttgacgggcttacaagcaatgtggttgctttccggtaaagcgaaggaaacttcgaaaaaagctagaaggggtcgggaaaagaaagtattaacaagaggcggaaaaaaaaattgccggcgcattattaaaaaaaacaggcttagaaaagaagg

SEQ ID NO: 526257 - DNA, 118 bp, Homo sapiens
ccttgtaggtgaccccagcgaaggccaaacggagcagaagaaccaccggttgagacctgcgggatgtgtgacctccagaattgtgagaattaataaatcattattggtttaagctacc

SEQ ID NO: 526258 - DNA, 1239 bp, Homo sapiens
  misc_feature (466)..(466): n is a, c, g, or t
  misc_feature (468)..(468): n is a, c, g, or t
atctacttcaacattcctccctgtacaaataggacacgatgatatcaagcctactttcagcaataggacgctcgttacccccgatagcatgagtatcatatcgtcaatccttatagtactgtagtaccccagcatgccgacccaacgaagcaggggcttcgttttagatgaatggcacgacgctcctggataacgtctgcattagatacacttacacacacttttatcatgtcagtaggtttcaattttcccttactttactttaaacccaatcaattaacctccagtgggcgccatatccgtgccataactgcaccttcaagttgctcaccctcaatttacttagcgtgctggccacactcgcgcaataacgcgtaaattgtctctcacgccgataacggaccaaaaattacatgagtgtccttagtactatcatatacatacccgccaatcaggcgctccctanantcgcttgctaacggggccctcttaagcgaggtctatcgtacgagacccgcgatatcagcggtgacagcgcgattagaacactctcttacaccatacaccgatgtccccataggaaaacctcagctcaccaatacctatcgcaatgtcactccccgtctaacaacttcaacaccgcaccccgtataccctcttagtactactcaacgcaaatgcgttcgttcttttccttacctaatgcatatacgcgcgcgcactacttcacatttattcacataacaccccaccatgagttacatacaccgtacatagcacctttaagcgccaccgtgaccgttaataaaaccgcctaatatggacccgagacagtcgtagccctctaagtcgcgtcatgaactttccagaatctccctatctttccagctagagggcttgcagtaccctttacatcccgtcaatccttcgttaccgccacgctttgcatatcagagtggccatgggtgatgcaaggtagtaacgttacccgtaaaaccaagaatctctgccaatacctggtcaagaatcaaccccagctaagttccttatccggaatcccccatgctcaggtgaacaggcaagtgcacgcataaccctcaaagttcgaacttcccccaaatcaaccctatatattcgttgaactttatacccaggggaaccacacccctggaaaaggccctacatgacccttcaaatcacctgcacaatagggtgtatacggcaaagaaggtcaatccc

SEQ ID NO: 526259 - DNA, 438 bp, Homo sapiens
agaggatgtttagattaaatggaaatgaagacataacatgcattgcctgatcttttgattgtgattctgtactatactttcatctttctggcttgtttgaatttattccaatacgtaatttgggcgaccagatgtgaccgatacaattgattaatatattagttgtggcttgttggtggcactttcatagagattaaaactatccctgtgactgaaataaaacgtttatcttaggcagtatagtatggtcattaagaatacaagattccatagccagactatgcttcaatctcagctctgcttatcatgtgccttttggccccttgtttaatctctgttccttggtcttgtcattattatagttactacctttgatgaattttgaggatcaaatgagtcactatcttaaagatgccttgtgcctataaatagcgagtg

SEQ ID NO: 526260 - DNA, 128 bp, Homo sapiens
  misc_feature (4)..(5): n is a, c, g, or t
gtanntgtgtgtgtaggagtgtgtagctaaagtcacgcgtaagtgtgtgcaggtgtatgtagctgtcaagtggtgtgtgtgtcagttgtatgtgggtgtatgtgtatataagtgtatagtcatacgtc

SEQ ID NO: 526261 - DNA, 970 bp, Homo sapiens
tatgaaaactcgtgttaggcccggggaaggccgagggtaactctcaccgtgccctcagatgaagcacagagaaggttgttacttgccggggccatccagtggggctggctgggtctgtgtgtccccatctgtggacccctctagggtctgagaatgagaatgaaaaggtgtctccgtggtatccacctttttccgggcctccctttcccccatttccgtggtcccgtgttccacttcctcaggttgggtgctctcactttctttgaagagctctaggagaccccgcggcttccgcgccagggtctcccccattgggctctcctgtggcatggccacgtttgaaaatttgaacaggacaatgtggagtgcacgtgtcacgcccagggcttgcaacacgcgtgacgggaattgttgagtggccacagggcccctaaatagagggctatccaagcctatagacagggcctctccacagagtcctcagaatatatcatcacgtgacctgttgtgggctccacatcgtgtgattggcgtacccagtcaatcccccgaggataacaggggtccaagaactcagcgaggtgggtcgccacataatgcactccttgttgggggcgtgtcccccccgagataaggccttatagacgtcttccgcacgacaataataaggccgcctgttgtggggggagcaaccgatcttcctccaacaggccacactattctctcaagagtgttgtgacccccgagtcacacaaccgcatttttgttactgaacaacgtgcgtggtgacgcttctaaggcgcgcccgtgttcggggggacagaatctaaacatgtgggtatctccgtccaacacaacctccccaatattttctgctcataacgcacttttaaactcgcatctcgcaggaccacaccactcacgccacgaaccatgtgagtgcaggcaccaacagttgccccccctgtgg

SEQ ID NO: 526262 - DNA, 986 bp, Homo sapiens
gggacgtctcgcggttccacctcgcgggaccgcgagacgtctgacgtcgcggggcacgctccggtcgcgtcacagcgggagcgacgatcgggacgcgggacgcctgatggcggcgagctcccggggcacgccctgtgcgcgtgaagcgggacgttcgacgccggcgacgcgcgcgcgagggccccggcttctgtatgtcccgtttgtggcgggtgaccgcgggacgcgcgacggctcactgacggacctcggacccctgacggcgcggacgggtgcgacgcaaccgaactcgcgccgacgtggacttcctgacggacccggacgaacgcctgaacaccctgtcccccgaatacccttgggaccacccactttaaccacgggacgctgatggctcggaaccattaagacaccttgcggacgacccacactggtggttcgtacctcttccccctcttcaccccctttcaacattgccttctacatgcccgtggtcctagggatagatgacagggccaaaaggctaacattttttcaccagcgtcccagggcggatttattggacaagatccttcaccaggcccttaacgcattttccacaagagtggtcgcccagcttatacgcgcacacccacttgcttttttcaccccttcccaaccacccgatccccatcaaacacccccttcaacacaggctttctttcaccccttgacccatttcccacagaagcacatcctttacttaatgaacttcactctcacaatccccttaagtctggtcaaagaacatccatccaccggctcattgttgttttggaaacgcccccaagagtctatcaagcacacaggcaatgagcacatttggcagaacctggggaccacaggcaaaggaccaccattgttccccggagcaatacttgactgggtacccacttttacccttgtccggggaacaatcgatggatgcactggacactctacgatacagg

SEQ ID NO: 526263 - DNA, 158 bp, Homo sapiens
atacttccacgtatagctagggatactagtgacgaccctttgaaaacagagcccagtctcagtcctggaagtcctccacagagcagctgccagtcaggctgtggtcgagtctctctagcaggcgatcttcgccagcgagagcctctgtccattagtgt

SEQ ID NO: 526264 - DNA, 245 bp, Homo sapiens
gattatgttcttgcagactgtgctgtggagtatcctgggcctactgagtgtgaagtctagtggaggccaggtctggccaggctcgggagagcggtcccccttgcggtgaagtttcaggcccaccgtgtggtgccccaatggtgttacagcagctgggtcaccttcaccctgactgcagggttgtcaaacgtagactggtggcacccacacatctggtcccctctccttgaacaccccatgtgcgg

SEQ ID NO: 526265 - DNA, 183 bp, Homo sapiens
aggctgaacttatgtctttctgtaagagatttgatgatggtgcaggtctcctgtgtgagcctgaatgctttatagctcgaggcgttgagaaaactcgaaatagtccaactcttagattttcagtttggaaaaacacaaacaaaaaaaaaaaacaccccccctcttcctccaagaaaaaaaaac

SEQ ID NO: 526266 - DNA, 409 bp, Homo sapiens
cgaaaatggtattccaatgctgcaggattcaattaactggggttaatgcgagatgatacaatattccaggatgaagatgttaaagaagccataagaaggcttcctgagaacccttataatgacaggatgtttcccattaaaagggcactgggcctgaactttaagcctcagatcttgcctaaagagcagtggccccaatatgaagaggaaaatttctcccctgaaccgtatttgaaaaaggttattcgggaaaaaaaaaaaagagaagaatgggcaaaaaagtaatcatgtagttgaagtctgtggatgcacctgttattaagatggttaaacttgaaacaaacaattttaagaattatttggttttaaaatgtttttctttaaaccaatgtttattgtaatggctgga

SEQ ID NO: 526267 - DNA, 714 bp, Homo sapiens
gtccattatataattcctatgcctttgcatcctcatagcttagctcccacttataagtgagaacagacaatatttggttttccattcctgagtcacttcacttagaataatggcctcctggccgggctcagtggctcaagcctataatcccagcactttgggaggccgagatgggtggatcacttgaagccaggagtttgaaaccggtctggccaacatgacgaaaccccatctctactaaaatacaaaaaaaaaaaaaaaaaaaatttgcccaggcgttgggtggcgggcaaccccagcttacttgtgggaggcttgaagcactttgaccctgggggcagagtgtttgccagttgagcttgaaatcacgttcatgtgcacttttcacgccttgggttgacagagagaattcggtttccccagaaatttgaagagagtggggcccttgcgtcggggtaaggcttggacattaaggaacctgtggtgcgcttggggtccatctggtcccagatcactgaaattttctcccctatcagcaataaggctggttaggcttccttcatcattggtggttgtcccctaaaagggggactttccaaattcccttcgagggttttccctttggcattggatcaactttcgcataaatgacgtgcgccacaagagaggcctgcctttggggcctatctggcgttttggccatggccttcctca

SEQ ID NO: 526268 - DNA, 768 bp, Homo sapiens
aggcgaatgcagtgtgcgagctgataggctctacgctggctgacggtaactggcggcggttgtgaacgggcgagtgtggcttcttctggtggtcagcttgggagagaggggtggccttcctcttgcattgaggccggcgccgagccggattcaggcggatctcgtggcggagccaatcttgctccctctcccaggcctttacccgctccctaagatacccgggccctgtaaggtgggagtggaagacgagagttctctttcattctgcgctctcattggctctctgaccttggtgcgaacgcagtcctttactgacctacagctgcattaatagaagatggagatggaatccacagtgacctgtcagctataaaacggggggaactgaccgtagtgtataaacactgtcgagtatcgcctggcaacagcgccaaggacatttatatgggacaagccactgcttttacacggacgaccaggtgtaaagggcatctcggaaggcacagccaacatgtgtgacctttgacagaaggccaggtaaccggatccctaaatgtgaacctcaatgagaaccagaagtctgtaaaagttggccagaagagtgaccctcgggaagtgaatctgcgctactaagtcagctattggaggccactgtaccttactgcttatgagcaacgaagctgcagatgacgtcggaaggagaaaactcggcacatccatggaacttcaagagcacctggagcaagatatattttgacattccactga

SEQ ID NO: 526269 - DNA, 373 bp, Homo sapiens
  misc_feature (49)..(49): n is a, c, g, or t
  misc_feature (241)..(241): n is a, c, g, or t
ccttttgagacagggtctccttctgccacccagactggagtacagtggncgatccgtgcaacctccatctcccgggttcgagcgattttcctgcctcagccttcccaagtagggggactacaggcacccaccaccacgcccggctaatttttgtatttttagtagggatggggtttcgacatgtttaccaggctggtctcgaacccctgacctcaggtgatccgcctgcctcgtcctcccnaaagtactgggactaccaggcgtgagccaccgcgcccgacctccgcccggcttacttctctatccaagaaatcgccaactagactgaaacgagcctctccccgaaccctccagcatgtgagccgttcaggca

SEQ ID NO: 526270 - DNA, 396 bp, Homo sapiens
caaatccccctccaacacctctggggcctctgggatgcgtccccacaatcccagcaactgcctctccggcctaacctctaaccttcccgactctggatgatttatttccccctaatatgcggcggtggccccaccaaagccaccagcccgcgactctgggtcctttgaccccattggcccgacgccaccatccttttaaccaccaactaagctggtccctcctgacccggggaccttcgcggagttaggagcctgtcctacaggcgctgtttagagttccgattccggtccttcactacttgaggtttatctttcaccttattggaactaatttccacagcttttccatcagtttgaacggattaacagcctttcctcccaaacgctttgtgaatt

SEQ ID NO: 526271 - DNA, 257 bp, Homo sapiens
aaaaaattttttcccccccggggggggggggggatttttttaaaaaccccgcccctttcccctacccttttttttgggggcccgggcccggccccccccctttaaaaaaaccttttttttttgggtttaaaaaggggcccctgggggggggccccttttttttccggccccccccccggtttaggaatttgggggttttttgggggggttttttttttccccccccccggggccccaaaccctttttgggcccccca

SEQ ID NO: 526272 - DNA, 116 bp, Homo sapiens
ctgctaactcatgcttccacacttaaaaatgtggcttttcaagctttaaaggataacagctatccgttggtcttaggaaccaaaaaattggtgcaactccataataaaatgtaata

SEQ ID NO: 526273 - DNA, 275 bp, Homo sapiens
ggactgtgagtatccccaaactaatatcatcaggaaaatgcaatcaaaacagaatgagatatcatcttagcccagttagaatgaccattactaaaaagataaaaaataatagatgctgttgaggatgtagagaacagggaattttttttttttttttttttggaggcggattctcactcgggggcccaggcggaagtgcaggggattgatctcagcccatggaaaccttctgtctcccatttcaaagacaattctctggatatcagccttctcca

SEQ ID NO: 526274 - DNA, 989 bp, Homo sapiens
ccggacggctgggagtgaagagggacgggtcccgcggcgagcgagactcctggagcataagactgatggccatgacatactgaagttaggcgtctgtgtcgttgcatagttgaagaaggcactctgagccaagttcaggcaacagcatgcaatccgaggcaaaaaccttaaagcaagtagccagaaaatccagcagaatcgagtcttcctgatccagaggaggcaacaaaggttcccaggcatactcctgcagctgaaaagccaaagtagtctacgccggcagaagagagagaaggaaacgatcgagagagcagggagtatttactgcggttcataccgtcatgggtataagaagcaaaaggtcatctaccttagatagctgggccaacagatggcaggagatacaaacaagagcctacccaagactgattgatgaagaacaggatacgtaagataagagaggaaccgcatacgagaaagaacagagacaggcctacaggcgtgactgctgaccaagatggctcaggacgacacacaagcgatcaaaggtagcaaggccacggacacgacaacccctcaggagcaaggaagacaaaaccctcagcgcacaaagcggagacgacagcctacatgcaataagagacgaaaaggagagcagcacgaaaagaaaacagaaaacaacggaaagaacaaacaaaaaggacgaaccagaaaaaaggagaccaaagaacagacagaccacagcacagacaagcaacacaagcaaagacaaggtcccaccagaagcacaaccagacaaggtacgagacagagaagaagaaacgaaaaacacaggaccgggcgaaaacgacaggagaaacagaccagaacaaacgagccccaaaaacaagaaaaacaaaaacgaaaaagaagaaaacacagaagacaaagaaaaacaaaaaaagaaacaaaaacacacaaaaaccaagcaaacaacacacaacagacac

SEQ ID NO: 526275 - DNA, 302 bp, Homo sapiens
gccactccacttcagactgggcgacagagcaagactctgactcaaaaaaaaaaaaaagaggctcttactttcccataggcttaatattacatttggacatgggggccaactttatcaagaccacaaataccacttacaattaattttaaattattaatcagtgcatagttgtctaaaatgtatataattcacacagagcatattataactgaagacacaccatatctatgatatcttcattaatccatgcggggaaaagaaagatcagattgctactgtgtctgtgtagaaaaggaagacat

SEQ ID NO: 526276 - DNA, 1685 bp, Homo sapiens
  misc_feature (1)..(1): n is a, c, g, or t
  misc_feature (1348)..(1348): n is a, c, g, or t
ngctgccactccggtggagcctcactagggtgcaatcgaggggcgcgtcagcataggcatcactcgtgggggccacacaacagagcacaccaacgaacacaaagtggttatgtttccagcagaggaccgcccagggggggcaccaacaagccactaaagggggtctgcccccctgcgccgtcccgggggggaagacctcatcacccggttccttataatacggggcacacaccgaggggaaaagcaaccccctgcacacaaaaacaaaggcccccctggtggagcacacaaggccccccctgaaaagcgcaacctcgtggggggcacgaagtttgtcgccgcccacccaggaggaccgttgctgtgtgtatacgaagcaatatccccccgggggaccgacaggagggtttagtgtcccccgctgaggccacagatttgggtgtcccaaatgaacgccacaacgggatgaggaagagggttggcaacaccacaaagacgtgtctggggcccccgccaaataattaaagcgttctccgtggggagggaaccccactgactgtgtcgcccgcgaggaagatctcccacgggccggggggggggcaaacacccctttgtggggcgcgccgcgtgaaacactttgtggggagaatatatacagccgctgggggcaccacggggtgggtgtggaaaaagagattaccttctcccgcggcgcccccaccgctttgagggagcaccgggcgctgggccaccggggggaaacagcgtacggccgctatagccgcgcgctttgggctggcccccagcgataggggtaatctcccgcgccctcgagacacagcgcccccccctatagagagtgcgctggagacacacacacacggtggtgactcctcgcactgtccgcttgcgcacgggagcactcacatgacggcgcgctcgctcgttgcgcctgttcccacgcgattttctcgcgctctctctccaccacgcgctgtctctcaccgcgcgctgcttgctgtgctctctctctctgtgagactctctcccacaagacgcacgcgtggggcccctccccacacgccacacgcttgttctccgcgctctctctcggggtgtaagggctctctctctctgtggggcaccacagccccgcgccccacatgtttaaccctcgttgagagatttgttggcgagagagatggtcaccgctctctcacgagaagggaccacaggtccccccagaagggagggtcaccctcgggggacacacacgtggtggccgcggtgtttctacacccacgagaccaccgcctggggtgtccctcgtctctttgtgggggttttnggggtgtccgcggtgttctcccacaccacgccccactcggtgttcctccctggggccctctcggcctcttccacacccctctgttctttccctctccctctcgcgggggccccctcgaagtgcgtgggcggccaccccacccgcgccctctcgcggcttctttaactcccactcttcccacacccgctgcacacgccggctccaaccccaccacagggtggcgagagagagccacccttctggagattttcggttgttgtaaggagaggttgggtggttttcacaaatggtaaaagaatgttttgaggccaaaaaaatttgcctgagtacccggaaa

SEQ ID NO: 526277 - DNA, 102 bp, Homo sapiens
gttatgatggcgaggtccgtattgttgcgctccagcttcatttattccgaggcgcctacgccacggcgctggattcctcgatcggggccgagcgcaagggcg

SEQ ID NO: 526278 - DNA, 421 bp, Homo sapiens
cactgcatggtgctcggggaggcgaacacgttaaaattacaaagcctaataataacaatgaaagaagggttgtggagagcctgaaccagtggcttctcaatgcctgcaacatattagaatgacctgagaggcttttaaaactactggctactcagctcagaccaacttcagtaaaatctgtggggatgaaacccaagcatttgtagttttgttttccttgaggcagggtcacactctgacacataggctagagtggcagtggcgcaaacaggactcactgcagccttgacctcctagggctcacgcaatcctcctgcctcagcctcccatgcaggtgggaccacaggtgtgtgccaccaaacctggctagttcttttgtcgttgtaagttagttgtatttaactttttgtagagatgaggg

SEQ ID NO: 526279 - DNA, 1408 bp, Homo sapiens
tctaggtccaatgggtagtttttattccccgggaacaaagaatacatgtggtggagaaaaaaatctccaaagggcaacacagagccagggatgtgcaaagaaatgagtgaccacccggggacagccgtggtctcgagggagttcgggtataaatagagtggctgtgctctccacgaggggaccgtggctacgagtggccgcgggatttatctgtgggaatctcacacatttgtgcccgcgatcttcttataagtgtgtgtcacatcttcacgagagggtgggaggatgtggagaaaaggtggagggtggaaacagggtggtggatcatcacacaaagagcacacaagagtgggcaactcttccatattctcccgagagaggcaccgagtggacacaaccaaaaaactctctccctattattcagaaaagtgggaggtttaaaagagaattaaaacaatgtgagagaggggttcttggagcggtgtgtacaacgcagtctcccaccccgagaaacaaacaaaaaataacaaaagggagagactcacaacgcgtggagcaccagtggagaaaaatacaccgtgggatcgcggtgaacacagagcgggcagcaccacaaacagggggtgacacaagagacacacatcatccgaaagaagaaaacacgcgacgaggggcacaacaccactaaaggcaccagaaggaaaaaataaacgagacacacaggaggaggagacaaacaacacataagcaaacacaacacagaaagatgagggagaaaaaactacacaacagggcgacaaacagtcaaaactcaaaaaaacagaggaaccaataagtgggacacaaagagaagaaaacaaccagacacaaaaacaaccaactagaaaatcaactaattaacacccgcacaaccacgagactgacgagagactagacaccaaccgccacacaaaaaataactaaaggagccaaggaggaaacccagcatgagcacaccacataacagaaacgaccgatgatcaacaactatagcaaaaaaaaaaaaacaaacaatggggggccaacagtcagaaaggacataaaaaaacaagcacatggtagagcaatcaacaaaagtgacatagaaacacatgagtgcacaaaagaatacaacatacgcaggagagagacgaaaaacaacaccgacaacataaaaaaaaaaaaattgccctcagatctgacaccagataacaaaaaaaaaaaaaaaaggacccacaccaccgagccaacaaaacaaccaacaacaacacagtagcacataacacacacaggacgagtaaccacaagggaccggacacgtgacacaaataaaacacagcaaaaagagaacactataacagaaaacaacaaaacgaacaaaccacccaag

SEQ ID NO: 526280 - DNA, 687 bp, Homo sapiens
cacaacaaacagacagcacaatgtgggcgtgcaagtatagccaaatatataccatcatccgtgtctatctatgtggagactacgtgcattcgagttcttcggtcacctaagaattacctaacccaggagcctgccttccacacatacattaataagaccaaccaggaatgtcataaaaggatacaaattacgaacccaaaaacatgaaagtcattctgcactcgtcccgtggcttaatcacgtgcattgcagctcatatgcgtcatccattcctcgtgtcctatccactataatagagcatcttacttgactgcagtttatactccaaattctccaggctggtgaaagtttcctcaggattgcttgagaaatgaaagtcctggccatggtgcgcatgtggctcatgcctgtaatcccagcactttgagaggccgaggcgggtggatcacccgaggtcaggagttcaagaccagcgtagccaacatggtgaaaccctgtctctactaaaagtacaaaagattagccaggtgtggtcgcaggcgcctgtagtcctagctactcaggaggctgaggcaggagaattgcttaaattcggaggcagaggttgcagtgagctgagatcgcgccactgcactccagcctgggcgacagaatgaggctgtctcaaaaaaagaaacaagtaaaaaa

SEQ ID NO: 526281 - DNA, 104 bp, Homo sapiens
ttcactactgtcgtcaaacacactgaatgagatacagtaaagtagaagcagtctaaaaaaatttgaaacaataagtgtaaaaaactcaaaaaagccatacaatt

SEQ ID NO: 526282 - DNA, 393 bp, Homo sapiens
aggattcccggcagccccgaaacacgccaccgcgtctttatatcctgaccccgaagactcggtcacctggtctcgcggtctgctgtcgcaacgagtgttgcctggaactttgagaagttcctggtgcgccctgagcggtgtgccccgtagcgcaggatgcagcccgcctgacttccagactcagttgaccatcgagcctgacatcttaaacccttgctgtctctatggcccaggctgtgcctagggcgcccctcctacctccggctgcttcgcagttgccgtgctgccgtcttgcgggggctcgccggcatcccccgcaagacggcgcagccccgcaagacccaattcgtccctttaccattttcactgacttgctgcgtcgggtaccgcgct

SEQ ID NO: 526283 - DNA, 281 bp, Homo sapiens
tagtgagatctctaagggatatcctgagttctaataacattgatgtcaggaaaatgacggacacagaccaggtgaactgccccaagctctcgtgaaccaggttctacagggaggctgcacccactccagtgtgacttctgattcgctttcccctaccccaccccccgccatagggacaaaccaatcaaccacgacaaaggaagttgacctaaacatgtaaccatgccctaccctgttgacctggggtagctgcaaaataaactggtggttgaccttaatta

SEQ ID NO: 526284 - DNA, 854 bp, Homo sapiens
tgggcttgactcaggatttaaaaatgggaacggtgaaggtgacagcagtcggttggagcgagcatcccccaaagttacacaatgtggccgaggacttggatggcacttggttgttttttaaatagtcattccaaatatgaaatgcatggtacaggaagtccctggccatcctaaaagccaccccacttctctctaaggagaagggcccagtcctctcccaagtccacacaggggaggtgatagcatggcttcgtgtaaataatgtattgcaaaatttttttaatcttcgcctaaatacttttttatttggttttatttggaatgatagagccttcgggcccccccttcccccttttttggctcccccaactggagatgtatgaggggctttgggctctcccggggaggggggggaggcagccagggcttaaccggtacacggactggagaccagttgaataaaaggtgcacaccttaaacaatgaaaacaacaaaaaacacaaccacaaacaaaaaaaacacggggggggcgcaaaaaaaacacctgggggcgccagaccacgggctaccccccgcgcttgtgtttttctcaaacggtggcgtccccactagatggtgagctgctgattaaataaaagccgcacgacaacgggggctggtgtatcacacagcttgctggtgtagaacacgtggcaaatcgagcgcacttcttgcgagacaacccccttatttcgggtgcgtggcactttgggaccaactgccacggaattttacaccgtagggataaataaatttaggtgtttatgttgtcacatgcagtattttgttcgtaatttcacggacttttgaacata

SEQ ID NO: 526285 - DNA, 140 bp, Homo sapiens
cttcatggctgacttgcagaaaactcgaaagcagaaaggatggaacagacacctcacagagtggggaggacggaggctgctggcagagagagagagaggactctggagatgccgaagcacacgccttcaagagtcccagc

SEQ ID NO: 526286 - DNA, 536 bp, Homo sapiens
ggtccccctataatgggttgaggaaagctcaggtggaaaaggagggaactgctctcaggctgcgtgcaacaacagggcccaggggtttgatgggtctctcatcccttggaaagcctgaggcaaccgcctgtgtggggtttaaaagcagggttttttcccccctctcccttgtggcttcaagagcctttgggatttctttttgcaaagggccctgaatgggtttggggtcctgttagcctaatgtgagggggtggggagaccgcccccccccggggcccccggggcccctggcccccccctggcctggggtccccccccggtcattttttctggtcccgagagggggggggggggggttccctttttgtttccaattcatgggggcctgaggcggcactttttggttcccctaatgaagtttaggacccggatattaatttggggtttccaatttttggtttggaggggtggggggtttatttaattaggccattccttgaagtttgggggggcaattaaggccttgggaccctcca

SEQ ID NO: 526287 - DNA, 148 bp, Homo sapiens
cacgctggtctgtcccattccttcccagggcttcttcatgtcagatgcacccaagtccttagcccagctgtgccacctgtcaggagtgtcgctctctgcgtgtgtctgtccccgtccccaagaatgggatgtgtcgtacttcatgccc

SEQ ID NO: 526288 - DNA, 222 bp, Homo sapiens
ggaacagacttcgaaagagtaatcttcatcttcaagtcaacagagtaagcataaactaagataatcacaagttacattataaaaaggtaatttagagccgggcatggtggctcatgcctgatactaccagcacttatgggagagccgaggcaagcgagatcatttgcaggtcaggagttcgagaccacgcctggaccaaacgtggtgaaacgcttgtctcta

SEQ ID NO: 526289 - DNA, 1613 bp, Homo sapiens
tggtagtcagctattaaataaggtccttaagaacttttaaaacaccaattggggaggataaatcccattcggtcaagagcaaacacaagatcggcagtgtacgcccgggacgctagagggaatacgctttgagattttggggtgaaaatttggtggaggtcccacaggcttctctggactcaattctggcggctggcccccggaaaatcctccatatatatttcctctcttattatctctggtgtgtgcagaagagtattctacacctctatccccggggtgtgttctaggggtctacccagagaagtctatctctttctattctgtgagaagtgtaaaagggctatacagtgtgacacaaagtgttgtgaggggagatatcttttaacacatgatgtgcgcgtggatatatactcgcatactatgtggcgcgtgtagacagcgtggtgggcccacaatctgcacccacacatatttctcccgtgggaggtgcggtgggatcccactcgcgcgacacagacgcgagaaaaccttccgcaaactgtgacggggacacccagagaatgggtctccacaagtctcacacacaagcggtgtactatactacagggccccaacatattaatgcccccaaagcgtggtggcgctatcatacacggggggacaaaaaaccccgacagcgcgcctctctttttgtggcccccccccctgatggggttggggggggtcttcacacaggtgtgaacaggaggacatgttggacaccccccaagacacaaaggtggggtccccccccgccggggggggggcggcaaaaacaaagcagggccgatgggggaccccatccgccacaaaagagaatatatcacctcccccccacagcccgaggtgctcctgctagaaaaccccgctgagaaaagagggggaggagcgtacacaaacacagagagcgcgccgggggggggacccccccacaaccaacaacagagcccctctcttcctgcagagagggcgggcggccccccattcttctctcttctgcccgccggcgctcgcgcggcgggcaacattacaacatctacatcatcctcccttaaaagggaggacggccactattttctatgcggagagcgccgacaccacgcctttcttttataaccaccacccacacccccgcggggggggggttattcacccccgcggcgcgccagcggcttctctcgttgtggtggttcatccccccaccccaccaaacgtggttgtggtgtttctttgggggcgttccccccccgggtctgtggcgcggaacaggaaaccccccctttgctttctcaccccgatttcccttctgtatgcccgctctatgactctccacaacccccctttcggtggacgaatattaataacagcggagcgacgcatgagagaagaacacacatcatcccccccctcttggatgagaacccagatatgagccgccaacttcccgcggggcggaacacacaaccactagtgtcgcggcgagacaatcccgcggggggcgaaaaaacatccctcgtgggccgcaaaaaatattcccctccctcgtgtcaccacaagcgggacacccctcg

SEQ ID NO: 526290 - DNA, 423 bp, Homo sapiens
cagtcggcccggatatgggctgtagctgagagtagcctctgggtggcagtgtctctgctctcccatccggggctgcagtgggacactatgtcagatccccggagatggtgtcttttttcctttgtaattaatgaataatccagtggtgacactgagcatgtcctggtgagctgtgtgactcctgcctgataatggtggtttttctagcctgtcctttcctttcacgtttattggttggcgttctgagaagagccgccttttctcccatcacttagtgtgcagtgtgctacctgtcacctgtctgtcacttgtcagtcactgtcacctgtcactgtcactgtcacctgtcactgtccatctttttgatgcttgacggttccacctttggccggtggccacctcagtctggtggtgtcttttgcc

SEQ ID NO: 526291 - DNA, 297 bp, Homo sapiens
aacatactaggtgcaaagtaaaggtaaggagcaagatttatcaagcaaatggaaaacaaaaaagaacaaaggtcgctagtcttatattagatacaacagactattacaatggtcaaaaaggacaaagaagggcattacataatgataaagggttcaattcatccagaagacttaactatcctaaagatacatgcacccaacattggagcatctagattaggaaaacaagttcttagagacctacaaagagacttagataactacataatggaagacttcaacaccccactgatagtg

SEQ ID NO: 526292 - DNA, 955 bp, Homo sapiens
accgttgactattctctacgaaccacgaaagacattggaacactatacctattattcggcgcatgagctggagtcctaggcacagctctaagcctcctgtattcgagccgagcctgggtccagccaggcgaaccttctaggtaacgagctcacgatctagccaacagttagtcgtccacacgcccatgcattttgtaataatcttggcttcgatagtgaatacccactcataatcggaggcttccggcgaactgactagttcccctaataatcaggtgcccccgatatggcgtttccccgcataaacaacataagcttcggtgactcttgacctccctctctcctactcctgctcgcatctgctatagtggtaggccggcagcatggaacaggttgaacagtctatccctcccttgagcgaggagacactactgcccaccctggagcggctccgtaagacctgaaccgaatcttctgccttacacctaggcaggtgtctcctctatctgtaggggccatcaagttgcatcacaacaattatcaatgatagcaaccccctgccgataagcccagataccaaagcgcccctcttcgtctgatccgtcctgaatcagcaggcggggcctacgttctcctatctctcccaggcctagctgctggcatcactatacctactaaacagaccgctaacctcaacaccagcttcttcgaccccgccggaggaacgagacacccattcgtataccgaacacctattctgatctaccggtcaccctgcaagtttatattctatccacccaggctacggagtaaactcccctaatgtaacttagtactcccggagcacacacacccattcgcatacctacgcatggaccgaccacaattccaatgcccaaggtatcggttagcccatattccggacgacgaaccccgttttctcctcaaaatgacc

SEQ ID NO: 526293 - DNA, 586 bp, Homo sapiens
aaaaaagtggaacacaaagtaggaagtgagaaccttctggggttgggatggatggacttctggattctttctgggtttggcctgaacaccaagtagcttcataatcaaagggtcattttctgggttggtatcagaccggtatttataaaggttggggtatttaatttcagtaactccgtggtattttcaacaggaaaaagaacctggagtccatttggcagttaggctcgcaccagctggtcttctggtgccagccagctccgcccgagaccccgggcacggtgttcgcagcacagcctgggcaggggccctgagcgggagttctcagcccggtctggtgccaaaggttggcctggtggggtcacgggaaacccgggcccatggtccacccagtgcgtcagggccagccgggggcccaaacctggtggatgggacacgcaggtgccgtgcacatcgggggcctcagccagaccggtctccttcccaggcactgtcggaaaggggctggctccgtgtcgggccagtggaggatggtggcaggagacggggctggggaggtccaggtcacgtcctctctggcgaccct

SEQ ID NO: 526294 - DNA, 111 bp, Homo sapiens
tgaatgaactgcttcacaacgtttaaatccagacaacttctttgccttcttcaacctctacattttatatagagactgtcttttcagactctcttgaatctgctctttcct

SEQ ID NO: 526295 - DNA, 710 bp, Homo sapiens
accgtggatgctataatctgctactccgacgcctgacccctcccagagactcgtgatgccaaggacctgatgacgagacgtgactacagaaggagtcggtggatattgagacccaagagaggagccgagtggctcctgcacatctatcatgggtctcccagtggaccaacccaaactgaagacaaatgaggtggtggcataggatccaagctaaagagcaagagaggtatgtcatccataccattgcctattggacaacatggaccacaccgaagtagacgttagataacccgggatataaatccacaatgtaatggcaaacggtacgtacaaggtaacgcaaatcaaatgaaaggatcacaagaatacaccgagaaagaagtaaaaggggattcgcaaacggacatatagactgtaataggcattaatagtactcgtgacgcgaaaagcggttatcccagagggccacgagtcataccacgaaaacacgggggtaataaggcatacgagtgattcacacaagaccacgacactcgcatactaggaccacatgggaacagacggcacgcgtgaggctacagtaccgaaagggcgcgcgacgaccggtgttgataagatcacatcgatgtatcaggaacgggagcgggcaaagagggcccaattaaagataagggcctgacacagcggaaggaatgcaaccgggaacaggg

SEQ ID NO: 526296 - DNA, 1419 bp, Homo sapiens
  misc_feature (1)..(1): n is a, c, g, or t
  misc_feature (861)..(861): n is a, c, g, or t
nggcgtgtgctgctgtgtgtcttgtcgtagtgtgagttcgcgatgcatgtatgtgtcagagaagagtaagaatcgaaataggaaggactacgtgcgtgagcgccaattccgagcctgtcgtgcgttagtatggagactcttgtgctatgctgtgatccctgcagcccgggatgtgtaacaccattgggtgtctgctcgggccggccatatttttgggggccgcgcctaatttgttggtgactcatttaatagggttcgctgtccgcggttgctaaatatccgcgttgtctccccttcctgcgcggggttgtttctaaggcggcacttgcgttgcaacctgcccctcccgtgcacacgccgtcggtcgacgattgatgggtggtgccccgccccttgcctgcggcgcgctctatttgttgggggcccccccacatgtgtggcgctggcgcccccctgttgtgtaatgtgccagacacgcaaattgtgcctggcgccatagtatgcacgacacgtggtagtttgttgccgtcgtcgtgccgcgtttttttatgattgctatatatttttgggccctcacacccctatggggccgcctctcggtgtgcataagctaaagaacttctgttttgtggcaccgagccagacgttcagcactggcgagtgccgcagttcgctggccacccacgggggatgtgcgtggtggcggccccttcctcgcgcggagttgttatacatggcgctaactccgccccctctacgtcagtgcatgtcgcccccctcttctcacgtgagaggggtggccacccgcttcccacccgagagggggcctcgtacatgatggttacactttcatgtagaggntcctctttctcatcttgtgcaacatagtatacaaacatgattcttggttagcgtcgtggcggcaatttgtaggtgtaggcctatgagattaaatcgcccgtagatattatctgccccacgccacacactctctcgtgagagtaggcctggttaggtgccccgcgagagcgtattccctccttggtgggccttccccaggagaggtttcttccgccgcccccccctctctcggttggcacatatttctcagcatagaaccccctctctctctgtccacccccacgccaccatgtctaaacatagtatttacactgcggcgcgcatcgactcacccgtgtataggcactcgcatcgactctcgctctggggggcgcttgtagggtccgcgcgagagcgcagttgtctttagtgagagcgccgcggagatgtctcccgggggctccactgggtgcgctgtcgagactctttggttgcacgcgcactcttctctctcctggagggaattcgcacggaagaaccccttgtattctataaaaaaatcaaataaccaaacaaaca

SEQ ID NO: 526297 - DNA, 294 bp, Homo sapiens
ctccaggactttcctcagctggaaaagacgtacacgattaaaatactgttgcacgcaataattttcacacagataacatggataacacttttattacagaaacgtacggtgaaaggaccaccaacagaaccagggcttcataggggtaattgagaattgagctgagaatgacctgggagaagaaagaatctagggtgagaatgaccctggggagggagccacgttccctttggactggtgactttagtgtcgccgggtcttccctcttccctgttctcattttggggagtgagg

SEQ ID NO: 526298 - DNA, 292 bp, Homo sapiens
  misc_feature (60)..(60): n is a, c, g, or t
agtggctgggcctgtgtgaggcacctataaaggggcattttaccacaaaaagttacgaantgtttttcgttttacaccaccgtaaacagcagctttcacacaagggcctttcactgaaccggcccaaatgccgccaacgccgaaccgaggatcccccctcaaatcagctgtccccaagtgtccgaccagggggaaaaaatcagcagcgtgggtttaggaagtaaatgaaatatttcaatcttccaagaaagagttgtagcttcccaataacctttccaaacacatctcacca

SEQ ID NO: 526299 - DNA, 153 bp, Homo sapiens
aagtgcccttcgtagcagcagccccgatggatgccacccatagcaggtcgccggatccaatctcttcctctcctccctcggtcttcctctccccacaaaccccagggtctagaatgtagaaggttctcccctcttctctccttcctcataatg

SEQ ID NO: 526300 - DNA, 134 bp, Homo sapiens
ctcttcacttgtgttgactccaagcatacaggtgctttgtgtccaaccatgcggcaattgttgcagcaatgggctcaaggacaacatgaattagggtacaagaaggctgcagaagcaccacaagaagctgaatg

SEQ ID NO: 526301 - DNA, 260 bp, Homo sapiens
gcgggtgccccttgtatgtgatgtcttctgcgctccacgggtgacttctagccgcctgcccaagcgccagtgctatcgcccttactgctgggagaagctagcggagtgcggaagtggacttggagcgcgtgcgtgtgtggtacaagctggacgagctgtatgagcaggagcgcaatgtagcgcacagccatgcaaaaccgacgatgggattgctgaccctgatgctgcaccagacgatcaagaacaatcccctcactacc

SEQ ID NO: 526302 - DNA, 173 bp, Homo sapiens
caaagaggaacagctctttggacactaggtgaaaaccttgtagagagagtaaacatttaacacccatagtaggcctgaaagcagccaccaattaagatagcgttcaagctcaacacccactacctgaaacatcccaaacatataactgaactcctcacaacctatttgaccaa

SEQ ID NO: 526303 - DNA, 446 bp, Homo sapiens
gcttcataagccctttaagtttccaatgaattttaaagaaaacagaactatgggatattatgggagtggtctgtgcaaggaagatgaacaggacgccaatgggcagatgcatcccaaagacagaacttgggcctgatatcaaaagtctagcaaatgaatgtacatttgggaaaacattaaaataaaaatatttaatggtatgtatgtaatacttggtggtactctcctctttaaccaatttttctattaactaactcaagccctgaccacgtggactaaaagggattcttggtcctttgaaaacaagtccgctacgacaaggaccaagagtgcccatactcctgtagagtgtctctagtatacagttcaccactgtaatcactttctcagtgcagtgatgcccaacatggcagtgatgcccaacatggcagtgatgcccaacatgg

SEQ ID NO: 526304 - DNA, 454 bp, Homo sapiens
  misc_feature (18)..(18): n is a, c, g, or t
cgagtatcagcaagagancccacctctactaacgagtacaaaaattagctgagcatggtggtatactcctgtaatcctagctactcaggaggctgaagcactagaatcactggaacccgggaggtggaggttgcagcgagccaagatcacaccactgcactccagcccggatcacagaccaagactgtttcaaaaaaaaaaaaaaaaagacaaaccccccagggggggccccataacttccccacaaggggcccaatataatcggaattccaggaagcgcggagggaccaaatgacactgagggaaaaaaaaaaatctctttattacgggaggtgtgccaccatgatatggtattcccccgtgatgcagcatacctgaattatatgggtttatatacaagtgctccttcccggtatatcctctgtgtggggctgcaccccttttaccccgcccc

SEQ ID NO: 526305 - DNA, 295 bp, Homo sapiens
  misc_feature (223)..(223): n is a, c, g, or t
aaatgcgtggcgtgggggcggtgtatcatggcagtgcccctccgcgcgcttcgggcgggcagtgcctacatccaggtcgcaactcaccgcctcggcatcttgggggaggaggccatggactggtggagcacggaggtgcattacactttggaaaaaaactgtgaatcacgtcactacgtggacactgcacaaagctgtgccactgtacaaaatatgacccatnttgtgtgacttcatttgagacacattacctgacatgagcaggtgaaagccatcaaagaattgggtgaccacg

SEQ ID NO: 526306 - DNA, 478 bp, Homo sapiens
  misc_feature (466)..(467): n is a, c, g, or t
tttttttaagagacaggttcgtcactatgtttcccaggctggtctcaaacacgtagcctcaaaggatatccactcaggcctctcatgggatatggtttgagtcacccacctagctatgctacgtgttttatcaaatggattcatttgaacaaaattaaaacttatatacattgtgatttcccttaaagaaaacataaatattcagtgtgaatggtaaagtctcaccaaaaccattcagttatctagtagtcaatgttaggaataaaatttggttacttacaaatctctatggcaaaatctagccaatatcacaaaattctcaaaggctaaaaattacagtaaatgggctgggtgtagtggctcatatctgcaatcccagtgctttgggaggccaccacaggaggatcattgaggccaaatgtttgagaccagcctgggcaacacagcatgacctcatacttctacnnaaaaacaattt

SEQ ID NO: 526307 - DNA, 112 bp, Homo sapiens
gatatatatctggtgcctcttatggtaataaaatcactgccccattgggggttttatattgatatttttgaaatgtgctataataattttagctattgaaacattctacaaa

SEQ ID NO: 526308 - DNA, 132 bp, Homo sapiens
ggctgacatacagagaggcgcgctatcataaaatacggcctataggctaaacgaacttagaccatgtctatccttttttatgcccggccaacacaagtgtagtctgcttttattattaagcataaattacta

SEQ ID NO: 526309 - DNA, 197 bp, Homo sapiens
ttgcgcgaattgaggatgttgtcgtcgtctggaccctgtgttagaattgtttatcgcgaaaattgtttaacaatatgaaatctgggcaccttgaaaaaagaacaggataacagtaatgttcagggaacaagggagataaccattaggtctggctgcctgagagctgggtggaacagagccatatttctcatctttca

SEQ ID NO: 526310 - DNA, 141 bp, Homo sapiens
gggaccgtgaatgatagcacgcactttcccttttgagaaggcagctcccagaagctcgttctgtgccctttctgagatgggccctaggtgggtccctccctagcaggcgaagggtagggtgcgtgctatcattcacatgta

SEQ ID NO: 526311 - DNA, 411 bp, Homo sapiens
  misc_feature (28)..(28): n is a, c, g, or t
  misc_feature (189)..(189): n is a, c, g, or t
tttgcggtgcctttcctccaggaggagntggatctacttgtgtaaaaaccctgcctcccttggcctgtgtgttctggggaacacctagattcacagggcagggtggaggctgagctgagctgaaaggtggggtatgggctctccaagaacaagctcttccagcgccctagtggggtgtgcagctgcatngctggctcaagacacccccacatccaactcagatctttgttttgagatggagttttgctcttttcacccaggctggagtgcaatggcgcgatctcaactcagtgcaacctccgcctcccaggttcaagcgattcttatgcctcagcctcccgagtagctgggattacaggcacacaccaccacagccagctaattttcgtatttttaatagagatggggttt

SEQ ID NO: 526312 - DNA, 610 bp, Homo sapiens
  misc_feature (173)..(174): n is a, c, g, or t
gcgacccctgggggttcccccccccccaaaattggaattttgctttgccccggtggcgctagggcgcccaaggtggattcccccaatatagtccttccaccagggcggccatcccctttggtggatattagaaggcctcccaaggcatgcccctccaaatgcccaagttttanntggggcccttgttgagtggacccctggtcctttcaaccaaaaacctttcccacgggcctttttttaatagaccccctattcccggggtggggtttggggggcctgtagaatcccacggggatattggcccccccctggatggggaaacaaggggggtgtggggggtttcccccttttatttgcctcatttccccccttggggccccatttggggggggaatggtgggccgaaacccccccttttttatcccgttcccttttggggaggggggggaaaaggggggatttccctttccccccttttttccaggtcccccccccccgcccccttccccccccactcaggggcccccttttccttgccccctttgggccccgcttgtttttgggatttgttttcccccccggccccgcccattaacttccggggaaatga

SEQ ID NO: 526313 - DNA, 307 bp, Homo sapiens
gcacccaggggtcatagaaggtactgaacggtgattgagaagccaactgcaggaatgtgagcctatggtcattatttttggctctggctgatgcctgggccccctgcccctgtgagtactaccccagtgatgcccaggaagcagggttctgtctccactgtactacccccacacaggatggtctctgcggtccagcagctctccgcgttccaatatattccccactttctgactcttcctctagtgcccatgccctccgccactgtcagcactccacaggtccagtgctggagtgcaataatgtccc

SEQ ID NO: 526314 - DNA, 851 bp, Homo sapiens
gtaccagttcaagccgagggagagttaattttccaactgaagtcccaagatgggtcggtgttacactcttaaggtgggggacctaataattagaaagggaagggaccacgaattatgagacaggactttttacccgggacaaaggttcccgcgctttctgatttctgcgtggtggagagcacaaagcgggggtgtataaaaatgatttctggtgacacgcaataccccacaatggtgttgtggcacacccgtgtcttgcttgtgaaatgtattagtttcaacataaaaagtcgttcaaaaacgcaaggatacaacctcttcgagcggataatagtcggttaaaggcccaatttatatacccacactactccaatctccaaatggttccagggagtgaatactccattatttcatatgacactaatttcgaaaatgggaagcataataataccgaatgatgataaaaacgaaaggcgatactcccatacgaataattcttccatctccccttcttattgaccacgagaatagaaaattttgtctctagaggccagtagtgacctcagagcatgagaaagagtgatggtctggagcaatccctacaggcctgcagatttctatctgctctccttccttgagcaccagagagagggcacacagaaaagggtgtggtgtttcccacaccccccgccactgagggagaactgggcttttttcaaattcgaccccttcctttttcccccccccccggatgggccccttttggggggggcaagggtccccgattggcccaccctggggatgttaggactcccaaaccaatttttttttaaataaaatttgggtttcca

SEQ ID NO: 526315 - DNA, 647 bp, Homo sapiens
gggccgggcgcggtggtcacgcctgtaatcccagctctcagggaggctaagaggcggaagggataagcttgagcccaggagttcgagacctgcctgtgggcaaatataggcgagaaccccggttctccctatgaaaaagtgacaacaaaaaagcagaagggcccacacaaaaaaatttacgggggtaaactttcacttcagagggcaacattttacacccttaacacccccaaaaaaagaacacaccccagaccaaggacacaacaaaaaaaaaacaccttgtgcgggcgcgaaccggactaacctaggaggccccctaggaagagaagcgtctatcaaagaaacaccaaccgtcggcgtggaagacgccgcagcggccccacacagagaggccaacaagtgaacaacacgtgcgtgccacaacagcggggggtccccacagagcgggcaacccacccggggtgcaacaaaacacacccagaacctcgtcaggtgcgggaaactcaccaccacccactatgcaatcataaaaaaaaaagacgccgccacgccgaggggcgcaaaccaaacaaccggccgcagacagccagccactcgtgcgcgacgaacaacaaacacctcaccgcgacgaatacagaggcgaccct

SEQ ID NO: 526316 - DNA, 401 bp, Homo sapiens
attgcaccactgtactccagccttggcaacagagtttttctatctcagaaaaataaaataaaataaaagacaataaagaaatctgctgcatcaagggactcttcctttcatgaaagatttctccttaacatactatactgtgtgatagcactttacccacagcagaacctctttcaaaataggaatgaatcctcttaaactctgatactgctttatcaaccaagtttatggaatatccaaaatcctttgttgtcattttaacaatgttcacatcatcttcaccaggagtagtttccagctcaagaaaccactttctttactcatccataagaagcaactccacatctgttcaggtttaatcatgagattgcagcaattcagcttcaaaatgtgacatagag

SEQ ID NO: 526317 - DNA, 271 bp, Homo sapiens
ctacacagtccacattgactcctggagaatatggtgactctccagtccccacaacacgaagtagtagtgcagcttccatggcagaagaagaagcatctgcagtcagcacagcggcagcccagttcaccaaacttcgccgatgcatgaatgcaaaggagtttacagttcaaatcaaagatgaggaaggattgaagttaacataccaaaagcacaagtagatggcgaatggagtaatgggagatggacatccaatgtatcataacacgacggg

SEQ ID NO: 526318 - DNA, 460 bp, Homo sapiens
aagcttgcggccgcctccgccctgcgctttgtggagccggagcccagtgacaggcgacggcctcttgccgccccggaccccgggcgcttacctgtggctgctggggtcggccgcccgggaccaggctgggagccccgagaaacgcttcgttaagggactcaggcagtacgggaagaacttcttcagaattagaaaggagctgcttcccaataaggaaacaggggagctgatcacctttattactattggaagaagaccccgagcagccagctccgagcccatcgtagcaccgagcaggccggttcagagataaatgcaccggtcacacccgtacacaccctcaaccccgtcaggaattcttggacctattaacccgggagatgacttcgacagtgaggacagtgagcaggagctgaagggtacgcctgccgccactgcttcaccaccacctccaaagatt

SEQ ID NO: 526319 - DNA, 716 bp, Homo sapiens
  misc_feature (3)..(3): n is a, c, g, or t
  misc_feature (94)..(94): n is a, c, g, or t
  misc_feature (132)..(132): n is a, c, g, or t
  misc_feature (139)..(139): n is a, c, g, or t
  misc_feature (144)..(146): n is a, c, g, or t
  misc_feature (152)..(153): n is a, c, g, or t
  misc_feature (155)..(155): n is a, c, g, or t
  misc_feature (159)..(159): n is a, c, g, or t
  misc_feature (178)..(179): n is a, c, g, or t
  misc_feature (194)..(195): n is a, c, g, or t
  misc_feature (213)..(213): n is a, c, g, or t
  misc_feature (218)..(219): n is a, c, g, or t
  misc_feature (223)..(223): n is a, c, g, or t
  misc_feature (262)..(262): n is a, c, g, or t
  misc_feature (290)..(290): n is a, c, g, or t
  misc_feature (299)..(299): n is a, c, g, or t
  misc_feature (301)..(301): n is a, c, g, or t
  misc_feature (310)..(310): n is a, c, g, or t
  misc_feature (333)..(333): n is a, c, g, or t
  misc_feature (347)..(347): n is a, c, g, or t
  misc_feature (355)..(355): n is a, c, g, or t
  misc_feature (359)..(359): n is a, c, g, or t
  misc_feature (367)..(367): n is a, c, g, or t
  misc_feature (446)..(446): n is a, c, g, or t
  misc_feature (482)..(482): n is a, c, g, or t
  misc_feature (488)..(488): n is a, c, g, or t
  misc_feature (494)..(494): n is a, c, g, or t
  misc_feature (497)..(497): n is a, c, g, or t
  misc_feature (503)..(503): n is a, c, g, or t
  misc_feature (520)..(521): n is a, c, g, or t
  misc_feature (540)..(542): n is a, c, g, or t
  misc_feature (550)..(550): n is a, c, g, or t
  misc_feature (563)..(563): n is a, c, g, or t
  misc_feature (567)..(567): n is a, c, g, or t
  misc_feature (576)..(577): n is a, c, g, or t
  misc_feature (579)..(579): n is a, c, g, or t
  misc_feature (585)..(585): n is a, c, g, or t
  misc_feature (610)..(610): n is a, c, g, or t
  misc_feature (614)..(614): n is a, c, g, or t
  misc_feature (625)..(625): n is a, c, g, or t
  misc_feature (712)..(712): n is a, c, g, or t
ttntctcataaaaagattcaacttcaagtagcacaatttcttgtctgcttttaatcctgaacattcttgaagcatgaaacagccaactgtttanacaacaaatctaaaaaaacaaaaaaaaaaacaaaaagngccgaanctttnnnctctgnngngcangggctgttgtctcagcttnnggagggcccagatcnngccactgtgacctctggntttgnnagcnacaacaggtcccagcttcccagcccttccctcccctggnacctcccaaaagcacaagaatgcaaacngagattggncnaccactgangcaggggtggactcccgcttgantgtgccaacagggngggtggantgtnctggtganttcctggtgggcctggccaaccaagaggccaagtggcctcaccaggccttacctggctgcctggcagcctggagatganggaggaaggacgctcacggtgcgaaagtctggccangctggngggagntangtgatnatcctggcgatggcttnnagggaggggaagtggtggnnncgggcagnatggaggggtttnttgntttggtatnncnattctntagacctgctggggaggtggggganacangggcagtccangcccgcctgctgggtggtggcctgccacgcgctcttcttgttcttcttggacttggtgctcagaggcttctcgcggttgcagaagtnccgt

SEQ ID NO: 526320 - DNA, 152 bp, Homo sapiens
tctgaaggcactgggagatggactctgaatgccctgggaatatctatctcagatgccctctcatccttgtatgtcatagcttgatgtgcagccctaatggcacccactggcggccaggtgcacagcctggtggtggtggcaatagaactgtg

SEQ ID NO: 526321 - DNA, 231 bp, Homo sapiens
tcttactctttaagtgtttaaggaaaaaaagacagatggaaagagatggccgaggaaggctgatgttccaaatataacctttgtcagccttttcaaaccattagcaaatacacttaattccttccaaggtttattaaaaataggttgcacctgaaatacagtaaaattggaaacctacagcagttttgatgttttttcatagtaatgcagttctgaaaggcacttttacac

SEQ ID NO: 526322 - DNA, 1295 bp, Homo sapiens
ctagttctaggggaaacagagtggcctggctgatttgaataaatgtttctttcctctccaccatctcacattttgcttttaagtgaacactttttccccattgagcatcttgaacatactttttttccaaataaattactcatccttaaagtttactccactttgacaaaagatacgcccttctccctgcacataaagcaggttgtagaacgtggcattcttgggcaagtaggtagactttacccagtctctttccttttttgctgatgtgtgctctctctctctctttctctctctctctatctctctctctctctctctctctctctctctctctctctctctctctctctctctctctgtctgtctcgcttgctcgctctcgctgtttctctctctttgaggcatttgtttggaaaaaatcgttgagatgcccaagaacctgggataattctttactttttttgaaataaaggaaaggaaattcagactcttacattgttctctgtaactcttcaattctaaaatgttttgttttttaaaccatgttctgatggggaagttgatttgtaagtgtggacagcttggacattgctgctgagctgtggttagagatgatgcctccattcctagagggctaataacagcatttagcatattgtttacacatatatttttatgtcaaaaaaaaacaaaaacctttcaaacagagcattgtgatattgtcaaagagaaaaacaaatcctgaagatacatggaaatgtaacctagtttagggtgggtatttttctgaagatacatcaatacctgaccttttttaaaaaaataattttaaaacagcatactgtgaggaagaacagtattgacatacccacatcccagcatgtgtaccctgccagttcttttagggatttttcctccaaagagatttggatttggttttggtaaaaggggttaaattgtgcttccaggcaagaactttgccttatcataaacaggaaatgaaaaagggaagggctgtcaggatgggataatttgggaggcttctcattctggcttctatttctatgtgagtaccagcatatagagtgttttaaaaacagatacatgtcatataatttatctgcacagacttagaccttcaggaaacataggttaagcccccttttacaaagaaaaagtaaacatacttcagcatcttggagggtagttttcaaaactcaagtttcatgtttcaatgccaagttcttattttaaaaaataaaatctacttataagagaaaggtgcattactt

SEQ ID NO: 526323 - DNA, 296 bp, Homo sapiens
  misc_feature (182)..(182): n is a, c, g, or t
  misc_feature (239)..(239): n is a, c, g, or t
agggatgagagaagcagggtcactgaagagaagggagaatgttaacatgacaacaatttggcttataattttcctctgctccctgattatttgcatttgcgtcaggtgtcgtaaatcatcatgccagtgaattatttaaattcccagatgtattagatcttctgtaaactaagtattttgcnacttatatttttgctagttaaactgagtttctgtcatggtcacgtcaaatctaaagnacatttaatatttgctgcgcaggccacctggtgtgggtgtgaggaaaagcgcagctc

SEQ ID NO: 526324 - DNA, 735 bp, Homo sapiens
cacgaggactgatgcccaagagttaaatggcctctaatatctttgggacaccatgaagaaaatcaagacttcttgggccaagtcaacaggtgccaagtctagtggtggaagggaagacttgtgagtcatctggactgcagagaaggaactcctctgaagcaagctccggagacttcttagatctgaagggagaaggtgatattcatgaaaatgtgagacacagacttgccagtgcagcctggggcagagtgaagagaagccctgtgcctgctgctgcctgtgcccagccctggtggacccaggccccagtgccatccagaagaaatccccactggcggcaagtccagcctcgtcttgggttagctctgactgtcctgaactgctagtcagatatctagtctgtaacctccatgcttgtgaactgcacaacttgagcctgactgtacatctcttggaatttgtttcattaaaaagaagcacttatatgtactgctgtctttattattaatatactttgtgcaagaacaggtaaacacatctgacacattgacctctgtggactctgtgagagccataggcattgagttgtgaactagctagatacatggcgagggaacagctttgtgaacactaagaactgagatcataacgacaaaatacatgggtccagatgtgtagaggatctaaggaaatgaggtataaaactaacttggtttccaagctcaatgggcgaca

SEQ ID NO: 526325 - DNA, 251 bp, Homo sapiens
agcaggatacccgagtcccgatcagtaccttgtagctccgtgtattgccatctaatagtcacaaagctgtgacaccatagagcaagtgtgcgcctggagggttgatctctactgtagacatgtgcagaccctcgaattgtgtgccttcgcatgaaagatccccggtataagcccttagtaatgatgtgttatccctggatacggcaagaagggacgaaagtataacaaacacgcacctcatcattgccctg

SEQ ID NO: 526326 - DNA, 107 bp, Homo sapiens
tcactattgcgtggagagggctccgacgtgttgcagtggctaactgcggttaagaagcagcaggtcccagagagctcagcaggctgggtgcggcctaggtatgacac

SEQ ID NO: 526327 - DNA, 113 bp, Homo sapiens
accaggcaggtctagaaagtaatgatgcatccaggcgcagcagcagcactccacgcacagcagcacgaccaggaccacgtaggggaatgtagcagtggagtgctgctgcctgg

SEQ ID NO: 526328 - DNA, 136 bp, Homo sapiens
ggtaccttacagcttgtatttacacttgtaatgtacacctcctctgatctaatgattctccttctcggagtgaggcctaaagaactatttctagacatgaacagtcatttactcacaaggaggctcactacgtgct

SEQ ID NO: 526329 - DNA, 371 bp, Homo sapiens
gtgacctgaaatcacgacagttgcctcaagccacggcaatgagaaaaaaattcagtaaaaacaaaacaaaacaaaaccaccataaaataactcagacttaaataaatacaaccctagtggtgaatgactaaagatggattactcataacagagataacagtccaataagaatccaggaatcttccttttaatacaaaaatctttcttcgaagaacatcctctcaaggcaggaaatcattagtatgaaggcttccctaaaaacaaaattccttggcaggaatggttcacatctgtaatctcagcactcttggaggccgaggtgggaagatcacttgatgtcaggagtcgaggcgggaagatcacttgacgtc

SEQ ID NO: 526330 - DNA, 177 bp, Homo sapiens
ccgcgccagtgggcttgagtttaagagcaggatctctggaagacatccttatgacgacagtttgtccaaggggatatccacagagtacctgtgggcattaggtgatgtagttatacactttcacaaaagatttatctttgatctcttggcgatcttcttcttgcccatggcagctgt

SEQ ID NO: 526331 - DNA, 208 bp, Homo sapiens
tctcttactttactcaccttatctacttcctctgcctcatcatacactaatttccttctctcgttcctatctccaaataaagggtgatgggaatagcctatgaactgaaaatgcttcttcactactatctattgacccgcctctacttctaggtactctgtctgatcttctttaagatggaggatcactttggtacccctgccaatgg

SEQ ID NO: 526332 - DNA, 146 bp, Homo sapiens
actagcaggatccgagcaggtcacaggtatgaacgcagcctgcaaactcatcattcagcagggggctcaatcaacagcattcggcatgggctttcttctcaattccaggctcatttcccaatgcaaacttcagggtcactgcagct

SEQ ID NO: 526333 - DNA, 738 bp, Homo sapiens
cggacgcgtgggtacaaaaattatccgggcatgggcatggtggcgggcacctgtaatcccagttactcaggaggctgaggcaggagaattgcttgaacccagcaggtggaggttgcagtgagccgagattcctccactgcactccagcctgggtgacagagtaagactccatctcaaaaaaaaaaaaaaaaaaagttaaaaattaattaatttaaaaaaaaaaccgggtgcaggggctcagtgcctgtaattcccagcacttttgagaggccaaggggggcagatcacctgaggtcaggaggtttgagaccagcctgaccaattattggtgaacccccattctggtactaaaattacaaaatttaaccacgcattgggtggtgcattgccttcaatcctagctactggggaggctgaggcaggaggaaattgctttgaccctgggaggaggaggttgcaagagctgagaatcagtgcccatggcaactccagccggggcaactacgaggtgaaagttcagcctcaaataaaaaaaaaaaaaaactcaccttgttgtgtggggaatgggatattacaacggtgcgcactggggtactagtcattttagagattaacgagggatttcaagcggaaaagctaataggtgcagcattgtggggaatcaggttatccagggttaaattaatgccagaagttatctgcgaaccaatggacgaggggatggaagagtgtgtatgc

SEQ ID NO: 526334 - DNA, 314 bp, Homo sapiens
tccggtagatggatcattggctattctcttatcctcattactccatccaggagtggatagtcacatgcctggtacttccagaccaacctcgaatgagccagagcgccccacgataggccaaacttatcttgtagagcttcagcacgcacgacctatacgggcagcagtgaaccaccatccgcattattctatgtcgtagaggcggtagggatagccgtcaacacacctatgagacggtccagacgcggcctggcctcgcttggttacagtggagcagcatacctcgcacggtccgccagaagtgcgcctgggtg

SEQ ID NO: 526335 - DNA, 81 bp, Homo sapiens
tgtgcgagattctatggttcggggagtttcgagcccttatttgagtactggggccagggaaccctggtcaccgtctcctca

SEQ ID NO: 526336 - DNA, 162 bp, Homo sapiens
gtactgagtggaagtgctcggaatggtccacaggcccagaatcctgagttcgggaacttaggaggtccttactcaatctccttagtgctaaggttcagagtctcaaaccagatattcttccaaacctatcttgtagtactagtattgttccccccgtcacta

SEQ ID NO: 526337 - DNA, 938 bp, Homo sapiens
gcctgtaacgtaacagtggttaaacatccagctgttgcggcctgactccggatagatagccgaccctacgcactcagagtctacccctagagcgatagtgtcgttgatgatttcagttgaggaagagctaatgctagtctgggccaggttcagaaagctaccggaaacttgaagcaatgcagctatagcatcacatgtagaacaagagatggtccttctagcatttgcaaattgcaccagtacctccagctagtcatttgctaggtagctgcagttagccctgcaatgaaagaccgagggtcagttagcacaaacccttcaccatgactggaaaactcagtatcacgtatttaaacattttttttatcttttagccatgtagaaactctaaattaagccaatattctcatttgagaatgaggatgtctcagctgagaaacgtgttaaattctctttattcataatgttctttgaagggtcataaaacaagatgttgatcaaatctaagctgatgagtttgctcaaaacaggaagttgaaattgttgagcacaggaatggccaactataattaattgatacctatgagggctctggcggcttggcattttaatttgcagatacataccctggtaattctcatgacaaaatagacttgtataacttttgataaaagactaattccaaaatggccactttgttccctgtctttaatatctaaatacttactgaggtcctccatcttctatattcatgacattttcatttattaagcacatgtcatattaccttgatttcagaagagaagaaccatatactgtgtcccagagctataattgaacctgcagagtagtgcttctaagtgctaaatactggaagcttcaccgaattgcctccttgtaatcgcaattctgcttctaggcggcctccgggcgcggga

SEQ ID NO: 526338 - DNA, 142 bp, Homo sapiens
agctcggtaccagcttggtgcggatagtctgactatttaaggagactggcgaactctgcccaaacaatctgtggatggaaaagcaccacttgctactggagaggaggatgatgatgaagttccagatcttgtggagaatttt

SEQ ID NO: 526339 - DNA, 82 bp, Homo sapiens
gacagcagcatatatctctgcagcgttggcgcagggccctgggagacccagtacttcgggccaggcacgcggctcctggtgc

SEQ ID NO: 526340 - DNA, 398 bp, Homo sapiens
  misc_feature (6)..(6): n is a, c, g, or t
cgcctnaagacattaaaagaaaattttttgggcaggggcaaaggggatggcatttttttgtttttaaaaaaaaccctttggaggaaagttgcaatttatggggggtacggttgttggagggaaatttttgcttttggttaagccgggaattggtaaaaaagataaaattttatttttttttttggggcgagcttaaggaaaggttttgggggttctagttaatcagggcggaggttgaaaccttgctgggggtttttgatgtgcttctgtgcttttgaatgacttcaccccctagtttttgtctatttttcctttgatgttcaagtcctagtctataggattggcagtttaaatgctttactcccccttttaaaataaatgattaaaatgtgctttga

SEQ ID NO: 526341 - DNA, 539 bp, Homo sapiens
ggactcgagaggatcccctctactacccgacagctaactcatgactctgtcgtgaatgtaaatatttgtaattaagcctgcacatattggttgattgccctagagtactcaagtgttagcaccaagagcttttcaggtagcccctacatctttgtgcaattgttatctggttccccaaagtgtattttgctctaagtcgagggctatgccataatacaaatgggaatgttacctttgatctccttatgaaggagtttacaagtaggagtttttacattatgtagtaacactcctgatacaactctggttattagtgaattgagcagttaaggtttcttttgtatggattcctgtcctggaaagatattcatccatgaagattcaaggtcaagcaaaaaccaactccattcttgccaggagttggttgggctgagattgccaatcacggttaaacacaaagggtgcccattgaatgcggaaacagtcgttaacagagggcaggtattgcaatattgagggggcaccaagtttacttagaa

SEQ ID NO: 526342 - DNA, 298 bp, Homo sapiens
  misc_feature (14)..(14): n is a, c, g, or t
  misc_feature (25)..(25): n is a, c, g, or t
  misc_feature (57)..(58): n is a, c, g, or t
  misc_feature (202)..(202): n is a, c, g, or t
  misc_feature (265)..(265): n is a, c, g, or t
gcttagcacgaggnaccggcgagancctggagcaactgctgtaccacctaaaggtcnngtataacgcctaagcggaggccgagctgggccaggcccgccagccgctcaggtggtagccacgccagagcggggtcgcctctgggcctctttttgagcaaacctgggtgtaaattcggtggttttaaatgcataaagtgccttntggacacgggggagttgtggtgcttctgggtctctgggcctcgcctgctggcctgaaatgcgntcatgttgggaagcattccgtgccccgtacccc

SEQ ID NO: 526343 - DNA, 135 bp, Homo sapiens
aggctcgttatacctatatgggctcgtcatactactccagaggaggcgaaggccaggtccgggggggatagggctatcagattacagctagggcaaaccgaacaatttaagtgggacaataacagggtaccgagc

SEQ ID NO: 526344 - DNA, 737 bp, Homo sapiens
tggggggggaggaatctgggctctgtcacccaggctagagggtaggggcacaatctcggctaactggagcctccacctccggggttcaagaaaattcttctgcctcaggctttggagtaccgggcattacaggcaccggccaccacgcccggctaattttggtacttttagtagaggtggggtttcgccatgtgggccaggcgggtcttgaactcctgagctcaagtgatcctccctcctcggcctcccaaagtgcacccctagatacggatgcggctcctcacccagggacacttcccggggaaatccatttctcaaagaaatttccaagtatactggtaggcccccagttgaaatcttggagagaacagaccctaggagctgagcagtgacgggttgggactcgcactttccagccgggagtgcagatacagtgcggctattaggatggcccttggttacgtacccatggccagggtcaggggtgaaataccacgtggggagggcacctcattcgtacgaagaattcccaagaagggggttgcccggggtatataaaagcaaccggccagggttgaaagactaggtccgcacacccgggacaagggtttcacggagaaacagctgacctcacggattggaagctgcgacagggaatatcccctttggcgatcgggtcacacgactctatcaccaatggagaatggccgtgtggaccgcccgacaagacccgaagc

SEQ ID NO: 526345 - DNA, 259 bp, Homo sapiens
agcagcagttctcccattaggatacctaatcatagattgttacagccttatcatgtacctctctcacctttctcttaatcatgaggcaactgatcactcacgtattatggcaatataagggaactccatagagcttgacgtttactcctgtcgtcctgtacagggtcacagcgcttatatgtttcttttcttttctttcttactttctctcccctctctgtctttctttctttcttataatacagatcggcctctccat

SEQ ID NO: 526346 - DNA, 199 bp, Homo sapiens
tgtgcttacagtacagtgatggcagatggagacaggcaatcagaagtgtatggaacaagctcagtgtatggctgagagcatggagatgaattgcttgtacctggcgatgtggcatggttgcaggtgagtcttgacatcaaggcccctgttactccgaacctgtagcaacaggagtgagactccatctaaaaaaaaaagc

SEQ ID NO: 526347 - DNA, 1042 bp, Homo sapiens
gcattgctctacaatctgtggcgcagcccttgccaactctggctcttcccccgctgatggtgcctcggcagagatgtgggcagctggtcaggatggccattcggtgctcaggacagcaacgcagcccagtactcagactggggaagccaacaggggctggacacggccaggagagccgtgtctggacagctgatcctgagatgtgggagttgctgcagagggagaaggacaggcagtgtcgtggactggagctcattgcctcagagaacttctgcagctgagctgcgctggcaggcctggggtcctgcctgaacaacaagtactcggagggttatcctggcaagaggatactactgggggagcagaggcggtggctgaaagtcgaccctggcgtgcccaccgggcggcggacatcgggacggcgccgaccccggaatcctgcaacaggggggagaacagacccccgagcacccaccccggcacgtcccagaccgaccgtggcacgtcccacagaccggccctcatgcgacctcactgacggggagacactggggaaagcaccccacagaacaagagggccaaccacacccacggcgacaatgtaccagacggtcaagcggaatactcaaacccacgtaccatcgtgcaaccgacgatcacgcacctagtacgttcaccggggccagcagccaggcgcctggccagcctcacactgcccctcgtcgactcgagccaggcccagaaagcggcacaaaccggacaaggcccaatccatccagaaccgcggacccaggacgcctccagcccccgacagccacctccccaagccgccgagcaccgccaaaggcgcggccagacccaacgccagacgtcgccgcgacctaccgcacgcagagaccgacgcccgacacccgaaggtcccgagagccccaaaggcgcgaagcgagccatgagttaaactgagagacaagcacgcgtgaacaccaccccggacccacaaaataaggcgctgaaagccagaacgccagaggatatatctaga

SEQ ID NO: 526348 - DNA, 1155 bp, Homo sapiens
  misc_feature (99)..(99): n is a, c, g, or t
  misc_feature (318)..(318): n is a, c, g, or t
  misc_feature (380)..(380): n is a, c, g, or t
gtttcgtcgattccttctaccttgcggtgccttattcaatgtgcatgtcgtgagacacaatgggtgctaaatcgtcccatgagattatcactgagaacncagactcggctgtgcgcaccagtgaccctcccatagactattctggactcgcgatgctaccagagctcgattaccagggcacgtgtccgggtctgtcctgcgcagtgcaaggggaatgaatcctgtgggactcatccgttgcattgcgacacgctgtacatccgcgaataattctcatgaggagatagagtccacgcaagagtcccttggtcatgatgngcctctgaggcgcactgaggggatcatcctcgtggggcccacggtgtggagcaacaaccgcnccgtttgtagaactcggtaccgtcgcggatagttggtacagctccttgcgaaaagttcggctgcacattgacgcaggataataggccgtagagaccgttgggcttcccacgggcaagccttttgatgacctgggtcaccactgcttgcccgctggggtttgcgaaagtgcacctcgtgccctaggaggggggctcgggctcgcggagaacaaccactgtttgccattgcaaaggaaccccaatacggcgcggcctgttatgtgggccacgctaggcggcacccaccaaggtctaagctggtcgattgtgatccctaatcctgtcggctgttacgctgggagaaaaactctgcgtcaagcagcaatctgagacgacccaggggggccaccctctcggaggaccgggacggcatgatgtggatccccagggagacttggtatgggaactttattaaaggccctgtctgtgtgggacgcacgtttgtccacgacagtggtcagtgtcgcgcggacagtgacacactggcgttatgagacgtggttcatctctgtttccccccagggccccaggatggggtcgttgtcaccaggaaaacactttccattttgtaaagtgtgtgcaacggaagtgaaaacgcggcgacacatctcccgtgaacttttttccttaagtgaaacgcaaaggccggttacattgggcctcgcccatgaaacagttgttgccttgtcttagaacgcgcctcgaatgggagggtgaaaacgacatagttggtgca

SEQ ID NO: 526349 - DNA, 291 bp, Homo sapiens
cgcgcaagagtgtatagagagtttagagttggttaatggtcgttgtcctgcgagcccgttgggtacagtatgtcgttcaggaggggttgtgcgtatgtcagttgtaagagggagacctcgtggtgcctgagtttaacccgttcctagtgcgttttgccgacactacgcttcgtgatcgccacttggggtatttttcaacgatactgtataacccaccagatgcccccgattatagcgcatcgttactgcctgactggctaacctgtaccttcatcaaaagtggtcatcacg

SEQ ID NO: 526350 - DNA, 255 bp, Homo sapiens
tgtactgacccacctgtgcagaggaagaaaagtggatagatttaagagctattcaggctaggcacagtggctcacgcctgtaatcccagcactttggaaggccaatggcaggaggactgcttgatcccaggagttggaggctgcagtgatcacgccactgcactccagcctaggcggcagagcaaaaccctgtctcaaccaaagccgaacaagagctattaagaagcaggccttagtggtgggtcagaacataag

SEQ ID NO: 526351 - DNA, 1035 bp, Homo sapiens
ggcagacactgaccttcagcgcctcggtccaagcgccatggcgccctccaggaagtcctcgtgggggaacactggaaaatgaccgggcggacgcagagtctggggacgctcatcggactctgaacgcggcaaggtgccgcccgacaccgagggggtttgtggctccccctatggccttatatctgatttcgccggggaagaacagctagatcccaactgatggctgtgggtggcgcagacttggctaaaaacgtgactacaattggggcttatcactgggggagatcaaagcccgtggcattgtatcaacaagactgcgggagccacgtgggttgtgaccgtgggggcactcaagaggacaaacggcatgggtcttctggggggacgtacagatggcgagccttgtgggcacagacaacggtgccgccacgggctccgggcagcgaggggcactcgggaggaaaatcggccgtgccatttggtggcacgaaaggcataagacgtgaaagtgcggacagcgtgggaatcccacagtggccgaaagggtgtgtcatcagaccgacagaccaacgcgtgtcactcggcaagaatacagcggtgacagcgacgtggcagacaaggggtcgcgtctgcgccatatgacagcttgtggtggggtcatgacgtaccgggacagacgtgatacacacccatagagcgccagggaagtaacacgagaagcgtccgaggtaatggacagcacgtacagcgtctcagatgggaggaaacagagcaccgtataataatgaagggcctgtgaggggcaacctgaggacgtggacagcaggttgagtggaggctccagggggggggccacataaagccggaatgggcatacacgccagatgggcactcagtctaccttcgccacaggatacacaaagcagaaggccacgaataggaggacagcccggcacaaggatcctggtattcaccggtgcaggctcccaaggtcaccaggctcgaaggggtgcgcacggaacacagcacgcggtg

SEQ ID NO: 526352 - DNA, 630 bp, Homo sapiens
ctatcatatagtaaaacccagcccatgagccctaccaggggccactctcagacctcctaatgacctccggcctagccaatgtgagtttcacattcacagcgtcgcataagcgctcctcatactaggcctactaaccagaacactaagcacatataccaacgatggcgcgatgtaagcacgagaaagcacataccgaaggccaccacgacaccacgtgataccaaaaaggccttcgatacgggataaaccctaataaaattaacgtcagaaagacaacacacgtccgcaagggacagaaacagagcgatgtgcacgaacacacaaggccaaagcgcccccaaacccaccaaaagaaaagaagggaccagggaaggcacaaaacagcgccatccaaacccccaggatacaacgatcacccacgtcacaacggaatcaccgagagtcgcaatcaggacacaaacatacagcgcagtcaaatacggccaatcaacggcaagctcatcaaaaaccaacatggagagcacaaccaaaaagaagaacatcaaaaaacacaacgagaaagccagcaaacaacaaaaggaaaggcacacagaacaccacacagaaaggggaacaaaaacacggcaaaca

SEQ ID NO: 526353 - DNA, 695 bp, Homo sapiens
ccccgcctagctcgggcgccacccgagccctggcccaccttcacagtcgcgcctccgaggggccagactcccgccagatattcgccttggatgagggagcttctacctccgccctgatatgacccgggcccggacgggaaagggccccgacccgcgtataccccgcttcccgacctggagctggaaaaggagttcccacttccaaccggctacctgaccccgcgacggcgcatcgagatcgccccacgccactctgcctgtctcgagcgcccagatccagatctggttcccagaaccggcgccatgaagtggaagaaggacccacccaattgaaaagtatgagccctggctaccaactggcagcgcctttcagtcctgagcccgccccgaggagccccgcggccccagagcccgtgccaccccccgcctggcccctcccatcctccccgctctgccgccgccccgcctggggaccggttccccccagcctgcctcgccttgtgttacgatatttcgtttgatcttaggtcttcctcgtggctccctctttcctggactggttatcttgttattattgttaataattaataattattattattttccttcccagctccccactcccttttgcttgtccccaatccccccgtgtttctgaaagtttgtgtctgtggttgccgtctttccccccggga

SEQ ID NO: 526354 - DNA, 157 bp, Homo sapiens
agctacagattctcccaggctctctccagtttgtcatagctatttcctttgttgaatcctgaatacttctgaaagttatattttgattttcctttgatgaccctgtttttattctcttgtagacctcagtactataagttgattgggttgacgtcag

SEQ ID NO: 526355 - DNA, 101 bp, Homo sapiens
  misc_feature (44)..(44): n is a, c, g, or t
  misc_feature (56)..(56): n is a, c, g, or t
  misc_feature (58)..(58): n is a, c, g, or t
aacgaaaggaacgcaagaacagaaggattattttttgggggacngcaaaggccaangnccactgtggatttttcgcaagaacattaataaactaaaaactt

SEQ ID NO: 526356 - DNA, 943 bp, Homo sapiens
  misc_feature (25)..(25): n is a, c, g, or t
  misc_feature (76)..(76): n is a, c, g, or t
  misc_feature (113)..(113): n is a, c, g, or t
  misc_feature (175)..(175): n is a, c, g, or t
  misc_feature (186)..(186): n is a, c, g, or t
  misc_feature (206)..(206): n is a, c, g, or t
  misc_feature (213)..(213): n is a, c, g, or t
  misc_feature (218)..(218): n is a, c, g, or t
  misc_feature (268)..(268): n is a, c, g, or t
  misc_feature (272)..(272): n is a, c, g, or t
  misc_feature (313)..(313): n is a, c, g, or t
  misc_feature (342)..(342): n is a, c, g, or t
  misc_feature (371)..(371): n is a, c, g, or t
  misc_feature (401)..(402): n is a, c, g, or t
  misc_feature (427)..(427): n is a, c, g, or t
  misc_feature (488)..(488): n is a, c, g, or t
  misc_feature (493)..(493): n is a, c, g, or t
  misc_feature (498)..(498): n is a, c, g, or t
  misc_feature (600)..(600): n is a, c, g, or t
  misc_feature (622)..(622): n is a, c, g, or t
  misc_feature (655)..(655): n is a, c, g, or t
  misc_feature (703)..(703): n is a, c, g, or t
  misc_feature (707)..(707): n is a, c, g, or t
  misc_feature (715)..(715): n is a, c, g, or t
  misc_feature (778)..(778): n is a, c, g, or t
  misc_feature (810)..(810): n is a, c, g, or t
  misc_feature (824)..(824): n is a, c, g, or t
  misc_feature (839)..(839): n is a, c, g, or t
  misc_feature (859)..(859): n is a, c, g, or t
  misc_feature (928)..(928): n is a, c, g, or t
tgtagtgttttcaaagatcaggcgnggggacccacaccttggcctccagagcctaaggaggagtgttacgtgcagnagcacccgtgggtgtgatccacaaccagaactgaggnctgcctgggtgctccacacaccaccagggcctagccctggactctgcccattgactctcccntaacttcctcngggccttggtgtactcctcngtaaaanggggnggagagagtggcattttcactttctcgcacataactgagcccacatcatnaacnagactgtgggccaagcacagagataagatgatagaagacancaaaacaaggtcttgaagtgggatcccancacgtccattctatcccagacagcacatnactccatggtatgagggatgggggtcatcnnggtgaggctttttacctgtgtttgnaagaaggaaaaaagaaccatgcatgaagaggcacagaaaggaagtatggagccagcaatancttgngaggngaaagcggagagaggacatcactctggtccaacccccaatctcaccccacaaataagggctcttttttcccccagaggctctgtataagctctccacaagtntcattctcttcctaagcctcantttccccatctgtgcaatggggaggttggattncatagtctcaaactccaggctctgctcaatagaggaaaagggaatganagantgcaagancacagagagaacaggagaacccacaccagggtggaaaggaagggaggagggaaacaggcaganaaggaggagagcgcctgcagctgcctgcctgngagaaaggagagancaggtgtgcacagcnaggatgcttccagacctgcncgggctatgtggggcacttcctgttcacttaacggctgcagccctgcagtggtaaaaacaggcctgganaagaaggtgaaggtt

SEQ ID NO: 526357 - DNA, 138 bp, Homo sapiens
tgtgaaaagtatgtaaacaaaagtaagcttacattatgatcgacattattaccatgatgtaggtcacgcactaggaccttactgacattccacaagctttccttgaagcttcccaatcacaacccagtccttctctca

SEQ ID NO: 526358 - DNA, 156 bp, Homo sapiens
atatctacccccggcctccttcactgtaggtgagcatggctgctgcccttgaacaaaggacacagcccttataacagccctcctttccacgtgacttgttttcttccaagttcctgtaactgttccccttctgctaaggagaacaccaactctaca

SEQ ID NO: 526359 - DNA, 443 bp, Homo sapiens
taaccctttagataatatttacaagacacttaatgatatagatacactgtatcatcctctttctcactcccattttatactagaataaactgacaagcagaaaagttaagagattttcacactgtttcactgctaagtggagatggtggggtttgacgtctgaaatttggtactaatgtctgcatgtttaatcaccactctgtgctgtctccctgtgtgttgttttgagttttcagcagcagcatttacagaaaggaataatagcaggatagttaagaacactatagaacttgctagaattttatgcatttattaaaatgttcatttttgaaaagctagtgttaatatgcaatgtacttaagttacatgcagaaacaggatacaattttatgtcaagtaattacaattatgtaacaatataactctctgcttagaaattaaaa

SEQ ID NO: 526360 - DNA, 228 bp, Homo sapiens
ggagagccctgactattaggagactgctccatgattcattaacggcagcatctagaaaggtggcttatgatcccagagttcaattcctgcaaagcaataacatatatgtcaagattgaggttctggttgttcacgctgaatcaggtcactgagactctagagggggcgctgccgaagccacgttccaagtcacgaagtgtatgctgagcctcctgcctttcggcccgc

SEQ ID NO: 526361 - DNA, 889 bp, Homo sapiens
ggtacaaaagtactaaatgtaagagatggtatgtcatatggatcgcagcacatggctaatccttgtttacgaagatatcgagcgcttgcctgatgcctggatagacaatcgatctatgatggtgggagagctagtggcggactagtcctatgcagtgaatcgtgcaggcactgtatccaggtcggagcccatccaacttcagtcgaagacagagtgcgcacattactttgcagatcaggctggactgtggcatgctttctaattccaactttatacaactagcaaaaaaagtgtcgcttattccaccagttctactgtgaacatactcgagtataaagacatgtagcaaatacacggggagtggaggggggagtctcacagtgccttgtgcacgggcccgaaccttgccttaaatcttcctcaaccaaataagtatttacatacagttgcttgcagagaatctgaatgtaggatgggtccaactgcacaacaaggacacaagatttttcaccactaatgtagatatcagctcctacaagtgacgccacccgcttagtgctggccttctgtcgtaacatgcattatgcctgttaattacaagacagcatcccaaacactggtactatttctattcccatgtagcaacggccggaaatgtctcataaagctacctggacaacgcagatgaactgggcggtgtaaagtagtccgtaggtcccggcggagcctaatatgtactcttggactcattggacaaagtagggttggcggtcaccggatcagccctgagtgcacatctcgggcacaggcacaccatgtgcgaacactgaatggacagttgatttcccaaatttggggaacacacacacacacaagtcaagaagcacaa

SEQ ID NO: 526362 - DNA, 783 bp, Homo sapiens
agcggagtcgccgcgcgaacatggcggcgaaatccactccaggccgcatagcagccgcccggtgctgctgagcaagatcgaggggcaccaggacgccgtcacggccgcgctgctcatccccaatggaggacggcgtgatcacggccagcgaggacagaaccatccgggtatggctgaaaagagacagtggtcactactgggccagttgtacaaccacaagggtcttcttccttggctccggcttatgcgctttccccattcatgcacgcgcgagcacggaatatagtgtgcgcccaggataagtggcagcgtgtagtggaattcacacgtccctgaagattttaataaccatgaaacttatatcacagacctacccagctccatcatgaaccgggtgtctgcgatatccttcagcttggccacagagtgcctagatcagtaccggccacgacaaagtgtgtgcacgctgggatgttgcacgccggagcgggcacatgctcgggcagggcacttctacacgtcctgggctatcgtgtctgccaaatatgactgcgacactcagctatgcctgcccgttggtgattattcctgggcagcataacctgattgacagctttgaacagaaaacgttgtacagtcaatcacctatcctcaaaggactctgaagggtgtgtcgcctgcttctgggtgggaaccctattcaaggcggttactcttcttcaggagcatctgagaaacagcatcttcatgtgggacatcgggagggaagggaaagggccggcc

SEQ ID NO: 526363 - DNA, 528 bp, Homo sapiens
cagtccaacatccggggtcagtccaacatccggggtcagtccaacatccggggtcagtccaacatcctgggtcagtccaacatcctgggtcagtccaacatcctgggttcaagcgattctccagcctcagcctaccaagtagctgggactatatgcgtgcgccaccatgcccggctaatttgtggtggagacgggtttgtgccatgtgggccaaaccatcattcttttggatgctcagatggaccggcattgggccagtgtgtgtgtccccagcagtctttaagcccctctgacggcttgtcctttcactgctgtccggtacagcgggtccctcctctttctacagtttggtctcttggtgtcatgtccgggttgtgaagccctgactttctccggccgaccacctaagtgccagcattcagaaccggtcaggcccgtcaggcagcctgtctttccatgctgtctctcattgcatatgtcccatctgtgccccaggatgtggactggggtaccgagtcgaatcgtatc

SEQ ID NO: 526364 - DNA, 377 bp, Homo sapiens
cagtccaacatccggggtcagtccaacatccggggtcagtccaacatccggggtcagtccaacatcctgggtcagtccaacatcctgggtcagtccaacatcctgggttcaagtgattctcctgcctcagcctcccgagtagctggaattacaggcatgcaccacaaggcctggctaattttaggtagtatgagtagagacggggtttctctatgtggggcaggctggtctcgtactcctgacctcaggtgatccgcccgtctcagcctcccaaagtgctggggataacaggtgagccaccgtgcctggtccttgcagcttgattttttaaacatcagatttgatatacttataggatacggagtttcactgttatt

SEQ ID NO: 526365 - DNA, 141 bp, Homo sapiens
cacggagggctgtagagctgagacgacctcaggtttgaggtttccggtctcgatcttgacgacgtgaccggccttgcaaaccgtcactttggcgctcatggctgcggccagattgatgcgctgccatccacccgaggacga

SEQ ID NO: 526366 - DNA, 850 bp, Homo sapiens
ggttgacgggggatactgcctggacggtaggttccagagggaggcagacatcgtcaagctgtggctggtgcgcagaagagtatcttgacccttcgtatgtaatccgcgaagactgttcggaatcacgccacgtactcttcatcgtgctagcaagcaactagcacacagccacagccgtcgcgtcaagatggccccaggctcccgggcgagcgtgccagctacgcctcccacaatgcaagcagatatcttgcagctacgctaccatttcgcaccaggtactgccgaggagtgcagcctctgacaataatatgatgggctcttgtggcaccggcttctggccatggtgacaatgaattgcgtccctcatgcattggagactacatcagatcccagtgctagctccagtcggcagggctgagtgcggtgggtccttgggtcgctgtatgacatttgaggtccctggtaggatgacgagtctggaggttcctacacgctggggaggtgtgtggaggtcctggatagctccaaccccatcctggtggaccggccgcctgcagcaacaagttgggcctcttccctgccaactacgtggcatcccatgatcccgataaagctcttcaggggacagaagctttttgtctggagctgcccactaagaaaagaggggcaaggaaaaaaggacgtggacgtgccatgactatatatacatacatcgtatctacatctgcctgtgtacacacacaacttttatacagtagctaatttattggcaacttgggtctggtaattacgttgatagcaaaagggaactcaggtggagaataatattgacacttgcttttctgcccct

SEQ ID NO: 526367 - DNA, 365 bp, Homo sapiens
ggctgctgagcttccaacaatatggatgggctgacatgcaggtcacttttatacagacatttttctgcccctgtccagccctgaaacagcaagaccaacccctcctcctccgcttactcagtatgaagatgattaggataaagaactttatgaggctgggcacggtggctcacgcctgcaatcccagcacttcgggaggccgaggcaggtagatcatgaggtcaggagatcgagaccatcctggctaacacagtgaaaccccatctctactaaaaatacaaaaaattagccgggcatggtggtgggcgcctgtagtcccagctactcagagaggctgaggcaggagaatggcgtgggcccaggag

SEQ ID NO: 526368 - DNA, 838 bp, Homo sapiens
  misc_feature (12)..(12): n is a, c, g, or t
  misc_feature (123)..(123): n is a, c, g, or t
  misc_feature (140)..(140): n is a, c, g, or t
  misc_feature (156)..(156): n is a, c, g, or t
  misc_feature (171)..(171): n is a, c, g, or t
  misc_feature (177)..(177): n is a, c, g, or t
  misc_feature (213)..(213): n is a, c, g, or t
  misc_feature (217)..(217): n is a, c, g, or t
  misc_feature (220)..(220): n is a, c, g, or t
  misc_feature (270)..(272): n is a, c, g, or t
  misc_feature (289)..(289): n is a, c, g, or t
  misc_feature (307)..(308): n is a, c, g, or t
  misc_feature (315)..(315): n is a, c, g, or t
  misc_feature (398)..(398): n is a, c, g, or t
  misc_feature (409)..(409): n is a, c, g, or t
  misc_feature (421)..(421): n is a, c, g, or t
  misc_feature (437)..(437): n is a, c, g, or t
  misc_feature (439)..(440): n is a, c, g, or t
  misc_feature (443)..(443): n is a, c, g, or t
  misc_feature (448)..(448): n is a, c, g, or t
  misc_feature (485)..(485): n is a, c, g, or t
  misc_feature (575)..(575): n is a, c, g, or t
  misc_feature (594)..(594): n is a, c, g, or t
  misc_feature (671)..(671): n is a, c, g, or t
agtgacggtgcngggggagtgacacgctctaaatacaagtgtaatgatacagctgagacgttaactcagagggtcttttggggcgagtggttttcagaaagcgtctgctctctagggcggtangggtcctctacaagggnacgtgcagatccaggngctggggcgtcaggnatgggngccattttcatgcttcaactcaaactccaggtggtngtgngcncaacggtccctcattccacaaaacatgacagcaaattcatcttctaaaannngttttgttttgtttttncccattcaacagggaaannaattagncacacacggtgaaatttacaaccagcagcatcatccatcacactgtctgttctaccagatcctacacttaaagctcagcattnttggtattagngctttggggggngttagaattcttaggngnnggngtganatttgggggggtgtgcgaacaacaaagaatgcccggncctgaaccagacctaaagcgccttccagttcctccacacatcatgccccaacaccatccagcccaatcgggcaccaggacagtgagggangggtggctgttcggtgggngacggatctggaaggaaagattttcaaaaaaaaaaaaaaagtgtctgccaaatttgaaaaattaaaagttatctgtntagcagaaaaatcaaatgggtaaattagcactttagaccgataacagataataaaatgacaaatcagaatgaacaaaaaatcattaaccttttgatttcagtattttcaagagattttatcagaatactctaaatgacaaaatgactcatggtttcttatgtttgct

SEQ ID NO: 526369 - DNA, 528 bp, Homo sapiens
tgtgtaatctgggacgtgcgggccagaggggctgtgacatgctgtgggaagaagagaagggactggtggagtctggaaggtgggagatagggctactggcttggcgggagcagaggcagaggtactaacccagactgagcgctggcaatgaccttgaggctggcagcattgcggatgagcttgtccagggtattgacaatctgggagaatttgggcccgaggttccggtcccgcacccagcagtccagcatgagctggtgcagtgctgtgggacagtccatgggtggtggcagccggtaatcctgctccacggcattgatgaactgggccgaaggcagggaaaccctgagtgagccactgccatgatccccagccagcacccacctagccaaccactctggcgtagcctcactcacatcctggttgctcatgtcccagtagggtcgctctccatagctcatgaactcccacatgacaattccgtagctccagacatcactagcagaagtggacttccgataggctatg

SEQ ID NO: 526370 - DNA, 119 bp, Homo sapiens
gagtgatgctgctggtgagttagaggatccagttcctggtccccactactgcagcacctccaggcctgttgctatatgatgcctaccgtgtatgtcaactaaacgaacatgctgaatgc

SEQ ID NO: 526371 - DNA, 437 bp, Homo sapiens
cggtacacttaccaagttcaagtgattctcctgcctcagtctcctgaatagctgggacgacaagcgtgtgcacacactagttaattttagtatctttagtagagatggggttcatcatgttagccaggctggtctcgaattcctgacctcaagtgatccacccacctcggtctcccaaagtgctgggattacaggcataagcccaccacgcccagaccttgttcatttatttattgagacagggtctgactctgtaacccaggctgtagtgcagtagcaggtatcacagctctctgcaggcttgaactcctttgctcaagtgatcctcctgtatcagactcccaagtagcgggaagcatgggcataacgcaccatgcccagctagttcttggatttttgcagaaccagggtctccctagagttgtccgccaatcgaa

SEQ ID NO: 526372 - DNA, 242 bp, Homo sapiens
tgctgcagtcgatctccaggatccccctggctgctcaggtcttgtcgcgatacgtgtgttctgctgagtgttcctgcatgtgagtaattaagaccatgggaggggagagagaaacccacacataaacaatgcactaaagatcactgaacttgtttaaactatttccacgttgcctagtttacatttctatgaaagactgtatgcttgtattggaattgtttcttgttcactgacttttaatg

SEQ ID NO: 526373 - DNA, 233 bp, Homo sapiens
ggcatgagaatcagctgaaccaggaggcacagttctagtgagccgagatggcaccatcgcactccagccggggtgacggagcgagactcgcctcccaagagagaaggaaaaaaaaaggaaagactagagaggaaatattcgacaaatgtcaatagatggttcccggatgcagatggtgtagatttggtccgtctgtgtcttctgattttcagtttaattgttgccccagagct

SEQ ID NO: 526374 - DNA, 175 bp, Homo sapiens
cccgatgatcgatcactgtactatgattggactgactgcagtatggacctgtgaatatagatgaaaaataaaaaagaaatgctaaaataaaaaaacttagctacgattagtgttaaatatcaaaactcaccgagacaatccaatttttaaagaaaactcgatggaaaagatgctt

SEQ ID NO: 526375 - DNA, 286 bp, Homo sapiens
  misc_feature (22)..(22): n is a, c, g, or t
tgtgggatgggaagtttctgtntcggaaagaacaggatgggcggtgctctctggggtgtctcctaccaagcagctgttgaaggctcgtggtgctcagggagcacgagcaacactcgccgtcgcttcagcttcatcttcagggcacacagcatttccgcgcaccagatatcctcaggctcaggggcgagcaccttccggtggcttctcctccaacgactctttcagatacgtcccaccactacctattccttttccagcaaaaggacctaatgcggggggctgggat

SEQ ID NO: 526376 - DNA, 588 bp, Homo sapiens
gtgagcagtactgcggactcctctcctctcctaacctcgctctcgcggctacctttaccctgccgcgcctgctcggtgaccagaacaccttccaccatgaccacctcagcaagttcccacttaaataaatggcatcaatgcatggtgtacatgtccctgcctcagggtgagaaatgtccatggccatgtatatcttggatctgatgtgtacttggagaagtgacatgctgctgcaatgaccctggaccctgtgacaagttgagcccaaagtgtgttggaaagacgcttgcctgacagcttggaatttccgcatgtgctccatgatactttatcacgctcatgagggtgttaccaacacgtttgcacacttgtactcctcgtttgccttgcttgccattgatattcgggggacacccctttcacggtcaatggggaaccactaacaccaccagccttggcttgttcatagcttgacaagtatcactccaacgtgttaaccacaatctgcaaatgtggccttgcccagccagaccccaatcttcgacggcaccacacttgtaaaaccgggatcaactgggcacattgggc

SEQ ID NO: 526377 - DNA, 361 bp, Homo sapiens
atattcatggcgtgcgacttgtatcttaaagcgtagatgttgtggttgctttattagaagtttgtatcttgctgtgtgtggtggctcatgctcacaattcccagcatcttggggtaggccgtagtgggtggctaacgtgaggttaggagttcgagaccagcctggcgaacatggtgaaaccccatctactaaaaatacaacaattagccaggcatggtggcgcacgctgtaatcccagctacttgagaggctgaggcatgagaattgcctccaggaagtggaggttgcagtgagctgagatcatgccactgtactctagcctgggcaacagagcaagactgtctcaaaagggaaaaaaaaa

SEQ ID NO: 526378 - DNA, 246 bp, Homo sapiens
atatgagattaacactcattctcaccagacctgctaggcgaacagagaattagtaccctagcgaacgccttaaataccactcgccacatcaagcccgagatgatatgccgatgcggctacacaattctccgagtccggcccgtacaaactaggaggcgttcttgccctattactacccatcctcatcctagcaataatccccatcctgcatatatccgaacaacaaagcataatatttcgcccact

SEQ ID NO: 526379 - DNA, 199 bp, Homo sapiens
gttcaacgtggaatggttaaagccaacaagcaccagatttaaacaggcttgtgaagaagctgtatgacatttgatgtggccaaggtcaacacccttgattcgggccctgatgggagagaaagagaaattgggatcatctaaactgagtccagctgccctaattctgaatatatatatatatatatcttttcaccataaa

SEQ ID NO: 526380 - DNA, 112 bp, Homo sapiens
tcggccggtctacgggatacggattgaatatcgagatgggctcccagatcgcaatggataaacgaacagaactttcatttttttttttaaaatcactgttggggtgggggat

SEQ ID NO: 526381 - DNA, 445 bp, Homo sapiens
  misc_feature (161)..(161): n is a, c, g, or t
  misc_feature (171)..(171): n is a, c, g, or t
  misc_feature (174)..(174): n is a, c, g, or t
  misc_feature (177)..(177): n is a, c, g, or t
  misc_feature (184)..(184): n is a, c, g, or t
  misc_feature (187)..(187): n is a, c, g, or t
  misc_feature (297)..(297): n is a, c, g, or t
  misc_feature (307)..(307): n is a, c, g, or t
  misc_feature (318)..(318): n is a, c, g, or t
  misc_feature (361)..(361): n is a, c, g, or t
  misc_feature (364)..(364): n is a, c, g, or t
  misc_feature (389)..(389): n is a, c, g, or t
  misc_feature (413)..(413): n is a, c, g, or t
  misc_feature (428)..(428): n is a, c, g, or t
ccttctgtcttggatggcagctcttctctatgggatgaaggaaccctcctcggcccagcactgaaggtcttctaccgtctggtctcagctcacctttgcatcggctcccaccgccagccaagctggatgccctcccaccccatgcctcaagcacaccctgnttctaggtcnttnctnacagggnccnttgctcagtgggagtttgctgagggcccactgtgtgcgggcgctttccggggtgctaggcacagagggagcagctggcaggacttacattcatagagcacactcgggtgnctcttgctgnggcctccctgnaacctccccttccttcccttcccctcaagggtggtcacctatnggnctccacgaaccaatgtcttccctgntcctgggtcaatggggaaggaccngaggatcttcccganggggacccgacaggcct

SEQ ID NO: 526382 - DNA, 131 bp, Homo sapiens
tcaagcttctaacgatgtacggggacatgcgaggtgcctttggaaagccccagggcactgtggccagggttcacattggccaagttatcatgggcttttttttgaataaaaaagcaggcaaatagaaaaaa

SEQ ID NO: 526383 - DNA, 120 bp, Homo sapiens
ctagaggatcccgcagaagacgacagaagggcactgtagagatagagccttcttggtgatgaaagacatagagtgttctctataatgcacctcctcaagggggctcagtgcagctcatgg

SEQ ID NO: 526384 - DNA, 413 bp, Homo sapiens
  misc_feature (41)..(41): n is a, c, g, or t
taatgtttgatatgaccaacattcttaggtcagcgcaccanaatgatggaaaccatgtggatcacacggcatatgtcccacaaaagaaagcacaatgtacaaaatgtgcatgtttcagtttcctctatccaaaaatagttaaaatccattccaggtaaccatgtcacattaagaaatagtcctagtaagaaattggcactcaaaggaaaaatgcaaaagtattttcacacatgaaaccacaagacagtggaattggaacctttcggataaaccactgtaacccagttacgctctgtgggggtgtgggggaagatatgggccctcaacatttctgcagataacttttttcccctaaattcatctaaatcacctatcattatcccacacaggcacttcaatctattaatctaaca

SEQ ID NO: 526385 - DNA, 909 bp, Homo sapiens
ccacgcgtcgggaggcgggggctgcagtgagccaagactgtgctgctgcactcctgcctgggcaacagagcaagactccatctcaaaaaaaaaaaaaaaaatcagtggttttggttccaaaactggttttggcaagtggtacttaataacgatgtaatttaattcaatattaccaaaatcaaacaattatgagtgtgaacgagagtaatctctatgaaaaaaaagtggaaaactggggaaagacctgataaaagacgtgttattaaagaaaaaaatgctgtggaataggtgtgggtaaagcaaccgtgaattgttggggagggagagaaagtgtcaaaatataggacttggccttcatttggtttcacaagtgtctggagtcctcattctactaaagctgaaatggataaggcttctggcggggctaatcaagggtcctcggtgcagccggatcagcaggcccacacgcaaagaaaggtcttatcctgacatcaaggagtgatgggtagataaccctgtgtatatttaacttacacattaacctttggaagatatatatactaacaaaaaaaataaaaaaaaaggaaaaaaaaagagaaaaagcaacaaacacgcagcagagtacgccagacacacgaaccacagaaacaaacaaaagaggacgagccccgctgcaaaataaatcactcacgggaggcacccatagtcaccacacatgattggaaagagagccaaccatgaaggtaataaaaaagcagcagggcatactaacaaagatgcaggacacaacaggtttctgggcacccccggtggggtcacagcacccacaagatgcggaaaaaaagtgcatggacaccccttggaaagcggtatataagcggcaaaaggaaggaggcaggacatggcgaa

SEQ ID NO: 526386 - DNA, 542 bp, Homo sapiens
tgtgttgggaactagcattctaccagtaactatgatattggtggagcaagggtgaagagaggaccaaagtggaggaacatgaaggaaaaacaatgagcaagttattagaagtaacccatgaagactccaaaaaagaattaggggtgactttacgggggagagaggtcctggagtcaagagcctgagggtgtgtgtgtataaatatgtgtctatttatatctatatcaatcgctatctatatctacatctatctttcttcaaaaataggacatttttacatctactattgtataatatttcttcccttaataatatatcttgaaaatcttgtcatatcaaatatagaaatattttatcattttaaatggctgcattatattccattgactgcatgaggattccattgtaatcattgtatgcatgtatgtgagtatcaaaatttatttaaccattatctaggttgttttcaagctattatcaatttcttattagcagttcattttattattaaaataataatgtatttttctcctttaaaaaac

SEQ ID NO: 526387 - DNA, 202 bp, Homo sapiens
ttgaatgcgtttcaacgcatcatgatcctctggttgccatcccaggatcggccccagactttcagccactaccgcggcaatcaattcactttgggtggggaaataacggtaagccgtagcccgtgacacctgcgcataagcagccagctcagtgatcgacggaaagcccccttcgtcatacaacgccatggcacgtcgacgc

SEQ ID NO: 526388 - DNA, 344 bp, Homo sapiens
ggggggggttccccccaccggggagggggtggttttttttccttgggcgcccccccccccccccccccagagggcccttttttggggggccccccccaaaaaaaaacccccgaggtaaaccccccccccttttttttttttgtgggggggggtttcccccccccggcccgggggccccttttcccctgggggggaatttttggcaacaaagttttttttgggggggtttccccccccggggggttttggggggaaaagcccccccccccccgggttttttgggggggttttggggggttttttttcttttccccgggggggggttttccccctttttgggggga

SEQ ID NO: 526389 - DNA, 871 bp, Homo sapiens
  misc_feature (82)..(82): n is a, c, g, or t
  misc_feature (88)..(88): n is a, c, g, or t
  misc_feature (92)..(92): n is a, c, g, or t
  misc_feature (106)..(106): n is a, c, g, or t
  misc_feature (110)..(111): n is a, c, g, or t
  misc_feature (115)..(115): n is a, c, g, or t
  misc_feature (122)..(123): n is a, c, g, or t
  misc_feature (134)..(134): n is a, c, g, or t
  misc_feature (146)..(146): n is a, c, g, or t
  misc_feature (164)..(165): n is a, c, g, or t
  misc_feature (173)..(173): n is a, c, g, or t
  misc_feature (182)..(183): n is a, c, g, or t
  misc_feature (192)..(192): n is a, c, g, or t
  misc_feature (199)..(199): n is a, c, g, or t
  misc_feature (202)..(202): n is a, c, g, or t
  misc_feature (208)..(208): n is a, c, g, or t
  misc_feature (210)..(211): n is a, c, g, or t
  misc_feature (214)..(214): n is a, c, g, or t
  misc_feature (219)..(219): n is a, c, g, or t
  misc_feature (221)..(222): n is a, c, g, or t
  misc_feature (227)..(227): n is a, c, g, or t
  misc_feature (233)..(234): n is a, c, g, or t
  misc_feature (241)..(241): n is a, c, g, or t
  misc_feature (243)..(243): n is a, c, g, or t
  misc_feature (256)..(257): n is a, c, g, or t
  misc_feature (268)..(268): n is a, c, g, or t
  misc_feature (271)..(271): n is a, c, g, or t
  misc_feature (276)..(276): n is a, c, g, or t
  misc_feature (288)..(288): n is a, c, g, or t
  misc_feature (300)..(300): n is a, c, g, or t
  misc_feature (307)..(307): n is a, c, g, or t
  misc_feature (310)..(310): n is a, c, g, or t
  misc_feature (316)..(316): n is a, c, g, or t
  misc_feature (321)..(322): n is a, c, g, or t
  misc_feature (335)..(336): n is a, c, g, or t
  misc_feature (353)..(353): n is a, c, g, or t
  misc_feature (357)..(358): n is a, c, g, or t
  misc_feature (372)..(372): n is a, c, g, or t
  misc_feature (377)..(377): n is a, c, g, or t
  misc_feature (380)..(380): n is a, c, g, or t
  misc_feature (390)..(391): n is a, c, g, or t
  misc_feature (393)..(393): n is a, c, g, or t
  misc_feature (403)..(403): n is a, c, g, or t
  misc_feature (418)..(418): n is a, c, g, or t
  misc_feature (420)..(420): n is a, c, g, or t
  misc_feature (424)..(424): n is a, c, g, or t
  misc_feature (437)..(437): n is a, c, g, or t
  misc_feature (445)..(445): n is a, c, g, or t
  misc_feature (461)..(461): n is a, c, g, or t
  misc_feature (478)..(478): n is a, c, g, or t
  misc_feature (494)..(494): n is a, c, g, or t
  misc_feature (504)..(504): n is a, c, g, or t
  misc_feature (506)..(506): n is a, c, g, or t
  misc_feature (508)..(509): n is a, c, g, or t
  misc_feature (803)..(803): n is a, c, g, or t
  misc_feature (809)..(809): n is a, c, g, or t
  misc_feature (857)..(857): n is a, c, g, or t
tcgcgggaggccatcatgaggaagccacgagcagccgtgggaagtggtcacaggaagcaggcagccagccaggaagggaggnagaagnatgntaagaacaacagtnaggnnaagncttctgnntgtgatgagangtagctgaagtnacagccttccgagggagnntgctaagntggtaggannaagagaaangggacgntancatggngnnganggggngnngatgngatggnngcgtggngngggggggatatgnngtgtgggtgtnagnggtcntgctgcaggagngcccaggttggnagtgtgntgnagctantatannggatggatgcagnngtgggcgtacacgtggngggnntggggagtgcttcnctggnggnggtgagtganntntggggtgggntggggtagtattctngnggcngggggctgcgggngggaggtnggaaggtggtagaggngctaggggggcacatgncaggtacaggagagancctggcgggngntnntggctggggtggggcgcgtgagagagctggggccatgtgcctctatcgcctttggccaggcaaccggtgtggtggatggcaacgtagcacgggtgctgtgccgtgtccgagccattggtgctgatcccagcagcacccttgtttcccagcagctctggggtctagcccagcagctggtggacccagcccggccaggagatttcaaccaagcagccatggagctaggggccacagtgtgtaccccacagcgcccactgtgcagccagtgccctgtggagagcctgtgccgggcanccaganagtggagcaggacagctcttagcctcagggagctgtggggagtctggngggggggggggggt

SEQ ID NO: 526390 - DNA, 245 bp, Homo sapiens
aaaagagaggcaactgagcaggaggcagacaaaaacaagaaaagcccagagatacacaggagaatagacatttcccccagtacatacagaaaacatggctaggctcatgatgaaatgacatgtccccggagaacctgagctacaaggctgaactgctagacttcgcatcagtaattccaacaaacctgcagtgcgttgggcacatgaaacattgacagcaaatgtgcttagatttaaacttactc

SEQ ID NO: 526391 - DNA, 125 bp, Homo sapiens
ggcacgggaagcccgcaggtgggaagcatgcaagttcaagtcctagtacagttgacgggacagtattttaaaaaaacgtactattctatatttttccccctccctttcccaaaaaagggaggcct

SEQ ID NO: 526392 - DNA, 329 bp, Homo sapiens
  misc_feature (329)..(329): n is a, c, g, or t
ataaaccactggagttttttaatcccttaagtcacatatccccagaaatgttttggttgtgaatcatttgcccagcgagcccaagggagaggcagggattcccctgaaatgtactcttacacttttttattttatttttaatgtacatttgtgtgcaccagaatggaatgtgctctttttaaagagctggacagtggttgcttcagacttctgaataccagaaagacttgccttttaatttttaaatattactttttacatcataaaatgtgttatcttatccatgtatttgaataacatcatatataaaggtagttttttgcttgctn

SEQ ID NO: 526393 - DNA, 165 bp, Homo sapiens
  misc_feature (126)..(126): n is a, c, g, or t
tatagatcgagctggtaccgaattcgacagtgtgcacgctccttgccacaaaacatcggcattctgaaagttctgcctgagtatagcacctttattccgtggaggtatagtgcattctaactaccnatgaatagtgtccactgtgatcatttccctctgcacgat

SEQ ID NO: 526394 - DNA, 252 bp, Homo sapiens
  misc_feature (75)..(75): n is a, c, g, or t
  misc_feature (139)..(139): n is a, c, g, or t
agcctggccaacatggtggaacctcatctctactaaaaatacaaaaactagccaggcgtgggggcgcgcacctgnaaccccagttacttgggaggttgaggcaggagaattgcggaacccgggaggtggtagccgcagngaggcgagatcacaacaccgtactccaacctgggcaacaagagcaaaactccgccttaaaaaacaaaacaaaacgaacaaaaacaaagaggaggaggcggcgtcaccagagcc

SEQ ID NO: 526395 - DNA, 208 bp, Homo sapiens
gggaggagggaggccggggacaaggcgcgggtggcagatcgccagtagtgtccgacgggggggcgcccggtcggcgagcggacgagaacgtgcgagtcggtcaagggagcggacggagatgccggggacagacggactaataggacatcacggcagctgtcgttgaatgacggagtgaccatgacttcaacgatgaatctggagagtg

SEQ ID NO: 526396 - DNA, 774 bp, Homo sapiens
aagagtggtatcaacgcagagtcgccattacgtgcctggggccaagattgtaccactgtattccagcccgggtgacagagcaagactgtgtctcaaaaaaacaaaaaaaatcctggttggcacaccgggggctcacacctgcaatcccagcacttgggacggctaaaggaggagcggagccatcaggaagctcggaaggttcgggagaatcggaagcctcgaagaccagccgtgaccacttagtgacgtgaaaaccaccgatctcatactaaacactaccataacatagcgtggtcattggatggaaagtgcacagggtaactccacagatacatgtggaaggattgaaagagggaaacatggacttgaaacacggtgaagggtatgaagtgttgcaaggtgagcgaagagatttgcgcaattaggcattagcccccagcccagggtgtaacagagagcaacacagtcccatcctataacagaaaacggccaacaaaaagggcacctggagccagacggacaacatccctggcgacatacagcgagcgacgcagtaccccgttggaacaccccggaagggcggacccaatggcccaagcacgaaagccacgcgacacagccgtagagcgacccaacgagcaacaaaaccaacacgggaatgggcgaccaacacacgggacacacaacaacaaggatgaatcggcccaccaaagcccccagataccaggtagagagacacaatggacccaacaaaacgagcctacacaaagcggc

SEQ ID NO: 526397 - DNA, 574 bp, Homo sapiens
  misc_feature (22)..(22): n is a, c, g, or t
  misc_feature (37)..(38): n is a, c, g, or t
  misc_feature (40)..(40): n is a, c, g, or t
  misc_feature (48)..(48): n is a, c, g, or t
  misc_feature (50)..(50): n is a, c, g, or t
  misc_feature (78)..(78): n is a, c, g, or t
  misc_feature (80)..(80): n is a, c, g, or t
  misc_feature (234)..(234): n is a, c, g, or t
  misc_feature (241)..(241): n is a, c, g, or t
actagctgaacgaggatgagcnggtcaggcgaggctnntngccatggntnttatgagatggcccttgggatagtcagnanagggagcaaagtaaaagatctgaaatatgtcggaggcacttgctgatggataccatatcaggcgggatgaagaaaaagagcaatcaaggctcaatttctagcatccaaatttgaacaaatgcatgagtggtggtagtgtcaagtacaatggggngaatganagacaagtaggtttggtaagtggataaacaaattggtcagtctataggggggcatcatatcaggtttgtgatatcaggtgttaggagtacatatatcaaaaagataattataacagtctggcctttaggagaggggcagaggttagagatcaacgtctgcatggcattggtgcacagttcctatttaaataaggcacagggcagggtaagataacctaggaagaatgttcgataaagatccaggatcgagctgtgagaggtctctaatattaccagtcatcagagtagggtgccagaaatgaaagaggagcacaccatgaagtaaggaaagca

SEQ ID NO: 526398 - DNA, 123 bp, Homo sapiens
cccagaaggatggacttgcctgatgatcgtgattatcgtgaggagaaatgagctctgggaatgagagatgtacttgggggttatggacctctcaaaaaaaaaaatataataataaataaaaaa

SEQ ID NO: 526399 - DNA, 344 bp, Homo sapiens
  misc_feature (344)..(344): n is a, c, g, or t
tgtggtgactcatgtctgtattcccagtactttgcgaggtcaaggcgcagggatcatgaggttaggcgattgggatcatcctgtgtaacacagcgtaatcacatctctactaacattacagaagtagctgcgcttggtcggcgagcgcctgcagtcccagctagctcaggacgctgctgcaggagaatcgatgcacccggctggcatagcttgctgtgagccacgatcgcgctacgacactccagcctgggcaacacagcgagactccatattcacaagactccgacccaagcatgcggccgtatattcgagctcacttggccttcgtcctatggcgagttcgn

SEQ ID NO: 526400 - DNA, 836 bp, Homo sapiens
  misc_feature (411)..(411): n is a, c, g, or t
ggggcagagcttgcagtgagtcgagattgtgccactgcactccagcctggctgacagagcgaggctccatctcaggaaaaaaaaaaaaaagggacggaatagaattattaccctcagaccaaggagggcttgatgatgaacatttggggtaaaacggagggataacaggagaattatacctaaaaggctcccaaagagtcactacgagggttacttccaaagggaccccaaatttagattggcgcatttatattattcacacgcaagaaacttacagagggtcagaaattgcttctacgcagtgtctccagattattctccaggtgggacaagggattttccagtcttataacttttatttgcgcaaggccaaatttatcactcacagagtggggacgtctaagggtaaantaacattatttttaaggaacatttgcaaggagaagactttaaacaaccctggaagtcccccattgaagctggtttgttccaataacatcacctggttgaagattgtccccttaaaaaaggcaggtggacgaccaaatcgtggggttacgggaaacaatgtgctcataacaggtagcaagaagactactcgggagaagcccagtgtattgaccggttggttgttagccagtctaggggacattttcttaagaagtgtgggaaacagaaaaggtgttccggggaattgtttagaccaccaagaagaaaaaccgggtattctgatggcaatttggaaggctttgtggacaaatttttcccgattggtgacacaagatttggggagcacatgttgtgagggggaaacaggagtcttagaagggttcaga

SEQ ID NO: 526401 - DNA, 809 bp, Homo sapiens
taggtacgaggctgggtgtttaatcggccgagggcgacccgacctctttctaacctacccccggagccatggcctctgctggggtggcagcctgggccgacatgtgctggagtgatgtatttgcctgccaacgtccgaccagccgctgcctgacaccaagcctgctgcctgcctcctcatgcctgccgccggtccctgcgcctcaacctgcagcagtctgcctggcgccacggactcagtcacctgccctgcgctgagggaggaagagaactactcctttttacctttggttcacaacatcatcaaatgcatggacaatggacagccctggaggtccaccagtgacctgaactgccctcaaaagcaagttccagtgatgatgctgcaatgctcatcatgcaccatgccctggcatccacctgagcccctgaacatgcagcagcagcagctgcagagcctccgggagcaagtcaggaccaatgaatgagcttctgcaaaagtacaagagcctctgcatgttcgaaatccccaaggagtagagtgatggcttgacttccttagaacagatgtggggaagccaatggcctgtctccccactaccatccccaaactgctcctttggggctgttggttccctgtggacccccagctcagctctgtcaagctgcatgggtgcgggtggctcctgttgcttgtgcgcgctgcatcgcctgttgctggagccagcgcaaaggcttggtgcgccgggggttcctcgtgtcactccatatgttagaatgctataactggagtgctgtggggaagtcgag

SEQ ID NO: 526402 - DNA, 179 bp, Homo sapiens
gtacatattttggaattccatctatttccctttcactctagcagtattacatgctacattaccatttaaacagatgtctaataaatgcatattggaacctattgcactaacagcattaaacatgctcttcatccacatcactaacatacaaattaaaagctactccaagtaaaatgaag

SEQ ID NO: 526403 - DNA, 1492 bp, Homo sapiens
gggtgcctcgtgctcccgttttgtcgtgtcgttctgtgtttctatcacctgcagtgcgagtcgtgatgatgggtgcgcgtggggtagctgtgcgtcgctgaaggggtggtctagatgggttggtttgtggtaacaccatcaactgtctcatggtttgggttcttctgtcttatgttcttcggtgatcccgtcgatgagacgcccctcgtgttttttgatgatggtctctcactgagtcgtatgttctgaggagtgtgggcttgttcgtgatatgttgtgttgtgtttgcatgagaatatgtcatctctttttgctggggtggtgatcaggggtgtgtggtgattaggggggcgtaagaggattgtttgctcgctctggttgttaatgttttcctttgggtgtttggtggatcctcgcctgtgtggtggtcgctcttgcttgtggttggtttggcatcaatgcactgcccgcgcgggagtaggggccggcgccgcctgtgtgtgtcccccctaggttgtctctctgctttgcgtgttgtctgtactggcgctctcgttgtgtgtggttgatgtggtgtggtgtatagagatgttggtttgttgtcgctttggagtgtggatgtggcggtgatagaaatgttgtagtggggttgggagaagtgggaggtgttgtcgtttattgttttgttgttttttgtaggcaaggggatgggtttggtgcagagagctagtttttttgtgttgagttggggtagttgtgtttagtgtttttttttgtgtgatacgacgttacaaagtagagatagataagttatggtgagggggggctgcggcgcacgccgctggttgtgtgtatattgtttgtgttgtgtgtttgtgttgctcttttttgtgtgtttttatatatgttgttgctgtgttttattttctatatatgtaggtggggcacaagacagagggcgaattgctgtaggcccacagtatgcagaagactttgtatagggcacgagcccctctttaaggtgaatctcgaagagttagtgggtgtataaaggaggctgtacaagaggtgttggagtgggccccacggcgcggggagatacacacgaatgtgggaggaggctctcaagtatgggccaccgttctagagagagcttgcgtgcattgcgcaaggtatgcgccgcgcgcctgggcggcaaatgtaagcgccttctgttgtgttcgcggggtataccggtcctatttggtttctggagaagtatgcgcccccgtaaggtgcccctgcgttgtgggtccacacaccccgttcgttgtgtttcgcatccacaggcgtgcccaagcttttacggccagctgcaagaggccacaggttttgactgggcacagtggggtcacatgcggtgcaatcatcccacctgtctgtgttggctggtccacagcggaggccatcagtctcctcaataagtgatcattttgctgatgatggagtgcca

SEQ ID NO: 526404 - DNA, 343 bp, Homo sapiens
  misc_feature (159)..(159): n is a, c, g, or t
tcttcagttctatcaagagggttcaggaaccggtgtgggggaccatcgcatgatacttgggtgcggggtagggctgtgctggaccccttggctggctcctcaaaaactggtagaacgcagatccatttcctctggagggtggagttctatggtgactanggctcatttcttaccctatgattaggctgttacttcccctggtgaaactttcatcctgtaggttcagcacaaggttgtcagctgtgagatagatccgattctgtgatgtggcgatcgtcttggagatattctgggctgctcgaatcttgcgacgtttgatgtagccggggttcttgctcagtgc

SEQ ID NO: 526405 - DNA, 694 bp, Homo sapiens
  misc_feature (9)..(9): n is a, c, g, or t
  misc_feature (17)..(18): n is a, c, g, or t
  misc_feature (23)..(23): n is a, c, g, or t
  misc_feature (33)..(33): n is a, c, g, or t
agcctttgnggaaaatnngtctntgttgttgtngttataatataataattttttattttttattaaaattgtttttttataacaaaataaaactggggattatattaaggggggggccaaggggcaaacacccaaaggccccaccttattttgcctcttaaaggttttgccccactgtggggaacaaccccgcgccgcttcgttaaaacaccttaagagggagaattaaaaacataagagagttattggggtcccacccccaaaccaattaatttaaaaattttcgggaggggccccaaagtttaagttctttaaaaaggccccccagggaaaactaaccccccgccagagtaaaaaactgttgtctttttgcccagaaatatggagaagaaaaaaaaatgttaaaaaggttaatgctcacccccccaataaagtttgaacctttctgccccaaaaggcgggaaagggtcctttttttggcccattcttaaattttcgttgtcccaaccgggaggaaaaaaaccagcccaaactttttgactggaaaaaacaaaaaaaaaaatttctccaaccaaattaaaaatcttgtttaatgagaaaatccaggggcaggggaaagaaaattccctgtaaagagcccaaaaccccctggggccttttctttctttgttctttttttctaccatagtcaaca

SEQ ID NO: 526406 - DNA, 439 bp, Homo sapiens
  misc_feature (80)..(80): n is a, c, g, or t
gatccatgggtgggtgattaggaagtgaatgtgtggggcttaatcccattccctggccgagcccagaccctgatctgacncaggatatgggatggcaaaaggccgatttgtcagactgtcccgtggtttcacggaggtaaatctaccgatttctccaaagtgccggggtagagaatgatgaaaggggagagcaaaagggaggtttttccccaagggctggccagattccaaagccacagaatatccgcttaccctgcagggtaagggtaaggaatgtgtccttttcttggttacatctcttactccaccacagttaccgtgggttcaatttgctgctctttagttgactcgaatagtaaaactgtcctgaattaatttcattctgtgattctcaagtaaattagttatttccttgcaattaaaagaatcttttcatctc

SEQ ID NO: 526407 - DNA, 608 bp, Homo sapiens
  misc_feature (41)..(41): n is a, c, g, or t
  misc_feature (105)..(105): n is a, c, g, or t
  misc_feature (189)..(190): n is a, c, g, or t
  misc_feature (206)..(206): n is a, c, g, or t
  misc_feature (208)..(208): n is a, c, g, or t
  misc_feature (212)..(212): n is a, c, g, or t
  misc_feature (220)..(220): n is a, c, g, or t
  misc_feature (229)..(229): n is a, c, g, or t
  misc_feature (231)..(231): n is a, c, g, or t
  misc_feature (298)..(298): n is a, c, g, or t
  misc_feature (310)..(311): n is a, c, g, or t
  misc_feature (323)..(323): n is a, c, g, or t
  misc_feature (330)..(330): n is a, c, g, or t
  misc_feature (332)..(332): n is a, c, g, or t
  misc_feature (334)..(335): n is a, c, g, or t
  misc_feature (338)..(339): n is a, c, g, or t
  misc_feature (345)..(345): n is a, c, g, or t
  misc_feature (349)..(349): n is a, c, g, or t
  misc_feature (367)..(367): n is a, c, g, or t
  misc_feature (370)..(370): n is a, c, g, or t
  misc_feature (376)..(376): n is a, c, g, or t
  misc_feature (383)..(383): n is a, c, g, or t
  misc_feature (389)..(389): n is a, c, g, or t
  misc_feature (392)..(393): n is a, c, g, or t
  misc_feature (396)..(399): n is a, c, g, or t
  misc_feature (421)..(421): n is a, c, g, or t
  misc_feature (424)..(424): n is a, c, g, or t
  misc_feature (431)..(431): n is a, c, g, or t
  misc_feature (435)..(438): n is a, c, g, or t
  misc_feature (446)..(446): n is a, c, g, or t
  misc_feature (461)..(461): n is a, c, g, or t
  misc_feature (474)..(474): n is a, c, g, or t
  misc_feature (476)..(476): n is a, c, g, or t
  misc_feature (503)..(503): n is a, c, g, or t
  misc_feature (512)..(512): n is a, c, g, or t
  misc_feature (524)..(524): n is a, c, g, or t
  misc_feature (527)..(527): n is a, c, g, or t
  misc_feature (543)..(543): n is a, c, g, or t
  misc_feature (548)..(548): n is a, c, g, or t
  misc_feature (606)..(606): n is a, c, g, or t
gacacagggcaaccacacaggaaaaggataccaggacagantccatggagttttgcttataccacaaaaggagttaaggcagtttaattcaaggatgcgaaaacnacgtctatgacataaacatgacattcaaaaataactcagcctttaaaatgtccccaataccaacaaatcaacaaagtagtcaanncgacagcccctgtcangncccnctgccccntcccaaccncnctcccccatgacaccgctataacaggtgctatgcagagccctccctatgcagttaacacagattgangggtgctatttnngggccaccagtntcgcatncncnnccnncccctncctntcttcccctgtcctcggnggnccattnccttttntgtgtntgnnttnnnngcctctttttctcgttccacanacnggggttncggnnnncccaaggntggccagggccaccntgagataggtttntnttttttttggttggcccctctttggcnctgtgttgnggcctaatattntgntggggtgggttccgtnctttnttttgtggttgttacctggttttgggttttgagctcggtcggtttttccctgtgatcnag

SEQ ID NO: 526408 - DNA, 108 bp, Homo sapiens
agaactactgggccgaagaaccagaagagagggaaacctagtgagcaggacactaagagaagacatggaagacaaaagatcagggttgaaggtcccagcaatgtcagg

SEQ ID NO: 526409 - DNA, 776 bp, Homo sapiens
agcgggtgatgtgggtggctggaagagcggagagccagcgaccgccgatctgttagctcgtgcgacccagcggcgggggtcctccactgttcatttctctacaactgaaggaaaatactgtgtgttgagcacctgtgtagtgcgcgaattaaaggcctcatccttctggaacctaaattttaatgaagccatgtgggcaatcaaatgtgtgtgtgagcagcagcagcagagcagcacgcaatgtgcacctggagtccatggtgcacatgtgcagacagcagataccactgcaaggtggcaatctattcgacccaacaccacggaaccaggacaacttgcacagaattttggactcagttcttactagctcgacatttgctgcagagagacacagaacaaacagagacaacacaagcataacaaaagaagaccaacaaacgcagagcgagagagagacagaaaaaagtgtgcatgcgccaaagcgcggggaaagaacacaccgcaaccagaggggagaaagggcgagagacaacaaaacacgacccaacgcaacaagggtaggcgcgacagaagagagaacaaggaggcggaggagagagagcgaactacagaaacgccacaagcgccggccgtacgacacaccgcgacatactccccgaacggccgagaacaacgaggcgggggacacgacgggagatgtaggcggagcacctacgcgcgcgagcagtaaaccacaaccacgaaatcgggcgcgaccagcaggacagacgtcggca

SEQ ID NO: 526410 - DNA, 191 bp, Homo sapiens
  misc_feature (73)..(73): n is a, c, g, or t
  misc_feature (122)..(122): n is a, c, g, or t
  misc_feature (164)..(164): n is a, c, g, or t
gcaggtggaggggagatctgtttgctcacattcatggtaatggactttttccaaagggttataagtatctgtnaagcccatctgggtgtttcctgctggtgcatcctttagattctgtatgnttatatgtctatggcacccaaacatcatgagcctaaacagtnatatttggatgttgactttaatgctct

SEQ ID NO: 526411 - DNA, 425 bp, Homo sapiens
  misc_feature (23)..(23): n is a, c, g, or t
  misc_feature (29)..(29): n is a, c, g, or t
  misc_feature (157)..(157): n is a, c, g, or t
  misc_feature (175)..(175): n is a, c, g, or t
acctcagatgggttgccaaaatnccccantgaccattccctccaccagaaatagaaaaccaccaatgcctaaaaattggtatgggaacccaaaaaaggaccctaaatagcccaaatcaatagtaagcaaaaagaacaaagctggaggcatctacctnccctggcttcaaaatatncccacagacctatagtaagcaaaacaacatggcattggtataaaaacagacacatagagaagtggaacagaatagagaattcagaaaaaaatccacatatttacagtcaactgattttcaacaaaggcatcaaaaacatatattggggaaaggaaaccctgttcaataagtggtgctgggaaaactggatattcatgtgcagaagaatgaaactgtctgaatgaatagacccctgtctctcactatataa

SEQ ID NO: 526412 - DNA, 240 bp, Homo sapiens
  misc_feature (2)..(2): n is a, c, g, or t
  misc_feature (13)..(13): n is a, c, g, or t
  misc_feature (26)..(26): n is a, c, g, or t
  misc_feature (194)..(194): n is a, c, g, or t
  misc_feature (199)..(199): n is a, c, g, or t
  misc_feature (233)..(233): n is a, c, g, or t
tnatggttacacntcctacatccaangccatagccctacagcatggttcattctcctcctcaccccagtgcgacctcctatagtcaacagcttatacttcctggaattcaggtaacttgaaagctcagacagaatcctccactcagtcctcagtctctatagatagtgagttaagtgcttcagattagatgagnttcanttggttccattataagctaatgatgtactgatgncagttct

SEQ ID NO: 526413 - DNA, 181 bp, Homo sapiens
gcgtgcgcatgcagttgattgctgctactcgtgccactggaagatgcacaacagcagcatgagaaaatgtcaccttggtctggtgatgggcagtcaaaagattctgggcgcttcctcaagtgagaaagaagctcaagtgtacagttgaaggttgtgaggggacatttgtatggccagcgag

SEQ ID NO: 526414 - DNA, 893 bp, Homo sapiens
ggagatgatggcaatctttatataaatgtgaagctgaaggctcgtgaaggagatgggatcgaagccactcacattaggttaccacagaacaaacacagaatctgaggtgatgaagtacattacatctttgaagtgaagactctacggtacagtgggttctctagtagcgaggctgacgcgtttagattcgagagaattccattagatagctgaagaagtgatcaaggctatagcacccgagaaggatgtggatggataagagtagcatcaaatgcgggtgagactggctacgaggtgacctcagaggacgtgtgttcattccgttgtgagcgcctaagggatgcttggaactcatcaaagagacaggggtgccgaattgcccggaaggcagtgctgtggatggtggaggactgcagtcaagaaataggttgggggaccccgaatgcagtgacttgtcgtgtacggtaggaacgaaggccacacgggaccacccgtgcgcgacgtccaaggactgcgcacactctcgcgactgaggacggtgaaactacagagggtgacatcctgaggaggccggccctgggtcagactgtagagagggtgtaccagggggcagtagggcgcgaagccccggaggggcatgaggtaggatcggaccgtggggaactgcatctactagtgtgccagaatggatatagcaggaggcacaaggggcagagaactgtcaagtggggtgccggtggggaggacatacagagagtctaccgaggaggggcgaaactacggcatgcacgaataccgggcaggggatggcccccgaaacgtcgagaaagatgcagaatcgaggtagagcaaaagggcgcgcggaccctgaaggacgttgaacccgcgtgaag

SEQ ID NO: 526415 - DNA, 714 bp, Homo sapiens
caggatcttgtcgctcggacgagatttttgatctcgctcgcaagctatcgccaaaaaccgcctactcgccggcgagccgagctggaaagccgtgtgcagcttagcgatcaggtccaccagatcatcagtcatgcactcgcagaacgaaaactggaacctgctccgcccaccaaggcagaggccactggaaacatccgcgagaaccgcgcagaagaacgtctccgtgagcgtgaaaatgctgttgttcctgaaggcgttagggcggagccagcttcacttcaatctgaattgacaccgaaagcgcatgattcatatgccggcgagcgcactgcgcaggttatcgatttgctcaaaagaattcggccaggacaggcaaaatgaaaggtgcacagacgtttgccaattacgtcagacaggacattagtgagtatgcgggtaacccgcttatcgaagctttgcctccgatattgtcggaggcggcggctgttgagctgatctcgaattttcctcagccggtggatccgaaagagctgacgctcgaaggagccactcgaattcactgtatcgaccggctaagaaccgtggtacagccgtttttgctacatctggaactggaggccctgttctcactgctcattcgtcgagggtatgtagggcgtacccgatgtcgccgctaccgtcggcattgcattcttatctggggccagggtaccc

SEQ ID NO: 526416 - DNA, 1561 bp, Homo sapiens
  misc_feature (224)..(224): n is a, c, g, or t
  misc_feature (312)..(312): n is a, c, g, or t
  misc_feature (472)..(472): n is a, c, g, or t
  misc_feature (527)..(527): n is a, c, g, or t
gaggctgagcggatggtgtgagaaaggtcgattttcgcggagctctcacaggtggctagagatgctcagtgagtcccaatagaatcgctcaatggagactagaacggcatgtgattgtatgtctgctcacgatctcatctcgctggtgcgatcacggctccatgcttgcggaatccttctattgacgtaagcagcaatcgcgaaagaagatatggtactaatanacaaggcggcaaacgttgaatcgcgtccttttatgactacgaataaaattcgtgccaatgaaggggagcgcctggagggcacgccaanggtttcattgtcgtagcgcctcgactacaggtgaccatgtatggtccgacgagtggaagaacgcttagactagaatgatccagaggattcctattgctgtagagcgtgattgcatagacacggacttgcgtgacttgtgtacgtacgtttccgtcgagtngcgaccgtatcgcgaagggccagctacgcatatagtgtgtgtgcgcatatccagntactctgcgcatgcattcaaatcagccctcgtactcggaggcgtccgtccatatagctgcgctagacactatgcgattgccctctgtggagctcctgtcgaatgccctggtgagttgtcgacccaacacaagccagtacggctccgaggagagacactggaagtcgattgttaagctccgttctaggcataggactggtggttgctactttgaggcaaatctcatgacttgcttggccagcgctatcgggtgggatcattggaagtacattcccctaatagggtaccacaggcaatgtcgaatccctaattatcccaggggttcgccaaaagtagccgtccggggaagagtttagatgtcgcaggcaggaatgtggggtgcggatagctggtgttccgaacgcattaccccaactgtaaaagacgactcccagtgctggaatggcctcaagtctgtggccttggagaggattcttgattcgaagcattctaaggaaagaattttccgaaaacacggccttcgcaacgaaagaggaatgagagaataatacaccgaggctggttgaccccacggggacggaactaatacattacggtctgggattggttgggatcgaagggccagaaggtaacattccgggtttaaagacgtcgtaacaggagtgggagaaacagttgtggaggatattggggaacagagtaacgcaggggatttggcgcgtggcacccaaccgtcgttgggacatttgcggagacaaggcccgcaaaggtgcaccagttaggaaaatgcgccctgtgcagatgaacacaaccagttaatctagcgagaccagaaacacaagcagaccaaggccagagaaaaacgtaggagcgagcataacaccaacacaaagggctgtgacacaaaagagagagacgcacgtgagtccaacacaagtgttacagagggacaagaaagtaactactacatgtgagcaacacaccagcggttgccgcaagaaagaagaacgcaggagcacccagcagaaacaagac

SEQ ID NO: 526417 - DNA, 257 bp, Homo sapiens
atcatgcagagaaccccgtagacgtattcgggtctgtgccagccttgaagtcaagtggagcaactctatagctcactggcaacctccacctcccaggctcaagagacttgtgtgcctcaacccctcgagtagcttggattacagacatgcagcaccacgggcagctagtatctgtatgtgtagtagagacagggtattgccatgttggccaggctggtcttgaactccttgccttcaagtgatccgtccgcctatgg

SEQ ID NO: 526418 - DNA, 223 bp, Homo sapiens
atggctgctgactgcttagggtggtggttgctgaaggttgggtgacagtggtaatttcagtgatttttgtattgttttgtttcttaaagagacagggtctcattctgtcactcagggtggagtgcagtggtacgatcatagttcactgcagccttgacttcccgggctcaagcaatccttctgcctcagtctttccagtagctaggaatatcaagaatcggca

SEQ ID NO: 526419 - DNA, 820 bp, Homo sapiens
  misc_feature (9)..(9): n is a, c, g, or t
  misc_feature (117)..(117): n is a, c, g, or t
  misc_feature (277)..(277): n is a, c, g, or t
  misc_feature (299)..(299): n is a, c, g, or t
  misc_feature (328)..(328): n is a, c, g, or t
  misc_feature (335)..(335): n is a, c, g, or t
  misc_feature (337)..(340): n is a, c, g, or t
  misc_feature (343)..(343): n is a, c, g, or t
  misc_feature (355)..(355): n is a, c, g, or t
  misc_feature (357)..(357): n is a, c, g, or t
  misc_feature (420)..(420): n is a, c, g, or t
  misc_feature (563)..(563): n is a, c, g, or t
  misc_feature (799)..(799): n is a, c, g, or t
tccccacantacaaaatacacaccccaatggctcacaccagcaaatgaaagtgaaagagaaacaggtccacccctccctctgaagggcccaccaggtctgggcaagggtgggagggnccgtgggctgggtctctaaagagaagaaaaggagaggggagcaagtgagtggaagaggctggaaagtcatcgcagggccccaccctcctcttccctctgtgccctactgcctctgctggcagacaggggcaggggtcccttcgtccccataacaccaganacacaggcagggctgcagccantaacggtcaggcctttggacacaaaatantttcgcntnnnntcncccttacgtgtnanccaccagggaggatctttgctgagggcaaagtccaggatctcagccgtgtggccccggtagtnagtaagcaggcggccggtccgggcgtcccagaggcgcacgatgccatccaggctgcaggtatataccacggcagtgcctgcctcccacagcagctgcacgatgcccgactggtgctgacactgatgcctaagagtctgcgtancaggtcatagatggccaaggtcccatccaggtagccaacagctgccaggggcatcacactgcagaagcccaaggactccaccgagttggactcactctcctccccttctcccaggctgggctgggaggcacagtctcaggtctaaaaacacccaccaccttgccggtggtggcactgaccagcttggcctggcagtccacagagccagtaaggatcaagctgccatcctggttggnagccacacaggtgagtgggcc

SEQ ID NO: 526420 - DNA, 271 bp, Homo sapiens
tatcaagggggtcttttatcatagtacagcttcctttcaggttgatattcttccattagtatttctttaagagagagagctcctggaaatgaagcctcttggttttccatcacttgataacatctctctttagcgtactctcgcaacggctcttatttctggatacaaaattctgggtggatagtttaaatgatcttccagctttctaaaaggtaggttcccctgtcatcgtcatgggccaccatgtttttgtatgataaatggactgtca

SEQ ID NO: 526421 - DNA, 264 bp, Homo sapiens
catgcatgagcgaacccagtcaagatcagcctaagcttgtagcatagcagaaaaactctagtgggcaaagcatagacctgtaataaatcatcacatagttgttttaagtctccaaatttaggggccccttgctatctagtaacagacacctgattaaaccacacagtttaaaatgcaatgtcctacaaaaatctggttccattgttttacccatgcttcttgattacatccccaagaggactcccacatcctgtcatagtttca

SEQ ID NO: 526422 - DNA, 603 bp, Homo sapiens
taatttttaaacaatgttttatttttcttttttccctttttaaaacccccacccaaaccgaggaaaatttaattgggggggggccccaacctagggcccggactcgtgaaatctcataatctccccactttcccctcattttgggtgacttaggtgttgggggctgtggttctcacaccaaaacgtgggtgctcctcctattgtggactcggtgcagaagggggcacctaggcacacacttttgtggtggccccccccagtgaagggggtttaattgtggcagaggcgtggaaagaaacaaaagagtctctctccccaaaataaagaaggccactttttacacctctcacaaagagggggggtgtgggagttatggctcgtgcgtggcgaacatgttgtgcttgctgtgggggttgcggcgcgagcgacggttatatttctcacactgtggaggagaggtttattttgcgcacagattgtgcaccgacgaaagaaatcttcggggggaaagttcctcgccttcccgccgggccacctcttgcgggggcctccggtggggggcagtgcctgatctgctttgggcctcgcagaaggggggacgcg

SEQ ID NO: 526423 - DNA, 262 bp, Homo sapiens
ctttttttggttgcccaggatggagtgcagcagtgctatctcagctcactgcagccttcaccttctgggctcaagtgatcctcctaccccagccttgcacctcagccttccaaatagctgcaagtacaggcacacgccaccacacccagctaatttcgtttatattttgtagagacagggtctcactatgttgcccaagctgtctcaaattccagggcccaagcaatcctcccgcctccacctcccagagtgctagtcgaca

SEQ ID NO: 526424 - DNA, 936 bp, Homo sapiens
  misc_feature (346)..(346): n is a, c, g, or t
agcggagggtgcggcgggagcgccgcacctacaccgagccaacccgaggattcccgaggtccagacagctgcccggccctaagatccccatcgacctgacgccaggagcaatgccgagagtccagcgcgtgtcctggctgacactccggagcatcccgcagcagtacatctgttccttctgacccgagctcgacaggcagacccatttccagtggacaccctgtccccgtgggggcagcgacgtagtctaccttgtcggccatggagaccccagatccatgcagggcgcgccaaaccgacagcgggagagcgaggccacggctccaactaccacgcttgtctgacncaccccgacatcaacccggctgacatggatgaagaggacggaccccttgcagagagactacaagtggattcagacattgaggcaggatactacagatcagaaactcggtagtagacagtctgcaactggagaaaaaagcgggataaaaccgccacgaggtgtgacggcccttcaggccattctatcccgtaggattcttgagatgcacgggtggattcagaaccgccgcgtaagggtgtttccggggcattacaagcgctccgggacatagcggagggggcacagaagacttcgcgtggggacttgaccccgacggaacgtaccccttatgtaattttcagaataacggacaattggaagacacgcgccttccgacacgttgcaaggcttgtgaaggcttgaagacaagagggtgtccggttgatgggaaggtattaaaagtgatgcgtggaacagtggctgcagcaaattgcccacacgaaagtgacggggattgatcgcgtagaattatgtcttgccttcaatgggcgttccgaggtctttgaacacggactcctgggacagggcctacctggcttgaaaacatttct

SEQ ID NO: 526425 - DNA, 1086 bp, Homo sapiens
ctgtctcaaaaaaaaaacaaaaaacaaaaaaccccaaacaccaaaaaaacccgaaaaccaaaacaagaaaacaaaaagcaaaccagaaaaaaaaaaacccagtgaaaacgtgaagttccctttaagaatctccgatttaattttattcagaaaaggaaagttaagcactccctaagaaacttctacttataattcaagtgtctagaagctagtgtcagtggtgcatggtggccacacatagggtgcaagggtgggcgtggaaaatttttatatatttgtgaatagatgtgtgatgtgagccagtgtgtagaagcattcttccatacgtgataagtgatggaggacattatgcacaagagagaggtgaataggtgaaagagagagagacagggactagctaaaggataaagaaacacatggggagcggaaataagtgaaacaggcagtaacatttgggataatttatcaggagagaaattttcaacaggaatcacatgggactggtgcagaagggaatttagaactacaacataaaaaatagtcttggactgagactagaaagtatcagttaatcttcctttttaactaatgttttaaaaattactaaaatcagatggaaatcgggttataatagaattggattatgtagctgcaattatggtcgggatctacacggacctctttatgccaagtatgttcgtatgatagataggtaacggtctatcaaacaatttaacacatggtatctacattggctctggcggaaaacacagcacatttcacaggatggttaagaaagactcataagggtgcttccaagatattctgccattagaatgacgggtcctcaaatgagaatcattacgaaaggcttgggaggcattgagaaaaacacacatatacattgtgggcatgaaaacttaacaaggggccctccacacttaacattcttctcccgcggtagacaaacacaggtataagcacgtcacatcatacttacagaagtagcatacacatagatcgacaaaatatctgtcagttacacataagagagccaccaccgactttatagaaaacacctactgt

SEQ ID NO: 526426 - DNA, 111 bp, Homo sapiens
ggcgccgcctactactactaaattcgcggccgcgtcgacaatgtttttcaccatctgttttgatgattatatgatttttcctctgcagtctgttaaagtgacaaatcatac

SEQ ID NO: 526427 - DNA, 753 bp, Homo sapiens
tcaaggtataactgcaaattaggaaaccagagagggagccccaggctgggacaaattcatggctaccccttccccaacagaacagggggaggaggtggccccttacacccttttagtggctcgatttcgggccccctgttgctcactcgtgctgcagcactcctaggggcagggccccacctttcccgtgggaacgtggggtagtcggtcacccagccgtgccagtgccccagaccccttcttcccccaacaaagaagttattctgtggagggaagggggcaatcggctgggccagaaaccaggaaggccaagtgagcgattgacacatttgtgggcgcctggtagccagacaagaccatgtgcacgggattgttcggaaacaaaatgtgagaacactctgtgccaccacaacaacaccaaaccacaacagcgtgctcgccagaacgcgactaggctagcgctcgaaccacgactggacaaccatgtggcacccccagaaacccatatggggggagagcaacggagacgcgatcaagagagatgaggaggagaatggggaacacgccgaaggacaaaggtgtgtgaacgctctcccatatcgtatacatagtggataagcacccccactctatgatcagaaacggggcgaaaatctcggcgcatgacagttgcgcagcacaaacacacatctaaagggaataacggaggcagagaaacagaccacaagcaccaaccactacagggagacacgc

SEQ ID NO: 526428 - DNA, 178 bp, Homo sapiens
gtatactatctcccgacggtatcctatctccctactgtatcctatctccctactgtatcctatctccctactgtatcctatctccctacgtatcctatctccctacgtatcctatctccctactgtatcctattggtgcgggggctttgtatgattatgggcgttgattagtagtagt

SEQ ID NO: 526429 - DNA, 909 bp, Homo sapiens
  misc_feature (454)..(454): n is a, c, g, or t
gccgcgccgggtttcaatcaaggtgggcatatccgcccctgggacgtccccttctcgcgctggcttcacttggttggctgctggagcccccgccttttggttccccccctaatgggggcggaaaactcttccactgtctgtccagtttggaatacagttcatgcgttgcaaagcatcgccgcgcaaacaaagccaggtctctatctatgtcaccacagaacagcgcgtgtcagtgggtggtcgtgcgtaacacatcgtcttcaccccacaaagttgttcgtctgataattcaatctctgtagttagttctattcaagtgaggaacgcgtttcctctcctctagtgagcaatattttcttgatgtcgccgcacgaacctccacaggtttcaatacagatagatgtgtgtgtcccacacatacagatcgtggcgacacagatatattctgtgtcancgtgaacgaatgagagagaagtatccggtgaattcctccttgtgtgagcccaccgacccgccaccccaactagggggtccacagctacatctttcctctgcaccacccacgtttataggagtacagtgcgaggatatcatatatacctgtctatacatccatactttctggagaaacatatcataagtgctcgcccactgcggctgttttgataagatcggcgaggatctgtccgtctagtgtgggaagactgggcgggaatactactgccgccgccgttgttgacgactacatacaaagactatgctacgtccatccttagctggggggatctttgtcgaaaaatagctcagaaccctgcgtgcttttgtttttacgccgaaaagcgggcgcccaagcaagcatttcgtttccccacagaggtcaaaaaaaagccccttccccccaaacaagac

SEQ ID NO: 526430 - DNA, 1471 bp, Homo sapiens
  misc_feature (1448)..(1448): n is a, c, g, or t
ggatcagatatgagcgtgattccaatcatcatgacgagatgaggacccgcacacgaatcatagcagatagagacgagtagcgtagtggaccacgtacacaggagaggacctgcgacccccagtggtatcccgaggatagtacgtcccacgtgtctatggcttcgtgtaagaattgcatcaggagtccgatggcatactgcccgtgctcagagccgaggcgtacgtcacatggtatcatggttgtgtacgttgacaaatcacccctgagtgcttgggtggcagcctgtcggtccccaaagggccttggagtgcgagtctccggcgcttgaggcctggagtgtcgtagaaggtctatgatactcgcagtcaacttagggccaatcaacggatgccacccctgtttccctgctgatggaactcgaacaaggtgaccactcaccatccagagggtcgtgcccgttgtcgagtctttgtgggaggccccccagtcctttataacgcgtattcgtcgtagcaaggtttccccgttggaaggagtcactgtaacggttttcaccgagaaaggaagtctctgtctggtggaagcgttgtggtacttacgccaattgatataatgcggggggtttcaatacacttccgtgtttgcccacctcgtaaaggaaagccggtttgtacagagggaggcacttggacttagacatttggtcgccaatgatgcctagtacccaggagggggcactagtgtgcgaaatacgaagtgttcacagatcctcgagcgtgggaccatttgagatgtgcggggataatgcccgaaaacatataatagtgaaaaacagcctgtctaaagatcgtgggtcccataggtgggcggcagtagtcgcactccatacggcggccattaagaagacagaggggagcattgagctacggaacgactgagttttttgtgcccccccattgggggctacacttgtttgcgccggcattattcgaccgcggagtggtgcactattcctagcggatattggacgtgccatgtacgtggcacagttgggacaatacgccctcgggtgtgtacgcacacttgcaacgcggccccctaaggagaggaaatcagtccacaaaacgggtaatgaagcgttcggttcccacgttatatcacggcccgccatttaaacggccatttgcgcggcctctcattgtgttgccacacaccatataggcaatgacggcttgccgtctatcccattacgtactaacagattgggagaatatgaccagagaaggaacgacgcggcaaaaggggaacgctctgtgcaatttccagagaattaccacgcggtgcaactgcacaggtcacggccgccagagtgagagtgacattaaggtatccacgtcccccgcatctatgcgcgcgtaagggaaaaagtctatgttgtgtagcaagncgatgaaactcgtaaacaggaat

SEQ ID NO: 526431 - DNA, 1553 bp, Homo sapiens
tggctcaataaagatttattacattaaaaattccatggccaaacccgtgaggcactcagggcttctgaccggtgtgcagccagtgaccttctgtgaacccagaaacacatgtggaagcagcagcagctgagttggccaactcaagttctgggccgtgccgtggcttggcgtggcgaacctcctgtgcacaccctttcaagggcccgtggtacaaatgtgtcttctgtggtcttataggctgtgacgcagctgtgcgtgccctttctgtggtggccattcacaggggcctccttgttaacacagattgagtggcctcctgtgcaggggaggtgtgcccccagtgtgcccagacacgagggcccgaggcacagcaggtggggtgcagcgggaaagcgttcgtgcgtggagtgacccacgccatagaggccaactcagagggagccagcgggggccgtggggctccgtgggctccctacacattccgtctttcgcggaattcttgtgccccttttcttgtggagcggggacaccccagagggacgcagatagggccgccactgttgtgttgacagagcctcctgtgagaacgcgggcgagagcgggatgtgcggggcgcaaagaagacgcttgcttgtgaggggccaaccacggcttgccacgagaagtgtgcaagctattcgtgggcgccccgagaacgagccagacagtgactatcaagggcactacaggcagtgacatgtgaggatcatagacagcacttccggggacgggagaccatccgggcccttggccagggggggtggcccatgtgagggcccgattgggggggcccgggggaattgccacctttgtgggccaagcggggcacttcacgcctttacccccaaccactttgttgcgcatctcgtggggggccttacgacgggggtacacagatttgcccgcgctatacattaggggacccggaggtcaacgagaacctgatgtccaacatcttgccggggtgctcctttgtgttgtccccccttttcatgggatgaagaagggcgtctcgcgctttggtaaagcacagcttggcatgatagtataaccgggaccggtcctaaaggggtatatcccgtcgagagggggcgcacagagtctatacgagcgggtaacaccaagcgtttttgtggtcaccaacggtgggtccccatacgagcgagggccggcatttatcaaagccaaagcgacaagtggacacgccagaatacacacaaagcagcgtgaaggggggcaaaacgcgctcccggcggacctgtgtgagcgagaccccaaccttggggggggggaccacggggcaccacaccacgagaatcaggcgactggcgtaagcaatgacagcagatgatgatgcgacagctgatgtattgtgacgtagctagcgatgacacagtacgacagtcaaggagctagaccacccggacactaacagcacgacaactcatctcgctagacgctatatagactagcctcgcctgccatgcatctatccactccacaacaaatgcgtt

SEQ ID NO: 526432 - DNA, 152 bp, Homo sapiens
gaaggacaacagaatatacaggaagcagatggtgagctacatctccacaactacaactgtcatcagagaaagctcgacaatacgaggtggggcccattgaacacaatcgaacagttgagggtcacagctgtgatagagcaaagagatactgg

SEQ ID NO: 526433 - DNA, 194 bp, Homo sapiens
gaccaaatgtacttactgacacaagaggaaaatatatgtgaaatactagctcaggatgcagtagactatctacccccgcgaaaaaggaggtgacagcttacttcatgtgtgcccccctattaagagctgtttcagctttgttaaatacttgtgaatgaattaataacccgcaaaaaatatttcactggggtaat

SEQ ID NO: 526434 - DNA, 416 bp, Homo sapiens
ccggagcatggcaactggagcgcaccttcatctgccatcaagccggacgaggtgcagtgcgaacttggtgaggcgagatcatcaagcgcttcgagcagaaagggattccgcctcgtggcaatgaagttcctccgggcctctgaagaacacctgaagcagcactacattgacctgaaagaccgaccattcttccctgggctggtgaagtaccatgaactcaatgggcaacctggagctgcaacttgggaaggccatcacccttattgtatcgttgcaggaaaagatctaagtcagcggataacatgaagttaagctaagccaagaagatcacttttacggactgagatggattgtttgacaagtaggaaaagcatgaatgacagctggagtacaagagaagagaaactacgcggtgg

SEQ ID NO: 526435 - DNA, 83 bp, Homo sapiens
ggccaagaaactttcagaagcatagttgggacggcaaaccctgctgtgagcttctcagacttttcacctaccttcacctatta

SEQ ID NO: 526436 - DNA, 592 bp, Homo sapiens
ggcctccagacgtagccattttctgacatcaagatgttgaatgtgatctggtctgagctgggcctgtgtgaggggtcgcctgaggcctgtgcgctgttgtcctcgcagatgtacttatttttgttcatgatacgggcgctccgttccttaaagatgtatatatcttcttactgtacataaagatgctccttaagtcgcacagaaggtggcgcggcaaagggcctcgcgcagagtgttcagattgcccttgcagatcttctgtgtcttcagcgcccagccctgcgtgatcctggtgaagcagtttcacatcagtctctgcagatagcactacgatgtattccgcttatgaacaggatcccatgccagtgtggaacacctttccaatcttaagttagaagaggcttgtatgacacagataggggtcacatgagggctcgtcagctttctgggtcctgtttagaaggcacaaagatcttagttctggtcccccgcccagggtccttaacaacttggcacacaagcttgttgctgtagaggctggctctgtgtgtggcttaagctctggagacgagacattgcgtgcttgctcttc

SEQ ID NO: 526437 - DNA, 209 bp, Homo sapiens
gggaagtgacatcgtctttaaaccctgcgtggcaatccctgacgcaccgccgtgatgcccagggaagacaagggcgaccttggaaggtccaactaactttccttaaggttcatccacctattgggatgataatccggaaatgtttcattggtgggggcaaaaaatgtggcctccaagaggatcagaagacccgcatgtccttcggggaa

SEQ ID NO: 526438 - DNA, 247 bp, Homo sapiens
  misc_feature (42)..(42): n is a, c, g, or t
  misc_feature (97)..(97): n is a, c, g, or t
  misc_feature (120)..(120): n is a, c, g, or t
  misc_feature (130)..(130): n is a, c, g, or t
  misc_feature (134)..(134): n is a, c, g, or t
  misc_feature (147)..(147): n is a, c, g, or t
ctttggttcttttggaggtgcttttctctttagatagcacanatggttcagctactggttggagggtacctgggcacccttccttccttggtaaggnaaggtggggctcatcctacaggntttcacaagncggntggggcaaactgnatcccagggccaaagggtcccatccctgcagcgagcacttactcctgccatgcgtaccagccaggggcccccactgcatctcacttcccttcctgcactt

SEQ ID NO: 526439 - DNA, 165 bp, Homo sapiens
  misc_feature (149)..(149): n is a, c, g, or t
ctacatacagaagcgatgaacagaagactcataaccagtactggaacagggccaacttgagcccaggggaatcttctgtgtagaatcgccacatccccccgggtgcctgccgagagttgtgcggccggcacaagtggtcgcagattcgngggatcctctaggagt

SEQ ID NO: 526440 - DNA, 410 bp, Homo sapiens
  misc_feature (10)..(10): n is a, c, g, or t
  misc_feature (26)..(26): n is a, c, g, or t
  misc_feature (49)..(49): n is a, c, g, or t
  misc_feature (95)..(95): n is a, c, g, or t
  misc_feature (109)..(109): n is a, c, g, or t
  misc_feature (190)..(190): n is a, c, g, or t
  misc_feature (332)..(332): n is a, c, g, or t
  misc_feature (341)..(341): n is a, c, g, or t
  misc_feature (383)..(383): n is a, c, g, or t
  misc_feature (389)..(390): n is a, c, g, or t
agttttttgnaaattttttgggaaanaagtttttgtttgtttgtttttnaaaacggaagtctttgtttgtcgcccctgggtaaaagtgcaagtgncgtgatctcggctnactgccacctctgcctccctgggttcaggtgattctcctgccgcagcctcctgagtagctgggactacatgcacgtgcatncagacctggccaacatggtaaaacctcgcgtctgctaaaagtacaaaaattagctgggcatggtggtgcgcgcctgtaatcctactcgggaggttgacacaggagaatcgcttgaaccgcatcccccatcccctctgggagncggaggttnagtgtgctgagatcgagccactgaagtccgcttctgccacanggtgtnnctctgctcaaaaaacaaacc

SEQ ID NO: 526441 - DNA, 983 bp, Homo sapiens
  misc_feature (983)..(983): n is a, c, g, or t
gtttgtgctcgggttaggaggagctaggctgccatcgggccggtgcagatacggggttgctcttttgctcataagaggggcttcgctggcagtctgaacggcaagcttgagtcaggacccttaattaagatcctcaattggctggagggcagatctcgcgagtagggacgcggtaaaaatattgcttcggtgggtgacgcggtacagctgcccaagggcgttcgtaacgggaatgccgaagcgtgggaaaaagggagcggtggcggaagacggggatgagctcaggacagagccagaggccaagaagagtaagacggccgcaaagaaaaatgacaaagaggcagcaggagagggcccagccctggatggagggagccccccacatatgaaaactcatccccctggtgagactgcgcgcacctcccataatgtgcgcgcgagggtggtgtgggactgcggctcgaggcgcttggattaagaagacaggattagagtgggtaacaggaagaagccccagatatactgtgccttcaagagaccaaatgttcagagaacaaactaccagctgaacttcaggagctgcctggactctctcatcaatactggtcagctccttcggacaaggaagggtacagtggcgtgggcctgctttcccgccagtgcccactcaaagtttcttacggcataggcgatgaggagcatgatcaggacagcgggtgatgtggctgcatttgactcggttgtgcctggtaaccagcatatgttactaatgcagggcgagtccggtacgactggggtaccgcgcgctggatgagccttcggagtctggagggcggttccggaagccctgtgtggtgggaccctgtggcctagacttgctcgcctcgggcacagatgtggtttcgcaaccccggccggaaggggcgcggggttgcccccccctctctgttttgtcccggggggtttgccctctctggcgccan

SEQ ID NO: 526442 - DNA, 1187 bp, Homo sapiens
  misc_feature (1187)..(1187): n is a, c, g, or t
gtttgtgctcgggttaggaggagctaggctgccatcgggccggtgcagatacggggttgctcttttgctcataagaggggcttcgctggcagtctgaacggcaagcttgagtcaggacccttaattaagatcctcaattggctggagggcagatctcgcgagtagggtacaaggcactactgaaatgatctattttcgtgggtgaggggctgaagggcctatgatgcacggcagcgcggggcaaaggcatctcacgacgataacgtggtttgaaacggcgggcacctggtgcggggacgctcttgcgcgcaggcagtcttctccccagccttagcctggctcccatgactcccttctgcgtctgtaggcacacgcggtaaaaatattgcttcggtgggtgacgcggtacagctgcccaagggcgttcgtaacgggaatgccgaagcgtgggaaaaagggagcggtggcggaagacggggatgagctcaggacagagccagaggccaagaagagtaagacggccgcaaagaaaaatgacaaagaggcagcaggagagggcccagccctggatggagggagccccccacatatgaaaactcatccccctggtgagactgcgcgcacctcccataatgtgcgcgcgagggtggtgtgggactgcggctcgaggcgcttggattaagaagacaggattagagtgggtaacaggaagaagccccagatatactgtgccttcaagagaccaaatgttcagagaacaaactaccagctgaacttcaggagctgcctggactctctcatcaatactggtcagctccttcggacaaggaagggtacagtggcgtgggcctgctttcccgccagtgcccactcaaagtttcttacggcataggcgatgaggagcatgatcaggacagcgggtgatgtggctgcatttgactcggttgtgcctggtaaccagcatatgttactaatgcagggcgagtccggtacgactggggtaccgcgcgctggatgagccttcggagtctggagggcggttccggaagccctgtgtggtgggaccctgtggcctagacttgctcgcctcgggcacagatgtggtttcgcaaccccggccggaaggggcgcggggttgcccccccctctctgttttgtcccggggggtttgccctctctggcgccan

SEQ ID NO: 526443 - DNA, 236 bp, Homo sapiens
ccggtatcaagatcccaaaacgatctaaatatattcttcagacagggcgtggcagctgtaatacagactttggaggggaggagggcggatcacttgagcttaggagtatgcagagacaaactgtacagagatatgtctaaacccatatctatcacaaaaaaaaaaaaggaaattttttacttccctctctcaggcttaaaattaaggggggggggggcaaatgtgggataattccc

SEQ ID NO: 526444 - DNA, 434 bp, Homo sapiens
ggtgttatcttgacgctgccatgtaaccacaggcgaggcacttttcttcttgctttcggaagttgaacttggtggttctttcagaccccttatggctctgagattctaagattcacccaggcgtggtaatcccagctacttgggagactgaggtgggaggatcacttgaacctaggagtttgagaccagtctgggcaacatagtgagaccctgtctctaaaagaagaattttaaaaagcagggtgtggtagtgcatgcctgtagtcccagctacttgggaagctgaggcaggaggattgattgagccccagggctttgaggctgtagtcagctatgattgtaccattgcactccagcctgagcaatgaaacaacaccctgtctcaaaaaaaacaaaaacaaaacaacccaacaaacaaaaactccaaaaaaacg

SEQ ID NO: 526445 - DNA, 873 bp, Homo sapiens
gtgttttgtttaaatatgggaattaaaggatgatttaagaacaaagttactggtttaacgaacgctacataaaactctgggaaacgatatcagttagccaatgataatatttacggtctacttcttgtgtactgagtacatatcggtcaaatgtaccaagaaaacaagataccaaacatggaaaccccgaaagctatcacttaggaattagcaatatcacccaactggctttgaaaattgaaaatttaaataacatggtggcatgaagtacaagttgcgagtattaggcaatattgcatagtgttcctcatgctactttctgttacacctcgtatgatattagttttgaagtataagacatctgttttcgagaccaaataatacaactcttagttgtatgagagctctatcttatccatgtttatgttttccaatgcttttctgtaatacattatgtaattttcaaaatagtccttgtttaaacagcaatcagtaatgcactactaaaatatagtatgtgattaaccaatcctgcttccatatttaagcactgggaaatggaaacttaatctctgtgactacaaagggaagattctattgtgcctatggtagttccagtcactgacttgtggtctcttagaatcttctgtggctgacttcttgtattcaactctggtttaatatccttaatcttcgaacttcagacatacatttgtgtgtttatatgctcacaggtggattgagaaatcagttacatcttaagtgacctacagggtatatgttggcaaaagcagactgtgtatatgtcttataaagtagaatttatgttcagtgtgtttggaagtgtatagcatgtaaattatttcatactac

SEQ ID NO: 526446 - DNA, 358 bp, Homo sapiens
gcgtggtccttgcagatagaacattacataaatggtaccaacatgctattatcacaatgtggtacggaccacccagaatagctttagaagcaggtcaagtacattcccaataaggtgagaatcctttggaatctctatcttctctctaatttcgggtagccagttcctttaattcctcaatttctttcttgtattcaggagacgatccttcaagctccttcaactggtcgtttagtacaggcattctgttctcaatgacttccatagatttggtgaactgtgccactggcccatcatactgagagttgtacccataaaccaagcccaactggtagtgggtctctgcaaggaacccacg

SEQ ID NO: 526447 - DNA, 338 bp, Homo sapiens
  misc_feature (10)..(10): n is a, c, g, or t
  misc_feature (65)..(65): n is a, c, g, or t
  misc_feature (93)..(93): n is a, c, g, or t
  misc_feature (132)..(132): n is a, c, g, or t
  misc_feature (258)..(258): n is a, c, g, or t
  misc_feature (286)..(286): n is a, c, g, or t
gagacggagntcgctctgtcgcccaggctggagtgcagtggcgcgatctcggctcactgcaagcnccgcctcccgggttcacgccattctccngcctcagcctcccgagtagctgggactacaggcgcccgntaccacgcccggctaattttttgtatttttaatagagacggggtttcaccgtgttagccaggatggtctcgatctcctgacctcgtgatccgcccgcctcggcctcccaaagtgctgggattacangcgtgagcacccgcgcccggcttttttnagtctttaaagactactgttagataagtaatagtcaaatcttcactctgctt

SEQ ID NO: 526448 - DNA, 267 bp, Homo sapiens
ggggggggaaacccggggggggttaaattatttttcaaaaaaaaaacccaaaaaaaaaaaaccccccccctttgggggccccccccccccaaaaacgggtggggccaaagccgggggccccccccctaccaaaagcccccttaaagccccctcaaaccgggggggcgggggaaaaagccaccccccaccccgggggccccccgggggaaaacgggccccctaaaaacacaaaaccctctggggactttccccctccccccccggccc

SEQ ID NO: 526449 - DNA, 784 bp, Homo sapiens
taagtgggctggtaagcttgactttattaaagttaagcgaggtcagaaatatctggaagtcaacggggtgggcagaggccagtcccttcgtggaggctccaggagatgtcctactgggtgcctggcccagcttctccaggctggcctggtgtcggggcagggccgcgtcttcaaaggctgggctgggctctggccctgtgcttggaaagccctgtgatgacatgggggctgtatctgggacgaattctaggatcacctctccagtcttgaaattttttgtcttctttgtggaagagacgggatgtctccgtttcttggtcccctcagggtcttggggatgttgctgtcgcagtgggtcgcagatctttccgctcacttggcaaggcttggtcgcctcccgggggtgtttcacccccaattcttccttggcgcttaagcctcccctaagtacgcttgggggccggacgtgtgtggccccaagcaaccaaagcccccggggaaatgacgggagagctaaacgaaaagacgtgttggggttttcacccaattgtttcgccaatgagtggtccctggaactgtcttttgaccgctcgggtgtactctgggaccgccgtgtgtggctcaccagagtgtgtgctgggggttaccggggcgggtgtaggccacacaatgccaacccagttttttttaaaatggcgaagtgacctcctttggttgggtggggggccccttttcggggggtccggatacaggggatggccggcacgcaatttccgcgcctttg

SEQ ID NO: 526450 - DNA, 438 bp, Homo sapiens
  misc_feature (398)..(398): n is a, c, g, or t
  misc_feature (438)..(438): n is a, c, g, or t
ctactgcacaagacggcaccgatcgcgaacaaggaagctgctgccactcctaaagctgaagccaaagcgatggctctaaaggccaatagggcaacgctgaacggtgtgcaccggcactatgggatgaatatccgcacgtagcgcacctttcggtgcccgaagacactgcgactcctgagacagcccaaatatccttggactgaacgctatcagtgagaaacaagctacgaccactatgctctaataaagttctcggtgaccactgtgtatgtcatgaagaacatagaagacaacaacacacttgtgttcattgtggatgttaaagccaacaagcaccatattcaggctgtgaagaagcatgatgacattgatgaggctcagtggcatcctgattaggnctgatggagagacgatggcatgtgtgcgactggatactgn

SEQ ID NO: 526451 - DNA, 1228 bp, Homo sapiens
gggtgggcgggagagggaggggagggagggtagggggagaagggagggggagaggggggagggggggggtagtgggggatggggggtgggtgtgtgggggcaggagtgggggagggggtgggggagggggagggtgggggagggggggggttaaagtagctgtggggtggggggggggaggagggggggggggggagggcggggtggagaggtggtggtggatagagataggtggggggagtgtgatattagtgggggtgtggggaggagggggggggtggttgtgtataagtgtagatggggggtaagaggggggggttatatgtggggggctagtgtttttgtgagagatatgtgtgtagggaaaaggggttgtggagggtggagtaagggggtgtggggttgtatctggggggagagttgttgttgggggaagatagttttggttgccgcacaaagggggtgttcgctgcgggggaatacaaggggttagctatcggtggagagtggtggttttagtggggtccaataaagagatgggtatttctttgtttgttagaaagttctctcgggggcgtctttctccgcccgcggagtggttcccacggcagccactcctcccgcccgcggttttttgtttgtcgcacacgccgcggagggttctgtaaagtgtccccaccggggtggtcccgcggcgggggggcgcctctctctgtgaggggataaagagaagcctcctttgtgaatagcgacggagagggggggcgcatagcccccacacagagggggaggggacacacagatattgggcgcctctcggggagagaccccacgcggggcgcctctttgtgagaaagaagacacaccactttttatagaaaaagagtattttggtgggggacatatattttggaggaataaaggttttaagagaggagttttcttctgggggtggacacacagaggagggagatatattatgagagagagcgccagagaagatgggtggtgcacaccggtgggctgacgggcctctcccggccgccgtgggcgccccctttatttttttctcgcctgttgtggggcctggggccgaggtaatattttctctctccaccccccccctttttttctctccccccccccgctgtggtgggggcccccccatgtgagaaaatgtggcccaagttttttcaataaaacaccttgtgtggtgttgtggggccca

SEQ ID NO: 526452 - DNA, 141 bp, Homo sapiens
gaccccaaacccctgtggggcccgggttaccgtgctcctgcctgtgattccagcacttccggagctgaggcctgagaatcagttgaggccaggagtttgagaccaccttgggcaacatagtgagatcccagctctacaaaa

SEQ ID NO: 526453 - DNA, 161 bp, Homo sapiens
tgagtgtggcaggttcgccactgtgtgaggtttcctgatctggcgggtcctcatacagggctgggccatctactgctgcctctttgtcattttgctttgcggccggcttactcttcttgacctctgactctgacctgagctcatcctcggcttacgccacc

SEQ ID NO: 526454 - DNA, 527 bp, Homo sapiens
ggctatcacattatcgcatccactactgttatttgttcaagcagctgctccctcccccacttgatggtggctccaggcaggcagtgtcaaatctcaatgactcctgtgcttcctgcccacagctggagcagtaacactcaggcaaaggaaaggcctgccatccccacaggccatggaatatatcagcttttcccctgaccccaggtggggagactacttttccgaagtctaggaatgtggcagatcacccagcactctcttctttcttagaagcctaaactaatgtggctaacaaggctatacaatctgaagtggtcaaatcttacatgcttatgtaggaagacggaaagagcatgcataaccaagaagaaacacccgagagtagcacagatttacaaaaacagtgtcagggagactaatgctacatgagtggaggcttccccaaaatggtcaagacaactaaaaagggatttcaaaagttatatttggtgtgtgaataagaacaaggaagggctaggatggctctt

SEQ ID NO: 526455 - DNA, 164 bp, Homo sapiens
agagagtagtatttaaatgggtaaggaagtagagagggggccaggtgtggtggctcacacctgtaatcccagcactttgggaggccgagacaggaagagtgcttcagcccaggagttcaggaccagcccaggcaacatagggaaaccctacgcacagataaaat

SEQ ID NO: 526456 - DNA, 148 bp, Homo sapiens
cccccccgggggggggggtttttccggcccaacccctgttttttttttccccaaggggtttggggcaggagccggggcccttaccccccgtttttgttgttttcccttttgacccggcttttgggtttaaaaaccccctttttttgta

SEQ ID NO: 526457 - DNA, 877 bp, Homo sapiens
ctcagactgctgcagccctaaccttcccatgtgctcagctctttggagctgcccattcctccggctgcgagaaatggacgcgcgccctgcgtcatgggctgaagaaaagaagcaaaacttgtcgggagggtttcgtcatcatcctccttccctgcaaacctaaacctcctgcctgtgggccatccctagactagaggaaagttcctgcatgagccgaccagccctagtggatctggggcaggcatgcggcgctggctgtggaattagatctgtttttgaacccagtggagcgcatctgctgggtgctctggaagtcacctgtccgctgggcaccgggttggcgctgcccgagtggaacctgacagtttgcgagcctcggctgcaagtggcctctcctccccgcggaagtagttacagtgtcggagtgagggctgcgagtgtaggcaagttgcaaagagagcctcagaggtccgaagagcgctgcgctcctactcgcgattcgcttcttcctctaactcggatacccgtactgatgaaatcgcagacgacactacacaaaggccatccgggtcctaaccgagaccgatccgcagacgtaaggcccaggtacgcgcctatagcatcgggagcccccgagcagcggcgaaggactggcgggtggggaagggaaggatgacaggcgggcaatgcgcgaccgtaccccgaaagggccgaacctgcgacgcctgcaccgacctatgcaaccacggccaactgacttccacgggaccgagcaacaagatcgccagacagggaaacccgaaagaccaaagtcctatgaagaggcagcaatggaggttacctcagggcctaccgtcacacaagacgaagaagggag

SEQ ID NO: 526458 - DNA, 287 bp, Homo sapiens
gtttgaaacttatccatctgttgttaaatattgtaaatatttgtatatggccctattcagacctgtgctttataaatcacaaaagagctgggttttatatagtctagtctattttatttctaacgctctctgcgtaaaaagttacaaattgtctccttcaagatattttttctattgtaattttttgtatatcactgttgtgacatatccataaactatgtgacagttagctcttgactaatacttgtctatatccactttcaggtttgctatatacaaagctacca

SEQ ID NO: 526459 - DNA, 114 bp, Homo sapiens
aggtgatggttgatatatgacatgcatgacggtggcccttggatgttttaatccgctaaggagtgttgttacaactcacctgggctgaatcaactagccattgagtaaattgca

SEQ ID NO: 526460 - DNA, 266 bp, Homo sapiens
  misc_feature (41)..(41): n is a, c, g, or t
  misc_feature (103)..(103): n is a, c, g, or t
  misc_feature (132)..(132): n is a, c, g, or t
  misc_feature (194)..(194): n is a, c, g, or t
  misc_feature (228)..(228): n is a, c, g, or t
  misc_feature (245)..(245): n is a, c, g, or t
  misc_feature (254)..(254): n is a, c, g, or t
  misc_feature (263)..(263): n is a, c, g, or t
gcacttgatccctggagtcccaggttcatgttggggtagancctggctaaccgtgggacgaagggcggaaggacttggtggtcagcggatattagagtcaggnggtatcatgtcatctgtgatggagaagtnagatatcctcctcatataaaccaggctgccgtgttaagacataatccgagatgcaaagtagnccattttgttgtgtcctcagaaggctcatgattncagcaaggagggtaacntggagaacnggtggttcngat

SEQ ID NO: 526461 - DNA, 648 bp, Homo sapiens
tgaggttgctggtggacctgctctggtggtcttggatgaggccccatgatgcgcggctgcccctgtgtgggctacagcagcagcggttccgaggatgagtcctgaggacgggatgcggaccaggccgggggatggtgagcctaccgttcgtggtccagagcccccttcctcaggcagagatttccaggtacctgacagtgtgtctgaagcatgttcccggtgcaccgatggagggtgccttgaagatgacagcacaaaacacgtggggcacgggatgcgcagccttcccccacgagcgaggcaactgtggccacccacgtctatgtaccatgtgagtgatgtgtgaaagattgaagccaaggaggagttcctggatcttgcttgatgtgttgctgccccatgcccagacatatgtcccccggctggtacgggatgaagggggtccacgctcaggctgtcccagaggtgtggttcttgcggccagccactggatcctccccttcgtgcaggctctgagaagcccgtatgacctcctttccacaggtgccagaagcccatgccagaagcccaagccaaagtggcttaaacaacagagaaatttataggcgggttaactaaaagattcagaggtagcactggctcatgcat

SEQ ID NO: 526462 - DNA, 680 bp, Homo sapiens
atttcctcctcaggaatgggggttggactgtccagggaagggccagaggggtgaccccttccctcaagcctcacaagttttgtgatgcagggcagcagaccaaggcagaaagtgagcagccacgaaggcaaaagcaatgggagtggccaacagtatgttggcatgtacctttaagggtcagccaaccctgtgcccagccagacatttattaggttaggcacctcaccagagtccagccccattcattgatttagcaacagcaacagatccccctccagcagaaacaggtggtgatccagcagcagattgccatcccccccagcagcagttccagccccggcagtcccaggtcctttacacaggtacacccctccagttggggcagcagcagcagcagcaacaacagcaacagcagcaacagcagcagccgcaagcccccaccctcattgcccctcagcccccacatgtcccccctaataggaagggtccccccttcccagtcccagcagcaagcccaaaccctggttgttcagcccatgcttcagttccatttttggtttgtcctaaagctttataaaaccaaagggggtgggggtgaggtcaggagtataaggacccgccttaggccctattccttatataacaaaaaaattaaaaatttttttccccagtaaaaggga

SEQ ID NO: 526463 - DNA, 619 bp, Homo sapiens
  misc_feature (346)..(346): n is a, c, g, or t
taaaaacaaaatatttttatttagaaatttttacagctcattttatctcattacacttctccttattgaattagttaaataccttcttaatttagcagtgtcatattccaaaaggtgcgtgggtacaactctaggtggtgcctctttatagacacgaggccacgagattgttattctaactatacactctcaaactataatgtgttagtttaaagtttaggtggtgcctcaaacaaaaacaaactctctaggtggtgcctatttcgagaggagtgctctacgagaatttatagccaaacattctctataacgcgtgggatctcaagagaggagtgtgaaatgtccnccgcgggtgaaattgggagggcccaagctgtggtaagaatattttcgcaaagtgcccttcttacaaagagggctgtggagagggtatagtgtctcctttatagcgggcatgtgttcaatggggcgaggggcccactctctcaaaacagggggagacctcggagcgcttttgtggaaaagggttgaaaacactctattggggataagacatttgggaagaggggggatctgagcattcttttggggcccagaagtatccctccaattttccaca

SEQ ID NO: 526464 - DNA, 302 bp, Homo sapiens
tatgcgctacgggctcaggcgagggacctacagctcctggtgtctgccgcaccaccaggaagtgccagcgatgcagggcgtctggccttcagtgtcgtctcctccacggtgacccagctgagctgggtgagccggctgagaccaacggtgagatcacagcctacgaggtctgctatggcctggtcaacgatgacaaccgacctattggcccatgaagaaagtgctggttgacaaccctaagaaccggatgctgcttattgagaaccttcgggagtcccagccctaccgcaactggtacggcg

SEQ ID NO: 526465 - DNA, 437 bp, Homo sapiens
acaccgcaacacacggcgagctgctgctgctgctgttgtctgctgctgctgctgctgctgttgttgctgttggctcttgccgcggcgccaataactccgtctcacctggctcttagttttctcattcttcttagtccggtagtagtagaggacgcactcagccactgtcttcctctccaggaatgatgcgatcaggccatagttcttggtgatgctgcatgaacttctcccggaaggtctccttctcctgctcactccacatgttcacgacctggtggtcgttgtacaccttcatggggtcggccataagcccgttcatgttgatgaacttgatgcgctgctggtcagcgtcgtacagcatgggcgtgatcacgggcagctggcgcatctgcttctccaggttctcctgctctgagaggccatcgatgatctctgag

SEQ ID NO: 526466 - DNA, 474 bp, Homo sapiens
  misc_feature (29)..(29): n is a, c, g, or t
  misc_feature (53)..(53): n is a, c, g, or t
  misc_feature (58)..(58): n is a, c, g, or t
  misc_feature (62)..(62): n is a, c, g, or t
  misc_feature (75)..(75): n is a, c, g, or t
  misc_feature (303)..(303): n is a, c, g, or t
  misc_feature (324)..(324): n is a, c, g, or t
  misc_feature (351)..(351): n is a, c, g, or t
  misc_feature (361)..(361): n is a, c, g, or t
  misc_feature (379)..(379): n is a, c, g, or t
  misc_feature (384)..(384): n is a, c, g, or t
  misc_feature (430)..(430): n is a, c, g, or t
  misc_feature (445)..(445): n is a, c, g, or t
cacactgactgctttgaccacctcagtgnctcaagtaacaatttgtgtccctncgggncagncaacatcatcagncaacctgcttcaaggaggactgccaccagtaagtatcgatgacctcttctccgggaagtctgtacctcatcggcattgctgtccatcgtggttcgtctgtgtatcatgtatcttcgtagatgtatcctgagtcatggtgctgtgctgtggcatccggtaacagctccgtgtactgaggccccgcagctctggccacagggacctctgcagtgccccctaagtgacccngacacttccgagggggccatnaccgtctgtgtatataacgtttccggnattactctgntacacgtagcctttttanttttngggtttgtttttgttctgaacttttcttgttaccttttcagggttnacgtacatttaggtngcgtgtatgagtgagacgggctgggtttt

SEQ ID NO: 526467 - DNA, 325 bp, Homo sapiens
  misc_feature (13)..(13): n is a, c, g, or t
  misc_feature (15)..(15): n is a, c, g, or t
  misc_feature (39)..(39): n is a, c, g, or t
  misc_feature (73)..(73): n is a, c, g, or t
  misc_feature (75)..(75): n is a, c, g, or t
  misc_feature (102)..(102): n is a, c, g, or t
  misc_feature (107)..(107): n is a, c, g, or t
  misc_feature (111)..(112): n is a, c, g, or t
  misc_feature (127)..(127): n is a, c, g, or t
  misc_feature (135)..(137): n is a, c, g, or t
  misc_feature (173)..(173): n is a, c, g, or t
  misc_feature (187)..(187): n is a, c, g, or t
  misc_feature (191)..(191): n is a, c, g, or t
  misc_feature (195)..(195): n is a, c, g, or t
  misc_feature (209)..(209): n is a, c, g, or t
  misc_feature (229)..(229): n is a, c, g, or t
  misc_feature (257)..(257): n is a, c, g, or t
  misc_feature (261)..(261): n is a, c, g, or t
  misc_feature (277)..(277): n is a, c, g, or t
  misc_feature (280)..(280): n is a, c, g, or t
  misc_feature (304)..(304): n is a, c, g, or t
  misc_feature (306)..(306): n is a, c, g, or t
  misc_feature (309)..(309): n is a, c, g, or t
  misc_feature (313)..(313): n is a, c, g, or t
  misc_feature (320)..(320): n is a, c, g, or t
attcggcagagtntnagttcttatggcttcacttaaagnctgtctcaaaaatactttgctctcttcttctttntngttcatgggacatggtacctaagcaantaggngttnnggtttggtttttctnctaaaaannngctcaatacttacccaatcaaatggcatccatttgntaaaatgacaatanctanagcnagttaatgtcagtnacattaaactaactccaggnttcaggagttttaatgttagaatttagntttnacagatagagtgtggnttnatttgtccatggtagcccattctntnctnaganctcttcnagtct

SEQ ID NO: 526468 - DNA, 205 bp, Homo sapiens
ggacaacagagcaaagaccccaatctctacaaaaaatttaaaaaatagtcaaagcaatggtggtgttgtcccttgtagtcccaagctacttggggaaggcttgagatgggaaggatcactttgagcccaaggagttttgaggctccaggtgacgtgtgatcaatgccactgcactccacctggcaacagagcaagaccctgtctc

SEQ ID NO: 526469 - DNA, 158 bp, Homo sapiens
gacccatttaatattggccacaagctcagctagactctggttccctcgggctgttcacatcctactggacttctggtcccagatctcatctcagtcactgtggttggtcagaagacagtgaatcccaaacttgattagttgtgacgtccatctgtctt

SEQ ID NO: 526470 - DNA, 371 bp, Homo sapiens
cctcctgggaagggggccgctgctgtttggtgccctgtgaactgtgattgattgcctttggtcagtaatgggttcaggagtcccccccaggcccaaatggggccttgaaacgctttgtcatgctttttcaggcccatggatttgaaatgaactcatccttgctgtgagcatccaggggcccttgagaagtttatttatgattatgaaactggcaaggtccccccagaattagggtcagccttattccccttcccctcccagtgaacggtaaaaagtttcagccaagcagagggctttatttttagaagaaatatgttaccctcagaaatgatgaaacccaattttatattaaaaggcaaagatggcggaga

SEQ ID NO: 526471 - DNA, 228 bp, Homo sapiens
tggtccattaggcgcgtctgcgtgctgtagtcccagtgacttgggaggctgaagcagaagaatcgcttgaacccgggaggcagagattgcagtgaactgaggtcacaccactgcactccagcctgggcaacaaagcgagactatctcaaaaccccatattgatgtcatttcctaaatatttggttaaaaaaaattctggacgcgtctgatacgcagaacgcgcctaat

SEQ ID NO: 526472 - DNA, 122 bp, Homo sapiens
  misc_feature (83)..(83): n is a, c, g, or t
aactagccacaccccagaacaccacgttatcttacataggtccctcattcctctgtaccattacacaatcatgtatacagggnctgatgagatctgtcattcttaattagggtaccgacgct

SEQ ID NO: 526473 - DNA, 198 bp, Homo sapiens
ccagctcttactttcaggtgtttgagccactgtgacatagtttttatggtgtgaggcaggggtccggcttcattcctgtgtgtgtggccatccagctgtcccggcaccgctgttgaaagcctgtctttccctgatgaggttctcttggcttcgtgtcggaagtcgcacccatgtgggttgttcctggacctggtctca

SEQ ID NO: 526474 - DNA, 431 bp, Homo sapiens
tctggatgcaagtgtcctctgatgcaaaggtcttatgtatctggtgagtctcttgaagatggcagatacttggttgatggatttttatctattcttccattctgtatcttttaagtggagcatttaagccatttacattcaactttagtgctgagatgtgaggtactgttctattcattgtgctagttgttgcctgaataacttttctgttgttgttgttgtttgttttttctatttgtattgttttataggccctgtgagatttcatgctttaaggaagttctatctatggtgtattttgaggtttcgtttaacgatttcagcaactccttttagcatttcttgtggtgctggcttgggagtggcaaattatctcagcatttatttgtctgcaaaaagactttatctctctttcatttatgaagcttaat

SEQ ID NO: 526475 - DNA, 135 bp, Homo sapiens
gcgcatgcagtgtggggcaggacaggggtgggcttagtcatgttccaaactgtccattttcatttttcactgttgttcagcatcatggggcagtcagtgtgcattgcagtgtggcagtcagcattcaggctgtca

SEQ ID NO: 526476 - DNA, 1275 bp, Homo sapiens
gagtgctacatgaaacagtaaatgagctgacttgagtgagcgagtagcgagtgggaacaaggtccatggctcctttgtggaacactgcagcgagtcttgacattttgttgagattatgggaggttcaagtagaatgggagctatcctgctagttgccctctgcgtctatctggacgctggaccctgcacagggtccccagggcagagcattctggtgcttgtgttgcactatgagaagctagggtagtaggatcactagatttagcatatttgttaccgagctatcctgtccgtcgagtggataagaacaagtaggcgtaatgtgggcagggaatctggacctgtctctcgagattaagaggctacttgaggatacttcatatggaagcgaaatctgtgtaacaaagttgtgaacctagggctctgcgccaaagcagcgttgcactaggcgtctccgaaagcaaacacgcgcacaagggcaaggaacctcattcacaactcgcggccccagtgtccaggaaatacttgcaattgggttccattcgcgcatggacaagttgcgacaggcaaaccaagtatttaaatacccatcttgactttgtacacactctggccatctgaacctgtgataagacctctggggcacggagatattctaaataacatcagggatccatttgggccaattacaatggacaaattaatttcgacatcgatcgtaaagcttaataactactattcaacattatactacagtagcgcaggaaaacggagcagaccatcacgagctgggacacaccgatggatgaaaccacccaacgaacgaccatcgcgacaacaacgtgcaccgcgaactgcacgagagacacacatcacccacgcaaagccaaccaaacacagaaccaccaacacctctaccaaacaccaacacccacatggtgcagaaatccaaaaaaagacgaagaggaaagacaactcaccacgctggggacacataactcaccaaacacccacactcagcaagatgaacaccacactacgagcacccacgcgtcacacgaacatgaaccaaacgacaaaagcaatgcctgaacagcaccacacaagacaaaaacagccccacaaggaacgacaaactatgacaaacgacagacacaacaacatgagacagacggagacaggaaccacgcaatacgagcaacgcacgaccacgaacggaccccgcacgagcgcgacaccaagtagctcaatacaacagatgaggcgagaccgaca

SEQ ID NO: 526477 - DNA, 239 bp, Homo sapiens
ctttttaactgtttttttttttccgggaagcatagactcaggtggccctgaatacacgcccaaggttttctcttagattatgtgattttggtggggcacgggcaaaaggtgtgtgtgtgaatgtgtgcatgtgtgtgaatgtggtgtgtgtgtgtgtgtgtatgtgtgtgtgtgtgtgttggcagacttgcaaaagtgcggctgaaataataccttagatttcgaggtaagtcttccca

SEQ ID NO: 526478 - DNA, 600 bp, Homo sapiens
  misc_feature (283)..(283): n is a, c, g, or t
  misc_feature (357)..(357): n is a, c, g, or t
  misc_feature (378)..(378): n is a, c, g, or t
  misc_feature (424)..(424): n is a, c, g, or t
  misc_feature (510)..(510): n is a, c, g, or t
  misc_feature (528)..(528): n is a, c, g, or t
  misc_feature (578)..(578): n is a, c, g, or t
gaggacccctctatattccgggtgtcttataaaagatcaaaagaaggtcaggagagacagagagtctcaaatgacaggtgtccaactgaatgacctccatttcctgttctatcaaataagggatcataatatcgtgtctcacagggttatcatgagggttaaatatgatagtgcaggtaagacagtcattcttccacacagaatctgctcaacccaggagggattatttatagctttggatacctcatttcctttaaagcctcactccacacatcaacacagncagtgtcccacctggaactacgggcaaaatgctgagggtccatgagtttctctgggcctgcaaaactgtatganacctgaaaaaattgcctggcntcctacatacaaagtgaagatgctgtatctggtgttaataaacatntaattgaatgcctacataacattatatcaacctccctgacaagtatttaaatgcgtacaggatgttacgtcaagtaaacgtcattnatttttcaatgaaacatntaaaagtttttcatttgaaaataattggtaccttggcctcccaaagtgtngagattacgggcatgaatcacc

SEQ ID NO: 526479 - DNA, 546 bp, Homo sapiens
  misc_feature (229)..(229): n is a, c, g, or t
  misc_feature (303)..(303): n is a, c, g, or t
  misc_feature (324)..(324): n is a, c, g, or t
  misc_feature (370)..(370): n is a, c, g, or t
  misc_feature (456)..(456): n is a, c, g, or t
  misc_feature (474)..(474): n is a, c, g, or t
  misc_feature (524)..(524): n is a, c, g, or t
gaggacccctctatattccgggtgtcttataaaagatcaaaagaaggtcaggagagacagagagtctcaaatgacaggtgtccaactgaatgacctccatttcctgttctatcaaataagggatcataatatcgtgtctcacagggttatcatgagggttaaatatgatagtgcaggtaagacagatacctcatttcctttaaagcctcactccacacatcaacacagncagtgtcccacctggaactacgggcaaaatgctgagggtccatgagtttctctgggcctgcaaaactgtatganacctgaaaaaattgcctggcntcctacatacaaagtgaagatgctgtatctggtgttaataaacatntaattgaatgcctacataacattatatcaacctccctgacaagtatttaaatgcgtacaggatgttacgtcaagtaaacgtcattnatttttcaatgaaacatntaaaagtttttcatttgaaaataattggtaccttggcctcccaaagtgtngagattacgggcatgaatcacc

SEQ ID NO: 526480 - DNA, 592 bp, Homo sapiens
gtatgagctggatggaatcgatgtgcttcttcagcagttatccgtgtttacaagaccccatcccagacggctgagagcaagagatgatggagaatctgtttgattccctctgctcctgtctaatggcttagttacaatcgtgagcgcttcctggaaggggcgaaggtcttcagctgattgaatctcatgctcagggaaaaaagaagatctaccgggagcagtgccctgaaagtgtttgaccatgccatgataggccccgaaggaacagacaactgccataagtttgttgacaattcttggcttacgaaccatctttcccctctttatgaaatctcccaggaagctcacgaaagtgggaaccactgagaaggaacatgaagagcatgtctgttcgatcctggcttccctcctgcggaacctgatagggcagcagcggacccggcttctgaataaattcactgagactgacagtgagaaggttgccagactaatggagttgcatattaaatatctggatacaatgccagtggcggacaagaatattgccggggaaaaacactgacatggtccggcgaggagagatcatcgacaa

SEQ ID NO: 526481 - DNA, 388 bp, Homo sapiens
ctgagacttaagtttggacactttgtcctaggtcatgcagctgactacatttaggaactgcgaatgttcatttatgtaaatacttctgctttagcagtgcctcttccatgaggtaatgtgtgtaaaagctttcttgtagtagagccatataaccacgaagcattgttattcattttgctggacttttggctccatccagttcagcctgcagcatttagggagtccaggaaggggtgagggcagtaattaaagcctaaaggcccaatggcctgtcggaattccctgtctattctggttccctctccgaggcacctccagattttatcttctaccaaatagagagtttgttcctcagaagttgcaggatgtgggcggttatataaaaaaa

SEQ ID NO: 526482 - DNA, 112 bp, Homo sapiens
ccccgggggccgggggctttttggggttggccctcttgtttctttccccgggtcttttttccgggccctcggggggccccttggggggggggtgtggggggggggtttcccc

SEQ ID NO: 526483 - DNA, 170 bp, Homo sapiens
ggtagatttacgggggctattattaccacagtacaaccagcctatgaggattattatagaattccagataacttgtaactgtggccaaaggggtagctggctctttagccctgtgaaaaattatgaaatggaaaagttcatttatatggttagattttgtgcccccaccc

SEQ ID NO: 526484 - DNA, 254 bp, Homo sapiens
cttttggggtctttgctctgaaagggatggcttttgtgaaacattcaactgagaattaaactgtaaacaaggaagtaagaagggcccagttcctcttctcagtggcaaaagtcctccaagctccacattccatgtttttgaaccaaaccacttggcagtattcctgggaattcttcaaattatcatctgttgagtggatccagggcccagaaagcacctgggccacaggagggactcaataaatatttgttgaa

SEQ ID NO: 526485 - DNA, 1019 bp, Homo sapiens
aacgttaccatggtaacgtaaatcaatacaaaggactaccatctctcacactatcgagctgctggatcagggcttcagagaacctgagcggccaccgacacaacacaaccagagactgcacatgccaaatggacagacctgatcagaagcgagctagcgaacacagcataacaagagagatagacagcaagagacagatcaatggcaaaaggtgagtaactcgctcactgtgcaatcacaataaagactgagatatacgtcgacaacacaatgagaaagtaactgacacgcaacgacgaatagcaaatcacacagtatggtaagacaaaaataacacaaaacacattaaccccgagaggacagagagcaagcaaacaacacaattagaagaagtacacggaacaaggcgaagaaacacaacagaagtaccaacagagaatacaacgcagaaagactaaaagcgccaaactgctttggcaaaaccacaaacagcacaacgaacaagcgaaaaacgcacaagagaaagaagaagacgcagcaaatactccagagaaagcgaaaccaccgcacaggaaaaggacggttaagcagccacaaaccgacaaacccacaatgaataagaaacacacacgaaagagaacgagacacaccattaagaaacagaaagactactccaagaacaaataaagcaggcacacgtagcacatagtgacaaaacaagaccgaaacacaacacaaagcatggaagacaatgaaacccaaatgaaactacagcccaactgaatcgaaaaccaccataagaacacaagaaggagcgaacaaaaaacaaaaaccaagcagagccaacaaagaaagcctaaaccaccaaaagcaccgacaacaaagaggagaaaccacatccacacaaaactagaaaatcacagcatcacaaactacgcaaaccaacacagcaaatacagatgaaaacaaagaaccaaagagaacgcatcacacagaacaaaacgcagcagaaccaacac

SEQ ID NO: 526486 - DNA, 114 bp, Homo sapiens
ccgacttatctgctgttgtatctttcttccttccttccttccttccttccttccttccttcctttcttcctttctttctttctttctttctttttgcgcccgcagtctcccttc

SEQ ID NO: 526487 - DNA, 112 bp, Homo sapiens
tcagtttcccgaattgaggcactgcatcggtacgtcttacttggacttacgaagtatgtcatggcacacacattcagcagtaccctgaagagcaagaaactggtcagacaat

SEQ ID NO: 526488 - DNA, 1056 bp, Homo sapiens
cagagtgacttggtttctccagaaactggaagcctcatgggctgaggaactgcctcccacccacagcagagccctggcggacacaatcccttttcctcatggctgccctgactctctgaagtggcttggggttctgggctgactgtgggggacacatggccatcttgagcatcacacagaccggcgggtcctgctgcagtcctgtccttcctgtagtcttcactccacagcctcactccacagtgagtgaccctcactggacaccctcactccacagcctgcaacctgaggatggggtgtccgcctgagcacagcatcgggggcctggccccagcagcgggtcctggatgtgctgagattgggctgcctgggttgacctcattgggaggaggtggggacggcaggtccagctgcgtactggggaccctgctgcaagccctggatgtggactcctgagtcagttctttgccttcctgtggtctttttccggcactcacatcgcccaccaaggcctgggtgggtgagaacagtgcccacaaggagaccctgagtaacagagactcacagcccatccaggtctctgggcaggaaattgaaggaatcatcacattttacagaggaggagactgcagctcagagtgggggaagtgtgtgcaccaggccacaggcaagtctgtccagagcactggtaggaatgagggaaactaggaatgaccactttaaaaagttagatgagaagaatttcaaggccgggcgcggtggctcacgcctgtaatcccagcactttgggaggcggagatgggcggatcacgaggtcagaagattgagaccatcctggctaacacggtgaaaccccgtctctactaaaaatacaaaaaattagccgggcgcggtggcggacgcctgtagtcccagctactcgggaggctgaggcaggagaatggcgtgaacccgggaggcggagcttgcagtgagccgcgatcgcgccactgcactccagcctgggggacagagcgagactccatctcaaacaacacacacacacacaaaacaccc

SEQ ID NO: 526489 - DNA, 1185 bp, Homo sapiens
gctatggggctagtcttctctaaaggccagccagtgccatcctcgtcgctgagagcgagtacacgctctcagaacggcgacactgactgagcgaaatgacccttcgggcgtcatcctcaaggggccacaaagcggatgggataagcccagatccgctaagctatccccggcgaggtttcccgggagcggagtgactgcctctcgcgcgctcgtcgtacgatagagacctagtctagtcgacttgtggaaatcgtgaacagggattgaggacgcacatcatatggaaggttgcacgagtcggtgatctgcgggcggtcactcccacgtgttgccttaggtgactggtggttattgtccgtcagagtggtgcaggtgtctgtgccgtgcttcaggactccctggggaatggtacaaccgctgtcggcgctctggggattctcagcaacggggtcacccgacctcctgaggtggtaactttgctcggggccattaccaggggactgtgtgtgagtgtggccttcggtcctgctgagcaatccgggagattgtctctggatctcgagataaagagcatcgaagctatggaataccctggggtgtgtgcaaatacagctgtccaggatgagagccactcagagtgggtgtcttgtgtcccgttctcgccaaaagaggaacctatcatcgtctcctgtggcttgggacaagctggtcaaggtatggaacctggtaactgcaaggtgaagacaacacattggcacacaggctatcttgaacacggcgaatggtttccgaatgatcctctgtggtttgggggcaagaaggccggccagttgggatccacgaagggaaccctttacacgccagggggaaaaaaaagccggttgccacaccagggtgtggcgcccaatgttagagaccgaagtgtaacaacacatcaagacgcccgtcgcttgatcttgcttgacatgatagtaacaaaaaaccgcgctctgataccgccgagccagtgcacgacaacaaacattcgacgaccatacaccatacgaaaaaccatcatcacaatgaacacacacaacaacacaccaaagccaaacacacaccaccatacaacccacacgcaacacaatcgcaaacacaacaacacacacgcacaccacaggcaccaacagacaaagcaaagccacg

SEQ ID NO: 526490 - DNA, 142 bp, Homo sapiens
gttagcatcggaactccaattttaggagcagggttgtgtgttggatttgacatagatgagacgcatttggaaatattttcataggaattccagaagaggtttgagttaacacaatatttgacataggttcacatgtggatgt

SEQ ID NO: 526491 - DNA, 182 bp, Homo sapiens
ccccggggcccttttgggggttccccccccccccccggggcccccccccggtttgcttggccttttaattttcaaagggccccctgccggggcccccccccctttcccggggggggtccgggggttgggggggccttttttgggcccccttttttttttttgggggttttttttttccccca

SEQ ID NO: 526492 - DNA, 310 bp, Homo sapiens
  misc_feature (15)..(15): n is a, c, g, or t
  misc_feature (29)..(30): n is a, c, g, or t
  misc_feature (56)..(56): n is a, c, g, or t
  misc_feature (67)..(67): n is a, c, g, or t
  misc_feature (75)..(75): n is a, c, g, or t
  misc_feature (88)..(88): n is a, c, g, or t
  misc_feature (96)..(96): n is a, c, g, or t
  misc_feature (106)..(106): n is a, c, g, or t
  misc_feature (119)..(119): n is a, c, g, or t
  misc_feature (124)..(124): n is a, c, g, or t
  misc_feature (135)..(135): n is a, c, g, or t
  misc_feature (141)..(141): n is a, c, g, or t
  misc_feature (165)..(165): n is a, c, g, or t
  misc_feature (183)..(183): n is a, c, g, or t
  misc_feature (189)..(189): n is a, c, g, or t
  misc_feature (192)..(192): n is a, c, g, or t
  misc_feature (235)..(235): n is a, c, g, or t
  misc_feature (239)..(239): n is a, c, g, or t
  misc_feature (243)..(243): n is a, c, g, or t
  misc_feature (250)..(250): n is a, c, g, or t
  misc_feature (254)..(254): n is a, c, g, or t
cgctctagaactagngatcccccgggctnnggaattcggcacgaggtcagggaggnggggccaaggntgtcccanattcccaacaccnccctctgntcaccatggnaatctttggactnagganagggccaggtncagggntctccctcctctccccttcgctgncccctccccctggagggnatggtntcngggggtggcactgagctatgagtcccggggatggtgaggaacnccanaganagagccncccnaggagtgagtatagtgctggtgactgtgtttcatagccccagtccagggctgtcta

SEQ ID NO: 526493 - DNA, 202 bp, Homo sapiens
tactccatgtatgcggcgtgctagcttggatgtcttttggctaaattgtaacacgtaatggcatggatagcacacaggttggtgtctacaaacaaggccaaccatgataggcctcactacgcctcctagcaacagcaccgatagcttgcgctactggaagcgcagtatcttgttttaaatgtcctagagcacatatactctg

SEQ ID NO: 526494 - DNA, 660 bp, Homo sapiens
  misc_feature (13)..(13): n is a, c, g, or t
  misc_feature (141)..(141): n is a, c, g, or t
  misc_feature (284)..(284): n is a, c, g, or t
  misc_feature (287)..(287): n is a, c, g, or t
  misc_feature (289)..(289): n is a, c, g, or t
  misc_feature (302)..(302): n is a, c, g, or t
  misc_feature (304)..(306): n is a, c, g, or t
  misc_feature (308)..(308): n is a, c, g, or t
  misc_feature (310)..(312): n is a, c, g, or t
  misc_feature (314)..(315): n is a, c, g, or t
  misc_feature (318)..(318): n is a, c, g, or t
  misc_feature (320)..(322): n is a, c, g, or t
  misc_feature (325)..(326): n is a, c, g, or t
  misc_feature (330)..(331): n is a, c, g, or t
  misc_feature (336)..(336): n is a, c, g, or t
  misc_feature (338)..(338): n is a, c, g, or t
  misc_feature (345)..(346): n is a, c, g, or t
  misc_feature (349)..(349): n is a, c, g, or t
  misc_feature (353)..(354): n is a, c, g, or t
  misc_feature (363)..(364): n is a, c, g, or t
  misc_feature (366)..(366): n is a, c, g, or t
  misc_feature (368)..(368): n is a, c, g, or t
  misc_feature (370)..(371): n is a, c, g, or t
  misc_feature (374)..(375): n is a, c, g, or t
  misc_feature (381)..(382): n is a, c, g, or t
  misc_feature (390)..(390): n is a, c, g, or t
  misc_feature (392)..(392): n is a, c, g, or t
  misc_feature (403)..(404): n is a, c, g, or t
  misc_feature (406)..(406): n is a, c, g, or t
  misc_feature (408)..(409): n is a, c, g, or t
  misc_feature (419)..(419): n is a, c, g, or t
  misc_feature (424)..(424): n is a, c, g, or t
  misc_feature (427)..(427): n is a, c, g, or t
  misc_feature (434)..(435): n is a, c, g, or t
  misc_feature (439)..(439): n is a, c, g, or t
  misc_feature (447)..(448): n is a, c, g, or t
  misc_feature (516)..(516): n is a, c, g, or t
  misc_feature (539)..(539): n is a, c, g, or t
  misc_feature (626)..(626): n is a, c, g, or t
caactcccctggngagcagaggctcagcaatgagtgacagttggtcaccaaatcagcattgtttagacaacttaatcagataaatattttaaaaaacataatcaaaagaaggcacagaggccagggggctacatgggaacngcctattgttcagctccgttttcacggaaaacatgtctgagccaaggcagctcctacattgggtcccccaggataccccggtctcccaaataaatacattcatctgtaaataaataaataataaataaataataaataatcanaantnaaaaaataaatanannnancnnncnncancnnnccnnatcnnataantntataaannaantctnnaaaaatctnnananannaannactaanntaaacttntntcaatttctanntnanntcttttcaantcctncancattctnncaanaaaaaaannataaatggtataaagattaaagatgtaagggataaaagatgtaggaaagagtgagtaatggaggaaanagtttgaattattagtggttganagaaattaaatgtgaaggaaaaacattaatgaataaaaggtttagaagtggtggtattgttgattaaagttataagattgggttaanaaaataagccccaaattatttttttgagccagaa

SEQ ID NO: 526495 - DNA, 155 bp, Homo sapiens
gtggcacatagtctctgagaagacgcagaaatgaggcgggtaatctgctgatccatatgtttacaactggacagcatggtcagaggacagtgactggggaaaatggtatcggccaaaggcatcataacgtcttccctgatgggaaagcttttcct

SEQ ID NO: 526496 - DNA, 503 bp, Homo sapiens
gaagaacgcggcctgaatgaagcagagccactgcagtgggtccctaccaggcatgtaatgaccgttggggacagctgcaacaggatatggcttgatcatgccaagagacccatctggcctggatctcttcttcagatatcccttccagtcccctgaccctccagacctcagcctcaacggagcagccaacaagaagcaccggctaggtcccatttgtgaatcccgagaggacccgctgcacactgcaccgtcagaaggcagggatcctgactgctgccagggaagggacagctaatccctttggtggctcaggccaccagcaactaggtgagcacaaaaagcagcgttgtgacttctcgggggcagagacaatgaaggcaagatgggggccaatgggtttgggacactcattgttgctcatccgaatagctttctttgggtgcttcctgtgcgctgactgcttctctcgatgcccttacaaaaaagagcaacttaaggcaggt

SEQ ID NO: 526497 - DNA, 213 bp, Homo sapiens
agcggatgctgtatccacggttccaaaaggagctagaagtcgatgccactcaccccgcagagaccactccttcttggtggacgagttggacaccctccatcagtctgtccccaggatcatccagaacattggtacagagtttaactcacagcctcggaactgaattccgacgcaggccgacgacccggcacgtgctgctttactaacctgacg

SEQ ID NO: 526498 - DNA, 387 bp, Homo sapiens
gggacgaccgaaaagcatttgtagagcgtcatgcgcttcaggatgatcaaggcaatcggctaaatgtcacgcttagtcggctgcgaaagactatggaaagccgtttgtggaaactgagcggtggcgacattatagaagtttcctccgttatgggtcatacccctggtgtcgccgataatcactatttgaagatcaacgatgagatcaaggtcgacggggcgacatttgttggggaggcttttccggacaaactacgtggcataaacgttataccaaccccaccaggcggctgcaaagatagcctttacggtagtctggcaccaaaggatggcgtcaatcattgttctgaattcatccactgcctcggttgccctagctatgcaattg

SEQ ID NO: 526499 - DNA, 280 bp, Homo sapiens
  misc_feature (60)..(60): n is a, c, g, or t
gatctaaaggatcccggcagtctgatggtctggtcatactgcagctctaagtatagcttnatcagctggcagaatacactcacacctacacctcctggtcctacagcgctattctactcccgtcggatgtggtgattgaggtggagagcattaaactgtctgcactgcactggtggctttgtgtcgttactgggacgacccttgtgtgagtgatctccaggcggggctggagtgtcacagggaggctgccaggccctacatgcccccgatacagcgacca

SEQ ID NO: 526500 - DNA, 364 bp, Homo sapiens
ctatatcgcaaaactgaaactctatacccgttacacagtaactctgtatttctgcgtctcccgagtcgcctgtatcaaccatcatttttctgttcctagggtttgactactctagatacctcatgtaagtgaaatcatacagtgtgtgtgactggcttatttcacttcaacaacaaaggctcatccatgttgtagcatgtgccagaatttccttctgtactaaagctgaatgatataccattgtatgtgtacaccacatcttatttttccatccatttgtccatggacatatggattgcttccatcttaagactattgtgaataatgcttctgtgaatgtggatacacctcttaatgatccacg

SEQ ID NO: 526501 - DNA, 351 bp, Homo sapiens
tcgcgtacaagaagcatgaattatacgaggccttgcttaatacacatttcgagtggaatacgaacagaccagtggagtgactggtatactactactaagtctagtaacaatatacaatggcttgtctacaaagaagataaagcatgtaaaatctatttctatttattttctttgtcagtagaaaaggaaacatcccatctcagtttgctgttggaatgtttgcttcaacccctcatactagtcttgtgcatgaccatagtactcagccctgtaaaaattaattactgagtacagtaggaaagctgatgggaatgtgtatcaatacagtggcaccagcactatacgagcaac

SEQ ID NO: 526502 - DNA, 334 bp, Homo sapiens
  misc_feature (227)..(227): n is a, c, g, or t
atgtcattttactgttctgataaatgcataatgcaaaaattcccatggaaagaaaaatattaagaagtgttagcaatctgaaactatgtgctagtggttagctagtgtttatgttttggtgaacatccttttagacaattttctatgcaacgttagataaacatagaattgtacacgtatgattttgtacccatacattttcttctgtacctgcctttccactcaanagtgttttaaagccatctttctatgccactaaatacagtttttcttcctcattttaagtgacattgtagcatcctgttgttggctgtcttgaaattaattaaataaa

SEQ ID NO: 526503 - DNA, 359 bp, Homo sapiens
ctgagatggaatctcactctgtcacccaggctggagtgcagtggcgcaatctcagctcactgcaacctctgcctcccggatttaagcgattctcctgcttcaacctcccgagtagctgggacgacaggcgcgcaccaccatgcccaggtaatttttgtatttttagtagagatggggtttcactgtgttagccaggatgatttcaatctcctgacctcgtgatccacccgcctcagcctctcaaagtgctgggattacaggcgtgagccaccacacccggccaaagcttttaatttttaatggtcctccaataaatacattataaagtttcaaaccattttggggtcagttagttttga

SEQ ID NO: 526504 - DNA, 284 bp, Homo sapiens
gattgctagaaactagaagcacttgcacggtgtggacagagcctcagctggatgagacggctagcgatgggtggacagcttgtataccagtccctgaactgagctgtataacagggactggggaggctccacccagaaggcttacatttgtactctgctgggagtgacagggaaaaactccttccctgctgctgcagtggcagcagaggctcatcctggctttgcacccaccagtccgttgcagcacagcctcccaggagcaagccagggcacaagcacagggt

SEQ ID NO: 526505 - DNA, 178 bp, Homo sapiens
tagaggatccacttcgacggtgttctgaatactcgaatggtagaaggcatggtacaacaaaacaaaacacaaaaaacaggtattagcacttcttaatagttccttcacatagggccctttcaattttctgacagctcttgcctatctcatcatgtcactttatctaggacttcacact

SEQ ID NO: 526506 - DNA, 172 bp, Homo sapiens
tccgttcgttgctctcgttggtgaagacaagtggtagatagggctgatcctcacgtcgtactagggcccttgagcagcaggaaggagcactccagcggtgccgtgaccttgctcttgaggaggagctggggacagagcctacagaaggagcccggatggcagttcttcttct

SEQ ID NO: 526507 - DNA, 237 bp, Homo sapiens
tccagtacccgagcatgcttgtcatggcttgtcgggtcgacgtgtattcagctactggggtgcatgtcctccctggacaagtaccgtcgacacgtgagcaccgttgctgagctccaaatatcgttaagctggagcctggtcgacgtgtattcaccactgcggtgcatgcctccctgtactagttccgtcgacacgtgagcaccgtgctgacctccaaatatcgttgagctggagcct

SEQ ID NO: 526508 - DNA, 570 bp, Homo sapiens
ggcacgagtatttttagtagagtcagggttttaccatgttggccaggctagtctcaaaacccgacctcaaatgatccacccgcctcagcctcccaaagtgctgggattacaagcgtgagccaccacgtgagccaggggaagtttttaaatttaccactttttaacaattccatttaggaaagttcagttgagctgttggacttggacaactttgtacctctcatctttgtccttgtcatctagtcattacctcctaagcagggacatcatgggtgtcatgaagcattcatgtgtgatggcatttctttgcttctcatttcttcatgtgtttgacatttctcctagctccaaactgggccagctacctttcctatgaaatctagcagtagctgtgggattgacgtggttgctcttttcatctttttagattacccattgcttctctcgaaatcctagtacatgatttttttttatcctatgagcagaaatcaggaaaaaacagattctacatagaatttgacagatattatttcaggccaggtgtggtagctcatgcccgcaatcccagca

SEQ ID NO: 526509 - DNA, 234 bp, Homo sapiens
gcggccgcctactactactactgctcgaattcaagcttctaacgatgtacggggacatggcaaaaacctgtctgtacaaaaaatacaaaaaatagccaggtgtggtggcaggcacctctggttccagctacttggaaggctgagatgggaggatcacttgagcccagaaggcagaggtttcagtgaactaagattgcaccattcaactccagcctgggcgagagtgacaaaaaa

SEQ ID NO: 526510 - DNA, 128 bp, Homo sapiens
tcaggctattggttagaatgagtaggctgatggtttcgataataatctacgctataggaggatacagcggtgtacagtgtgccttgtggtaacgaagtgggctaagagcattttcaatgcttcagagc

SEQ ID NO: 526511 - DNA, 927 bp, Homo sapiens
  misc_feature (682)..(682): n is a, c, g, or t
  misc_feature (701)..(701): n is a, c, g, or t
ggcaggagaactgcttgaacccaggaggcagaggttgcagtgagccaagatcccaccactgcactccagcctggtgacagagtgagacttcgtctcaaaaaaaaaaaaaaaaaaaaaaatgacatgaatatacttcacacaactgaactgtacacttcaacacggttagatggtaattatcatcttataagtattttaccacaggttaacatgtttcacaacttgaaaaggaagtaattaccttcagctctctgagttctagaatttgtaacatttcatcccctgctccttcctgatctgcactggagcatcttccttctgtccctgctctactcagagttcactttcccttccctcacatcagcttcattgaggctggtttgaacttaacgcaaaacattctcactaatgactgaattcccaccaagatttccatattatcacagtatgcttttaatcttctaagatattaaatatttcttctcatcatagctaaaatgcaatgcaaatcccatctcagatgtgggtcagatacctatgaatctcctgaggtggtcattgaaatgacttttttcttgagacagagtgtcactctcaaccatgctgaagtgcagtggcgctaccttggctcacggcaacctccacctcccagattcaagcgattcttgtgcctcagcctccnaagtagctgggattacagntgtgagctaccatgaccattctggccaagaatgagaaatctctgtggaaggagaatactgggattcctgaggaggtttccgctatagataactcacatctccctccctggggtccaggccatgggtgtggcttgggcagaggtcggagaggccaggtgtgccccggcctgagatccgcctcagggagagagaaagggcagtctcttcaccacgtaatactacccga

SEQ ID NO: 526512 - DNA, 329 bp, Homo sapiens
tgaattagagaaggaacaggtggaaaatggatggcaacacacagagtccgggggacacacggccttatagatgaagtgaacgagtagacactgaataggatccacgctaaatgaacggtccatttcaaactcattcacatcccaaacggaggttcatctgtcttctggttggtgacagttatattctattaggagtcttattttatatgcattatcattacaaagtagataggttctaggcgtaccttattctttacttgtggtttactcatcagttatgaataaggcataccttagaaacttgggttaccaaatataaacgatggaat

SEQ ID NO: 526513 - DNA, 769 bp, Homo sapiens
  misc_feature (682)..(682): n is a, c, g, or t
  misc_feature (701)..(701): n is a, c, g, or t
ggcaggagaactgcttgaacccaggaggcagaggttgcagtgagccaagatcccaccactgcactccagcctggtgacagagtgagacttcgtctcaaaaaaaaaaaaaaaaaaaaaaatgacatgaatatacttcacacaactgaactgtacacttcaacacggttagatggtaattatcatcttataagtattttaccacaggttaacatgtttcacaacttgaaaaggaagtaattaccttcagctctctgagttctagaatttgtaacatttcatcccctgctccttcctgatctgcactggagcatcttccttctgtccctgctctactcagagttcactttcccttccctcacatcagcttcattgaggctggtttgaacttaacgcaaaacattctcactaatgactgaattcccaccaagatttccatattatcacagtatgcttttaatcttctaagatattaaatatttcttctcatcatagctaaaatgcaatgcaaatcccatctcagatgtgggtcagatacctatgaatctcctgaggtggtcattgaaatgacttttttcttgagacagagtgtcactctcaaccatgctgaagtgcagtggcgctaccttggctcacggcaacctccacctcccagattcaagcgattcttgtgcctcagcctccnaagtagctgggattacagntgtgcaccatccacactgaggtaattttgtatttttagtagagatggggtttgccatgctggccaggg

SEQ ID NO: 526514 - DNA, 588 bp, Homo sapiens
tcctgtattccagtccagaaagccaaagtgatagtaggacatacctcacttggtttcattctctcagggatcacagtcgcatactcactgatttcattgtctgaaaacaatttttttcatgtattttgttcagtttttctaattgtttatagcagaaggccaagtctagtaccagttactccaacatgtgaaaagaattttacttttatagttttctgattttacattttttactttatagatatacagtatcacctgcagtaataataacttattatttctaatattttctttttccccccaacacaacgcggtgtgtagttagttatcttgtctaattcattggctagtacttccaggacaatgttaaataatagtattgatattttcctggtatttttctgtaagggtagatgggacaacattttaaagggaggccgggcatggtggctcacacctataatcccagaacttgaagctcaggcaggtggattgaagaatcacttgggcctgggtggtggacgttgcagtgagccaagatcgcacccctgcattctagcttgggctacagagtgagattccatctca

SEQ ID NO: 526515 - DNA, 472 bp, Homo sapiens
ggcaggagaactgcttgaacccaggaggcagaggttgcagtgagccaagatcccaccactgcactccagcctggtgacagagtgagacttcgtctcaaaaaaaaaaaaaaaaaaaaaaatgacatgaatatacttcacacaactgaactgtacacttcaacacggttagatggtaattatcatcttataagtattttaccacaggttaacatgtttcacaacttgaaaaggaagtaattaccttcagctctctgagttctagaatttgtaacatttcatcccctgctccttcctgatctgcactggagcatcttccttctgtccctgctctactcagagttcactttcccttccctcacatcagcttcattgaggctggtttgaacttaacgcaaaacattctcaacaatagccctcttcccaccaggcttttttctgcataacccctccccaggaagagcgtggccagaag

SEQ ID NO: 526516 - DNA, 409 bp, Homo sapiens
aacctagtctctctaatgagcatacttattacaggctccatctagactaacgagagagagagaccttaaatcgatgcattgcatactctatcaatcagacacatagccctcgtagtaacagtcatactcatccaaatcccctaaagcttcaccggcgcagtcattctcataatcgcccacggacttacatcctcattactatactgcctagcaaagtcaaactacgaacgcaatcacagtcgcatcataatcctctctcaaggacttcaaaatctgctcccactaatagctttctgatgacttctagcaagcctcgctaaccatcacttaccccccaatattaaccaactgggagaactctctgtgctagtaaccacgtactcctgatcaaatatcactctcctactta

SEQ ID NO: 526517 - DNA, 1118 bp, Homo sapiens
ggcaggagaactgcttgaacccaggaggcagaggttgcagtgagccaagatcccaccactgcactccagcctggtgacagagtgagacttcgtctcaaaaaaaaaaaaaaaaaaaaaaatgacatgaatatacttcacacaactgaactgtacacttcaacacggttagatggtaattatcatcttataagtattttaccacaggttaacatgtttcacaacttgaaaaggaagtaattaccttcagctctctgagttctagaatttgtaacatttcatcccctgctccttcctgatctgcactggagcatcttccttctgtccctgctctactcagagttcactttcccttccctcacatcagcttcattgaggctggtttgaacttaacgcaaaacattctcactaatgactgaattcccaccaagatttccatattatcacagtatgcttttaatcttctaagatattaaatatttcttctcatcatagctaaaatgcaatgcaaatcccatctcagatgtgggtcagatacctatgaatctcctgaggtggtcattgaaatgacttttttcttgagacagagtgtcactctcaaccatgctgaagtgcagtggcgctaccttggctcacggcaatcccaaagtgctgggattacaagcgtgagccaccacgtgagccaggggaagtttttaaatttaccactttttaacaattccatttaggaaagttcagttgagctgttggacttggacaactttgtacctctcatctttgtccttgtcatctagtcattacctcctaagcagggacatcatgggtgtcatgaagcattcatgtgtgatggcatttctttgcttctcatttcttcatgtgtttgacatttctcctagctccaaactgggccagctacctttcctatgaaatctagcagtagctgtgggattgacgtggttgctcttttcatctttttagattacccattgcttctctcgaaatcctagtacatgatttttttttatcctatgagcagaaatcaggaaaaaacagattctacatagaatttgacagatattatttcaggccaggtgtggtagctcatgcccgcaatcccagca

SEQ ID NO: 526518 - DNA, 130 bp, Homo sapiens
ggacctctgtgacttggtgaacaagacgacactgcctgcctggaacggccattggcgtggaaagctaaccaaagggtctctctacctacagggcgaagcgcacacctagcgctgcgcacacccgctcccc

SEQ ID NO: 526519 - DNA, 894 bp, Homo sapiens
ccaacaacctcatggctaggtgcgaggcttgggtgtgtggagtgctgctgctgcctgctgtgcttccccagtcccctgagtgccccgccgtgccccgcagagcgggagtgggacccagccctagtgcatgaacccagtgcgccgcagccctgggacgcccgcggagagatgccactcccgcccacgtcccattatctgcccctcgactgtcctggagtccccgatatgccagatctaaccatgagctaccctgttgctatacccccgcccccaaggtagggctaacctcaccagctgcaccaggtaggtggtccctgtgtgtgagtgtgcttgcctaccctcctaccgcccatgcattgccccgccatcggggctggactaactgtggtgccacctagtagcgtgtggcaagtatcaaccacgtgactatctctctgagtgaactaggcgtgccaacactagtctagggacaatttagtgacgtgacgccaacagtagcccaagcctagtaacccttgaagagccccttgaggagactaggcatagcgcacgacccatgttgcccccaatgtgctgagcgtattagaggagctaagcacccccccttcattgcacaccagacacgaccctggtaaccgtacccctaataggagatagtagttcccaagcgccccccaggagtgacgggacacaccccccgacacccgcttcccaagatcaattgcccctatccaagtaattcccatggccacaataaccgcatagaggatggcacacccatatagcccatggggacctagtcaccccatacgcaggcacccccggtagacgagcctagaccacaccgcaaggggccctaccgcctggctgcaagtcagacgaggtgtaccaacc

SEQ ID NO: 526520 - DNA, 126 bp, Homo sapiens
atgcgaatactctactattctatctgcttccttgagatcctgtgtattggcctgatgttttaatcgagagagtctcactccatcgcccccctgaagattgttggtggccctgaagattgttggtgg

SEQ ID NO: 526521 - DNA, 673 bp, Homo sapiens
ggcaggagaactgcttgaacccaggaggcagaggttgcagtgagccaagatcccaccactgcactccagcctggtgacagagtgagacttcgtctcaaaaaaaaaaaaaaaaaaaaaaatgacatgaatatacttcacacaactgaactgtacacttcaacacggttagatggtaattatcatcttataagtattttaccacaggttaacatgtttcacaacttgaaaaggaagtaattaccttcagctctctgagttctagaatttgtaacatttcatcccctgctccttcctgatctgcactggagcatcttccttctgtccctgctctactcagagttcactttcccttccctcacatcagcttcattgaggctggtttgaacttaacgcaaaacattctcactaatgactgaattcccaccaagatttccatattatcacagtatgcttttaatcttctaagatattaaatatttcttctcatcatagctaaaatgcaatgcaaatcccatctcagatgtgggtcagatacctatgaatctcctgaggtggtcattgaaatgacttttttcttgagacagagtgtcaatttggtggcccaggttggagtgcaatggcacaatctcagctcaccacaagcttttcctgctgggttcaagtgattctcctg

SEQ ID NO: 526522 - DNA, 318 bp, Homo sapiens
gaggttgcgcgagcgcggcgggacagactccaggcaggcaggcaaagggcacgagggttggacacgaagccagaaagctacttgggttcctccttcttctcgtttgccataaatctgcttctggtgcatgatctccgtgtcccatctgcttgcgaggtgtgaactctcggcgtgtgcagcaacaacttcgtccattgtgacctgcaacaatttcgtccactcggacctttagctcatggggtatggtgcctcggcgtgtgctgcacacgccgaaaatccagaccccttggtgacacagatcgtggtggacgaagtagt

SEQ ID NO: 526523 - DNA, 122 bp, Homo sapiens
actgaacagcggtggggacgcggtaacggggaacgggcccgaccgacggtcagtactgggaacgccgaaggtgggaggcatttcataacatttcttgtagatcaaaccagcgtggacacctt

SEQ ID NO: 526524 - DNA, 1013 bp, Homo sapiens
  misc_feature (188)..(188): n is a, c, g, or t
agcgtgggggagtggggagagataaggcgctgtcatggacggacgccgccgccgccggtggctgaccgaggcgggtccttgagaggcaaggagcagccgccagctgtcaggccacggtgatggctgactgaaattcagtccaaagcaaaatgccaaccagacaagctgacagtctaatatgctgagcnaaatccacacattttgcacagaatcaagccacggaaggtacttggaagtatgctcacatgagatgccaatccctgcacctatgctatgcctttgttaatatagtgataaaaacctggattaacatttactattctctattaacgggagagtggtcagcaggtatttatccatcgatttctccacataggagagtggggcgcacaaggttgtccagcgaatgacttccattgagtagcctacgaatagatacatgcattgaccttgtccttgtgacctcctggtaatgagtgacattgagaacgcacagagtgcctataaatcatggattgatggagcactgtgtgcttaaagccatgctcatgtgtggcctgcctcgtccgtgcactgagctccaatgttcgcaggggagcgtgatcgtcagcttgaggaagtggcgctttgacaatagcgatgcatctcagcatggaccgttggcatgtcgagacctccttgttgcccccctactgttgcctttgaggaatttgaacgaccttgtagcgtgagctcacaaaacgttctttgcgagaaggcagaccccctggtgctgaattgcctaggaatattaatgagaggagttcttccgcatgctgctgggcctcccgtgcccgttgaggtgcgcctctgtatccttgcgacgggcggtgggcacccgggttccccagcctttttgttccccatttgaggtgaaggggtattaccttttccgacccttcggggttacctcgaggactcgaaaagcgtgttctcccggtgttgtcagcttggtatcccgcgtcgcaagtcca

SEQ ID NO: 526525 - DNA, 257 bp, Homo sapiens
  misc_feature (20)..(20): n is a, c, g, or t
  misc_feature (37)..(37): n is a, c, g, or t
  misc_feature (140)..(140): n is a, c, g, or t
ggcaaactgctagctgctgnggggtttgtagccaaancccaccccagggacaaatgtaagtaatatgctgacactgtgcaagacagaaactgggtgatatataagatctggtttttaataaaacgaaggtggttttgaanccaaagatcaggttttaaattccatcatttttctaaagctatcatttaccaaataaccagccaagaaaacatacctttgcatttgttcgttgtcttatccaaaattgcctttgtgga

SEQ ID NO: 526526 - DNA, 124 bp, Homo sapiens
gatagccgaagcctgatagcctcgctctcttagtcgcgcatgagactggtcactcgcaggtgcgccagaatacacaggatcagaggcgcatctaacggcagatcacctggagctctacgcctcc

SEQ ID NO: 526527 - DNA, 692 bp, Homo sapiens
taaggtatttaaactatttattaacaaacaaggcctacaaacttatttcttcttggacacacccacggtgcggccacgggggccaggggtcttggtgtgctggcctcggacacgaaaggccccagaaagtgacgcagccctcttatgggcccgaatctttcttcagtcgctcccaggtcttcacggagcttgtttgtccagaccatgggtctaggacctcggctgttatttcccatcctttactatcctcttcgtgtctctgtgttctcaaaaacccacgtctcgtgggatctcttgtggatacgtggcgtgtggattctcgtgcattatagtgggtgatctcacagcgttctccacctctcatctcttctcgaggtgaagttctcctcccgcccacctcttgtggtgtaaggctcaatgtgtgtcgtggcattctccttacaaaacacccacacatgtgtagccattatttcttgtgcggccccaaaacccccttaatgtgggcgagtgtgagagtggccaaagagggcctcaatatatctccgcacgcgccccaattcgacatgtatgtgggtgtatgtgcagaataacctcgccaaaaatatttatggcgtggaaacacatttatccgagggggaatccactaaaaagaactgtggggtgtgtgcaaccacaaggcgggcgcccggtga

SEQ ID NO: 526528 - DNA, 345 bp, Homo sapiens
tgctgtatgacggcaggagatatctgagtaatttcatgggatgattggattaatccatcaccaaaatcagcaagtaactaacttccttcctcagtctatttatctgcctgtggcttcctttatgcatggatttgtgcattcagccatttattcgtgcaagagtcgtttattaagtacccatatgtgcaagctgttagtataggtgtgagggcgatgtggcagtcttccaggtccaatcaaaaactggagctttccagcaccagtcttgatatgttgctttaggtggcctggagccatacaaaggtagatgtagaaagtgtctcatggaatacccatgcagacatc

SEQ ID NO: 526529 - DNA, 1463 bp, Homo sapiens
ggacgcgtgggtcgacccacgcgtccgcagagttttcatcggaggcatgcagagagttaggcttttctacgcaacttgctttgcagctcttgtgatcttctcggcacagcttcaaccctgcttcagctggcatcctgacttgcagcagcgatgctgctcaggcaggaacgcacaactcttgaaaccaagaacagctgtactgcacgcgacgcctactctctctcacagccttttgctgcgactgacacacacttgcggcaacgcgccttccccctcacagctccacacgcctctctctgcctctacgcgcagctgactacacacccctaacacctgcttccagcacggcactgccaacactccacaacctactgctcccgctgcgcctctcacgcatccccttgcctactttaccaacgcctcttctgcgccaccgcacccacactgcgcgcacaccactctgtcctgcacacccacaccctgcacccaatctcctccaaactgcgcaaccaccacgcaccacgctgctacccaacaccacacttcgcctgcacgctgcacacaaccgctctgcgaccaccgcgccactacttacacactccttgttgcccttaaaacacctccacgcgctcgcactacttcccctctatcttgcctccaccccctctacctccacacatctgcaaacactaactctcaccacgccacccctacccaccacaacttaacttcaaacgctctccgccgtctgccctttccccccttgccactccacgcccctctctctacctctgcacggccacttcacccctactcctacccttcccccttcgcttgcaccctgggccacgctccctcgccccccactgccactctcctccagcggagcctggcgccaccgcctctaccccctaccaccccccactcccccctaccttcaccaccgttcccactcccttcccctgccaacttccggcccgcacctaccccaccctacctccacccacctggcattcgctcacccccgcaccttccacgccttacactactgcgccacgcctgcaactacctcgccccacccacctcggctccaccctctaccccacaccacccgcactcctaaacttcccacacccctctacctaaccccaccactgactacctactcccctccctgctcctgaccacacacctctgcacaccacaacttacccccccacacatacaccgcccactataacacatccctgagccctcacacaactttcctgccccctccaaaccctctcccactaaccgatacccccccctcatctctacaactccatctctccaccacctaccagcaatcccccctcaccacacatcttcttcccaccctctccacccacccccgccaccacccaccctcctcagcgcaccacccatatactctcagacaacaacacaacacctactccact

SEQ ID NO: 526530 - DNA, 716 bp, Homo sapiens
gacggttgcggggcgcagccttgcgaagccctaacgcagcgctggggaggggggaggacgtaagggtagcggtggtcggttcgtgcatggggagatggtatggggcccgggcttcagagtggttatggagggaggctggcggcgtgaactgcgcggaggcggtgctgtagtttggtggtaggtcacggatgcagctgacctggttcgagtgtgcgctatttgtttgaggatacaggggtagatttttatctggtgtctttggtcattaattcggactgcgaggagacgttactgcagttgtggctatggttgacggagccggcgggtggttttgtacttttcttttgaatcgggatttcttctctaccatgctgtttgttgctcgcgtgggttttctaatgttgttagctatgtattgttatatgagctgcctattcgttgttgtatatcgcggttatgtttcctatcaggtcctagttccttggtttgaacaacttcttttctagagtgtacagtattttctctgctctgctatcgtacttggtctttcacctctgtgcggagtctttggctatataatggtttatctctctcttcatttttgctcttatcatatattgctcttaggatcttttccagtgtactttctatccttgtatctgtgtctctgggctatcatttctcgctccgcgccatcgtttatttctgtattagcg

SEQ ID NO: 526531 - DNA, 364 bp, Homo sapiens
tcggggacaccggccgtcactcctctctggcgggaataggctctgtgcgggcctcacagcagcgtccaaccctgcctctcggaccggggtacctgtccggcgtccaggaagaattaggtcatatgaacggattgaagagtagtgtatgcggggatttgattgagtggtggctcctggtgggatgggaactggaaagcagacggtgaaagagggtcatctttccctgaagccgcaccatctgaagttagctgcgtctatctgtagtcttcaacactcttgctgcttctctgctcaccgctcagccgcttgtgttgctctgcagctgaagtcttttttatggccacaggataggggcgtggcaggc

SEQ ID NO: 526532 - DNA, 945 bp, Homo sapiens
cgagttcgggctagttgttgcattccggcatgatgggactagtaacgcccctatgagcttggtatggggtgcactttgcaattgaacttgtagagtgcgacgagcgtgttatggcgcgatatcgagaatgcgatgagcgcatatggctcttgtctaggccctagcagtgagcaccggatttcgatggccttggacatgtgctactataaagcaacaaagaactgagacacgaaatagtttgataagactctgacaagggttgattccaataagacatgatcatttggagtaaggcttataatgaaagtcttgtaagcaaaaagtctttatggttacaatagttgtattaagggagtttgacgtggatgaagaatatttttgcgaaccgaacgtgcgatccattcactaaggctctttggggtttcaaatttattgagcccaacacaggaaacaactggtttagcaagatgagtcatgggagccgctcgaacattgaacggccaatactcctgctttcgtgagaaaatacaagcatctggagtaaaccgcataccaacacagtcatgttctcctaagttaaactggaaacttttggcagttgcctttgaaaaccggttgtctatgaattgcgcacaatagaaccatgattttgcggattaggggaagtggtgggggaccacaatgataatttgaaatatatggttaactactaggggattcggaaagattactaaagaaggacgtgtataaacatataggactattatatataagggtagccagacagataacaaattggtaacggtaccgcaatatataatttagagcatatacacataattatcagcggctcggtataaatgtgggcgcccacattgaaacttaacctatggtgttgagaggcaacatattgggacagagcatcttcgtgattaggaaagtgag

SEQ ID NO: 526533 - DNA, 786 bp, Homo sapiens
agcggagcgggcagacgagcagagagcgggccgacatcttgagatccgtacagtgcccgggccggccagagcagggggccgaggacaccaggtctgtcctcataggcgactggggccgcggcagactgatctgccgccgatgatctggaggcttattcactctactaatctagcaaggagtggaggtgctcatcttcccgaagtctaccgacgatgacgactcggcgagtgaacgctacgttggaatgctcattgtcgaggttcaatcgttgatccagtgaccccgggcagtcagcgtgcgacagcgccctgatctagcaagcatcgtctcgacgacacagcattcttccacagcttagatgcggtcctacatcagtttggtctggacacgtcacgtgcacctaagacagatactgctcaaacaggcgttgccactgggtcgttcgatattcactctattaacgacctgtgtgtgtacctgtgcattcgtgctgccttatcattcgggcaacgtatcacgctgatggaattgacagtcaacgacacagaattttgctcgcttcagtactattcgagtcctgcctgggacgtgacgtacttcttacgatcatctgtcgggctttacccccaaacaagccaactttgccctgatggaacgagagccgccggcttgaaaaaacgcgtttcattctagctgcacagcaccgggacagttcaaccggaggttcacgcaattcacgatcatacacggacacgagcgagttgtacctgcattcgacccatccc

SEQ ID NO: 526534 - DNA, 190 bp, Homo sapiens
gggagaactcatctctactaaaaatgcaataagatttgccgggcattgtggcgcatgcgttataccccagttacttggcgaggtctgatgcacggagaacttgtttgaacctgtgtggcggaggttaccgcgagacgaggtcgcgtcgttgcacttcagactgggcaacaagaacgaacctccgcttgcg

SEQ ID NO: 526535 - DNA, 506 bp, Homo sapiens
  misc_feature (12)..(12): n is a, c, g, or t
  misc_feature (69)..(69): n is a, c, g, or t
  misc_feature (145)..(145): n is a, c, g, or t
  misc_feature (170)..(171): n is a, c, g, or t
  misc_feature (179)..(179): n is a, c, g, or t
  misc_feature (184)..(184): n is a, c, g, or t
  misc_feature (212)..(212): n is a, c, g, or t
  misc_feature (219)..(219): n is a, c, g, or t
  misc_feature (230)..(230): n is a, c, g, or t
  misc_feature (234)..(234): n is a, c, g, or t
  misc_feature (249)..(250): n is a, c, g, or t
  misc_feature (346)..(346): n is a, c, g, or t
  misc_feature (493)..(493): n is a, c, g, or t
gttccccactgnggatcccagaccatggagtgagcctctcccccaagtttctcctcaccatctggtgtntgtattgttgtttcagacagatctgccacaatcgttgctgacttgcacctccaacgcacccctttccctcaccacnacgttctggaaagacagggagtaanncagtgctntcccnatacagtgaacagcagtggggtgccatntggggtngagcagggagngtgngagggggcgcgtggnngggtaggggagcctctcacaagtccacatctgggcctcccagactcgaaagacagctgaaggagtggtagccaggattttgctgccgtctgggggncagagcaggttggtcaccccacctcctcgaaaccagggaagggggacacaggtctctgttgagacatcccatacccggatagcagcatccacgggtgaagctgagagcagccgccccccactgggggcccaggccaagctgggtaanaggtgtatgccca

SEQ ID NO: 526536 - DNA, 405 bp, Homo sapiens
  misc_feature (310)..(310): n is a, c, g, or t
gtctcatctcctccccctcccctgatccgcggcggtcacgggcttcctggctggctgtctgggaactttccaagcacgcaggctccacccgcaaaccccctccggcaccggcctgggttcccggacctcatctcctcccggtcccctactccgctgcggctatctggcttccttgcggcttctggaactttccaagcacgcaagctccaccggcaaaccccctccggcaccttccggggttcccggacctcatctcctccccctccccggctcctctccagaaggcaccaccacagcggcccacttcggnaaggttccatccccggcaggcctggtctccacgagctccgtgtcctgggtcgggtcctccccatccggctgccaggtcaggaagagaccggcagg

SEQ ID NO: 526537 - DNA, 835 bp, Homo sapiens
  misc_feature (325)..(325): n is a, c, g, or t
gagagacagaattcctgagtgaacgaacagagcagctcctcttccatctccagtaaatgacctccaccttcaagccccgagaatgtaaactgtccaaggcaagaagggcaaaactatggccttcttctctgcgtaattgagaaggacaccagacgggcctagcctggttccggggtgcgttgtgagaaaagatgtaagctccagccagagaatgggctcggcactgtctagaggatgcggacgacagcatgttctctcatggggatccaatgtgctgtactttctggtaggtacctaaacatgaaagcacacactatgactaggntgttgttgcgcaatctgagtcacgaaccagagtggtgtaattcaagatgacattctatctaccgattctggattggggagttcctcactgtagaaccagcatgtgataaatcatcgggttggagcttgatagagagttggggtcagataggtcagaacggagcaaacggtttgagttgataagtactactttcccctgtgatgacatggaggtgtgccaaaccttggatcccagaccccggctctgctatctcagtgcaagggagaggatggctacgctagtgtgcttctcctcgtgaacaactcgtccaagcgtaaaaaggcgggtgtacatgacctgatattacacctcatagggtgtggcctatggagagctggagggctggcgtgatgatccccttgaattgacgtgaatggcgagactgttgaaggctgcagcccatgaggaagtggttggcacggtgcacactcaggaaacctgttcatgttccggcggtggacagaaccgcag

SEQ ID NO: 526538 - DNA, 939 bp, Homo sapiens
  misc_feature (939)..(939): n is a, c, g, or t
ttccctccattctactaggtgctgtgtctttaagctctagttggggaatctgagagaagagaaagaagagtctcaatgacagaccctgtgcctgccctgagcagtctgtgaatgaatgcacctagcccacgtttctaaaggacagcagttctttgtgggcctcagcctgtagaaatgaccagagagcaacaatgtgcgacatctttgtgtttgcctgatcttggcccttacctgtcaggttttgaatgtccttccatgtttccatcctaacaaagaaggaagcaggctgtagagtgcattgtgggagggagaccccaagcctcttctcagggatgtggggatgtgaggggtctggatttgcaggacatgctccattgaatttgcaacagcgctgttgtggcttctgccgctgcagccctcaggcattccctttctgattgaaagaccttgttgaaagcttctccaaagctcgtaggtctggataccttcgttggaggctgggaattttaagaggaggactagagggaagagcctgttgcagagtgagtttttctaggtctgctgagatgattgacacatggagggagcagggttgggggcaggggtccctgaagcacattccagtgcaacgaaggtgggggaagggatcaagttcgttgggatttaaaagagacgcttggaggatatcttagttgtctagtttcactcacccgtggatgttgtaaccgatgtagttgagtgagcctgctgggggatcaggggttgctccattcctggtcgatctatccccgtggtctggggtttggttacaccgcttgggctgacacgcgcttttttggtggttgacccgggcccctaaagttgggttctgttttaaaccccttgtaagttttgcacacctcttgtttcctacactttctctgcagtttaatacttcgn

SEQ ID NO: 526539 - DNA, 195 bp, Homo sapiens
  misc_feature (182)..(182): n is a, c, g, or t
  misc_feature (186)..(186): n is a, c, g, or t
ccggggaaggcttgagcagagaattgctttaaacctgggagtgagctgcagtgagccaagatcgtgccactgcactccagcctgagtgacagagcaagactcgtctaaaaaaaaaaaagcatttttgccccccttgagcccatcctttccttcgccaataggagttatttcaggtgcggtgntttntgcgctttc

SEQ ID NO: 526540 - DNA, 336 bp, Homo sapiens
  misc_feature (58)..(58): n is a, c, g, or t
  misc_feature (214)..(214): n is a, c, g, or t
cgactcgcccttgtctttgctgaatgcaattccgctaacaactattatagcaaaacanaaagcccttgtgtgggctttgctaaatatttataatacaccgactatggcacatctgcgaattcgggtgttttggaattgtgtatttactatcaccgaactctgataaagggaatgtcttaccgtctaaatcacgacaaattgaacatgcaccagngcttgctatccattcagctttatgcacatcagcgttctaaatatcacgagcttgtctgctgacctgagattctagctccctccgtccagagatgacgttgcagactgggtaattaacgacgt

SEQ ID NO: 526541 - DNA, 306 bp, Homo sapiens
atgaccgcattcccaggtcacatcaaatacatcggagccagtcgcttcggagggtgccagtggagacctgggggcctcctcttcagagggctccagccgctagtgtcaggtccccaccggcactcctggtagatgagctgcggtgcttgtggtggaccatgggcgctcagcgctcggtgtggcagggtcttggtacaagaagaagccctggtggtggtaccagatactccgtcagatccatcaggtcccccatgtcgtcgtcctccagcagtgagcggtagaaggtgctgtccaagggactggctg

SEQ ID NO: 526542 - DNA, 372 bp, Homo sapiens
ggtcgtcgaacagtcggccacacgcaggaagccctgaacaacgcggccgacgaggtccagaagcttctgccacgccgctgacaccggttcaatcaaggacaggcgccctgcccaccgggacatggcgcctgtccgcatcacacgcatttgccaacttggtataacggttttgcaatggtttgagactattaccatcagggacaaccaccggcttgaaatatgtatcccggatacgtactcgcgccggaccatcaatccttgctggaccagccatcgatgccaccaaccgaatccggccacaagacggaaaagcgtattgaagaacgcaagcggacacgcctgcgctcaggaaagcttgcaacgcttgaaggc

SEQ ID NO: 526543 - DNA, 238 bp, Homo sapiens
aaaaatttttccccccccccccccctgggggaggggggtaaaaccccccccccccccccccgggggatttttttttttttggttttttttgggggccgggggtccccccctttccccccaaaagttttttccccaaaaggggggggggggggcccttttttggggggccccccatttttttaaattttgggccccccggtgttttttttttttttttttttgttccccccccccccca

SEQ ID NO: 526544 - DNA, 258 bp, Homo sapiens
gcccgagagcaagtggaaaatttcaggatacaaagcccataaccccccataaaagatgattatgtttttagaagcaagagccaaattatggaacctctaaagatttggggcatggtaccccatttgaagaaaattttcactaccggccgctcctcccataggagcctaccctaaggccaagggtgagcccttcccaggctagaacccaaggagggagagaggcttttaaacggaaaaaaaaaagcaattccccccccc

SEQ ID NO: 526545 - DNA, 523 bp, Homo sapiens
  misc_feature (101)..(101): n is a, c, g, or t
  misc_feature (137)..(137): n is a, c, g, or t
  misc_feature (360)..(360): n is a, c, g, or t
  misc_feature (372)..(372): n is a, c, g, or t
  misc_feature (384)..(384): n is a, c, g, or t
  misc_feature (441)..(441): n is a, c, g, or t
  misc_feature (494)..(494): n is a, c, g, or t
aaacgacctaagtgtctattggtggacggattggtcgttttcatagtttggcagttgtggaaatgctgcagtaaacatgggagtatagctatcttttgaanataatgatttcatctcttttttatatgtatacccanaagtgggattgctgcatcaaatggtggttctatttttaattttttgaggaaccgccatactgttttccataaaggctgtactaatttccattctcaccaacagttcactagggttcccttttctccacattgttgccaacattctttatcttgtgttttttaataacagctatcctaacaggtatgaggtgatctctctcattgcgggtttgatttgcatttnccctaaacggtnggtgatactgancatttttgcatacaccgggtccatttgttcctttgttggttgaacttgagtcccttnatataattttggatactgctgtgggcctgaatgtttggtttcccccaaaaatnccgtatattgaaccccatccctaaggtca

SEQ ID NO: 526546 - DNA, 451 bp, Homo sapiens
ctggactcaaatgcatctggaatggagaaccacccccagtgctgcagagccacctcattttctatcatctacccacctggttttcggaggaaaaactttgttccttcagccatcttcacaggccagggactggcacttcctccacactctcagcacaccgccctgtgcatcctacagttcctaaagagtggaaattccccagttgtgctcgaatcaaacctgcccttaagtaccatatttgtataaactcgtgtgagatcacactagcttctcagtgggtgcatcatagtgcaagttaatttcagatttaactgatttgacatggattgaaactgttaagatatttgcaacatgctaccactaaataactattactttgtcctatattgggaagtagtttgtgggatttggggtaggtggatgcaaataaaagcatttatacttatgcaaa

SEQ ID NO: 526547 - DNA, 183 bp, Homo sapiens
gatgggagattgtcgagcaaggtgacaatctcatcaaaagtgatatcccagtgggtgtaagggttgttctgtttctttcggtctctgggtggttccttgaggacttggaggatcagggcagaggcagaaggcaccacctcaatcggggccggtcggtacggaagggtcagttgcacggtaatc

SEQ ID NO: 526548 - DNA, 1719 bp, Homo sapiens
  misc_feature (608)..(608): n is a, c, g, or t
gacggcgatgatggtgccgcgtacggatccaaagaccgtgaaaaagggcggcccgggtcatcatggcaacagtacgtagcaacgcagccatgggactcagcggagcgtatacgcatgaacgaagcaagccgcctgatggtgactggaaggcacggatcgacacgactctgagtcccacagtcaaaagagcttccgtggagcaatgataggccgggttatgtcatcgcatctggatgagaggcgatactatcagaggacggcgcacacgataaggatggatactctcacagtgcaaggtcgtggtcgaggaagggtagggagacgatgagatacggaggaacgaccaatttcaattgtgttcgcgtgaagtggtgctcaatgtcgcttgtggcattccaggtggagaaatatactccgacggatagaacttcccgggaaccacctaacaaggggaaacatgtccttgaaggccttgtatgtgggaacatctacgggtgcagtgtcatggtccaaaatagcgtctgcagagctccaatatacgaaaactcgtgaagccagattaaggggtcatggagagatttgtaacacagcgcacctgttccatccgnagaggggtaaccctgtgcttatagggaacacatttgtggtctcatgcgtaggtggaaggagtggcttgggttcacttgaatcttgttctaccacatttgcagaaacttacctgtggggagaattccacaagcgacagagcacattcggcacacggcacacagaatagcacttggactcgcagaaagaggtgccacattctcagaaggggttccacgtgtgtgcgcgcgacgcatgaaacacagagacgtgccaaaccgcgtggaacagtgtggggcatacatgggtcgggccccacaaaaaagggaagaggggtaccccagtgcatggcaccacgagggacgtattccccggggggatgaaaagcggggggcggacaacttgtcaggggcgcgcgaacgcacaaccggcaattgataataagcgggcgagggaccccacggtactggtacgacaagtggtccgcgcttggataagaaacgacggcccacggggggttaaacccctgggggggaaagctcaaagtgaagaattgagcggggggagcaaaaacagcgccacgggccagagcaactggatatccggaaacggatcacatcggaactgtggtggaaccccaaaaaggggcgagagcacacaacaggggccatacaccaacgagggggagtcacacacaccaacaaggagaccatgatgtggaggcaccacaacagcaaaaagggaaaggcgtaggcacaccacgagccacaaagcaaacccacagccggacaggcagccttgcagccaaacagcgatgaggcacccggcaacacgggcggcgcaacggcgcaatcaccgggaaacacgaaggaagagaccatgaccaaccgaaagagggacaacacgcccaggtgccgccaacacggcgctaaccacaaccaaccgagcaacagcgcaaacaaccaccagcacgcacagatcatcacacacagcacgtggcccaccagtgtaccacccccacatcaacgagacaaggcacgaacgccgcgcatcactagacaacgcagcgcccaccaagacgacaaacacacccatactgaccaagaacacaacacacaccacggatgaagagga

SEQ ID NO: 526549 - DNA, 293 bp, Homo sapiens
gacacgacgactgggacacggcaggcgcggccttcgtagtcagtagttctttgatgtgaaatgggcagcacagtcatttaaacattgatccaaccatcatttgcatcttacacaagttaaacagactaaaagaccgtaaaatacagaaggcaatgcttgtggaatgtacagtgcatattggcggcgcacgcctcattacgattcgcctgcttgctatactcctgttcaatcgtatctttggaaggcagtggatttttctcttgcatctcgtctcttctcttgtataaagagaa

SEQ ID NO: 526550 - DNA, 756 bp, Homo sapiens
tccgagtagatagcaggcggggcgaagtaatggcttgagaatcgccttagtccagaaactgacatgcctctggagccaggcgacttcttgggaaactggtcatctcccgactcctaccctgaccagccctccgctcagtgtggctcctcagcccacagaggggagggagcatggggccaggtgccagtcatctgtgaagctagggccctacccccgcagacggagtggccccggggggcccccttgctagaggagcaccatctacagttgtgccattcccccagcacttggcttcatggctgccccgccggactggcagaagcatggtgtcagccagctgcctttgagtcatcaagattgctctgcagccacaattctgacctaacttgggagggcccagaaatcctgaaaacctcccgctgccttttgtgatacttcctgtgctccctcagagagaaacggagtgaccttttgtcctttacctgataggcacttcgcagtctatctccctgggtagcagacgggtagtgcccttctctgggcatgttctgaatgtttacactggtaccttctggttcttctttagagccccctgcaagctgcaatctaggctttatcagcggggccgagcgccctaagggaaggtaaagccacggtttgcggccaaatgtgcttaattgtttaaaaaaggggagctattcccgtcatgttctcccatccgacagtggttgcacgggccggagcgagtgccgtaca

SEQ ID NO: 526551 - DNA, 827 bp, Homo sapiens
  misc_feature (819)..(819): n is a, c, g, or t
agccaacatggtgaaaccccgtctctaccaaaaaaaaaaatacaatagatttagccaggcatggtggcaggcgcctgtggtcccaagcggctgggactacaggtgtgtgccaccatgcctcactaatttttttggttggttggtttggtgttttatagatgcggttctcaagactagccgtgggcaacatagcgagacccgtggtctctaccaaaaaaaaaaaaagagaacatgtgttccaggtgggcaagtttttttcctcggcaaggttccgtgggaagggattccggtaaacaatttaacccttaaattagctggcaaaaccaactcatctggacaacgaggggagggctccgatgatggccctgtgattatcccactaacgtgtaagtcccttgttctttaaccatttctagtgcacttcatctacaagaacacttattgggaactgcggagggtggaaaagtgccggttgtatgcaggaagcatcaaatcggtaaaaaccttggcgggagttcaccacataaacatgccccaaagttaagggtcccttacaagagggggtgtcaaaaaacactggctctgggtcttgggaactacgcaactggttccaaaccgcgctaatcgggccctctgggccaagtccccctctggacccaccaagggacgcgaatgagaaagagcacccgttatgccggagaacacgccgaaaatgatcgaacggaggcatggtattaccttgcataggagacgagacaactgaatctgagcggaggacgtatcccctcacacatctgtcaatggaagtgttattgagangaggggtg

SEQ ID NO: 526552 - DNA, 202 bp, Homo sapiens
tggtttcggaccctctgaggacttgctctcgtgtgagcgtcttctgcctgtgagcccagggggcaggcgtggctggtacccttaggtcctcccagaacctggcggatcgccttgctctcaggcaggaggcgatgcatgacgcctccaacttccgccaatatatcccaaggatggctgctttaactaaaacgcgtttgtctga

SEQ ID NO: 526553 - DNA, 851 bp, Homo sapiens
tacaaaaaccaaaaccagtttccatttttggatggggccccacccccgtgaacgtccgggggagaggggccccccaaagagcctttctctcggggacaaaatacaaagtggcgaggagagggctccatacgagaaaaaaaagcgtctcgtgaggctcctggcgtttttataattaaaagtgggtaagaagtcttctcggtggtggggccctcccgagcgtgggacaacgcttgaatgggccgaggagtctccgagggtgcccgaggtgtggtgaccctcagcccccttcgcccgtgaccaggggccgcgtgggcaaaagccataggcccgacaaaaaggcccggggctgtgccgccccattcaaacgccccagtggcacactccctgggcggaagaactggggagaagaagatgagagggggggaaaagggccgcagggggccaagtgtaacaagtatcccggagaaaatgtgctgggagaacccggccccacaggggaacaatcggggggagaacatggggcacgggggcctggggagtcccttggggggaaagagcaacatggggcgggtgtgggcgcgaaacagaagaaaaagagaaaacccgcgcgagagagaggggggcgcacgaacacagcgaagagcgccaaaaccgggcgagcacacccacaagcgagcacgcaccgcgggcgggccaccgccggggagcaaggagggagaggcccgagaaagcaggggagaaactccgaggaacagacagacggacaacaaagaaagatacacaacgagggcaaccgcccagaacagccagagcgcgctaagaaggaaaccggggattgacacgcgcacaac

SEQ ID NO: 526554 - DNA, 234 bp, Homo sapiens
caccgctgcacgattcagacgagccttccctagtacgagacggacccggagtggccacacctctggtgtatcggttgtcacgccagtggcacttgccgagtcgctaagtgtggaagagatacccgctgaaagcatctaagcgggacactcgtctcaagatgagtcttgccggggccttgtagccccctgaagggtcgttgtagaccacgacgttgataggttgggtggtatcag

SEQ ID NO: 526555 - DNA, 363 bp, Homo sapiens
gtccctcgctgggggcgacatgtgaggggaagaggcagacaacactcaatcccgagttacctttatgtctggaagacatgaatttcttcccccacaaggaaaactcgacctgacatagaagctgtatatccagggtgtgtatttttgttttggtttattgttgagacagagtctctttctgtcacccaggttggagtgcattagtgagatctcagctcagtacaacctccgtctcccgggttcaagcgattctcctgccgcagtctcccaagtaggtgggattagaggcatgcgctaccacgccatgtgtggtcagcagctgtgctgtggggtagtggcgatgtggaggtccccagcgaggga

SEQ ID NO: 526556 - DNA, 135 bp, Homo sapiens
agacaaggaagtgcaggttagtgctaatttaagaaggcctatactaatgtatgtgaaggtagctataggaactagttagtgtattcttaaaatcccatattgcaagccgttacactgtacctcgacttagtgact

SEQ ID NO: 526557 - DNA, 212 bp, Homo sapiens
cgacggtttctcgcgtgacctgacggttttactgtgtaactgtggtgggtgacgtgacgccccactggtgttgtggtaccactactgtacgacgggacgtactacagggctgtgacctacgtactgttgacgtcctagtaccgtacggacgacgtgactacttgtgactccacggacgacaccgtgagttacctacggcacccgacgaccgt

SEQ ID NO: 526558 - DNA, 367 bp, Homo sapiens
cgtgtggtcgtctagaggatcccatctcaggccaggacgaggaaggatgcatgaggtttttttttttggaaagggagtctcgctgttgcctaggcgggagtgcaggggcgcagtctcggttcacggcagcctccgcctccggggttcgggtcattctcgtgcctcggcctcccgagtagctgggataacaggcacccgccaccacgccgggttaattttttcttttttttttggtagagacagggtctctttatttggcccaggtgggtctcaaaccctgtgactcaagtgatgctctgtgcctcagtttcccaaagggtgcggggataacgggcataagccacggggctcgtcctgggccggagag

SEQ ID NO: 526559 - DNA, 571 bp, Homo sapiens
ggagccgaagactggcgtccagcggggggagcgcacctaccccaggcgtcctgctggcttcaaccggcccccgagccaagcccaagactgtgtctggagctgcttcagagagaagcggcttcaggaggcccgtgccaggaaggccacccggggcccggtggtgctcgcggggggcagctgctggtctcctctgtctgtgatcctccagccccctctagcacaaccccacacggccgcacagcccgggtcccacacgtcttaaattgtaccgctctctgggcctggggcacccgaagcagccaaagctggcacttctggctcctggcaagaggctgggacttcaggccaacggaccaagagactcatccaccatgcaagccctgacccactccggctcctgtctatctcagaggccgagggcacagaccctgctgattcccaagcccatgacctagggcaccggacaggatctcatgtgaggctgacccgagagtggactcgggacaagtctcagggccaccggatgactcccggaagcagggcctgcatgaggagacaaccctaactacgc

SEQ ID NO: 526560 - DNA, 297 bp, Homo sapiens
  misc_feature (18)..(19): n is a, c, g, or t
  misc_feature (34)..(34): n is a, c, g, or t
  misc_feature (38)..(38): n is a, c, g, or t
  misc_feature (44)..(44): n is a, c, g, or t
  misc_feature (50)..(50): n is a, c, g, or t
  misc_feature (63)..(63): n is a, c, g, or t
  misc_feature (65)..(66): n is a, c, g, or t
  misc_feature (69)..(70): n is a, c, g, or t
  misc_feature (121)..(121): n is a, c, g, or t
  misc_feature (124)..(124): n is a, c, g, or t
  misc_feature (129)..(129): n is a, c, g, or t
  misc_feature (132)..(132): n is a, c, g, or t
  misc_feature (138)..(138): n is a, c, g, or t
  misc_feature (140)..(140): n is a, c, g, or t
  misc_feature (155)..(155): n is a, c, g, or t
  misc_feature (166)..(166): n is a, c, g, or t
  misc_feature (176)..(176): n is a, c, g, or t
  misc_feature (184)..(186): n is a, c, g, or t
  misc_feature (203)..(203): n is a, c, g, or t
  misc_feature (244)..(244): n is a, c, g, or t
gattgtgtgtatgtatgnntaatataacatgacnggcnctaggncgtctncctttttaaggcngnnccnntaagggtttttgtttttaaacttttttttgccacccaccctgtgcaatatnccntgtanaanatttgncntaaaattcaaggccncaaaaacaatntttggggganaaaaaagnnnaaatcatgccagctaancatgtcaagttcactgcctgtcagattgttgatatataccntctgtaaataactttttttgagaaggaaataaaatcagctggaactgaaccct

SEQ ID NO: 526561 - DNA, 128 bp, Homo sapiens
gcggtgagccatctgatttcattgttttagtggaatatctaggtagcagaactactttaccttggctcctccgctgcattgtatatgctggcatagtgcttataaaaaaaatggcataagccaggtgt

SEQ ID NO: 526562 - DNA, 123 bp, Homo sapiens
gacgacacccacggtgtggcgaggcaggcagcgccggcgcctatcatcgcgagggccgagcggcggctgatgcccgtcttgcgggtctcgtcatcttcctctccctgaaccgggtttcgtttc

SEQ ID NO: 526563 - DNA, 237 bp, Homo sapiens
aggagagcttgccagggctctgctccccaaaagactgtactgacttagggccccccaaaactgaggccaggcctttatccagccaccctctttatcaagaaagccttgtcctgttcataggtagttctcaatataaatggatgttagacaaaaacacacagtaaataccactttaagaagaaacacatatagagtcctaataagagcttcttagtaaacacactggacaaagcccca

SEQ ID NO: 526564 - DNA, 141 bp, Homo sapiens
gcttttagtttccggagtctctgcaatggcggctctagactccctgtcgctcttcactagcctcggcctgagctttcttatttcccgcgagacgctcaagaactcggctctgagctctctatgttgcgcgaggccgctact

SEQ ID NO: 526565 - DNA, 349 bp, Homo sapiens
ttttccggtttcagaaaaaccccatgattccccttaattaaaacggcctggattggatatatatccccctatatatatatatcccagccaaggggaatggtggcttcctaaacagggcgggataattttgattttttttgaaacccctggggttttatattttttttgccgcccaaagggaggggcttataaagccctttttttcttttggtaacggtattagcaaatctttgggctttattatcccggggcccgttcccgttttatgtaggctgtgccctgcgccgcttttttaaagcccttggccaatcaaaaatggttctagcgggttttggatgcccttttttta

SEQ ID NO: 526566 - DNA, 461 bp, Homo sapiens
  misc_feature (206)..(206): n is a, c, g, or t
  misc_feature (254)..(254): n is a, c, g, or t
  misc_feature (313)..(313): n is a, c, g, or t
  misc_feature (319)..(319): n is a, c, g, or t
  misc_feature (333)..(333): n is a, c, g, or t
  misc_feature (336)..(336): n is a, c, g, or t
  misc_feature (358)..(358): n is a, c, g, or t
  misc_feature (374)..(374): n is a, c, g, or t
  misc_feature (392)..(392): n is a, c, g, or t
  misc_feature (410)..(410): n is a, c, g, or t
  misc_feature (451)..(451): n is a, c, g, or t
agcatggaatccctccctcaggcctctctggacggtgttggtgggggatcaagatgaacacactgcagacgaggacacgagccccacaggagctctttgtcccgccggagaccagcggacccacgtcagagaagatgcttgtatcttttcacggctcttctctgagaaatgaagccacaccacaatacggtctggaagaggaagcngggaatgggagatggcaacagtccctgtcactggaatgctggcctctntggacaagccacccttttggaaccccatcccttatgaccctggcagtggaacggtgatntatccngcctggccgccggngtntgccctgtcctccctcctgctntgcctcacctgtttcncaagtgcctcaatgcctntcgctgacgcccaatgtnttcaacaaagatgacttcccagtccgtcagggagacatttnttcgaaaaaa

SEQ ID NO: 526567 - DNA, 822 bp, Homo sapiens
gcgggggctgacatgtcgtcccggcctgggcgcgaggacgtgggggctgcgggcgctgcgggtgtgccggtgtgagccggccgggagcaggagctgcagcgacgtcgggagcagaaagcggggggacacgacgcgcaagcaagctgcagcaggttcaaggcacctggagtccttttaagggaaaaaactcctcgtgggcttatcagggacgatgacgactagagccgaggaagattggcatacccagatgtcccgtggcatttgaaacagggccagagggaatattttcgtggcttcagtgcaaccccaactaaagaggggacttgtggattgccatctggggggacaacgaacgtccaaatgttattgccaggtggttgggcggttgcgcaaaccggctatgggtccacccggaggggggttgaccaaaaaggattgccccttttcttttatcaagagggcaacccaaaaaggttacgagcagtcaagaggtggcacattgaaagatccctgtggttttgcctttcattacggaggacaattaaagcggactttgaaacggggcggtaggggactaccaagcagttaacaacccgttcacgtgggggagatcctaccctcagattgaagaatagggagccagcttccaatgtcccttctgaagggtacacgccaacacatagacaaactatcataacaacaacaactttttggggcgcgctgggcccgcaagaagaggttttaaaaaccatctgttggggcccggcgcgcccaatgtgggatggcatactgcgcattcgtgtcccaagggactccgggcag

SEQ ID NO: 526568 - DNA, 439 bp, Homo sapiens
gcttctatttcttaccactaaattggtttcctttttcatccagaagttagaactccccagatattcacactataggatctgaattccgagattctaaaatatcttaaaccacaagagagaaaatctagttctgcctcagccccagtcagcaggccatctgtcccttcctctcctctgagtcagacagctctggcaagcaaggctccttggctagttcctaatgcactgacaggagccctcccattaaggacgacttctactcaaatggccgactctccctctgaacttaagttccttcttttagcaggaaaaggcctttaatggaattgaaaaaattaagttaactcgggcatttttggctgtagaatccgtgaccctaaagttaaaggaatgggaactattcttataaacttgaaaaaaataaagtttttattttcta

SEQ ID NO: 526569 - DNA, 362 bp, Homo sapiens
ccagaggtatcccggcacagcacgcgcgtatcatatactttatacaaagatgttatatagagttcaactgtatacgattagagcatttattaaacctgttgtccaaagcgcttataaataaagcatcttcgaggcaggcggctcacttgaggttaggaggaaagcagactggccaacatggtgaaaccccgtctccaccgaaaatacaaaaaaattagccaggcgtcatggcgcacctgtagtcccagccactggggaggccgagacacgagaatcgtctgaacccgggaggtggaggttgcagtgagccaagattgcaccactgcactccagcctgggtgacagagtgggactctgtctca

SEQ ID NO: 526570 - DNA, 405 bp, Homo sapiens
gatctacaggatctgtcagtctgcacaggtttttcattggattagctttcaaaaaaacaacttttgctgaattgtgccccaaggttggacaatctgacactccttcaacaatgcggaaaaaactggtttggcgggaatgttgcgggaagaagccaactattccgaaaagaagttggaatgggcaatctggtaaccaaaggccttgggttggaattggggggaaaaggaaaagtggattggcgggttgctcaagccgtcctcctggctcatttctctccagggtgatgctgacagggacactgtctgaccggcagccgggtgaactccaactcttccggaactacgatgctccagaaactgtccgggagcctcgtttcaaccagaacgttaacctcaggcctccag

SEQ ID NO: 526571 - DNA, 203 bp, Homo sapiens
aggtggaacaacatcttttgcttctgacgtcttcattgtggggtatggtcttctgcagttcccaacaatgccccaggtccattctttttttttgttctttcttggtataattaagacagacacagggtctcactctgtccacctcaggcgggcatgcagcagtgtaggcactcctacaggtagctttgcacccaccaaatcgg

SEQ ID NO: 526572 - DNA, 238 bp, Homo sapiens
ccaggtagacctacccaggtagtgggtgtagagcttgaacgctttcttaattggtggctggttttaggcctactatgggtgttaaatttttataccaccatctacaaggttttttcctagaagtccaatagagcagttcctctttgagactaagcagctaaatttacaagggggatttagaagggttctgtggtgcaaatttaaagttgaactaagattctagttaggtctacctggg

SEQ ID NO: 526573 - DNA, 141 bp, Homo sapiens
cctatcgccacataggactcccaatgtctgtatggtgaatgttaagaactacggacatcataccatgaatacgatcagccataaatggacaaacctttacacaggcacaacttggaagaactcaaggaaatatgctgagtg

SEQ ID NO: 526574 - DNA, 107 bp, Homo sapiens
tggtgcttgtaactgtcacaccaacatgcactgacaccacttcaccaaccaccacccccagccctccaatcagcaccacaaccacccctccgccaaccaccactccc

SEQ ID NO: 526575 - DNA, 213 bp, Homo sapiens
ggcccttggctatgcccagcagcagctccagatccaccaggaacatgtggacatcccggtggaacacaactagcttagcccggcttaactggaacattttcttagggtcaggggctggaatcatgcttcccttcccggcccccaggaacccattggaggctacttccacataaaaagggaggcttcgggggtctttttcccccaacctgtcag

SEQ ID NO: 526576 - DNA, 711 bp, Homo sapiens
cagatatgaatacctcgggtgtacacgtgcagtaatattcaccatagtagcctctgacacagtgctatctatatgtgcacatggctataagcaccaatgtcatggcacgctaccattgaacagcctctatgcagaacatacatgatctacgcagttccaagtatccaaagtcaatgtccaagtgtccataaatgaactgcatgacacattgtaatgtagcatcttcgatgtacgcatcatcgcgtaactgctgccacatatactcatctcacgcattccctccacctcaataggcacatgtataagatgcatgtcagcttcaggtccttcatagcacaagcaatctgtagctgttcaggttcctccattccgttcatcaagatccacgcttgacgcacatggtatgctaatctgcgctctacaagacatctatactcatattccagagcacactctggtagttcagaagtacaccatgcgcctaacccatccaaatgtataatccactgtaacctcttatctacatgctcaccgagttgcttcggaccaccagactatgcaaggctagcccctctgcttacactgtaaaccacagtttacctggcagcttcatacagccccactagagttaagttcgagaccagagcgggttcaatgataactgctcaccgatctaccatattgatttcaggtccgtacgcagacactgcg

SEQ ID NO: 526577 - DNA, 433 bp, Homo sapiens
tgggctttatgggcctaaataacgctgaattataattagccccaccaataatgagaggtttattttttttttttggctcactccaaatcagcctggtaaggtatatttccttctacagcctttcctgattttgcatgttctcattcccaaagtagtctaccttagtttacactcaaaggtagcacttgttgaaactacatgacagaaacaggctgcaaaggtggacaaggggaagcatgtccctcttgtcttgataaatcagtgccacacacagaacccacattttctgagacattatcttcattatagagccgtttgattccatcatagaagtcatccacttccatttcctctactttgcgtttagtagaggtctgcttgcacccactggcagctgggagatgatggtaaaaggctgctgtacctctgactg

SEQ ID NO: 526578 - DNA, 1478 bp, Homo sapiens
tggataaattatttttatttaaataacagaggaaaggtgaaaccaacttcttcgacaaacaaggctccgtgaagcattgagcacgtgttgggctccgagggaggggacagaacaagcagcgggagttaagacgcccggcgcaggtgccgtgcggttccgtcctagaggaacatcaggctcgtataagtgtggggagggaaaacggggacagcagatattctgagcgaactaaatctccaggtgccaaggggaagatatttcaaaagcctcttgagaaagaagaaaccacccacaatgcagcgaagcagaagagagggccggggcagccaggctctctgtgaacaggggaagcgcggaaggtgcgccgcccgaagcctccgcgttacagcacctttgtgaagagggacattcacttagagacaacacgataatatacacaacatgtggccttgacagagaaggctcaagggggcggcagacgggggcgcgtgggacacggggggaacattttgtgggggtgacccttcacagccgtggtctactataatattttctcacgagacacaaaacaggcagccgagcacccacaatgtgggcgtgtgttgcctcacccaacgtggcacacacatgttgcacaagcccgtggcgtgaacgctcctgtggcgaggcaagtgcgggcgcacagaccaggccctttcccgtggcaattttgcggcagtggcctataaagaatatacgcgggggccttatagagaggcatacaggcttttcttatttaccccgcgaggacacaaatacaccacagtggaacccaattcttttccttcttttaacaaaaccacacgaagatgacttcgttatatgaaccaccccaaaaaaaaaccaccagaggggtacttccactcgacacggtacttcctggaacaacgctcgaagggacatacactcccgtggaaccttgcaaagaactgtccttttgcgcacgaaagaagggcggacaaccacggagggtcacggcggatgacagctccccacacggggggcccaaagaaaaccctttttctccaacaaaaagcgccaacattatgacccccctctgctgttccacgagcgggggctcctcaccaagaaaaccccacatcatgttggctctctgtgggcgcaaccatcgtttggacacccttggtaataacaacagcggcggcgacacccgggacaaacagatcaaacgcactgtgtgggaacaaataacgccgcggggcaagcaaaacagtcggcctgtcgcaccacgagcgcgctagcagcaacaaccgttctttcccccaccacaagagaggagggcgaccccccaagagaaagatccacccccatactaggacgcgacaacaaaacaggaggaacaccctacgccacacacatacactcaacgacgcacatagcagcaacactagttcgatcggtaggacggcgaccacgac

SEQ ID NO: 526579 - DNA, 255 bp, Homo sapiens
caggatttacctggagagctcatacccacagctagacaatatttcaggctttagcatacaactgtaaacagtgactaggttacaaaaataaaataaagtaagtggacttttttttttttttttttttggaaccggccaaatttcctaaaacccggggaattgaccaccccagggttggttgggtgggttaagggttccggacaaaagtattcggtgttaagggcagatgcccttgacattacaatgtaccctcag

SEQ ID NO: 526580 - DNA, 204 bp, Homo sapiens
cggctcctgcaacacgtagtaagtcctaaggcaagattccaagccaagcgcttcagcacataccctcgagcgtgccagtgcgtgagagcctcccctgcgaggaagcctagcccagaaacgcctcccgaaacgggtagtggccctggggcagaagcttccctggaagagcacaagaaggtaaacatgtggcagacatcttaccat

SEQ ID NO: 526581 - DNA, 99 bp, Homo sapiens
tgggactgtttggactctgggcactatttggactctgggcctatttgactctgaagcgaatctgcgattcatcaactgcggcgctgacatgtttgaggc

SEQ ID NO: 526582 - DNA, 439 bp, Homo sapiens
  misc_feature (122)..(122): n is a, c, g, or t
cacatttcgtgtcacatagggcgcaattgtgtgaaaacaaaacaatttggagctcgtggatttttgagccctgcgtctaccaccaaggcataatataaattgagttagattttgcaagtccncaaatgaggtcttgcaacagaactcccagccttttgacttttttcccctaactttagcaagggaggatcttgagccattaatttttgggttttttttaaaatccagaagggaaatagaacccttttcagatttttcatgtgatttgttcttgcagaggttcttctaacaaaaaccttattttcccctacagaaatttgtggcccaggcagatactgctgtatttaggcatttctatttcagttcattaaaaacggcaaaaccaatttggatcatggcccaaactgccttaaaataaatctacaggtttattgaatta

SEQ ID NO: 526583 - DNA, 286 bp, Homo sapiens
aggggcacaaaatctagaaaggtgccaaaaaaactcagtagtccagataaatactattttactgcaatattttttaaaaattgaaattagggcaaataaaatccaagataaacaaattttttttttttaattagctgggtgtggtggtgtgtacctgtagtcccggccacttgggaggctgaggtgggaggattgcctgagtccaggaggcggaggttgcagttagctgatattgtgccactgcactccagcctggaggacagagtggagcactgtgctcggccgg

SEQ ID NO: 526584 - DNA, 1547 bp, Homo sapiens
gcgtgagtgagttgatgtctttgctgtcctgctttcgtgccttctgtagttgtttcttgtgctttgtttcctgatacgatacgcgacgctggttgcctcccggctccgtctatcttgtatgtttgctcttcctgttcgcgactgtgtctgcgctcacagtgttctgtggttttgctctgtgctttgttgtggtccttttcggaagctctgcgttgtctcttgtcctccgttcggtggttactctgtgcctcgttctccgctcttctttcgatgtgggtgcgcccgccctcgtggccccccgacaactgtaatgcagtgcccccctgtgggttctatgaaaacaacccagttttatgctaccacctattaatacttcgaaggatcctacacaagttcgaccacaaaatagctcagggcctgtgtatatcctacggtccacgtgacctattcccggtcctctaaatgtatgctaatccacttgtgttgcaaaatttttcgccactatgggataataatggaataattcaggggcccccgtgttcgctgttcaaggacacaccccccctccaaagtggggccgatcacacccggctgggcatttgtgggacacacacgttgggaggcccccccgttctcttggggggtagatatatcccaggcctctaccagattcgtaatggccccccgggaccttgctttttatgggctggggtaaactcggcgcgtgtctaagacatccaaagaggttgtttcccccggggccccaatttgtgtcttgtgtgaacacaaccacgttggggtgtgtaagcctagtggacacccagagcccacaaacattggctaaaagtgcgcgcgacgcacaaggtgtttgggtgggatgttggtataaaaagaggcgccggtaagttatcactcccccccacatgtggggaacaatggggtgtggaccactcagacgacacgccacagagggacctaagatctgtcttcagcaaccgcctgtggggccgcccagttgcgcaataagttgggtggcaacacgcccacacagagggcaccacacgagtgtactgcgcgtgtgtgagtgtggagatagccccccacagctgttgcacgcccccgcggaatagaaaagattgtgtgaaattgtcactatagagtgagcaaattgtataccccacagctgtcgcacacgcccccactgagctataccacggaagaaaggggtgacaatctgtgtgtgggtgtgcgcgaagtggcacaccttgggtttggctaactaagtagcccggggctatcccctggggctccacagtacctgctggagaaagggagactaacaaaggacagcagcaaactttggggccccgcaaccctcaggtacaagtccctgcgctgcatccccgaacaagcacaggggcacacccaatgtggtgccttccaacccctccaaactatgcccacaccccccatgcctcctttccccgaccccggtttgctgccccagaaccctcccagacctcccaaagatgaattaagttttactt

SEQ ID NO: 526585 - DNA, 299 bp, Homo sapiens
ataactggtagaataactgcacagaaaatactgaagtgacattaagttacagatcggataagacagataacgtcagtatagctgcagtctcatcgtgaattagcaactgaacagtcattaacttaaagttaccatagttgaaagcaagaacgcacataacaatgatactcctaaatgtagaaatatttgattttaaaatacaatatccaggaacagaacatgaaatgtgaccaaattcctcaaaattctcattaccctacaaattatttaatttgcttgtacaactactacaaaatcag

SEQ ID NO: 526586 - DNA, 244 bp, Homo sapiens
ggctttgcagcccattcccaagtcctgtccagtccagggtggggcagggatcccccagggctgcgcggcccttccccagaaccagtcaaccgtcggcaccccaggatgtctacccaccacccacctgggcacccacgctgcagaccgggagctggtcagcattttcgggggactgcttgtcccgtgcccaggcctggaacatatctcccgtctcatcctgaaacggcccaagcccgaggcctct

SEQ ID NO: 526587 - DNA, 581 bp, Homo sapiens
  misc_feature (500)..(500): n is a, c, g, or t
  misc_feature (535)..(535): n is a, c, g, or t
  misc_feature (578)..(578): n is a, c, g, or t
ggctcggtaccgggtcagtacggatgtcgggcgatgtggacgcccaccatcccattcagtgtccaggaacacctgcaacaacaggattcacggatcagcctgagatgatcccagctgtgctctggacagggtaaccagggtgggcttgggaggggagagccgcagtgggttgggggcagtgtccttgtgaaggtggcattcaaaaaatgtgggcgggacacaggtggggctaggccaccacccttggacgcatgcgtcatcagagacatcccctcatctccaccctgggctcggtggagctgtcctccaggctttgcgagcttggtccctgtggtcaggcttagagatcaggggacaggaaagttggccatccacatcccacagcctcagtgcttggaagagcttcctttggggactccaagccttcccagctgctgtttcggcttggtggctgccctgatgctccgggtttgtctcagatgaacttgcttgacaagtcncctgctcctcactatgaagatcactgtcccccagncctgtgtccccgcactgtgctgcacgtccacatccgtactggnccg

SEQ ID NO: 526588 - DNA, 240 bp, Homo sapiens
taaacgtagagctagcggccacacgtagatacattttaaacatttttttctttttgagacagtcttgctctctgtgacccaggactggagcgcagtagtgcagtatcggctcattgcaacctccacctcccaggtccaaacgattctcctgccttagcctccctagtagctagaattcacaggcacctgccaccgtacccggctaattttggtatttttagtagatacgaggtttcacca

SEQ ID NO: 526589 - DNA, 1496 bp, Homo sapiens
  misc_feature (367)..(367): n is a, c, g, or t
ggctcatagattcccactgcttaaacacagggtaagtctttgtggatgccaatccagcgattctcagctctatccgaatcggcaccgtgcccgtcgttgtaagcccctagggagtgctgactgacataaccgtttcgcctgggcatcgcatgatgacactccttgcaccgaagggagcgccctctatacacccggcccaccatctaccgatttatcgctactagatcatcgaatccgatcttcatgctcaactagccgctactgccagcttcctacatagtagtaacccccactaccaacttcaaccaaacccacatgagaggcgaacatgcaagcgtagtgccctcgcgttacttggtgatgtccntacgtcgccagcacgtgcgtgaagcacattactcgcgttcttcacattcgaactacgctacgtaggagtgcaacgcgtctcgtacgccatcagaaatcatcctggtatatggctcctagttccgacttctgctgggaagcttgcgctgggcgcgcgcccacggggtccttccaggtctgagggcgttgcacttcgcgtaagcgcagatcaatctcccataggcttagtcgagattcctctacttaccctcaaagcgtcgttcctcctgctatgtagaacctttggcctctgagcgcccatgtatctcagccggggcagctatagggcagcgagcccatctcctcgcaatataacctcgcttgtttgaatccccccggaaaccgcggagagaagcggttacattgatggatatgtaactcgttttcgccaaagcttgagttcgagcaagcaagcacaagctggaattggccccgcgtgtgccgtacccatatggcgccaggataagagccgcggaaagctttgcggaccggcttgagggtggcgttccccgttgccctcttcccaaaccatttactggagagtcaccgaacgcggagagagcccccccttttccgaagcgctattgacttgtgcgctcccacccctgtccttggcttcattggagcgataccattccccttaattgtggagagttccccccccatactagggcgaggatatccacactccccttttggggcttaagaaggagggccacattcccttaatttggagcgggcatttgtcctccccccctctgggaggggctatcttagcgggacacttccttttctcccgccgttggggcacatgggaaaagcgcgtctctttttttttagaaccctccctctggggtcccctcaagatgggaattgggcgaaggtcagctttcccgccccaggagtggtccggggtatcgagctcacccttcacagtgtgcccccctgctttactcggaagagaaccctttgtccctagtgcacactataatgtcgtcttgaaggggtttacaccgttgaggatggtgacctattgtgcgctcgcgtgtacccgcggtttttccccttttccccggggacttccctccccg

SEQ ID NO: 526590 - DNA, 573 bp, Homo sapiens
  misc_feature (567)..(567): n is a, c, g, or t
ggctcggtaccgggtcagtacggatgtcgggcgatgtggacgcccaccatcccattcagtgtccaggaacacctgcaacaacaggattcacggatcagcctgagatgatcccagctgtgctctggacagggtaaccagggtgggcttgggaggggagagccgcagtgggttgggggcagtgtccttgtgaaggtggcattcaaaaaatgtgggcgggacacaggtggggctaggccaccacccttggacgcatgcgtcatcagagacatcccctcatctccaccctgggctcggtggagctgtcctccaggctttgcgagcttggtccctgtggtcaggcttagagatcaggggacaggaaagttggccatccacatcccacagcctcagtgcttggaagagcttcctttggggactccaagccttcccagctgctgtttcggcttggtggctgccctgatgctccgggtttgtctcagatggggttgatagaaaggtctgccgcggcaaacaaaaagatgagattgtgaaaacataaccaagagaaagggaaaaggaaaaagcggngaaagg

SEQ ID NO: 526591 - DNA, 649 bp, Homo sapiens
  misc_feature (492)..(492): n is a, c, g, or t
agcgggcttccgagctgggtgcgcgccgagcacaggagattgcctgcgtttaggaggtggctgcgtctgtgggaaaagctatcaaggaagaaatcgccaaaccatgtcttttttgctgtgttcagagtagttcacaacagatctgagtgtgttaattaagcatggaatacagaaaacaacaaataaacttaaggctttaactttcagtctggaccttccactagtttgcttagactccctggacccggttgacctgttggctctgtcccgctggactgctcatatcagcgatggctgctctctcgactatctcagccccgtagtggtgcacgagaccttcgggctcgcggtgtcttctgacgctgctgtggactggcctcgagctctctgagactgtcctgtccgacgtaggagtgtcagctgagactccctcaatagtggagccctccttgctgctggtcactcctgacgtttcttatgtgatgtggtacnctcagctcttccccactacgaatgtgactagaacgcgtgtaactgggatgtacttctatgagatatgagccgattgtacagacaagactttcacttcacacttcgagagcattcaaactgctctcatcaagaatccatttctggtcattctggtgac

SEQ ID NO: 526592 - DNA, 1314 bp, Homo sapiens
tttttttttgtggaaacgagcgaaaattaatttatattaaaaatatttgggtggtggtgagtttcttaactttctcagggtgacccatctgtggggacccatgtggccccacccaaaatgtgggcccatgtctctgggggcgcaggggaaaaaggggagggggtagaatatgagaaaaagagcccggtttcttctctcagtggctggggggtgttgggaagacaccacccctctttctggtgtgccctctccttcgtggggcctctcgagagaagaggaagaaccagaatgaaactatcttcgagcgcgcgtggtgggtttctctccaaccacccgagtggtcgccccgcagaggtgtgtgggaggggaacgccttaagagagatatgaagacaaagagggggcacaaggaggccaaaaaaagatgtaggtgtgtgttctaaaaaaagatatgaaaaacaccgggggggtgtgagggggctgtgaaaggggaaatatcaagagaataaaaatcaccggtttataaaacaaaaaaaaaaaagagagggggggggggcgcgcctctctatagagagattttctcccctcgcgaggagggggggccccaccaggatgttatataacgcgtggttcacccacgaggttttttttcgtgtgtactcaccagaggggtggggggcctcccctatatatgggtgagaaagatctgcgaatattattatatagagcctaaagagacacgtggtgcgtccccggctctgtttatcttcacacaaaagaggtgtgacgtgagtccgtgtgcggagaaacacccggttgcgtatacgactgtggggaggagcatctcctttgtggtgggagcaagggggggaccacctcttaataactatctcggtgggggggggggtggggtagcccaaccaattattctgttgtgcgggcccacaaaacaatgtattaccatgctcatcaagcgaggggagagtaatctttttaaaaaggggcgtctttcataaagaggggggtacactcttagtttagagaacgtcgttgttgtcacgaggggtggtgattattagcgggggggtggcctctaacacacaatcaaggcgctgtgggaaaaatatttgtgcagtggtagcagtggcttagagaaacaaaatcgtttctagggaggagcaataaaacgagggggagaaaatttgacaggatcattttgatcagctggagactcacttttgtttttctcagacggagatgatagagtattgatagtgagaatagacaaataataagcggagcgagaggggagagg

SEQ ID NO: 526593 - DNA, 721 bp, Homo sapiens
cgcaggtacttgggaggctgaggcaggagaattgcttgaacctgggaggtggacggttgcaggtgagctcgagatcacgcctacgtacactccatcctgggctggtggagtgatgaccctgctctaagcaatgaaataaaaaagagaaaacaaaacaatacaacgatgagatggaggtggactacgccgaaaatgaggtgagcagtctccgaggacgaggacactgagagctcgtcggactctccgaggatggcagatacgctcacgaaatggatgagtgaagactgtgaaaagaagaagaatggaatgtaatggatgaaatgtccattcttgaaaaaccaggtttaccgatctcaagagatcaactttgatcgaagaacgaattaagtcaggtggatgcaacaacgtacaagaagtcatagctggacaaagcaccagagattacttgcgaaccgctggcaaactttacaggaaaactatgccacattcgctacaacaggtcgccaggacatcctaatagagagctcgtgcttagaagtctgtaaacgaacaaatatgactgtgacaattcacagcttctcgccagcataggtgagagcgaaacagaggctgtatgctatatgataacaggtccaagagtgaaactatgaggaggaagatacgaaaggcttgaagaggataggcaacagaatagactattacctcagagcagcaggaatga

SEQ ID NO: 526594 - DNA, 326 bp, Homo sapiens
tgctgggaccacaggcgtgagcactgcaccgagccagaagttttgaatttttacgaagtctaatgtgtctgtttttcttttgctgcccatgcttttggtatcgtatccaagagatgattgccacatccaatgtcatgaagctcttcccctgtgtttccttctaagagttttatagtcttagctctcacatttaggtcttttattttgagttaatttgtatacggtgttaggtaagagtccaactttatatttttgcaggtggatatccagttgttgtgacaccatttgttgaaagactgtcctttccccattgaatggtcttgaca

SEQ ID NO: 526595 - DNA, 458 bp, Homo sapiens
gttagagcgggtatccggaccaccaccccacaccatagctcttagttcagaccaagtgggatcatctttctgcatggctggcaacatgttcagcagttcttcttctgctactgagtgaaatgcccaagcaaaatgacttgtagacaggcctgaagaaatgttaaaaatgatgtttataagaattataaatatgcttatatgattatcagaaatgtatgttccatattttcaatataaatgtgtaaacttctatgagactcacagtttaagattggaaatatgggcttttttaagtttttccttcttcaaataactgtatcactccaatgagcacatatatgttttgcaaaaatagcatttttttgaaaggaaaagaaaaaatgcttatggcaaattccactgtgctgatgtatttctgatcctttttaaaaaatgagtaacacttaaagcattatttt

SEQ ID NO: 526596 - DNA, 398 bp, Homo sapiens
aaaaaagatatttatgaaataaatggtaatttgtgtaaataagctttaaggttcccagaatatgccaattggtattaatctacctcccagccacaacaaaagagtagacataaatttagagaataacatcaaacatttaaaacattttttcattttacgtgagcatctataattgtacagggctgggggggcccttggctgcgggaaaaggcccagagccctggaggagccaccaccccgccggccccttgacccctcggcccctcggcccctccgcccgggtttggctcgcccggcccgcgggctccacctcaggttttcacttttcgctccgcagcgagaacgaaacgacaaaaacgcaagaaaacaataaaacgctagaaagcgaagtgaaaaaa

SEQ ID NO: 526597 - DNA, 612 bp, Homo sapiens
  misc_feature (408)..(408): n is a, c, g, or t
  misc_feature (511)..(511): n is a, c, g, or t
gagttttagtaacctgaaatgttttttttaagtgcttattcatttagggcagttagtacaaactcaggtttttttggagttgtgcttgtactcaccatcatgtaattgtgaagtgaacaaatacatcactgtgtggcatctcatgtcgtaggacatgtatttgagttgacaataaatattaaatgactgtgaaagaatgatataatgccagcacggagaagaaataccacacagagttaaattttgcatataaacgttggcaaagtgctgcagtaaattaccgttttcttcataatatgaaattcctttgcatggtgcaaaggaagacctttttaagcaaagagtaatctctggaattcagcattaagactctagttaatttcaggattttgttggtattgctgttgntgcttgttgttgctcctttgcagggaaccaaccataagaaattccttgtgcacaacacgaggaagtttacaagttaattaacatttccgttcactgcatttgntttaatttatattgcttgcaattttgaatacatctggtagctctttttgctttgcggtacctcttaataccgtataagtactttctttttatcaggatgcg

SEQ ID NO: 526598 - DNA, 447 bp, Homo sapiens
taaaattctaacttaaatgttttgatcctcaagctaactttgggcattaaagcccttggaagtccaaatagggcccctggaagtccaaaagaaacatattaggctaatttggtatattaaaatcatacaggaagctgatcaaataaaaaatgttgtttaattttctttgagttgtatttgtataaatctgttattaatatgcatcccaaaattgtatcatattgctaaaatgttgatagatcttgttatatgttattggtaataattgttatcctgttaaattattgtataccacagaaataatgaaatttctttgtcaattgcatcagtaatcatggctcttctaagtcttttgtcattcacagatgattattgttttacttggattcttttcaaaagtggtttgtaatgtgctacagcctaaaatctgcttgttcaaaaaaaaaa

SEQ ID NO: 526599 - DNA, 205 bp, Homo sapiens
ccggaaaggtagctgctactgtataggtgaagtaaatccgttctgtatagcagctgtagtagggtcgtaagtaagtgtcattccagcaagtctcacctctccttctctatgccagggtctatccatatagggatgtatttgtttggggttctgtctctattttctggtcctaccatcacgcacaacttacacaagtaaatggttc

SEQ ID NO: 526600 - DNA, 957 bp, Homo sapiens
  misc_feature (607)..(607): n is a, c, g, or t
cccacgacggtaccgcccttcgtaggcccctaagggttaatataacctatcgttgacgccataaaatgtcttcaccaaagagcccctataaaccagccacatatacacatcagcgtctagatccaccagccccgcaccttgagtctctcaccaatcgtcgtctgtctactatgaaccccccgtccccgatgatctgcaaccccggtgggtgcgtacctcgaatacgtgaagccgtcctactgtatcgcgtactataccgtcatatgctgataccgctaatactgtcatctcaggtcatggattccagaggtgtggagccttctcagagtatcactcagagaaactgtacggctcctgtgtgatcagtgcagtcaactgtccacaccactcataggcctctgatgtaatcactcgtccagtatgtgagcgatctacctcgttatgcaattctcactgcatactttactttagaggattgtacttacaattaatgatcgcgctcagcgtgtctcacagcgatctttcacaaaccccagtgtgtagtctagcacattgattgacagagaacatcacttcgatggcactctacgtcacatgatcggatacnataagtacaccctatgggaagaagcgcatacattgtaatcgatatgtaaactccttttggctaatcacaatacagtcgtcagagacgacgcgtaattggaaatatctcgcccccgttgttgcaagccatttagcctgtaaagggggagcaaaagggccagttattctattagaaatccatctagtggcgtgtacatgcgcgatactcgaaattgactctctcggtgcacgggtcaccatgcgcatttcgtggctctctacgtctacgtgtccatgtagtgcacgaattaattacacatctataaaaggagttttttcccttgaggctataaacagacacaccagtacacc

SEQ ID NO: 526601 - DNA, 631 bp, Homo sapiens
tgccgctcgtatcttaggacagaggcgggctttcagactccagaactcaactcgcagctctctgaaaagtacgcggatggaacgttccaaagccatctctcactccctcccaatagctagaacataaatgttgtgtaaaaaaaaaagagaaacacaaaaaacgggtcaggcataccacctgccacctcagcctagggaaccacatggacatattctagtgcaacactcaaaatacaagcccaaggtgaaacttgctgggagggctcccatacgccaaaaatgtggtccgtcaggttcaatctggctgtggaatcgttctgtatggagtctcgttagtccgaggatcagatacaatttaggaaaacgaaatgtgggtgattgcctttactctggtctcgactgctagacgaatcacgtactgactggccctaagaataaggacttctgaagccatgagtccatacggaacgatcccttgggtttcctttgcttaacatcccatggaatactgccaagaaaatctctagatggaggagccaattgctgtggtctcttcagtctattggctcggcctccatctctgtccctgccttccacacacttccaagaccacaggggaaggaggagccaa

SEQ ID NO: 526602 - DNA, 227 bp, Homo sapiens
tggccgttactcgcaagccggtgatctccgagatacaggcatcttccttgacttgatgcatctgaagaaacctgggcgtgctttgacatatccttgttctacagagatatcatcagcataggagagtgatgatgtgacctcatgggttcacttatgatggaatccaagcaatgctacgaagcacctgattgcgtgaagtgttctgcgccaagtgagaccagtgaagc

SEQ ID NO: 526603 - DNA, 169 bp, Homo sapiens
ttgtgttgcacttttagcaagaaagacattcatattccaatggtgtagtgttgattgagtcctgccatccttatcaacagttacatcattgaggtgaccaaaattgaaagtaatgaatcagtgaagaatccttacaggaacatcttgattaatttcgaaatgtctgtca

SEQ ID NO: 526604 - DNA, 301 bp, Homo sapiens
  misc_feature (50)..(50): n is a, c, g, or t
caataacttttcaaggggcctttgttaaggaaattatatccccttaattnctataatatataaggctttatgaaaagccctttataaaattttaatttaaaaggtcaagaacttaacccttatttttttattcaggacagggggcctttatattaagtatgtgacccagtataaaatccctgaagggtatcatgatttgattgtatcctggaccaagactacttcccttgaatgctccaagatttaaaagtagtatgacatgttctccctctaaaataaactttttttttttttttgagga

SEQ ID NO: 526605 - DNA, 732 bp, Homo sapiens
  misc_feature (128)..(128): n is a, c, g, or t
gtatcttattctaaaggactgaattatttttgtatacagacatacatacagaataaaaacatgtacaactctgcatttatagtctgtttgcatttcaaattattcatcatcattgggagtcagatacnaccctgtctgcctgtattcaggtttcttcattttgcatccatcaaccatgcgggttgggttcattttcgcagtttggcagttgcagcaatcttcatactaacataatcccagtgggcagcacaacaccaactcccagtcatatatctagcacctcagcgcaccacactgtgcaaacatctcttcagcgtatcatcacgcaaatcttaacagttccggcagtcacagcaccttatagcaacgtccatcacacttttcatcaacaatattcctccaactcacagcataggcaatcaggtatcattagtcgcaatcttaaacaacgtacatacttgcctactaaacagtcacactttcgacaacggggacggcctaatgctagggaatcacaccacgtctgacttccacacattgcccacacgacaacttggtctgccagaggccataagacaagagcccaaaaatagaggaacatcaaatgaggaggtaatgaaccacagcccagtcggtcaacaggaccctttagaccgctcaccacgtcatacagagtctacgtacatgggttccaggggcaccaatccggggacggaaaccaaacgccactaa

SEQ ID NO: 526606 - DNA, 683 bp, Homo sapiens
gacagctcggacgctatatgactcgaaagcaacgcctcgccatgccgaggcgcgctacgacaaggggattggtgatcggcgtactatccgccaggctagcgatatgggactgggttctgataaactcgtagctgcccattaccgccgaccctgccaggctgccgatactctggctcgccccgtacaggaccacgagcgtgatcatgtactgaggtcccttcgcgaacagtttgaggaagccaaagatcaaggcaggcccgataaacagcgtcgcaccgaacccaatcaaacactggctcgggtacagttgcggcgcacgcgtgaggctggtggattgcgagtccagatacgctcccgttgcgataaacaacgccgcgaccatgacctgccaggggatacgtatgggcgacaacgtcaggcaagcgacgacaatccccattagcatcgacaccagtacgcacgcaaaacaggacacgcaattgatcgttattgagcccgcccattgatagcaaacctaccgagccgaaagtctgctcggacagcgatagccgaaccagcagcgcaatcgcaacaaaacgcatcaagtcgaaactgcccagccattccaattgcaacagcggctgacgccgacgtcgttcaatgaacaccaccgtcaccagcaacgagataggcgccaccagcat

SEQ ID NO: 526607 - DNA, 163 bp, Homo sapiens
cacatggggtgttggaggtagatgggctccggcgggggcggcggtggatgaggcgctgggcagaagcagacgccgattccagctgccccgcgcgccccgggccctagcgagtccccggttcagccatggggacctctccgagcagcagcaccgccctcgcctc

SEQ ID NO: 526608 - DNA, 414 bp, Homo sapiens
  misc_feature (175)..(175): n is a, c, g, or t
  misc_feature (180)..(180): n is a, c, g, or t
  misc_feature (185)..(185): n is a, c, g, or t
  misc_feature (190)..(190): n is a, c, g, or t
ctggctcaaaggaatggtacccattatgattcctgatacttaaactcttatatcagacaccaaggagacctctgtatgtatccggaatgctaagggtcctctcattgattagggtctcacaaacggggtgcagagaaatgtgtgtgtgggagggttgatgatggaggggggtgtncaggnttggngtttntagcttggcacatacggacaggtgatgtttgagctgcctgaaagagaagcatgatgcttacgggaatacagtttccaagaagtgatgatctggctccaagctcattcttcagttggatttcaagttgcaacgcccatgcttgaataagcactgtgaacgagcattcaaccaacggaatacatgtttcacctgcagggatttgttagcatgcagcagatgtttgt

SEQ ID NO: 526609 - DNA, 314 bp, Homo sapiens
cgtcgaccggggtttcaccatgttggctaggccggtctcaatctcctgacctcaagtgatccgcctgccttggcctcccaaagttctgggattataggcatgggccactatgcctggccataggtcacattctatatgataaaagatgacacaaacaaagcttaaaggtatgaaacagatggagagaagatacaacatggaaaacagatggaaattagtatccataaagtatttttaaaattcctgtgaatatgaaaatataataatggacaagacatataagcaggtaacacccaaaaaaaaaaagtcgacgc

SEQ ID NO: 526610 - DNA, 152 bp, Homo sapiens
gactctacaggatccccatgtatagtccactgaggggcagagctcggccagcagagagaaaggtcatctaccctgacaggcaggccgattctcccaagcacatttcacctttgttagtggcttcttgccccctccctccccggcgatacagt

SEQ ID NO: 526611 - DNA, 247 bp, Homo sapiens
caactgcttgggatgggattaaaaataggcaccaagccgcggtggctcatgcctgtaatcccagcactttgggaggccggggcgggaggatcacttgggggaaggagtttgagaccatcctggccaacacggtgaaaccccatctctactaaaaatacaaaaaaattagccaggcatggtggcgggcgcctgtaaactcatctactctggaggctgaaataacatgtgcccaccaccactttcatcc

SEQ ID NO: 526612 - DNA, 193 bp, Homo sapiens
gtttactgggcagctgttacgctcagattccaaattgataattgtttgaagaagcgcttgacttctacaagcaacaaggtcctgggccgggtcttttgggcctggaaatttgttcctcgtctgcgccaaatcccgagacacacggagggatgggtgcccacacatttttgggtgttttcttcatgtctccttt

SEQ ID NO: 526613 - DNA, 173 bp, Homo sapiens
  misc_feature (15)..(15): n is a, c, g, or t
aaataaaaaataagnacccaaccaatgctacagataataagagctcagtaaatgttgattgaatcactaacaaagataaaagcagacgacacagtacctggcacactactaactgtaaatgttttaaaattgaatctgtaaaatttgtaaggttttatgaatataatattatt

SEQ ID NO: 526614 - DNA, 353 bp, Homo sapiens
aaaaagggtatttattaaaaatagattttttttccttcccctcccccctgcgagcaaaggggcctttcccaacatcttttcccaaatggatgaaccaggtcttggggcccccaatgtggctttctccataacctcccggacccggcttttctgggccagggggtctgctgggccccagaggggacccgcccaagacaccatcagcaaaccctggcccccctaaccccgggctgccttggatcccgggacggcctggagtccctcctgctccagggccaatcccacaaagagagaccccccggcccaacagcagcctcctgggcccccccagaaagcggtgtccttaagggcct

SEQ ID NO: 526615 - DNA, 125 bp, Homo sapiens
gaccgtgatgttacgcccacactaggaggggataaaataagcattgcaggaacttatttgtaaatagcttcctcacctaaactttgacttgacaatcaatactttctactttgtgttggggataa

SEQ ID NO: 526616 - DNA, 671 bp, Homo sapiens
  misc_feature (359)..(359): n is a, c, g, or t
tcagcgtagatcatatgttgcttgccaataaagacagcatcctttcaatctgcaggacttttacttctctttcatgccttttccagtggttaagaccttcagttcaatattataagtggcaagtgccttttttcctgatctgaggaggcaattcttgtgatgctgttagtaagagtgtttcctttacctctatttcttacttttctttttttcttatccctcccttcctttcttccttccttccttcctttcctttcctttctttctctctttccttctctttcttttctttctttctttctctttctttctttctttccttccttccttccttccttccttctttctttcttcctttntctttctttctttccttccttccttcccttccttccttccttccttctttctttctttctttctttctttctttttctttctttctttccttctctttctctctctttgcttatcattctatcctctttcctctctctctctctttcttctttctttttctttctttcctttcttctctccgctggtagatgccctttattttcttgttctgctgagagcttttatttcttaaagccatgtggttttgaatattgcacgccttggataacttattgcattttcatatacacgcatccatacttcctggtccc

SEQ ID NO: 526617 - DNA, 104 bp, Homo sapiens
caccatgtgcggcaaaagccgaaggagtaaggtgctgcaatgatgttagctgtggccacggtggatttttcgcaagaacattactaaactaaaaacttcatgtg

SEQ ID NO: 526618 - DNA, 98 bp, Homo sapiens
ttgccaatccttacattcctgtactgtgcatcgtgagggccagagacaggaatgtaaggattgtcaactgtgttaccattctgatgttggagcgggcc

SEQ ID NO: 526619 - DNA, 472 bp, Homo sapiens
cttggcagagcagaaatacatatacagatgtggagccaatggggcctagaaaaagccatcagcattaatgaggatagcaggagtggcggtagtggttactgattaaacacccttagtcagcccagccctctttcttccaaatctggaaacactagcctctagaggagctggggaaagggcggagaaacaacgtatttgaagacacaaaatggtttaaatgtttgtagatcacctagctggtcagcaatagtcaggggtagaagagaggactggaccagatgtctgcctctgagatgatgggacgtcttaagcaatctcaaccagaatgcattttttattaggtcagaagtccttgacctcttttaagtcccaatgcctctaaatgatttggaggggaaactttggccccaggtcgtactccatcacaagggttcacttcatcacaaactccagatggccacggacaggtcac

SEQ ID NO: 526620 - DNA, 423 bp, Homo sapiens
  misc_feature (371)..(371): n is a, c, g, or t
taatctatgaatctctcttactaatataagcgaggagaaatccagactaataactgctacgatcttttgtcatgcttacttctcatggtgttacctgattatacctctttatgtgaaagccctgttagggaatgctcctggtgtaacctatgtcgcgtttcaagttggaacttgtgctcgcatcctgagatccagaatggtcaattggcctggtttgattgttttcccctaatatcctgggtgttaaattctatccaggcttactttgaagatattgcgagtttggttccagactactttaataaagcaaataatcgcaataaagtgagtcacacaaattttttggtttctcagtgcatataggttatgtntggcccttatcgagctcgataagggccaagttcattggagctggggctgcca

SEQ ID NO: 526621 - DNA, 360 bp, Homo sapiens
gtgctggacttatcagatttgagaaccagtatcacattttcctaataaaatgcattaggtggtcaggtgtggtggctcacgcctgtaatcccagcactttgggaggcagaggtgggcggatcacttcgggtcaggagttcgagaccagcctggccaacatggtgaaaccccatctctactaacaaatacaaagactggctgggcgtggtggtggacacctgtaattccaagttctcagaggctgaggcaggagaatcgcttgaacccaggagacggaggttgcagcgagctgagatcgcgccatagaaacaccatggaactccaacctgggcaacaagagtgaaacttcgactcaaaaaa

SEQ ID NO: 526622 - DNA, 83 bp, Homo sapiens
  misc_feature (51)..(51): n is a, c, g, or t
  misc_feature (57)..(57): n is a, c, g, or t
tgcaaacaaacccgggtaagtatggaacaatgtgtaagtggggttatcacnctttgntgtaaaaatttctattttgtgtattt

SEQ ID NO: 526623 - DNA, 840 bp, Homo sapiens
ctttactttggctagcgagcgcgcattgttggtacccgggatcggccatatggccgggggtgaaaaaaattaaaaaaaaagaaaaaaaacaaaaaaaaaaaaaaaaaaaaaaaaaaaaaaaaaaaaaaaaaaaaaaaaataaaaaaaaaaaaaaaaaaaaaaacaacctaaaacaaaaaaaacctataaaaggggggaaaacaaaaaaatgaccaaaaaaaaaaaacctttttgtttttttttgccccggggtttttttactttagcaattttttttcttgcccccccatttcgccccccttttcccctttccccctttaaggggcctttttccaattccttgcccccctttttccccccgtgtttttggaaaacccccttgtttccccccttttttcccctttgaaccccccccccttttccccctttggttaaaaagaaagggcccccccccaaccccccttcccaaaattttccccccctttttgggaaagggaaatttcaaccctttttttttttctaaaattccggaaaaatttttcgaaaaacacccttttttttcccccctttccccgacccggcccactcccttttaaattaaaatttttaccccaatttgggtcggggttgttccccgttttgacccaaagcccctttttaaaccccttttccccccggaaggccaaaaacccttttttggggggttgcccccccggggccccccccctttacttttttttggggaggggccccaaaacctaattgcccccctatggccccccttattacttcctcggacgccccccctccctattggggcccttccccccttcgccttct

SEQ ID NO: 526624 - DNA, 109 bp, Homo sapiens
gcacatgtgctttttatttctcattaaatgccagagggaaaggcaattgcaggcgtgtagtattccgacatttcagcgtgctgcactcctgcccttctgtcgtcttctc

SEQ ID NO: 526625 - DNA, 281 bp, Homo sapiens
actgtaaggactgccctatctattccagacagaattactcttccatgctgaatacttgtgtgaaatatcgttaaataattgaacattccttgatcacttcttaacagtgtcaaaactggggtagaagggatactattttttcccacaagggtgccatctttgctatctgtggatcagccttagaaaatctaagtatgatcaataaattttaatggttgatggcatcctgtgtcagctggagtagttggttgtgaatattaaaacctagtactattttccct

SEQ ID NO: 526626 - DNA, 294 bp, Homo sapiens
ggacccttaggacatgatggggctgtagctctggggacggcacaggtgcagcaaggaccggctcctctcactggggaacgaaacaggccatcccgcaaggagccttcacagcacgttcttgattccgtgggcagtcagatatctttcaacgcagctggttaggcgggactcacacatggcagcaccgagatcaatgataagtggggcagagagccgaggctttaggtggcagactgcgaccatttgactggactcttgcgcctttgacgtttattcttgaccattgtggccgac

SEQ ID NO: 526627 - DNA, 111 bp, Homo sapiens
acgacacacgcaataacacagcacacacaaacacacagcacacacatgcacacacaagtacacacactcatgctgcagaacatactttaacacagctcgcactgcggccgc

SEQ ID NO: 526628 - DNA, 121 bp, Homo sapiens
gtgggtccaaagaagacgcccctagatttgagagctgttctcctgcctcctcactgggctgccttgcgagtaaatcttttctcttttacaaaacctgtcacagtgatggatttgattcgcc

SEQ ID NO: 526629 - DNA, 307 bp, Homo sapiens
agatgacgcagataacccaggagttcgagaccagcctgggcaacatggcaagacctgtctctacaaaaagttaaaaagattcactgggtggtgtgcacctgtaatcccagctacctaggagactgaggtgggaggatcgcttcagcccaggagttcatgcctgcagtgagctatgattgtgtcactgcaggctccggatgccgggttctctagatcgtctctataatgccgagaaccccaagaggtgaatcagaaaccagtttgactgctcaaatggccattgttataatgctcgtggaaattgtct

SEQ ID NO: 526630 - DNA, 153 bp, Homo sapiens
acatgttgtgtatcatgggtaacataagtcgatcacccattgcagaagcagattcaggaaacttgtaaccgatcaaacatctcagagaattgggagggtagacagcgcggttagaggtgagggcgcgattagggtacgcggtacagggtgagg

SEQ ID NO: 526631 - DNA, 331 bp, Homo sapiens
ggctcgagcggacagcgtctgaatatggtgaaggcaaaaagacgctgctttggcattttgtttgcagcacacagaagtttacatgaagtacaacaaatccttgcagtggtgaaaactgacatggaaagtggcctaaaccaggtctaactaccaggtgattgcagtagcctggcacaactggccaaagtgtaactcccacagatacgcgcggatccttatctttgaaacacaaagcgactggggctacgattcatcaagccattggacagcttcataatgcagcatcccagaatgaccggccgaacaccgtagacctatcaaggtttgatgt

SEQ ID NO: 526632 - DNA, 290 bp, Homo sapiens
gagcagtgacggaatcatggctcaccgtaaccttgaactcccaggctcaagtgtttctcccaccctagtcttctgagtggctaggactacaggcatgtgccaccaatacctggctaatttttcttttttttttttagagacaggggcctcactatgtggcccaagctgatctccgagcctgatctgcctgggcctccaaaaaggctggaaatacaggcgtgagccatggcaccgggcaatttatttcctaagtgttctcctttttttttcactaatgcggcacctgaatc

SEQ ID NO: 526633 - DNA, 1616 bp, Homo sapiens
  misc_feature (775)..(775): n is a, c, g, or t
  misc_feature (923)..(923): n is a, c, g, or t
ggcaccgatggtcggtcggctgagaacaagcgccgttacgaagaggcggcaagaagggagaccaagagagaaacgtggttcgatcgcgactgttcttgagagggacagagagttcgtgctagtgagtcgtgaagacgtcagcacgttgctagtgcttacgactagtagagcagcactattcgcgcatagagagcgcgtcggtacaacagggagccacgggaaccatgaatctggcgttcgtgagtggctctcaaggggctccggtgtggtattcgaaaggtcgagatctctgctcgaattgtgccatgaactgaatgaacgattgaccagtttcagcacaaagttacaaagcgtgagtatagcatgacggaatgcttccgaagggggctgaaaacacaggtgcgcgtgcgacgttgacacttatcgcacattgggacggatcggggagtcatttagacgcactgttggcgacagtaggcagaatggtagctgtcccagatggggttcccacaggagagcaccagttgcggcacagtcacacgaaaagtggagtcttgcacagcgaccgttctaacgcgtattcgcgcaagtaggctccgaaagcggaaccctaaccccaagaaaagtagaggctgaaacggtaatgggcacttcgtcgggggcggtagattatcaatggatgcccagtcgcggggtagtttgtaagccctaataggaaagacatatcggcgggaaataacatattattccataggaagatgagcgcggagaacanggtaaaccccttccgttatcaattagatcgcttcccaggtctaaacacaaatagactaggggacttcacgcggctcccgagatatgttcacagcgggaacaggcgacaagtgactgacacttgtggcgacaaatctcccaattgaaangaccctgagaagaaaagaggttggccaggcaactagaagagttggagcgcttttgagacaaaattgggacaaaagcttgggcttacacaaaagttactagacctgtgtggacttggtccccgaagggagcccagtgccaaagttttttgcggcaaaaaaaaacgcacccagtttaggcgacgcaaccacgggccttttggctctcgaaaaattccttgaatctgttcaagttgcccattgcctttcaacacttgggaaagttgttcgtttgtgcccgcattttaaggggaaccagccacttggttcaacaacactacacaagttgtgcgctcgcaagagcgaaaaaaaggccgccccaaagaagatttctttggacgagagttgtggggggagacaaccggccgtcccaatttggcgcagggcagtttccccgtttggcgttttttcaagaaccgcgggacaagggaatcagcattccctttggggcagaaaagaccggccgccaactcggaggatgtggaacgccgcaatgacaacaccaaggtggtgtggccctttagaaaaggtttttgaagaaacgcggacagccccctgtggaaatggggggacaacaaatcgaaagagtgcccaacacccaagggtacccagagaaaaagcccttgctgttagagaaggttcacacacactttccat

SEQ ID NO: 526634 - DNA, 132 bp, Homo sapiens
tgccgtctaatcaggatcacaagtaggaactgagtattctcaaagtggatcttctagagtgtagtgtcactccaggcaaagattattcagttctcatcccctgcatccactactacctattagaactggctt

SEQ ID NO: 526635 - DNA, 679 bp, Homo sapiens
  misc_feature (629)..(629): n is a, c, g, or t
tagtcttctcacatagttgctagaatgtggtgtaacatctgagtctgcacagaccaggagaagcacgcatcttcatcagcaaaggccccttcgatctggacttaaattcacctctgatccaccaaagttgatattaacaatcatcaaactactactctaataatagtgtgagcttgccacgttactcgtctcatgcctattccacggcactggtcagaggtatatatgcttttaaactagccgaatgtgcaagttctcatggcatcctcactctgcaaacattcaaaccacggtttcataatgctatgagtgttccatcttcttctaagaggtcctgatctggagcatgtgcttcaaattccgcgttagagctgctcgctatggctgctaagctcacttcagtagagggaataaagccattctgttcagactcatagcttagctctatctgtgttgatgactccaggctctcagtattaggaacagctttttgaatctgctgtggcactccattgtcttcaatgataatgtcatcttcttcgctgtcttcatcctctggctcgcttgggtcaatctgctgtgggtagccacgaaggctgttatcagtagactgaccggaactgccagangtccgactgttctcacaacattattcctctggtttgcccgtctcctgttt

SEQ ID NO: 526636 - DNA, 624 bp, Homo sapiens
ggattacaggcgtgagccgccacacccagccattaatacgttttaaaagcccactgccctccggcctgggcgagagagtgagtctctgtctcaaaaaaacaaccaactaaccaacacccccgtccaccaaaaaaaaaagaaaaaaaaaaaaaaaacttgtttgggcggccatgggcccttggaaaaggtttttagaaacaatttggttgtggggcggggggccccagaggggttaagttgaaacatgtgtactaagtggttcccataggaagaaatcgcgggtactggaacataaggtggtgggatttcttacagcaaataacaaaaaaagccccgggggggaaaacaggaagaggttttggaaaaaaaatctccagaatgtgggaagtttcggaagggctcattacagcgggcatacgacaccaagggagatgtcacaaaggagaaagcgcccaagattatcagaaagtaagaccgcccccggcccgtggagagaaaagaaaagaagacaagaaagaacaagaaaacaaaagcaaagaagaacaaagagaaaaacgaaagaaagcagagaagcacagcaagagagaaacagagcaaagaagcagaaacaaggaactgccacag

SEQ ID NO: 526637 - DNA, 1148 bp, Homo sapiens
  misc_feature (230)..(230): n is a, c, g, or t
  misc_feature (1148)..(1148): n is a, c, g, or t
ggtgggagtctcgcttcgtacagaggacaagtttgtgcttcggtgtccagtgtgttactttggagtttaggatgccagtatcctgaggttttttttgtcatcgtgtttcgtttctcctctgtatttaatagtttgcatgtgctttgtaaccacgtgtgtgttgagaatggaccaatcaccaaaccatccctggggaagggggacacgggataacatttaacacagattgntgagtcaggattttgccccaaaatcagcccaagggagaagaggaactggagttgggaaccaactaataggtgaccccgcagtaaatctctcgttagatgtgacaggggtggagtcagacatcgcagacactggagactcttggtgaagcttgttgggcgtagcatgagcagggacatacagagggagagacggagggggcatgtagaccttaggaatcaactcttaactagactcgcttgggcaggactcggtaggagatacgaatatcttcccttgtcagcaagacctaactctatactaggggaatcacattcaggtgtatgttggaacaaggctaattctatgacaacaggaacttccctttggttcccgcgagaaccttttcattgcgtagagatccttccttaatcagacatacacaggggggcgatttaaacaaacatatcctcttgggaagaatggtaaagggcatccattgttgatgtccgtagaatagttattggcaaaaaataggcagaagggctggccaattccaagcactactttaagaagaaaggcatcccccctaaaaggctccatggcggaagttctccagatactattggagactttgggggcctttgcccgttgggcatagggatcggtgccaggggtaattggcgagaggagaactgagcgttcccaaagcagcatggcgttcacgtgtcaatgtgcaagaggagaacagatggttcaacagacactagttgtggccccaaatatttcccaaatcggtgggagttctcattagtggaaacacgggtcctccttagtagggaccattacatgttctggccttggggatatcccttattcgtatgaagaaaataatcacaccgatagagcaatgggacaatggcaagccttgacaagatcgn

SEQ ID NO: 526638 - DNA, 1563 bp, Homo sapiens
  misc_feature (167)..(167): n is a, c, g, or t
  misc_feature (195)..(195): n is a, c, g, or t
  misc_feature (397)..(397): n is a, c, g, or t
  misc_feature (626)..(626): n is a, c, g, or t
  misc_feature (661)..(661): n is a, c, g, or t
tgatcactatccccttaagaagtcacataagatagtgagtacagacgtgcaacaacgcatctcttattctaccactagtcaggtgtccttaggaaagagcagatagaattatctgagttgcgacagtcccactctaacttaagccttgagcctcattcattgaaatncctcattcaaaactagcccgcgagtgcncacttccgtatcagacacaagaataactctagttgcacataattatgcgatgaaatgggagtgttggcgcggcactggcgaagaggcggctgcgcttgtgcgacacgttaagtcgcccttagcgtgatgcttcttgcgaaattacataccctagacaaacgacttagttagggccgctttgaagaaccgttagcggttaatncaatcacaactcttgaaataatacttacgcttctgatagtggcacatactatatagcatgaaactccaggtccacacgataaccataatttgattgaatcttaacgttcaactctagcaattgtgacacactcgaagcgtatctaccccaagaaacgacaacatctaccaattcaaaatatatagccatttgccaatatcagcgaagagcgcaaaccatccatccaggngcgccttagatacatagtgtgccgctagataccantcgcactctacgtaaaggtaaatgctagtggttagatctccgagatagtaacaatatctagaacaagacctcgtgattatttcatgcccctagattgtaacctctgcgaggacacgttattctctccggatgccacgcaactctgcccccttatacctagggacccctccttaaccatcaacactaaggtggtgctggtatggcaaaataccccaatcggataaatctctggttacccgcgcttggtctcatcaaccaatcccactatggggggcaatcgccccaaacggttggcacggcacctaatcacttttcaaacgggggcgcccacgcacacagaagcaactaactggcacagcgcaccaaattcgtgcttttcaccccgtggcattacgtttcaatagcccttccagttttccatccaactcttaaaggcaaaaaattatttgcgcgtctttaaccttaaactcccccctgaattttaccaacggtggaagccaatttgtggatcgctcccaataccattccttggggttattggggtccttgtgggttttgccaccaaaaccattgcgctctcgggttagtgtccccacgagtgccttttagagccatttgtccattttgtgctcccggagtgggggtcgttggggccccatggtccaacgcacgggtgtcccggggattgcgggcaacggggcgccatttgggtgtaccccaataggcttgagcaccggcagaaagtccaggggactccgcgattacccctaaacataaacaaacgtagctttcccaaattttggaaacaagaccatttggctccattgggcttcctcccaacggatatgtctgataacacaacttttggagggataccagcgagaaccggtcacataagaaga

SEQ ID NO: 526639 - DNA, 307 bp, Homo sapiens
gtactacagcatatagattaccccgtcatatgatcatgtacgcgtatgtagttaccccagctgcttcatttagaacccctgtacagttctgtatggaaaccatcccatagtcaaggacactttaaatatatagtctaaataccgttaaggtaggcccacaagctgtgttcacatttccccttgcccaccttaccaggaactttactaacttgggaacgtgaaaacaacaagctaacccacatgttcaccatagaaaacaatttaagtcttgaaaaacaaggactcttacacccgtcactctgccaaa

SEQ ID NO: 526640 - DNA, 240 bp, Homo sapiens
tgcaggctgaacctgaccctaggtggactcctgctctctgccatgcccctattctcatcccctggttccccactgtcctcgtgggtctctcccgctctgctagaatctcgctgagggattggtggggagggggtggtcactgcactcgggtggagatctggtgccccctgaaggccggacaggaagggcccgggcggacaaggtctttgagaactcggatggaatcccgctcctgatggc

SEQ ID NO: 526641 - DNA, 211 bp, Homo sapiens
ccctcgactgccgacaggagagcgggaggtctggcgggagtggaaccagcaccggccagaaggggctccgggcggtacagaggccaatgcattggaggctgagtggtagctgcgacctctggggcaggcgacactgctgtgtggagcccagggtgggcgcccacatggtttgcctggccgcgggtgtgtctagcctttcttgtctcttgtt

SEQ ID NO: 526642 - DNA, 893 bp, Homo sapiens
gacacaactttaaatgctaagaaaaatagcagaattgtaaatggggaagactgtgacaaatatttagacttccatgatgtaaggggctgaaagtctgaaagtaggtgaagaatacagacaacaagcactatacgatgggtagcccatggcttaagcctcaaaaaaaaatttttccagagtcacaagaggatgggagaggagcagtctgcaagcagccgtaggagcaagaccttgagacgtgtccatcaatgctacgatagattctgctttggagatcaacatgctgtatatcacaataatgatgggactcacggcatggaggatggacagaggagctttctcctggagtggtatttctggaatttctagtgtcaggtgctacttaatatctctcacaagaaaagaagaaatccctctgccttttaatgttctgggaatagaaagaataaaggagactgaaggtgaatccaccaaaggagtatagcaatttctattgtctccttaatagtccaacacttcactcacacaacaaatgttacgtagtttcatccaaatgatgagtccagggcccctttcttctgcagaaaatgtcagctcactgcttctgctacaaaatagaaattagagagatccagctttctaggccgatacaaatactttgataatcgtaaaatcagctttaccaattccatacgttccaatggtacttaaccggtgtgcttcaggatcccagggcacacattttctaggattccctagccatgggtgggtttagccggaacaaattggggtgctccaaagtcattaggctgtgccccggtcagggccccgtaaaaaccttagtggggatggtcaaaatggtgctgccgctggtcgtcaggcagagcagtctg

SEQ ID NO: 526643 - DNA, 736 bp, Homo sapiens
  misc_feature (1)..(1): n is a, c, g, or t
ngtgttcaacttgaaccctgtgaagatagattttcgagcccaacgcaaggccccccaagcctttgtcgttcagtaagacagggatcaatttttgggctgaaagtcctattatcaagcatcaaatgttccctctggtggtctaccaaagtggttggcctacatcagaacccgggtgaagggcattatttctcttgcaggccgagatctggtgtgaaagcattccatataactcctggtacatactcaagaccatcgggtatagtctacagtaggtccctgggttttttcgtgcccccatacgtaagccttctgatcaaaagtgtgctctagtgaaggcaatgttcatttatttccttacactcggacagttttggccaagagtatcccaattgtagtagggtttgcctggcagtatcctatctggttgaccaggactagattaagtgtcatatgatgctgcagcccatgttcccctcccagaaggaaccgtttcgtgtagtgtttatcacgggttccacaacccgaccgtacctaggaatgtggtgaacgtgctttccgcttttggcagcaagaaggcgcggggtgttgcacatgtgatgttgaacctataatgttatgttaattcagtgactggtacagttattatgatcgaatcttagcacatatagaccgattatttaaacccttgtcctctactacgttactaactctagggtaaatcttggtcagctaaaaa

SEQ ID NO: 526644 - DNA, 111 bp, Homo sapiens
cagtaaagaaacagaatactggaatcgttagagaaccctgagattttaacagcataactcattccctcttccacctttgtactttatccaggtcaacacatcaggtcgacg

SEQ ID NO: 526645 - DNA, 107 bp, Homo sapiens
atgatggcccagggatggcggtggcacctccttggagcacttcacacccagagcgacgtgtacattgtagtccgcgatagcaacaaatgccgtgcctcgttacgctt

SEQ ID NO: 526646 - DNA, 299 bp, Homo sapiens
cccgtatcctcacagccagcaggtgccatacagaaggagacagaaacggagtgaccgccgttaatgtgacgccctatgaggagaacttgaactacatgtcactgggtcacgttttgcctcatgaacactggccgccactggataagaatgtatatcaggctttaacaataggtatttcttccagtgatgttgaaattaagcttaaaaaagaaagattttatgtgcttgaagattcaggcttgcattaaaagactgttttcagacctttgtctgaaggattttaaatgctgtatgtcatt

SEQ ID NO: 526647 - DNA, 1262 bp, Homo sapiens
  misc_feature (572)..(572): n is a, c, g, or t
agctgcagcggctcggcgcggaccccgaggcggcgccggcctccgcctgcctcggccccggtgccccgcgcccccgtgtctcggctcccgcccgctgctgccctccagcaccgccgcggagaacaatggccagcccctgctgtgtggacagcgtgggggacctggtggctggcagcagcttgctgtgtggggcactgggacccttggctggctgcgggtgcctggggagccatgctgagcggcgtggggctggctcctggtgtcggcgggtggcgcggcgcccccggaggggtgccattatctaacgcgggtttaccgtactgccgagctgcggccaacggagacgttgaagcccggtggtgtccaggcaacgcctttttgcgtggaactttctttgattgccagcttggaaccgatttaccacgccttaaccgaatccccaagaattgccagttgaacttgggtttaccttaaccttggaaacccggtggctttggcctttctggaagagccttccaggaacccgcgagcgcgattaacttttccgggcctcaatcttcccttttaagcgnttgccccaagcgagacattttcaattcttccagggaacttagtgtggccccaaggttgaatttgcccgccttatcagggccaaactttgccaaacaaaaagttgcacaccagggcgcaacaccgggggccctttcccgtgtggcacaagcgcccttcccgcggggtgaagggcgataaaggaaacgccaaaaggtgggaacccctcgccaaagaggtttacgcccgcgcattctttaacaccgcccgattggcgcgcaacggggacacctttgtgaaaacgcgcgccgtttgagccccatttccaagtcaccaaaaggtatatttgagacacaatttcacacctgtgttgcaacaatgcaaaaagctcccggacaaaccataaactttttccaaaccccgttgagagacccaaaagcctcgaaaacctgctttacacaattggtttacccctttaaatttcttggtttccccccaaatgggttttccccaccaaacaagtaccaaaggcccctgtgaattattctcacatctatacttattatcagcctttttaaactttgtggtttggacacccaaactaactacaagcactgctacacactcactcatgaataatactctatcaccacacatgcagcagcggtcatgaagcacgatgatccatcacactataatactgatactaaccc

SEQ ID NO: 526648 - DNA, 813 bp, Homo sapiens
aggaatgttggattttattgaaaaattttttttgcatctaattgagatgactatatggtttttgtttttaattctgtttatgtggtgaatcacatttttttatttgcatgtgttgaaccaactgtgcatcccaagaataaagcctacttgatcatggtgaattaacttttggatgtgctgctggatttggtttgctagtattttgttgaggatttttgtgtctgtgttcatcatggatattggccgaagttttctctttttattgtgtttctgccaaattttggtatcaggctaatgcaggtttcatagaatgaattagggaggagccactcatcctcatttttttttttaaatagtttcagtcggattgataccagttcttttgtgccagtggtagaattggggctgtgaatctgtcgtggttcaaaagtttttgggcgggagggttttattactgaattccactcttgagtcctgccggaggccggttcacgttttcactttccttccctggtttactattagggagttcgcgttgttcccaggaattggtttccatttcgtctagattttcctaagttgggcgtgcactagaagggtgtgtccataaataacttccggaagggaccttttgggacttccgggggggaaccacgcttatccatcccgttgtcaatcccggaaaggagcacaattgggaaccttccctttttcccccctgtggcgcatgttacctaggcctgttcaacctggttgatctctctgtgaaccattatacgccttaattcaatggacacctgcagtgaatggggc

SEQ ID NO: 526649 - DNA, 188 bp, Homo sapiens
gacagagtgagagcctatctcaaaaaacaaaatgaaacaaaaaggttctcttattctggtgattttttgtttattaggttgtcgttgcttccgcttttccatcattggttattttccaggattaggggttattaccttaggcaggttttatataatttacaattactgtgattcaagcattataaact

SEQ ID NO: 526650 - DNA, 773 bp, Homo sapiens
  misc_feature (187)..(187): n is a, c, g, or t
atcgactttacttcagattgtaaggaagtgtgctattagaggagtacactgcattctctcaccaacaggtctccagtgctcatttggtgggataagtgtgtggccacgagatgaagatggtggtgagtggggaatatgcttattattctccagtataaaaatgtacgcgcacttcaaactttgcaangtacacggtacctaagagctatgacttggtcgttgacttgggtcactctgcttagcgcctgggagggcatagatcaggtcaaagtcctctcgttacttcaatgtctaatacataatagattagcaccatggagcctcaggtgtcaaatggtccggacatccaatgacgaagcaatgggaccctccagcaacaacagaaactgtccgttctgcccatgctaaacaggggtcgaaccacagatgacagcaaaatcaacctcatcgtcaagctatttaccccagaatatgacccgaagacagaatctcagggagtctcttcgaggagcgatctggtcgaaatgagaatcctgcgaaacttgtgagagacaaagattactggacagagtatagggtatggattcgttaactatattgatccaataggatgcatgagaatagccatccaacactttcaagatggcactcagactccagaccagaaccatgaaagcctattaaactgcagggaagtgtctccgtgggcgctcttatcctcatcgagagcaggtctgacgcagagtaggacaaaagagaaacctctccccaga

SEQ ID NO: 526651 - DNA, 343 bp, Homo sapiens
taacagagatttgaggagagttagtgaacccaatgggagaatttgatttatcggtattatcaaaaacaatggttacgcttgccttggtaacacctgcttgaccacgcttatagatcaaatcttgcaggctagatgctcgcacagtgctcattgatgctataccgagcacgaagcaaatggcgtccaaaatgttcgacttaccggacccatttagacctgtaatagcattgaattgagggtcccaatcagtaatgactgttcttgtagcgtatgatttgaaaccatcaataatcaattcctctaccttcatgcggtaacgatactaaaattgacttgtatttac

SEQ ID NO: 526652 - DNA, 135 bp, Homo sapiens
gcagcggtggcgacccgaggaggcctgggcactggaagaaagcaagatatttctgtctccctccccggctcaggtttcgcccttccctttcccttcccggtggacaatcccgagcttcaccgtcaaggccttttg

SEQ ID NO: 526653 - DNA, 825 bp, Homo sapiens
  misc_feature (15)..(15): n is a, c, g, or t
  misc_feature (63)..(63): n is a, c, g, or t
  misc_feature (73)..(73): n is a, c, g, or t
  misc_feature (92)..(92): n is a, c, g, or t
  misc_feature (113)..(113): n is a, c, g, or t
  misc_feature (118)..(118): n is a, c, g, or t
  misc_feature (141)..(141): n is a, c, g, or t
  misc_feature (159)..(159): n is a, c, g, or t
  misc_feature (213)..(213): n is a, c, g, or t
  misc_feature (216)..(216): n is a, c, g, or t
  misc_feature (221)..(221): n is a, c, g, or t
  misc_feature (236)..(237): n is a, c, g, or t
  misc_feature (244)..(244): n is a, c, g, or t
  misc_feature (254)..(254): n is a, c, g, or t
  misc_feature (256)..(256): n is a, c, g, or t
  misc_feature (269)..(269): n is a, c, g, or t
  misc_feature (274)..(274): n is a, c, g, or t
  misc_feature (278)..(278): n is a, c, g, or t
  misc_feature (302)..(302): n is a, c, g, or t
  misc_feature (304)..(305): n is a, c, g, or t
  misc_feature (307)..(307): n is a, c, g, or t
  misc_feature (319)..(319): n is a, c, g, or t
  misc_feature (327)..(327): n is a, c, g, or t
  misc_feature (331)..(331): n is a, c, g, or t
  misc_feature (336)..(336): n is a, c, g, or t
  misc_feature (342)..(342): n is a, c, g, or t
  misc_feature (348)..(349): n is a, c, g, or t
  misc_feature (352)..(352): n is a, c, g, or t
  misc_feature (354)..(354): n is a, c, g, or t
  misc_feature (363)..(364): n is a, c, g, or t
  misc_feature (380)..(380): n is a, c, g, or t
  misc_feature (383)..(383): n is a, c, g, or t
  misc_feature (402)..(402): n is a, c, g, or t
  misc_feature (430)..(430): n is a, c, g, or t
  misc_feature (434)..(436): n is a, c, g, or t
  misc_feature (438)..(438): n is a, c, g, or t
  misc_feature (448)..(448): n is a, c, g, or t
  misc_feature (471)..(471): n is a, c, g, or t
  misc_feature (490)..(490): n is a, c, g, or t
  misc_feature (531)..(531): n is a, c, g, or t
  misc_feature (535)..(535): n is a, c, g, or t
  misc_feature (556)..(556): n is a, c, g, or t
  misc_feature (565)..(565): n is a, c, g, or t
  misc_feature (567)..(567): n is a, c, g, or t
  misc_feature (579)..(579): n is a, c, g, or t
  misc_feature (585)..(585): n is a, c, g, or t
  misc_feature (589)..(589): n is a, c, g, or t
  misc_feature (628)..(628): n is a, c, g, or t
  misc_feature (634)..(634): n is a, c, g, or t
  misc_feature (637)..(637): n is a, c, g, or t
  misc_feature (645)..(645): n is a, c, g, or t
  misc_feature (680)..(680): n is a, c, g, or t
  misc_feature (730)..(730): n is a, c, g, or t
  misc_feature (820)..(820): n is a, c, g, or t
ggacgagctggccancaagctgagccggcggctgcagatggagggcgagggcggcggcgaaancccggagcancccgggctgaaaggggcancggcggcggcggcgggggcanccgangaggcggccgaagcgctgggcancgcggactgcgaactgancgccaaaatgctgcggcgcgcaaaactcaaaaaaatcatcggcgaaccccaatngcncaacngccgcgtcttcaaannctaaaanaaattcaaananttctccaagaaanaaaanaaanaaaaggaaaaaaagttcaaaaaanannangccgggcggganggcttcancaanctganggaacnaaaaannaananggaaaaaannggggcccctcaaaacnaantgggcctgaaaaaaaaaanaaaaaaagtggataaagaatttgaaaanaaannnancttccggganttcctcctgatcttccgcaaagnggcggccggggagcttcangaggacaacgggctgtgcgtgctggcccgcctctctgaaancaangtctccaataaaggtgtcaanggggccaanancttctttgaagncaaagnccangccatcaacgtgtccagccgcttcgaggaggagatcaangcagancangaggaaangaagaagcaggcggaggagatgaagcagcggaaancggccttcaaggagctgcagtccacctttaagtagcggggggctgcagcngaccgccctgctctggccccagtgtggtgggcgagggtggcgcatgggaggccgagcctgaatccttgcctgtgtctgacgggacactantaaaa

SEQ ID NO: 526654 - DNA, 252 bp, Homo sapiens
  misc_feature (190)..(190): n is a, c, g, or t
  misc_feature (202)..(202): n is a, c, g, or t
gaggatccaccaaccatagaacggccctactaatgaaccacacaagctagttgcaccactatagaaacacaaaactacacatctataccaataaaaataacaactactccaattgcccatgtggtattgtcgcagactgaaatgaattatgaatttaggttggttaccaatatcggcataaaataaactntgtaaggctcantatgttgacagtaagctcttgtcaggtgtctaatgaggtaaaagcatttt

SEQ ID NO: 526655 - DNA, 382 bp, Homo sapiens
gtgatctagaggatctcatctgaggagcctttgggggaacactagagctatggggaacttgaaagaagattttaggactttggagaaaaggtgagtcccaaagacataggggttgaggaatacagagaggagagagagagggagtaccagtgagccaggactataaaggacctatttctttttcctcaactccgtcccttagttttctcctcagaacttaaaggcaatgctggcttcctaagcccgtaaacccaggggcccccagaaagttggctgtgaatctctcatctgaattgaaaaggctacatcagggcagattgtcccctaaaaaactggaaaggtgggtatgggggtaagtttcggacacatgcatgcacccagg

SEQ ID NO: 526656 - DNA, 197 bp, Homo sapiens
atacacctcttttatgcgcgtagtttgacatttaattgggttaaaatttaatccctccggtgtgtttgtgtatgtgtctgtgtgtgtgtgtgtgtgtgcatgtgtgtgtgtgtgtgtgtgcaatgaaagaacatacatacactaattctccaaaattcctatgggtgacttactcaacagtgtatctctgaagcttc

SEQ ID NO: 526657 - DNA, 160 bp, Homo sapiens
ataataatcatcctgtgattcatcgtcatttgctttgtacttatatactagaataaatcgtagcccatggagtatattagtaagtattcagagacaagtttcagaataccaggtaagccatgatctcttggaaagtagtatgtcccatttatagtgaaca

SEQ ID NO: 526658 - DNA, 830 bp, Homo sapiens
ggaattccgggtccccagaaacacaatctgggttatatttaaaaattttggcgcgtcgttcccgaaggtaaaagaacgatcgtgtgcccccggacagtattgtatggcaaaagaattctgcgacctaaatttcctgcgtccataattattgggcgaaaaaaattgatattgcccatattattgagggagcatgtactatttggagtcccgccacctcacggtcgagcacccgatctggagttcgctactccctcttcgaagaagggtcttatttccacccactccgctgtcacctagctgtggtcgtataaaagaccacccagatatgtaatttctgccttgtcgaaactttacaggtggttaatatcaaccaagacaaccgagtgaactcattgtgggcccccgccaatattattaaatggaacaacttattttctggcgggaatcctccttgtattttcaagacacgtcggccagatgaagtatacttccccgcgcgctatgtatccaaactggaacttcattcgccccctagacgagggtggcacaaaagagctaataaacttgctgacagtcccacggcacataatttgtaaataaccctgggtcaattcccactcagataccacaatgtaagccccctaattgtcattcaaacattcccgccgccataaagcaccactctgtgatgatccactctggtgagaaaacacttcgcacgaatctctgggattggtccaggattgcgccacgttactcacctcctcctcctccatgaaaactccgcaatttttttccccaaaaaaaacatttcaacccccaaacaaaac

SEQ ID NO: 526659 - DNA, 287 bp, Homo sapiens
taggttacagatgagccgagattgtgccattgcactccagcctgggtgacagactgagactatgtctctaaaaaaaaaaaaaggattaagctgtaaggcttctacactaccttgtatttcaaatttttttccacaaggcttttatattcaaaacagtatgacatttgttattaaaattggctacttagtaccagttggaacagtagacccttagaatatgattccacgcattttacagctcaatttgatctctttgacaaagcccacggatcaactccacggggaat

SEQ ID NO: 526660 - DNA, 395 bp, Homo sapiens
taatattcttttatgcttcagaagttgatattaatctcacctattgggaagctaagcacaataattaaaaaatacactgctgattgtctctgcttatgtaaagaaaacagtgtccttgcttaaatggtgtattgcgatggggctatgatcgttcagaaagtcatgaatgcttaattctgtaccaagcccagtggaaccagttagttgaaactgactctttgcatatgtgacctaatctctgccttattatcagaatcccagaaccatgcaaatggggacagcacagcaaccctgcagattcagccaattattcccaaacagatcatccaactgtctaaaaaataccaacttttgtaatagcttgatctcattgctcctctgtatagatcaggtac

SEQ ID NO: 526661 - DNA, 783 bp, Homo sapiens
cccacgcgtcggacaaggccacccagacgcccctgtcctggcaagagctagaaggtaggagctgaggatggtgtgcacggagacagtgtccgccgtccatggtgacggaggcatgagcgaacgggaaaacgcagagtgcgcacagtgtgaagagcgagaccagacatgcagcggacgggacgaagcgcctggagagcagcacaggggcagagagaggcagagcggagacggaggcggacgagcgcagagctgccctaggggggcatgcgagagagccagcgagacgagaggcgagaccaacggtgcagcggagagaatgccacacatgcgccgagaggtcacgaaccatcacacggcactcacccagaatgcatacggacaaaaccaacaagacgcaccagcgagggcgtggacagaccagagggccaggaccacctgagaagaagcgagcacgacaaaccccacaatcacacgccgtagggagccgaccgggctcaataaaggccatcgaaaacgagaagacgaggagaggaccgacacacgacagcggacgaacactgacaaagcacagaggagatcgcaatactgaaattagagtcccaccaaagaaaagaagaggcgacaaaaaacagaagagaaaacaacgaaagagacgccacggacacaaaccaaagaaaagaataggcaagacgcccaaagaaagaacagcagaaaaaacacgacacagtacagatacacagacacgcgaggaaaggcaccaaagggacaaaacaaacaataagg

SEQ ID NO: 526662 - DNA, 142 bp, Homo sapiens
aattaatttaaagatcatgtgattgcctaatgatatgcaaaacaaaaaaaaagctatctttcctttacaatctatttgctcaggttaaccatttagttgctaagagaaaccttctccatgaaaagagtattgtgttgggtga

SEQ ID NO: 526663 - DNA, 384 bp, Homo sapiens
ctactgattgcattgtacctctttccctgatgggagcaagacgcgcgcatcttctcccatcagcattactaataagtggctcctttaacctctccacccttatcacaacacaagaacacctctgattactcctgccatcatgacccttggccataatatgatttatctccacactagcagagaccaaccgaacccctttcgaccttgccgaagggagtccgaactagtctcaggcttcaacatcgaatacgccgcagccctttcgccctattcttcatagcggaatacacaaacattattataatacacacccccccactacaatctccgtaggacacatatgacgactctccctgactctacacacatatttgtcacagccta

SEQ ID NO: 526664 - DNA, 377 bp, Homo sapiens
ctgtgatgatctcatcgccatgcatgttgacagtgcgagtctgtgttgccgtcagctgcgattgttgattgggatgtgacatttatctaaagggttcactgatccacttattcacgaattacagggtctcggaaaccaacaatctcctcatccatgactaatacgctaaaacatggggctcaattcatagttttgcttggggtgacactggcgaaattaaatcatcaatgtagttcccaaatttaagtgcgtcatgtgaaaacaaaggactgtggaatgataatagtgtaatctataattgatttcttgtacatctgtactttagtacagaaaggaagccaccagcaatcaacatattgccaatcaacatactggat

SEQ ID NO: 526665 - DNA, 191 bp, Homo sapiens
agtggagaaagctgcccagggaagctgatcgttatccatgggaaggcaggcctgtttttagaagggcagatccaccccgagctggaaggagtctccattgtcatcagtgaaaagggggcaagttcaccgctgatcacaggctttactgatgacaaaggtgcctacagtgttggccccctgcacagtgacct

SEQ ID NO: 526666 - DNA, 190 bp, Homo sapiens
  misc_feature (14)..(14): n is a, c, g, or t
  misc_feature (51)..(51): n is a, c, g, or t
caatctctggtccngtagtgcctaggccatctgttgcgaataagtgcgtantcagcccatgagttttcattactcgtagaggattcattaccccctgtggttcattaccccctgtttttgggaggtgcctctgatgatttctggcgcggtgttgagtgctctggagaagagggaaacgtttcatagtcca

SEQ ID NO: 526667 - DNA, 362 bp, Homo sapiens
  misc_feature (320)..(320): n is a, c, g, or t
  misc_feature (345)..(345): n is a, c, g, or t
tgaggtcgggagtttgagaccagccaggccaacgtggtgaaactccgtctctactaaaaatacaaaaattaggccgggcacagtggctcacacctgtagtcccagaactttgggaggccgaggcgagcggatcacgagttcaggagttcgagaccagcctgaccaacatggtgaaaccccgtctgtactgggaatacaaaaattagccaggcatggtggcgggtgctgttaatcccagctacttcaggaggcttgaggcagggagattcactttgagcccaggggaggcgaaggtttgccagttgagtttgagatttgcnttcacttgcatttccagcctggggncggacaaagcgagattt

SEQ ID NO: 526668 - DNA, 2134 bp, Homo sapiens
agaaggaaagttcctcaacataacagaagccatttatgaaaaatctacagctgatggaggaatattttccaagcaaatggaaagcaaaaaaaaaaccagggattgcaatcttagtctctgataaaacagactttaaaccaacaaagatcaaaagagacaagggcattacataatggtaaaaggatcaaagcaacaaaaagagctaactatcctaaatatatgtgcatccaatacaggagcacccagtttcataaaaaaagttcttagagacctacaaagagacttagactcccacacaataatagtgggagactttaacaaccccgtgtcaatattagacagatcaataagacagaaaattgacaaggatatccaggacttgaactcagctctggaccaagcagacctaatagacatctacagaaccctccaccccaaatcaacaaaacatacacttttctcagcaccacaatgcacttattctaaaactgaccacttaattggaagtaaagcactccttagcaaatgcagaataagggaaatcataacaaatagtctctcagaccacagtgcaatcaaattagaactcaggattaagaaactcactcaaaaccacacaactacatggaaactgaacaacctgctcctgaatgactactgggtaaataacgaaatgaaggcagagataaagatgttctttgaaaccaatgagaacaaagacagagcatatcagaacctctgggacacatttaaagcactgtgtagaaggaaatttatagcactaaatgcccacaagagaaggcagagaagatctaaaatcgacacactaacatcacaattaaaagaactagagaagcaagagcgaacaaatccaaaagctagcagaagacaagaaataactaagatcagaacagaactgaaggagagacacgaaaaacccttcaaaaaatcagtgaatccagagttggttttcttgaaaagatcaacaaaataaataggccactagccagactaataaaaaagaaaagagaagaatcaaatagatgcaataaaaaatgataaagggaatatcaccaccgatcccacagaaatacaaactaccatcagagaatactataaacgcctctacgcaaattaactagaaaatctagaagaaatggataaattcctgtacacatacaccctcccaagactaaaccaggaagaggtcgaatccctgaataggccaataacaagttctgaaattgaggcagcaattaatagcctattaaccaaaaaaaagtccaggaccagacggattcacagccaaattctaccagaggtacgaagaggagctggtaccattccttctgaaactattccaaacaatagaaaaagagagaatcctccctaacttattttatgaggccagcatcatcctgataccaaaacctggcagagacaatagaaaaaaagaaaatttcaggccaatatcactgatgaacatcgatgtaaaaatcctcgataaaatactggcaaaccgaatccagcagcgcatcaaaaagcttatccaccacgattaagccggcttcatccctgggatgcaaggctggttcagcatacacaaatgaataaacataatccatcacacaaacagaaccaatgacaaaagccacatgatatttacctgtatacctttttaagtacaaataaatctgggctgtcattatttatgctaacactggttttgtgtccctggaatctatctatctaagtttttttttctttttttctttttccattttccagtacctattagacagaatggctttcaattttttctcttacttccaaacttagtcattataagaagatgtaggccaggcgcagtggctcattactgtaatcccagcactatgggaggctgaggcaagtggattacttgagtccaggagttcgagaccagcctggccaacatggtgaaaccccatctctactaaaaatacagagattagcagggcatggtggtgcatgcctgtaatcccagctactcaggaggttgagtcaggagaatcacttgaacccggaggcagaggttgcaggcagattgtgccactgcactcctgcctgggaaacagagcaagactctgtctcc

SEQ ID NO: 526669 - DNA, 248 bp, Homo sapiens
  misc_feature (41)..(41): n is a, c, g, or t
gaccccaggagttcaggctgcagtgagccatgatcacaccnactgcacttcagctgggtgacagagccagaccatgtcacaaaaagttagaaaaaaaaaaagagagagggagagagactatacacaggctaattttggtatttttagtggagatgcggtttcaccatgttggccgggccagtctcgaactcctgacgtcaagtgatcttcccgcctcgactcctgatatcaagtgattgttccccgct

SEQ ID NO: 526670 - DNA, 922 bp, Homo sapiens
agctaattctagatcggcgagcggacgccttgttatctgtacagaacttcagatttgctatgactgctgtgccagtagaaagcatgaagcttttgagatcatgtagggcttatgtagagggtatcaatgggcctagactaagcaaggattgaatttaccagaggctaagctgcagatagtaagaactaagtggctgtatggtgattggttcttataaacggtcaaccgtattaaaataaggtatctttccttttccctcttactggatttttcaattgtctcaaacccatatggcctaggctaactttcacacttgaaaataatatagatttagtcgaagtactattgcagtgaagtaagtaacattttaatatatcacattgaaaattatcgcagggctgactgaatacttggtgtagcccccctcgtttctggtttcacatcatgaggatcagttagctgctgacaatgaatagtcatcttgtgtctgacgtagattgaattctacctggtagagatctattacggaactggaaaacagcaagtcatggttgatctcatcatgtcaaggctagttacgtgctataaatgtccctgcgaacactgaattcgcaaattttgaacctacgggggaaatcacaagggcttcatatttctcggaaggcccactggtccacattgtcgcattcacgccacgtctgacactgttacctccctgttcgtacagacacgctcgattcctataaaccgactcccttaacattcgcagtcccgtgaccaccacacaccgtacctcaattgccactgaaggtatgttgcacgattaaggaccatacagcccacgcaacgcccttttacccctttggcacccgttgttgccctagcgccttcgatggggggccactctagcgggcccccacaa

SEQ ID NO: 526671 - DNA, 299 bp, Homo sapiens
cacgaggccgtaccccacgtcgtcagggggtcgatggcggtagggaggtggttttccgctccccggtaccggcccaggttccggttaaaggaaaagggcacggttggttggggagggggaggcaggtcaggttggtaggtcacaaaccccaaaaaccgcttggggggagagaggaagagatgggcggggggccgggggccggtaaccgctaagcggtggggcggttcgctaggcggttgcggtacggggcccggtaaggggtgctaggggcgcggtgcgtgcccgccagccccgctgaa

SEQ ID NO: 526672 - DNA, 220 bp, Homo sapiens
agtcagctccgtcctgccaagcgtagtacccaagtactgggacgtacaggcatgcactccacgccctgctaatttttatatttttagtagggatggctttcaccatgctggccttaagtgatccgtccgccttggcctccaaagtgctgggatttcaggcaagcgtcaccacacccgacccctcactagtatttcagcatttgggtactacgctttggca

SEQ ID NO: 526673 - DNA, 336 bp, Homo sapiens
aaaataaaaagaaaacctttttttaatgggtttttaactaaaaaaaatttaaaaggcagccggggggctaaaaggaccaaaaaaaaaaattttttaaacctcccaaaaaattttttttaaaacttttcctttgaaaagggaaggggggtcaagggttccaaaggggaaccccaaaaatttacccccggaaatttccctttaaaaccaaaaagggataaaatcaatttaaaaaaatccttccttttgggggccccaaaaacccaatgttccctccccccccccctgggggggttataagggaaaaaaccgtttttcccccccccccccaaaaagggg

SEQ ID NO: 526674 - DNA, 209 bp, Homo sapiens
tgttaaattagcgacgcttgtggttcagaaatcatgctagcaacctgcttgatggtgatgatattggtagaggtggtggtggtggtgatggagatgatggtaagaatggtagtggaggtggttagtggtgatggtggtgatggtggttgtggttgtgatgtcagtgatggtggcgatattggtgagaagggtgatggtggtgcgtcggc

SEQ ID NO: 526675 - DNA, 142 bp, Homo sapiens
caacagtgggctctgtatcttcccttctacacagcctgcactgctcacgggtgtccctgactcagcggaagtcagctcagtctcgccagtggctcaggccaaagtcctggggctcttgttgacttctgtctctggtcgacgc

SEQ ID NO: 526676 - DNA, 333 bp, Homo sapiens
ccgctagcccgacaggacgaggttcattctgcgtgtattgattgtgcagatctgtcatgcatcatggagcgatgagaatgatcgttccccatgtctgtcacctgctcttgtctacgggtgagtttgctatagaggaagaaggatgccgtacagaagtccatcagcggagattgcgtagtcttgtagttggttctccgtctgcccattgctctcccagtccacggcgatgtcgctgggatagaagcctttgaccaggcaggtcaggctgacctggttcttggtcatctcctcccgggatgggggcagggtgtacacctgtcgggctagtcgggg

SEQ ID NO: 526677 - DNA, 907 bp, Homo sapiens
  misc_feature (463)..(463): n is a, c, g, or t
ttttaaagaaatagaattaatggctcaggtggattggccaagttttcaaagcaaaacacagaattgacggaaagacttacgttattaaacgtgttaaatataataacgagaaggcggagcgtgaagtaaaagcatggcaaaacttgatcatgtaaatatgttcactacaatggctgttgggatggatttgattatgatcctgagaccagtgatgattctcttgagagcagtgattatgatcctgagaacagcaaaaatagttcaaggtcaaagactaagtgccttttccatccaaaatgtggtactgtgatgatagggagcatgttgcaacggtggtggattgaaagaaagaagaggcgagaaaataagacaaaggtttgggcttgggaacgtcttggaacaaataaccaaaaaggggtggattatatacattcaaaaaaattaattcatagagatcttaagnccaagtaatatattctaagtagatacaaaccacgtaacgatggagacttggcactggtacacattctctgacaaaatgattggaaagcgaaccaaggagtaagggaactttgcgatcacatgagcccagaaacagattttcttccgccacgcactatggacgaggccgtggacctctacgctgggggcctattcctgggttgaaactgcttcctgtatgtgaccctgcttttggaaccatcaacgttttcaccagacctaagggattggctcatctccgatatattcggcacacacgacacgcccctctacgacaattctcgccggaacctggggcggctaccctttgctatttaggctgctgggtgcgaaacccggtatactcgccggccattgtcgcctctgagagtcaggccgcgcgcgcccatttcacgcccggaccccc

SEQ ID NO: 526678 - DNA, 170 bp, Homo sapiens
ccgcagcttataactcaacaccccgctccgccataccagtgacccatgagggacaccctggaacatggccaccctcctactctacccgagacatacccacacagggtggacgtggactgtagtgctcccctaccccaccccataccctactaccatagatataccatgcg

SEQ ID NO: 526679 - DNA, 604 bp, Homo sapiens
  misc_feature (4)..(4): n is a, c, g, or t
  misc_feature (11)..(11): n is a, c, g, or t
  misc_feature (23)..(23): n is a, c, g, or t
  misc_feature (59)..(59): n is a, c, g, or t
  misc_feature (65)..(65): n is a, c, g, or t
  misc_feature (82)..(82): n is a, c, g, or t
  misc_feature (87)..(87): n is a, c, g, or t
  misc_feature (106)..(106): n is a, c, g, or t
  misc_feature (113)..(113): n is a, c, g, or t
  misc_feature (115)..(115): n is a, c, g, or t
  misc_feature (130)..(130): n is a, c, g, or t
  misc_feature (135)..(135): n is a, c, g, or t
  misc_feature (137)..(137): n is a, c, g, or t
  misc_feature (140)..(140): n is a, c, g, or t
  misc_feature (144)..(144): n is a, c, g, or t
  misc_feature (146)..(146): n is a, c, g, or t
  misc_feature (156)..(156): n is a, c, g, or t
  misc_feature (174)..(174): n is a, c, g, or t
  misc_feature (184)..(184): n is a, c, g, or t
  misc_feature (213)..(213): n is a, c, g, or t
  misc_feature (258)..(258): n is a, c, g, or t
  misc_feature (262)..(262): n is a, c, g, or t
  misc_feature (264)..(264): n is a, c, g, or t
  misc_feature (267)..(267): n is a, c, g, or t
  misc_feature (269)..(269): n is a, c, g, or t
  misc_feature (276)..(276): n is a, c, g, or t
  misc_feature (278)..(279): n is a, c, g, or t
  misc_feature (287)..(287): n is a, c, g, or t
  misc_feature (301)..(301): n is a, c, g, or t
  misc_feature (312)..(312): n is a, c, g, or t
  misc_feature (318)..(318): n is a, c, g, or t
  misc_feature (320)..(320): n is a, c, g, or t
  misc_feature (339)..(339): n is a, c, g, or t
  misc_feature (343)..(343): n is a, c, g, or t
  misc_feature (362)..(362): n is a, c, g, or t
  misc_feature (366)..(366): n is a, c, g, or t
  misc_feature (378)..(378): n is a, c, g, or t
  misc_feature (405)..(405): n is a, c, g, or t
  misc_feature (410)..(410): n is a, c, g, or t
  misc_feature (415)..(415): n is a, c, g, or t
  misc_feature (418)..(418): n is a, c, g, or t
  misc_feature (434)..(434): n is a, c, g, or t
  misc_feature (437)..(437): n is a, c, g, or t
  misc_feature (439)..(439): n is a, c, g, or t
  misc_feature (457)..(457): n is a, c, g, or t
  misc_feature (462)..(462): n is a, c, g, or t
  misc_feature (480)..(480): n is a, c, g, or t
  misc_feature (488)..(488): n is a, c, g, or t
  misc_feature (493)..(493): n is a, c, g, or t
  misc_feature (539)..(539): n is a, c, g, or t
  misc_feature (568)..(568): n is a, c, g, or t
taanatttcanaattttattaancctttaaaaaacaccccatttcttttgagtaaaaanccccancccgattacccccaaanatggnttagtttgattctgttacnaaattcngngaataattatttaancaaancnacnaaanantagaaaaaantccagcaagacttaaaancatgaaaaanagaattaaaagtttaaacccaccaaaagncccatggcccattatttagccgggaatgagaaacggcaggggganaaancngcncntttgacngnnaggaaaanttgccaatgcaggnagcgaaaaagngaaggnanacggggggggccaaaagantacnttttttttttttttttgcnaaangcagggtacccnaaaaggggcccacccagaaggcccccncccgnaaacncantaatttttccaaaganaantngggggtttgaagaaaaanggcantaggccaagaaaaaagcnccaaaggncaaanagccattttagacctgaccaaattttccccttttagcaaaaagccnccctgaaaattaggggggggaccaccccnaaggggccacaggttcattttacaagattggattta

SEQ ID NO: 526680 - DNA, 304 bp, Homo sapiens
acaagattttttttttcttaaggtagatgaaaattagcaaggatgctgccttgggtctcgggtttttttaagcttttttggcatatgtttggtaagcaacaaattttttggtataaaagtcccgggtctctcgctatttctgctgctgttcctagacggagcatggcatttctggatcaaccagatgattaaacggtggtattaaaaagacccggggtaaacctgagccccccggtccgcacccgcgcgggaagaaagcgagagacgagagcaacgaataagagaagaaaaaggacacgcgagg

SEQ ID NO: 526681 - DNA, 640 bp, Homo sapiens
agtaccccacttatgtggtgggagagacaagtcaagtatctttcaggctgagagagcgtgcactaattcattttaagtctttcatgaatactagagatggtgagcgctagattaacgtgatataaatgatggcagttgttatttttaggcaagtttgcatactggctgttgaggcagagtgcagtgtaagagcctaagctcgcactgccaggacgtgagtgactgtaacgagagactttttcgtttaccttcgatatttatgtagagagccctctagttccagggccacgtggttaagtgtaggacttgtaggatacctggctgacacgcaggtgacccaccagtattaattcggacagacgagccaataaggtgtcatgaaactcgtggatttgtgaggctcatggtggaggttgagatggcgaccctcacgttacacggtccttaccatcaatcaaaccgtggcatttcgatgacaccgttaatcgaggactggacactatgagggcaagctttgcaaacgaccctctgatccaggatgactctggagttgaccctggctcaacagcacacatatcagtgttgctttgcttaacatgatgcacttggtcctcccacgggatccgtgcacgttaacgat

SEQ ID NO: 526682 - DNA, 255 bp, Homo sapiens
ggtgcgcacactagtggataccaaagcattcgcccacgaccgtttattccagtcaacccgagcactctgaggttaaggaattaaacacattccaaggtaaaatgactatgggctattagctcacagtgaatcgtttgggtctttcaggtggccatgtgtgaagtccgatttgagcacgtgcgtgtgcccaaagagaacatggtcctgggccctggcgacggctttgagatcgcccagggagatctgggccccggc

SEQ ID NO: 526683 - DNA, 446 bp, Homo sapiens
  misc_feature (12)..(12): n is a, c, g, or t
  misc_feature (61)..(61): n is a, c, g, or t
tttcctaaacantacccctggcactttgtgccttaacccagtatttttaattaataacaantctttcctgtaaggcctcttggttgttatcttagtcctgtttgtgcctgcctgtaacaaaatacccacagactgggtaacttaaaaataatagaaggtggccgggcattgtggctcatgcttgtaatccctgcactttgggaggccgaggcgggtggatcacctgaggtaagatcaccagcctggccaacatgatgaaaccctgtctctactaaaaacacaaaaaattagccagctgtggtggtgggcgcctgtaattccagctactcaggaggctgagggaggagaatctcttgaacccatgaggtggaggttgcagtgagccgggattgcgccactgcactccagcctgggcaacaagagtgaaactctgtctcaaaaaaaaa

SEQ ID NO: 526684 - DNA, 263 bp, Homo sapiens
cttctccaggcagccttcttggatgtctgccaggagacaagcatctctttgctaatcaggcggggtacagctttgtctctccctgttacttgaaagcttcatacacaagacctgtctcccctgccagcaattcgaagacaggtaccatggctaactgccacttctgactttgcttacctaggtgctccttatggacaggatgccatctggcgtcactttttgcctctttggtgcccaacacgtgttgggcacacaatatggag

SEQ ID NO: 526685 - DNA, 355 bp, Homo sapiens
tgctgagatcgtggcaatgaacatggaccagggcacctatgaggattatgtcgaaggacttcgggctgttatgacgagggaggaaatggcgccgtcatgggtgctgaaatccggcatgttcttgtcacactgggtgagaatgatgacagaggaagaagtagagatgctggtggcagggcatgaggacagcaatggttgtatcaactatgaagagctcgtccgggtggtgctgaatggctgaggaccttcccagtctccccagagtccgtgcctttccctgtgtgaattttgtatctagcctaaagtttccctaggctttcttgtctcagcaactttcccatctcgtctcttctct

SEQ ID NO: 526686 - DNA, 281 bp, Homo sapiens
  misc_feature (134)..(134): n is a, c, g, or t
gttgcccaggctgcagtgcacttgtgcaaacgcggctcactgcagccccaatctcccactcttaagcaatcctcccacctcagcctcctgaatagctgggattacaggtgtgcactgccacacccagctaattnctttaatttgttttatttttagtagagatggagtttcgctatgttgtaaaggctggtctggaactgctggcctcaagcgatcctcccgccttggcctctcaaactgctggggttacagacgtgagccaccatgcctgggcctgctca

SEQ ID NO: 526687 - DNA, 1222 bp, Homo sapiens
cttcgaaaccagacttatccctcaccttggctatcatcacccgatgaggcaacgcagccgagaacgcctgaacgcaggcacattacttgcttattctactaccctagtaggctcccttcccctactcatcgtcgagctgagttatacacgtcacgaagcaccctaagctcacataagacagttgctacgtactacactctccaactgtccgcatggaacagctattccaaaacctacctgtagcaccaaggaactgtacagtactgaagctagacttagcaccagatagtgctgtttagtagtacagcggactagcctccttgtaccgggatcttccatctgtagtgaacttccactgaaagtcccacatgttccagaaaagcccctgcatcgactgggcgtgcagtaagtaacttttcgcgcgtcgagctaactcctctcacaaaatcgtcacgtgcggcgccgtaattgggtgactacaaattagcggtcgcatgcaatcgaccttcgatttgccatctatagccccctctcctgttatcaagacactagccatcgaatttagtccgttatcgcacccatgttcccttgtgtgattgcgttattgccccataaattgcaatgggtcgactcagatttgattaaacgagaagtcgttccctaatccttgggcgtcactggaatcaagacgatgatcgcatataatagtccgcctacaatgggcctattcacgttctttacatatttcgatgcccagccataagtcgcctgcggtagttagacaagacgcatatctttcgatccaaaattcctcctgaaaaagcttgcatcgcggcgccgcatggtccattatctccactatagtctgcgctcactgggacctttaagcagtccctccatgtaacctatttcctcgccctaggcagagactcagaacctttacggaatcggcaacttcaacaagatcaggctatgcatgtaagattcccgttcgtgcttccacagggatcggtgtcagaaaccttcgtgcttcccccaccataatgtcagcctttttttggatcgaactttcctacaacaagagacacgtcggcctaaaaccgttggtccatttatcccaccccatcttagtttaaaccgtaaccttggaggaagaaaccttcattcttggtggcctagggttataacccaacaggtgtcttcccttgatcccacaccttta

SEQ ID NO: 526688 - DNA, 368 bp, Homo sapiens
ctacagtgatctttagaggccatcttccagcttattaccagacacggcgatcactcttattccttcagctctagcaaacttgcatgcaatcgtgagccgtgtaggctatccaatacaggggcatagccggcgctctatttggcctggattgttcaggataatcacctgagcagtgaaaccagctgcttccattggtgggtcatattatgcagtcaccagcaacgttgccacgacgaacatcctatgaaagacacattcttgacatttacagcccacgattgtccccaggaagagcttcagtcaaagcttcatggtgcatttcgacagattttacttccgtcgtgacgtggaaaggataaaaggtgaaa

SEQ ID NO: 526689 - DNA, 497 bp, Homo sapiens
  misc_feature (429)..(429): n is a, c, g, or t
  misc_feature (450)..(450): n is a, c, g, or t
ggaaagcggcgttgataccgtggaaggtttgtgctgttgctggcccttgattgctggaaggattccgaggtgcagttttcgaagcgggagttttgttcgtgttggttgcttagcgtgtgttactgtcgctaacgggagattctcaacgtgtttgcattgggccgtttgcatcagttgggaccgttgttactgacctcctaggttgtgtgttgcgtttacacgcttaaatccgggtttcacggtctcttagtactcgcatattaagctcatcgcgcgtaccttacttctacgcgttcacgtcggttcgtccgggcctataaagcgccgctgctttttggccgtgtgcgctttacgttgcacctttacgtcggatcactggggtccatcagcgccgtatttttgaactggccgggcgtgcttcgaagcgcntagttgcttcggttcactggntgcggcgtgacgatcacggcactcactcagtcgcccggtctccgttc

SEQ ID NO: 526690 - DNA, 89 bp, Homo sapiens
ggggggggggttttgggggggggggttttccccggccgggggttccccccccccccctttttttttattgttttccccccccctgggga

SEQ ID NO: 526691 - DNA, 397 bp, Homo sapiens
ggaatacaggcatgcaccaccatgaatggctaatttttaaattttttctagagatggggtcttgctatgttgcccaggctggtctcgagctcctgaccccaggtgatccgcccgccttggcctcccaaagtgctgggattacacctgtgagccactgcgcccagccagtattatgtattttttagttctcttaaaacatgggcatcagaatttgattttcaaacaaattatatataaaagtagaagactctgagtgctatttcaaggttacctgtgaagggaaggagaaaaagggtatagccagtaaaggtgatcaagagatccaagagagctacagagtgagaccgtatctcaaataataaaaacaataataaaaacaaaccatttttgattggtc

SEQ ID NO: 526692 - DNA, 192 bp, Homo sapiens
  misc_feature (118)..(118): n is a, c, g, or t
tcagctcggcggccccggcagcggtggacaggctgtcggccgggccccgttgggcagccgtcggcggttgtttctccttgctgccgccttacgtggttgttgcttccccgtgcagcgnctgctcgacacggatgccggccgcttgtgggcgcccagatcggtgggctgcgcggagcccaggctggcggccgc

SEQ ID NO: 526693 - DNA, 337 bp, Homo sapiens
  misc_feature (47)..(47): n is a, c, g, or t
tgagtggagggaaaggaggatacggagagttggttaataaacacaantatactgccaataggaggaataagttctagtgttctgtagctttgtagggagactatagttaacaattgtttgttctatattttcaaatagctagaatagagtattttgaatgtttccaacacaaagaaatgataaatgtttgaggtgatggatatgttaatgactttgatttgatcacaacacattgtatacaggtagcaaaatatcacactgtgctccataaatatgtacaatttttatgtgtcaactaaaaataataataagagaataaataaatggaggttgagag

SEQ ID NO: 526694 - DNA, 829 bp, Homo sapiens
  misc_feature (131)..(131): n is a, c, g, or t
agcggagttaacgaagcagcaagcaggaacgagaagacgctttctaaccgcggtcgctccgggataatccgaggccctacgattgtccaactcatcccagttatcagacgcagatacaggggagaataaangattagcggacaacgttgagccagacgctggacgcactgttgtggtgatgaagacctagaaagcgaatggaaggccgcgagacgggtgaaggagcagcagttccagaatgtaatttggcacagtcctgaatatctctcttgtatgagcttggtcgcatagctctaggcctatgtatgccagcgctaggcactagtgtcaagtgtgcccgactgaaacgtgagttgctgtgctccttctggtggccaggtttgtaactagatgactctgggggcctgcagactagggaggaatcttgctgttgacgggaggcccagcggctcgtttccataacggactaaacacctgtgcgtttgccaggtgtcgatactagtcaagaaccggcggaatatcggttgagtttaccatcgaggaaatctgggcactgaggatgtgacgctcagtgcaggaccccatcggaagcgactgttgtcctagccatttcccaggttggtgcacctatgaaaagactccgcctatgcgggtagtttgtcgagggcgggagcctaccgcgacttaagcggcactggtatgaattgcatccattcgcccctaggtttttccccataagtagcacaaccggataaattacgttattttgcaaaacagttttcgctagcaaatagttcactccagcatcccatgggcaacccgtcaactc

SEQ ID NO: 526695 - DNA, 231 bp, Homo sapiens
ctcagctgatttcgtatatatttggtagagacgggttatcagcatattagccaggatggtcttgaactcccgacctcaggtgatcctcctgccttggcctcccaaagtgctgggattacaggcttgagccagcacacccagcacattaatgtattcacacaaagtaagataaagtctgtaatagccttgttactagccgttgttaggtcaacccttgccgaagcttgatca

SEQ ID NO: 526696 - DNA, 142 bp, Homo sapiens
ttttcattttggtttctgctcgtgtcttgttgctgaatcatctaatcccaggaagaagtactgttcgcccacagacgggtatagtttgcttttgttccagggagacacagaataaactgttgtcatcaggcggtataagctt

SEQ ID NO: 526697 - DNA, 300 bp, Homo sapiens
  misc_feature (134)..(134): n is a, c, g, or t
  misc_feature (257)..(257): n is a, c, g, or t
cttccttccttccttccttccttccttcctttccttccttccttccttccttccttccttccttccttccttctttctttctttctttctttcttttctttcgacagaattttgttgcttatcagcccaaaggntcggacgtttcaactgcgcgacgactctcagctcactgcaacatccgcctcctgggttcaagcgattctcctgcctcagcctactgagtagctgggactacaggcgcagcgtctacctaatgncacctaggcgtagatgtttatgttatttgtttacgtacgccag

SEQ ID NO: 526698 - DNA, 115 bp, Homo sapiens
tatctagaggatcccatctcgggtctgggtacacaaccaaaaatatatgcttaaaactaggccgggttcaatggctcacatctgtaatcccagcagtttggaagaccaagatgga

SEQ ID NO: 526699 - DNA, 918 bp, Homo sapiens
tccagccccgcgtgatcccgcgcgcccagtgacgcctcctcccgctgctggccctggccggcggccctgacgtgcgctgctgctgctgctgctgggccatggcggcggtcgggcgctggggcgcccgggccctagtgaggcgtgcgagttgtgcgtgcggctgtgactgtgtgccccctcgcgtagcagacggctgaggactggaccagtgagccgtcactagcaagccacctgtacacggacgacatgttcacgcacgaggatccacagcgcctgctgacacttcgtcatgttcttcgcgccctggtgtggacactgccagctggctgcatcgcgacttggaatgacctgtggagacaaatacaacacgcatggaagatgccaaagtctatgttggctaaagtggacttgcacgtgccactccgacgtgtgctccgcaccagtgggtgtgcgaggataccccaccttatagcttttacaagccaggccaagaagctgtgaagtaccagggtcctcgggacttccaggacactggactaaactgtgatgcttgcagacactgaacgaggagccagtgacaccagagccggaaggtggaacctgcacatatgcccccgatgcatcatgcaacggctggtatgagctctcagcgagcaagtatgagccatgcacgttgacaccaagtgcgaacacaacattagtccagcttctacgctcccgtgactagtgcacccctgccaacatgtcccccttggtcttccaatcacttgtcgacgctcaatccttgactcctgagtgaccttgtacgcatttaccggcaacacctgtccacagcaattggcacagggaactagcacatggctgcacgcccgccaactccttgacacatccgtccaccgagaaacacaccagggtacg

SEQ ID NO: 526700 - DNA, 949 bp, Homo sapiens
  misc_feature (136)..(136): n is a, c, g, or t
  misc_feature (142)..(142): n is a, c, g, or t
  misc_feature (145)..(145): n is a, c, g, or t
  misc_feature (147)..(148): n is a, c, g, or t
  misc_feature (166)..(166): n is a, c, g, or t
gtccagcatgaaacatggatagggacccacttggaggacttgctgatatgtttggacaaatgccacgtagcggaattggtactggtccaggagttatccaggatagattttcacccaccatgggacgtcatcgttnaaaaantcntnnaggccatgggggacacancatgcctcccacacaatcgcagtttggagagatgggaggcaagtttatgaaaagccaggggctaagccagctctaccataaccagagtcagggactcttatcccagcgtgcaaggacagctcgaaggactctgccacctcgagtgtttctaagacaaggacagctgtaatgcagcatgcagattagccgtgagggcctgctcagctcggttcctaatgacatacaaaattcagagtgccacaagacttcaggccccaagcatacactactgatgtccgtcctaggtgcacaagccacacagcgcagctcagaacacccagcctcgggcgacagagcaccttcgagctggcgtctcaagaagctaagtccaccgaggttatccaggcacaagcctgccagagaccaggcaaaacagccaccaaccggtcaaaggcaagaactccttacaactaactggacacggctggtgactggacatatctaaatagctggcaaatggcaaatgaggctggtcaatgggtgtacagagaaatgaggggctcctaaaccactttcttcctgagatgtaaagcaaaaggtaatcattcctgtcactagattagaagcgatgaagactaacgacaaaaggcaagttctaaggaatcagttgacgtaaaaccagcgacagcggctagcccaacaggtggaccacaattcatggccgggcatttccctggcactggtaatggcaccagtgtgtcccaaatcttgacagcgtggacattcccttggggggacgtccta

SEQ ID NO: 526701 - DNA, 1299 bp, Homo sapiens
  misc_feature (136)..(136): n is a, c, g, or t
  misc_feature (142)..(142): n is a, c, g, or t
  misc_feature (145)..(145): n is a, c, g, or t
  misc_feature (147)..(148): n is a, c, g, or t
  misc_feature (166)..(166): n is a, c, g, or t
gtccagcatgaaacatggatagggacccacttggaggacttgctgatatgtttggacaaatgccacgtagcggaattggtactggtccaggagttatccaggatagattttcacccaccatgggacgtcatcgttnaaaaantcntnnaggccatgggggacacancatgcctcccacacaatcgcagtttggagagatgggaggcaagtttatgaaaagccaggtaagtcatatttgagtgtttaggcaacaaatgttaaattatgcaatatatgtgatttcatttgctattaaaacatgaaactattttaggagtgtgcatgttttctaaaccttatctgcaacatttatttcaaactgaaatgtttatccttaagattagtaaagtattagtaaaatcacatcactttatttgataggttagatttttattcttccctgtttcatcttttactttctctgggcaaattcagttaaactaactttatggcttggctcatccctttggtacttgattaccataatttgtggacccctttttatctagactttctttctccttttctgaaataggggctaagccagctctaccataaccagagtcagggactcttatcccagcgtgcaaggacagctcgaaggactctgccacctcgagtgtttctaagacaaggacagctgtaatgcagcatgcagattagccgtgagggcctgctcagctcggttcctaatgacatacaaaattcagagtgccacaagacttcaggccccaagcatacactactgatgtccgtcctaggtgcacaagccacacagcgcagctcagaacacccagcctcgggcgacagagcaccttcgagctggcgtctcaagaagctaagtccaccgaggttatccaggcacaagcctgccagagaccaggcaaaacagccaccaaccggtcaaaggcaagaactccttacaactaactggacacggctggtgactggacatatctaaatagctggcaaatggcaaatgaggctggtcaatgggtgtacagagaaatgaggggctcctaaaccactttcttcctgagatgtaaagcaaaaggtaatcattcctgtcactagattagaagcgatgaagactaacgacaaaaggcaagttctaaggaatcagttgacgtaaaaccagcgacagcggctagcccaacaggtggaccacaattcatggccgggcatttccctggcactggtaatggcaccagtgtgtcccaaatcttgacagcgtggacattcccttggggggacgtccta

SEQ ID NO: 526702 - DNA, 356 bp, Homo sapiens
gcgtagtatatgaacaattcaatcacaaaaggaatggggagagtattaagtaaaaccaacctttttagatttgtttgctaacaggtctattaacagatttatttagaaaggacattgaaggcattgaataaaatcatgtttcaaattattagtagacttcaaatatttgtgttatccctaactactaaataaatttgggacctttaatagaattaaacctcgtgtatttttgttgttcagtaggaaattcagatgcatttgtttaaggtcttaattacaaaacctggggtgtttaagggccagctttaaaaggaaacaaaaaactattcactgtttagtatggccgttaatctaaa

SEQ ID NO: 526703 - DNA, 347 bp, Homo sapiens
attgtgtcatttccactcgcctgtggcacattgaagtggttaacctttatgtcccttctttatgtgtttacctcggcttattccaagggtgcgttccgtcgagatgcacacaagactgaggttgctgatcggattaaagatttgcgtgatgaacatttcaaagccttggagctgatggcctttggtcagtatctgtagcatgtggcattcgaagatcatgtcatactagtgatgtgaagcaactgaatctgcagaaacatgtgatgctgatgagtcagctgtacctttgcctgaaacctatgctgaaatggctgactgttgagccaaggaagaactattatagtgtg

SEQ ID NO: 526704 - DNA, 486 bp, Homo sapiens
caatggccagagaggggctggccctacagaccagtcacagcaagggacagggcccagagcctgcacttcagttgccctgagattccaggagcctctgagggagatgaggggggtctgcatgaggtgggaggtggtgtgcgtgggggtctgtatatagttctgaaccggaaatggctggcccttgccagcctggtgtgtgatgtgatgagtttgggaaggacagtttccatgagaagcagtggcagggatggggatggatgccttcgttgttccaggcctgtcagggggcccaggtccctagcagtccctgccctctgccctggactggaagctgactaggagagctacgaatcagaacaactggccattttctagctggagatgccagctccgatggcatggagggccctggggccaccccaggtgtctttacctcatcctggtgtgtaataaatcactgaccatggagccatcatggctgaaata

SEQ ID NO: 526705 - DNA, 934 bp, Homo sapiens
ttgtccacttgtgttccgctgggcttctcctgtgattatggttggccccctgtcaccgtgtccccctaactgtgtgccacccggggcccgcgttttcgtttggggcccgccgtctatagttgtttgcgggaggacacgtacagctccgtgggcgtaggcttgccctgagttccacacactacttgcgcgtggtggtacacccaggtaagtcgcccccccctttggtgggccgctcgttcgtgcgtgcctcttatcaggcaccgggttttggcagcacccccttgtgcagcatctggcgggcatcccccctgttttgtggaaccaccaactgtctccacgcacttgtggcggcgcgcccccttgccgtcccccgtctttacacgggtcgtggagcacacggcagaccggcccggtgaccccacggggggtgggtggattcccagcagactccacgcatctgtcccccagcactcgcacgcacccgcggtagtacacagcgaggcgctgtttcttggccccaatacgagagagttgttttgtcgcccgacgcaaggcccccggcgctgttgtggcgtgtccccgccaggaagttgtgccgccccccttcggtggcgcgttgcaggtggggatgataccccctacgtatcttacgtggtctctggacccccccgggtctcctccacacccactggcgttcctccctctgctcctcctgtgacaagtccccccccacatcgaaccccgggacttcatgggggccccattgacgcgtaagacgccgcatatatccctggcagtgcgtcggacggcgccgacggatttcttgccaccgacgggaggcggggggtgggctggccgccgcggcgcgacttaccggttctgtccccccccccgtaggtcccccggccccacttttttcccccaacatgacaca

SEQ ID NO: 526706 - DNA, 131 bp, Homo sapiens
cccaggctgggttatactgtgatgtatgtcagctctgggcctggaatctgccctggaattagcggaaaacaatggcccagtggtggcgaatctatcaccaagagcctggccacccagccggggataatata

SEQ ID NO: 526707 - DNA, 279 bp, Homo sapiens
tccatagcacagatttgcgacaagggggctgtcatcaccgtcaccgtaacttcatggagctgacaccgaggctacatagcctgacttggacaacaaagtcgactggccgcaacctggccggcacccggagactcgctatgactcagatcgcccgcatcagcgacaaaggcaatgaacgccgtctgcaagccgaacgcctggtaggcacgcaggcattgcaggaagcccaggccctgcggttcaacgtgttcagcggcgagttcaacgccaagctgaaag

SEQ ID NO: 526708 - DNA, 265 bp, Homo sapiens
cctcttccacttgtgtcgagcttgtaacgctttcttacattggtggctgcttataggcctactatgggtgttacatattttactctctctacaaggtttatcctagtgtcccacaagagctgttcctctttggactaacagttaaatttacaaggggatttagagggttctgtgggcaaatttaaagttgaactaagattctatcttggcaccaaccagctatcaccaggctacggacaggtttgtcgcctttacctataaatac

SEQ ID NO: 526709 - DNA, 265 bp, Homo sapiens
cccgaggtgaggagcgagatgcgtagagagagtataggagagtgaagaaaaaacaaaggaaagaggaagaaagaagaggcagtcaatgcacggtgtacaaagatgaggatgacagatagagaaatgaggtcgagtaggcaagtttttaggacgtcatgccgcaatgaaagcgttgaggacgtccagtagaggacaggaagaatatcaaggaaatacaatgggatgaaagatagagatagaaacgaagctgagtaacaggtaaata

SEQ ID NO: 526710 - DNA, 257 bp, Homo sapiens
acgaaacacattgaagagctatttgaagggattcattgaagttcccttcattgcgtttcaaattagaaggtagtaactcctttgtccaagaagggtgaattgagcatttaacaattctccaaagaaatttctacagtggtctgtatcctagaccccttctgtatccttgagatggctgaggattgtaaaaaatgaccggttttacatgggggggctgggatttaaaaaataaaataataaataatggtaaaaactga

SEQ ID NO: 526711 - DNA, 187 bp, Homo sapiens
atgatgaatgagcactgtacaagctactcagctctcagcgtgcacccgtgccatggttacctttgatcacatgacatcatatatgatttccttctccttgcgtaagtgggtaaaggtccagaaatgcctaggcaaatatgaagcgaagttatttatggcatagaatctcatatatataataacccag

SEQ ID NO: 526712 - DNA, 635 bp, Homo sapiens
cgtggcctctgtgggtgcctgaacacagccaacccccttgaaaaccgagcccttccggggcgttaatttccgcggtggtaatgttccgctgggcacaaccaatatgtgggaatattaaagagtatcagccccgatgtttctgcaagttgttctgcagaagggacccttaagacctgcacacggaatccagagagctgggtggggtcaaaggcgtccttcacaaactcagtttcccaaagtgcgggatcacaggagtaaccccccgcgcccggcccaaagagcctttaaacaaagctttggacccaccaaacgcagaggactcgagtttatatgaagacgacgtggtgtcactcgtctctgccctcatgtgccctcagttctccattctggtatccgcggcacagcacagaagagagcgccagtttcacatagtacctggcacagatggggcccatgcaccccccaagctcccgaatggtgctctttctctgtgccacgatgtcagtaagattggtgcccaccgtggcccgtgtcgggggcggctcccacaggtcgcctttcccatcccgggagctcacctcccgcagccgtttcaacaacagtgtcttcccgacgcccgtggcccacagctcgtg

SEQ ID NO: 526713 - DNA, 191 bp, Homo sapiens
gggagaggcctagggcatgcagtgtgccctctgccccctgaaggattagatgactatgctagctgtgtaacatccccgtgcacgggacgccggcagcccatatggacgggacgcctttggttgcctttcagtgcacagtatactccagaaggccgatccttatttatccaagcccgttttctaaatagctt

SEQ ID NO: 526714 - DNA, 979 bp, Homo sapiens
gaggcggctccctgcgctcgcagggccgtgccacctgccctgcccgcccgctcgctcgctcgcccgccgctgccgcgctgcctgacctgccatgcatgctgcctgagatgtgggctgcccctgcgctgcgcgctgcctgccgcctgcctgctgctgcctgctgctgccggctgctgctgctgctactgggcgctgatgtggctggctggcggctgtggtgctgcgcgctgtgagtgtgctgattccgtgctgccctgcccatggacaccccgaagccggctgtggcaggctgtgggggccccgcaggcggtgttagttgcaggccgcaggcggggcggggggatgggcccggaagggtgaggcggtgacgcgccgtcccctggcacttgccgcattgcggccggtaacggcttcgtgtccggggggacgccccgggaggctaggaggagcttggcttggtctccggcgtgtggtgtcgcgcctctgcgtcttggagcacgtgtgcatgagtacctttatgcagcggagtgtcatagcagccccgcggagagcattaggcagagagcgccaagaggggggggcacgttgagcgcctatgcattagttccacacgatgaccatggtaggcctacactgacagactttagctacacacgtgactacgggcctagccattgggttcacttgaggtagcagacggagagacagcctttgggtgacgaacatgccgagcaccggcgggaacctgccaccagacagcgataaataggggctggccccaaaggccccccctgggaatgaccaaggggtttaggcagagaaccgaaagtagggagcatgactttgctccccagcattaccaacgaacagcggggaagggacccaatggagactaggagatgagacaaccccgaacactgtttagagacaacaaagacagacccacgttgaacacacaattaggttatggtagaagcag

SEQ ID NO: 526715 - DNA, 661 bp, Homo sapiens
agcgctcgtgtccgcctctgactgcagcgctgtgtgtgggctgatgtgtgattaccatggcgatggagtctctgtcctggggtgcctggctaaggaaaccctattacctccagtgctcgcttctcatatgtgctgtgatgaaatatcttttcttttcctggttagtggtttttgttggaagcttggattatatatgtgcagtattctacctatacagaattatgcatgaggaaatggactgtaagaaaataatatgtgacaatgtacaagactggagttatttgatgggcctgcatgtaacatgcctttgatgttacagaaactctttactttggaaaatgtttataccaccaatgcccaagcaatccagatgtatcaaatggtgattttgggcataatctaccatggtgtatgtgaaattgtcaaagtggaacaatgctgcttcaatctatgcattttatggaacttgaatctggaaccaagaaaagaaatagtgctattttgataagccaactagaggaactactgtacaaaaatttaatgaaatggtctatagtctcttaagggaccagcaccggtacattgtgccaaacttttgctgaagcacttgctccagacatgcaatcagtgatgccaaacgtcggtatgacggaacacgcta

SEQ ID NO: 526716 - DNA, 436 bp, Homo sapiens
tgcggccgtgtcccctcctgcaatgctaggactcacagctggccaggactccatgtctcccggttcatctgctcgccatgaggaacactatagtaacaaatcacggtccatgaagcatttttgtaattttcagctggatggctgcaggcccacaccaatgggtgcacattcactccccaccctctctgcaggctagcgataccgatccgcaccaccccaggctcagcgggaaggtgctcgtcttctctgccaccattagcaataataacgacttcaacagtcactctgcttactgtcccgggcttaccagattaccagctaatgttttaagtgagtggcttagtccgagggacggaagaaggggtggagtgagctcacaagaagagttaagcgccaaacctagagtcccgtccaaaggagcactgacacctggaag

SEQ ID NO: 526717 - DNA, 118 bp, Homo sapiens
  misc_feature (71)..(71): n is a, c, g, or t
taaaaagtatttattttttactagtgaggatggaactaggggaagaagtgggacaaaaaagatgcagtttnccttggtatggggaaatgtgaaaataaaatggtcaactctttcagtt

SEQ ID NO: 526718 - DNA, 111 bp, Homo sapiens
ggcatcggtgtacaccgcgcggcgctaaccctcctggtgttcccgacccttgctctccttgagcatcgcctccattcagtgagcccaacagacctgattgaagacttgggc

SEQ ID NO: 526719 - DNA, 360 bp, Homo sapiens
gcttttgggaaaaactagttttcccaaatgctttggttgtttgctcttttaaataaactttatcccataaaccttttttaagaactaccccctaaggctggttaggtttccattataaaggaatccaatgttttaaggggggtttttttgcccctggttatatgaaccgcctatttttaggagggggtcctggcatttaaatttgttttggtttgcggatttggcgttgaaaatggccctataaagaattccaggattaatgtctccctgttataatgggtgggggtgatataaagcccttttgtcctcccctcctggattccgttaaaataaagttaatgacttggggctttttaaaga

SEQ ID NO: 526720 - DNA, 796 bp, Homo sapiens
caatagggctatgtacgaggctgggtgctaatcggccgaggctgagtaacaattgcgtgtccgggagtgacaggtgccctctgggccggagcctggcggcagtggtggcagctggtatctgccgccctagctcaccgcgccccttttccagccctgctgactgtcgccgctgcaagctgagtgcatgcggctggcctgcctgagaaacaagtggcccagcctggtaacctgcctgagaagcccttcacaaactgcgtgcctggcaaaaatgaaacctgactgagctggctggtgatcagtgttcccctctgctgattcttgggcccctgaacccctggtaaatgtgcctccgtgttcctgtttcctgcctgccctcctcctgtagccttgcctagtgtagtgatgccccgaggcctccgtcctcttcccatgatggtgtctggggcttgtgccccagcctccatcttctgtctctcatgtgatggctgatgtagcagctggctccaatggctgaattcatttgtctggagtggaaatataaacttggtacggaagatcgggtctggctccttctggggacatctatttgtgcgatcaacatcaccaaccggcgaggaaagtggcatgtgaatgctagaatctcagaaggccagtgcatccccagttgctgtaccgagagcaaggctctataagattcttcacgggtggggtttggcatcccccaataccgtggtattgtccggcaccacagactacaatgtactactcatggattttctgggacctacctcagaga

SEQ ID NO: 526721 - DNA, 146 bp, Homo sapiens
  misc_feature (1)..(1): n is a, c, g, or t
nagctttgcgcagtggcagtatcgtagccaatgaggtttatccgaggcgcgattattgctaattgaaaacttttcccaataccccgccgtgacgacttgcaatatagtcggcattggcaatttttgacagtctctacggagactgg

SEQ ID NO: 526722 - DNA, 675 bp, Homo sapiens
gagacgggtgatgcggtggacagaaagactcttacttgggctggtgtatccagaaacctggccgtctccagttttattgtcgttgtgtaaattattcctttgtgcttcatagcagtgcggtatgcattatgtgcctaataacatggttgtgcaaacaaggtcatgagatttgctggtagacgcatatgggaaagggtggctgagtctccggttagaagatgagttaaggggtttggatactccagaatcggagtatctttgtgatactggaagtgctgatcatcttcccatgactgttcccagccagcatgaatctgggcaatggaatagttgtttctcagtctgttttaattctcacgagtgtgtaggctacagcgtggacttgtctttttcttatttaactctagagcagcgcacttacaaggtttaagtggcacctgtatgacatgttcccctccaaatatagtcaactccttatttggggcagcaaagtttattttgtatagttactttatttccctgaaagagacattacaaaaagctattatttcttcccatttatcacccagtagattagcctaaatttaatcagaaggtcttggagagtaaaattattaaatataggctaataaaatgatggggggcatttatttgatatagatcatattggtctaa

SEQ ID NO: 526723 - DNA, 948 bp, Homo sapiens
  misc_feature (224)..(224): n is a, c, g, or t
gggttgtagccgagctgacgcgctgtcttgttatgatgacgtctgtgggagcatgaagatgttgatgaatttgcactccccctgccttgctcggtttgttatgactcccttctggtggggcggatattattttttaatgacctcagccgcccgttcttgcttcgttacgcggaacaagagcaggccacttttgttttgtttcctcttcatggagacgttatgtntttgtgagactgatccagcaacaccatgaggagcttgctctttgttttggagaggcccgccctctttgtgttttgcaacgcacccccgctgggtggtgttttccgcggcgccgtcgatgatttttttgttttatttgtcgcctcctccgtgggtattcatgatcgctccctcgttaagtttttgttcgtccgtgcgccactccactctccgttgatgtccgtgcgcgcctcctctcctctctggcggtgatctttattaactccttcttttctacacaggcaggagcttcgcacttatcttttctctcacgcccccgatagtagagtttgtgtttggtagaggtttttttcacagacccgggcgtacaaccctcgctttcacttcccccaccacccttttttactactcgctggggagagtactacttcttttttgtgtttaaaaaacgacgccgctcttcttcgtttggatgtactaaaattataactcttcttctcctttattcatagctgctgctacactactttttgtttccacccacccgctagtattacctccttgatacaatgtttataccaccaccacacaccctgggggtgcctcaccccccccaccccggtcaccacatccccctttttcccccaaaacccccttttttttaaacctccccccttttttttttttcctccccccccccatcatttcccggggttttttttttta

SEQ ID NO: 526724 - DNA, 791 bp, Homo sapiens
tgcttccaggatggtgcgctgaacactgtgtcttcacatggcagaagagcattaaagggcccaaggcatgtgtgaagcctcttttataagggccttaatcccattcacaagggaggagacctcattaccataatcacctaaaggccccatctcttaatactgtagcatgggaaataaagtttcacgtgtgaatttgggagggataccgaaccattcaaaaccatatgcacgcagcatctttacttaccttttcctggtagacttactcaaccagttgtggattgacggacctataacggactgacatggttactggatacacccagagacgagaccccgtgggaacccttgggcctataagactttacaacttggatgactaacccacggctctgccgctcccaccacgttgcctatgatacctggatacacctggatttgggtccctgtgacgaatgtggagagaacacagtggcaaagacagttacttgacacaccccttggatgagtaacatatgccagataaatatacttacaagtaccctagtggtacaatggaactcaattctttttatagggatgaacccattgggctatggaaacccagactggacattgccccctaaacccccccaaaagaccgcccagagcacacaacacacctgggttgggacaacgcgcccccagcctagcacggccatatactgacacgtgggcaaccttacttcaataaaacgcatacaacactcggagagcgagcacacggacagtacacacaaacaggtgcacga

SEQ ID NO: 526725 - DNA, 175 bp, Homo sapiens
ctccttatcataggcgtgtgggtagaaatgtctcgcttcatagcaggaatgtttatcattacgagcgccattctccacaagggattttatgataccacaggctatcttcgacttcagggtggtggatataattttctgcagcttgaaaaagcaattcgctatctttcatagatgg

SEQ ID NO: 526726 - DNA, 247 bp, Homo sapiens
gctcgacacaacattctgaagaaggtgtgacatggtttcataagtcaaggttctccagagaaacagaactagtggaagacagaaaagagatttattctaattcacacacaacaatactaaccttaaatgtaaatgggctaagatgcccaattaaaagacacagactggcaaattggataaggagtcaagacccattggtgtgctgtaattctggagacccatcttacctgcaaagacacacacaggc

SEQ ID NO: 526727 - DNA, 145 bp, Homo sapiens
cagaagactggcgacgttttttgccacactagaaagcccagctttaggtgcgccgttggcggtggcaattgcgattcataatgtgccagaaggtgtggcgatagccttgccggtatatatggccaccggccgtaaagattatgcg

SEQ ID NO: 526728 - DNA, 307 bp, Homo sapiens
tcagacttgaaacctcctgtaaagaaagtatcatgccacgatagaaaaaactgtcgagacgtgtcgtctcttcctataagtattttcaatgtacggtaatgaacacaaatccgatgaacaaactgattaaaatttggacattatatcttgcttcactaattatggcatagtacaatgacatagctaatatgtcccttaatatttctttgtttaacagaggatatacatataactactgccattatggttatgggctactttaccagcctcttcaagtattggacacaatctatggttcgctacctac

SEQ ID NO: 526729 - DNA, 1349 bp, Homo sapiens
gccagccttccccgcgagcggacgcggaagcgcctctgtctcgctataattcttattatttcccaccctttacacctatacttaataagataaaaactataatacttattctccccaacccacacataataacacaactattctacaatacgaaaggcaaataaacaaagacaaaataaaaaaaagaaagaacataaacacaataaaactacaaaaacaacaaaataacaacaccaaaaaaaacacaacaaacacaaacacaacctaaaacaagacaacacaaacacaaaaagaacatacaacaataaatagctaaacataatataaaaattaaaaaacaaaaaatctaaaataaaacaaaataaaacaccactaatctcacaaaccacgaaaaacaaaataacaacaatgacacacaacacaaatcaaaaacacatctataaataaaaccaaaaccaaagtaatataaaatataacacaacaaccaaacaaccaaagaataaaatacacaacaaaacaaaaaaaaaacacaaaatagaaaaagtagaaacagcccccaacaagacagagaacgcaccaacaggaagacaagagaacacagacgaacacacaacacagataaacacaggacacccagacctgccaaacaaagaaaaaaacagaacagcccacacatgaaacacgacgagacaacaccaacgagaaaaaaaaaaaaagagaagaacacaaaggaaagaaacgaagtcaagcacaggagaggcgacagccaagacaagagcaaaaacagccacagagacaacagaaagaaaagcaaagaacaacacacaaacacacagcaaaacagacgcagagcaaagcacagagggagcaacagaagacagaaaaaaacacagaacagacaccaaacacaaaaacggacaaacaaaagacaacacagaaacaaaaaaaaaaaaaaaaaaaacaaaacaccaaaacctaaaagaacaacacaccaaacacgcagctacaacaccccacaacaaacacacaccacacgagaagcagctcagcagacaaagcacccaacacaccaccccaacaagaaagaaaacacaaacacaacagcaaacaaaataacacataaaccaatagaacatcaacacacaacgaaccagcaaaaacaaacagacaacaacaccacaaacacaacaaaaaaaacaaacaactaccacaacaaacacaaaaatcaatacaactacacctccaacaccacaaccacacaacaacaccaagacaaaagcacaaactcaaacctaacaacactacgcaataaaaacaacaaattaccacatcacacaacataaccacac

SEQ ID NO: 526730 - DNA, 305 bp, Homo sapiens
agctcgatgaatgaccgagtcaataaaatagcagaggatctgaaactgagaaaatatatttgagtacaaacagcttgtgaaacttaatacttttttttttttgggcttcttcagagggttcaacggaatttacaacggattggccggttcagtatgctgttcagatgtgagaggcgcttctctgtacagcagcctgtacgtgtctcaatcctatgcggtgaaggtgtctaccacgggcaaacagtttttctccccattgggtagtatgtggtgatttcctataagcaaaaagaggctcaccagcc

SEQ ID NO: 526731 - DNA, 933 bp, Homo sapiens
gcaaaaatggcagtgagcctggggcccgggccggttgccctgcagcgccgcggggaccttctgagttggccggtggcagtgagactcgtgcaggggcgtccgatgcgcggtggcccggtggacctcgggtgagagctcagctgctgcgtggccccagacgaggcgacagggatggacttgcgtagacagccatttgccgggcctgcggggctgcgctggtctgggatggggcgtgcctgctgcgggccggggccgcgctctgtgaaccggctgatggcgggaaggggccgccgtggtgctctggcacggccccgggcgtgtggcgggcgggcgagaagcttgagcgcgatcccgggcggcgcttgtgcgcaatcagttgcaggctcccgcccgactctgactcgggcggcgctgacatggtgccggccacaccctctggccccgattgcgccggctgccgcttcccaatgagctggaggcaggagatgcgcccggggcggacagcggcgtccccagagagccagggcccgtgaccgaccgtcgcggggaagtgccgcctggtggggtcacgggcgcctgaagcccacgtgcgccgcgagccgaggtggcactcgagcgcggcgggtgacaagcaacaggccgcctgaagcttgcatcccctggagctacctcccccggaggggaaaaggacttttgaatgtccaaaagaaaagagcaggggagggaatggcgaacatccacggattacgacagacagacaacagacaaaaggacgagagggacaatcacacaaaacaagagcgagacagagagaccgagaagcgggaatacaagacagaagagacaggagagagaagagaaaaccgccgggaatagacagaggccaacagagaaaaggacaccaaaggaagcaagaacaaaaccgacacaacg

SEQ ID NO: 526732 - DNA, 462 bp, Homo sapiens
agtctcagtattttccactacttaaaaaatgttttgggccagccgtggtggctcatgcctataataccagcactttgggaggccaaggcaggcagatcagttgagttcgggagttcgagaccagcctggccaacatggtgaaagcccatctctactaaaactataaaaattagccaggctggtggtgggtgcctgtaatccaagctacttgggaggctgaagcaggagaatcacttgaaacttgaaggcagaggttgcagtgagccaagtttgcgccactgcactctagcctgggcaatagagtgagactccatctcaaaaaaagaaatgtttttagtttacttcattaaccttttatgatctccgggttttgtgatgtgcttggaagaagttttgttctaggttataaaaatggttccagccaggcgcgtcgacgcggccgcgaatttagtagtagtaggc

SEQ ID NO: 526733 - DNA, 157 bp, Homo sapiens
gtccgaccggtatagtgtactcctgtgtggattctctggctgctgactacattggctctactgacgacgacagttttccccacaacgggtacatttatacggtttctctcctgtgtgtgttctctgatgtctggtgaggtgcatgccctgccggaag

SEQ ID NO: 526734 - DNA, 149 bp, Homo sapiens
attggtggaacgagagtaaaggccaacttcaaagaccagtgacaaccatctgcccctgcttcacactctctgcttggagaggactagtgcagctctgtcagttttagaagcaagttaatctatcctcttttcaagaggcaggagactgg

SEQ ID NO: 526735 - DNA, 500 bp, Homo sapiens
aagggtttgatttttatagtcacatttacaaccatcttgagatttttattttttttgaacggagtctcccactgtcgcccagactggagtccagtggcacaatctcggctcactgcatcctccacctcctgggttcaagtgattctcctgcttcagcctcccaagtagctgggattacaggtgtgtgccaccacgcccaggaaattattgtagttttagtagagacaagatttcaccatgttggccaggctggtctcaaactcctgacttcaggtgatccgcctaccttggcctccaaaagtgctgggattacaggcatgagctactgcacccggcctaaccaggctggagtgcagtggtgggatctcggctcactgcaagctccgcctcccagattcacgccattctcctgcctcagcctccccagcagctgggactacaggcacccaccgtcacgcccggctaatttttttgtattttagtagagacagggttcagcc

SEQ ID NO: 526736 - DNA, 190 bp, Homo sapiens
ctcgtaacgacacctccgtaacgagcgctccgtaacgtctacgagcgctcctaacccttccgtaacagcgcctccgtaacaccctccgtaacaacgcctccgtaacagccctccgtaacgagccctccgtaacgaccctccgtaacagcgcctaacacccccagactccaccagctggcgctcgttagga

SEQ ID NO: 526737 - DNA, 1053 bp, Homo sapiens
aaccaagacagatgtcattggactctttcaaatggaagctagagatgacttcctcatactatgattacgatgtgtgtgccgtcttgttctgctcatcttggcttcgccgctttcttcctatcgctaagtctgttcgccatactgtaagaactaagtccactgaatgcattgacgtatactgatgagacccgaaactgatggcaaaacatggtcattctcgttcaacgaacgttctcaaaagatgtgacatgaccttctgggtgacacccgtaggtatcattttggtgctacctcgttcgtgaatacaacacgtagtattgcatcgcctcctcgactccagccgtcaattttaaactagtctaagagacgcattcgagtcaagcaaattccactgggggggaatccaggatctcatttgggccaagggacacatgacggctcctctccgaagagaaagtccaacgcgaaaccgaagggaggccacccatacattggctaccagtaactacaaatcccctgggttctcttacgccacggggccgtttatcagtccatctctaacgcaagtgatagggctatccaccatgcgtgtgcgaggccaatgaagtgcgaggggaggttctcagcacccgaggaagcagagaccctgaggactacatatggggccaacgtcgaaaggttggcacaacgagtgcgcaccgacacagcatttttcagcggaacacatgaaaacgtctaccctggcttcgaaaggcgcaacggatggctattgggctttccaacgtgtatcctaccttgttgtcataacatgggttccccggccgagccacattttcgaggatgcctatgggcactcccgataaaaggaaggccccgtacaggtgccttaggcgcattgtggttcagtcaccacttcgttgtcacttagtggtcgaacacgcaacacaccggaggcatctgttgtccaaagcccatctcgtgagacaagggtcgttcaaaacgcagaagacctttcgcaaatcctctaggaatgctacgcccttggagcactgg

SEQ ID NO: 526738 - DNA, 382 bp, Homo sapiens
  misc_feature (240)..(240): n is a, c, g, or t
  misc_feature (249)..(249): n is a, c, g, or t
ctcaaagattttttttttctccttaatttggcctcttttcctatctgtctttttacttatccactgttttcctttagtggtaaactgatacaactgttttcctattcaagcatagcctctttattttcctataatcccatgtataattttcataatttcctttcctcaaatctttaaaaaaatttggttaaattttcttctttctgtgtgagttacaagtgtttctgtgcttcctttccntaaaatggnaaaatatactactcaattcttaacctaggcacttttatgttttctcaggcattggctcagagctcccggtggcagggcaggttgtgaaatcctgagggggaaagacagtgacaggacaggacaggacatggga

SEQ ID NO: 526739 - DNA, 157 bp, Homo sapiens
tgtcactctgagaggatccccctggtcagtctgctcttgtgctccttgtcagtcgtgcttgtgacagttactgacaagtttcatgctaccatggacaacatgctctttatcctgccatattactacaaagcatagctgggctctatgtttggctctg

SEQ ID NO: 526740 - DNA, 490 bp, Homo sapiens
  misc_feature (18)..(18): n is a, c, g, or t
  misc_feature (86)..(86): n is a, c, g, or t
  misc_feature (89)..(89): n is a, c, g, or t
  misc_feature (146)..(146): n is a, c, g, or t
  misc_feature (298)..(298): n is a, c, g, or t
  misc_feature (304)..(304): n is a, c, g, or t
  misc_feature (331)..(331): n is a, c, g, or t
  misc_feature (338)..(338): n is a, c, g, or t
  misc_feature (355)..(356): n is a, c, g, or t
  misc_feature (364)..(364): n is a, c, g, or t
  misc_feature (375)..(375): n is a, c, g, or t
  misc_feature (384)..(385): n is a, c, g, or t
  misc_feature (428)..(428): n is a, c, g, or t
  misc_feature (452)..(452): n is a, c, g, or t
agggacgggaagccgganaaggacaaacaagcagaagagagaggccagagaggaggccagacgaaagaaggacgagggaaaaaacnaanaagccaagggacgagggaagaagccaggcgaaaaaggaaccaacagaaagggaaacnagaacaggagaggacgacaggagaggaaggggaggaagggaggaggccagcagagagagccacaggacgaaaaacagcaaggggccggggaaagaagaacggtgaacgcgcaagggaggaggaaagatcaacggggggcacgcaaggacagntacagnatgatgaccaggggggggatgaacagngataacnggttataatggccatannacagggcncataggagggncaacggggnngccacgaacggaatgcgccaaagacgcacacgggaaagggcanaaaagaagccacaaagagggaggncggaagagggggaataaacaatggacaaagcagggggc

SEQ ID NO: 526741 - DNA, 445 bp, Homo sapiens
  misc_feature (131)..(131): n is a, c, g, or t
aataaaatgggtgtgaaacttttcatactctgctctagcaaaacacagtaaagacctctaagcatctttttttaagaaggtcaatgtagtgattagctttatgtgaaaatgtgactggtctacataccccnaatgatatgggttggctctgtccccacccagatctcatcttgaattgtagtttctataatctccaggtgtcctgggagggacctggtgggaagtaattgaatcatgggggcagttacccctatgctgctgttctcgtgataatgagttctcatgtgatctgatggttttataaggggctgtccccccttttgctcaggacttctctttgctgctccacttgaagaagaatgtgtttgcttcccctttcaccatgatttcctgaggcctcccccaccatgctgaactgtgagtcaattaaacctctgtcctttat

SEQ ID NO: 526742 - DNA, 1118 bp, Homo sapiens
gagttactgagaactcataagacgaagctataattgctcttgcgagtatccactagtcaaccggcgctgaagacaatcgctgcaagaaagcccagagaaaggagcgccatggattactacagaacatatgcatgctgatctggtgcagggtcgacatggtcggtgtttcgttgcatgttctaccattccgtctcgctgatgtgcaggattagagctgagcaatgacaccgctatgaggacataaacctcaattttctttcttcctcagtccggggctgcccacatatgagcttacgagaatgcagtgggtgcgtggactgtctgtactgcgtaggagactatgagtcccgcatcgtcccggacttaagggataccaacgaaaagcagcggatgattctgtggtccagataaagaaagcgggtcaatcacgtccagcaaggtgcccatcctctcgtgcatcgcagttaagggcttatatatccagttagtgaaaccacggggttacgacatgataaatgagagcggtgtttgtcaacaagctgggtaaggagagcgcatcgatcgggctggtgtcccaaacgtggtcaagataaccttatgcgtccaatcttactcgagagaactacgttaaaattggctatgtaaacccaaaacgatgggttgctctatgaattgaggtgtgcgtagagatttattggctaggagatgggatgaacatgaaatgtcaggtggaaaggtagtctatagatggcgacgtttgtgttagaagacataaggaatttcttgcgttatgaatcccaatttaatcgaagtaagaacatgtttttgtggacctagcgggcatcttccaaagggggagttaataaccctgggacaagggcgtatttatagcggggcaccttatttcgcgttccactttgtggattccaccttaacgatggtgaaacataagtccaggcaatggatccttcaaggtgggcgtcttttccacaagtcctgggaaatgggaaactaaccatggcaatttgttatggatttgtgtggtcaaccgcaccttgggtaggaagtcaaaacaggcgccttgtggaaaaactgggttcctgatggtatatggcaag

SEQ ID NO: 526743 - DNA, 603 bp, Homo sapiens
gggaagctggcaggggcacgagccgggggcgggttgaagacgcgtcgttgggtttggaggccgtgaaacagccgttgagttggctgcgggtggagaacgttgtgccagggcgccggtgcaagaaaggaggcccgcctgttacgatggtgtccatgagtttcaagcggaaccgcagttgaccggttctacagcaccgggtgttgcgcgtgtggccatgtccggcacggggaggatcatccgtgggggacctgttacatgggtagtaaaacccttattgtgtggcaattgggctgactgtggacaggtgactcatcaaaactccattgccaagttgtcaactattcagtatgaacgtcactcggaatacatatcgtctgagaaatggtgatattgcctgtgtcctttgggcggcctctgtccttatgtaataattcagtccaaggctggttaagtggagcaatttcttatcaaggtggtggcttgattccattcttctgtaccggactttgggattcgccctcagttgcctgtagcaatagtcttctcactattggcaagaatcaagatttctgatactacctgttccctaaaaatactctggct

SEQ ID NO: 526744 - DNA, 167 bp, Homo sapiens
gtgagccgagattgcgccattgcactccagcctcggaacgagtgaaactccgtctcaaaaaaaagaaaatgctttctcttccttttatataaatatcgttagggtgagcattatggtccaatgattcaaatgttttaaagtttaactcctagcagagaactgccctt

SEQ ID NO: 526745 - DNA, 954 bp, Homo sapiens
actcaggagctggtgggctctctattgcatttcatagacaatgcaaagagagcccaccagacttccgggacacttgactcaggagcacgatgctgtgctcagctgtctggtacaagtcaagctggcctggagggacggggaggatatcatcctcagggtgccatccatgacatcgcgcgttctatgtcgggatgagctgcacacctggtggtcctgaagacagcgccaggaaccaggatctcccccagccagagtctgtgtgcggaaagttccagaggcctcagtgcacgctccctgtcggagagtgcagttgggcccgtggaggcatgctgctggtcatcctggctgcagagagcaaggtcgctgcggaggagcttagctgtctgtaggacaggtcttacaggttgttacacggagtccagcatcgactttctggacagagcgagtatctgatggggcctctacaccgaaccacactgtccctgcacaggatgatcttactacaaaagtggacattaacggagactacgacgtggacagccagacactttcttgcttcccctgaatctgtggatgtgggtggtgaatcacgcccaacagcaagacacatcagtggcagagcgaagcgacagagcacgcgcgccaatgagccgccgtgcggacacaacatgcctgagacgcgcaccaagcgtcatcaccaggtagatcggcatatgccgcacggcggacgagaacccaagcggcgacctaccaggagcccgcaacaacctggcgcggcacgggaccagcggaagagccgcgaattgcggagcctcaccctgacaacggcggacctttggaactcgcaccacctgctaagcgaccggacaccggcagctgcgagcgcggccagcactggcaccacgaaaggcacgggctagcgaccccgcgcgcgcagaacaccgcgggcgcacc

SEQ ID NO: 526746 - DNA, 1987 bp, Homo sapiens
gcgactcgcacaagaaggaaccccgggcctctgtgatcctgctcgcccggctatgctgctgtgtgccgctgcctggtggctgggcctgccggtggctgctgcgctgctttgtggcctggtgaagctcgcgtgtgatgccctgttgcctcatgtgcccctgggcctgcggagggtgcagctgccgcgtgcctgtgctctccctgctacaactgaacatcgtgacaaaccgagcgacacaacatcagtgactctgtgtcgagtggcactactttgcacgtgggaagacgacatgcctggaattactatctccaatgcgagagacgtccgcaggtgttaacggagcctgtgtccacgtggcacgaaatgtcctgtggccacaatcctctggtgcctgattgtaccacgatgcctctcgctggggtcttactgctacagacttatgtgcagctcaccatgcttgacatggcatactacgtgctcaggtgtcatactgtacggttgatggagaggtcgattcacagtgcaatgatacattttgtagagaacctgtatagaagtgggaagatgccagaagtggactatgtagtacatgaaggaaatggcttgaagaggaacgagcgcggaacatcgacacgagaaatgttgcatacgctaatatcactaccgaccacatatctgaacacattgaaaccagcttgttacatccttcacactacttagcccagggagaacggcacacggcggagacaactgggacacaatccccaatctgcacgcgcaatcacgaacaacgaccgacacacacagaccctgattggcctcagcctccacccgatcgcgcgatctacacacgaaccacatgcgcacccaaaaacactaaatcaccaatccaatcgacagcccagactcaacgcactctccaccaatggctacacatctccgataatctctcataacatactcctttcttctgctccccctcttactgatccactacagactaaaacgcaaaccacacaacgaccacagctccaaacacactccacacaaaccaaaccacagaaccaacaacaaatacacgaagcaaacgcacatcacacactgaaaccaaaccgaacgacaacagcacctactactaacctccgcacaaacagaccacccacatacaaccatcagaaccattaagtacaataaccaagcatcaagaatcccagcaacaccaacaactactaaactagccacagacaaccagaacgctacacacagagactccaaacgaccaccaaaacatccacaccacaatcccatacagataagccagcaataataatcgatactgaacatgaacgacacacaccacaacagctacgaacacacatacagtccacagcaagacaccacacatcagcgatcagcgcaagccagacgacacaacgcacggcgacacacgcacaacagacgagcgacagtcgagacgaaagagagggagagcacagacacagagacacgcacgagcagacgagagacgtagcaggcgcaactgctaggacgatggacagcagcaagaaagataatgagagacgacaacaggatacaacgcaagagatgctagacgatacacaacagaacatgatggccgctgacaacggaagaccaacgacaaacactggacagagccgcgcatcagctagccgctgagaaggagcaagtacggagcaggcggcgacgcaggaaatgccagaagcagagactgacagacagggagcacgcaagcgcgagtacgcggcgcagacaagcaccccagacgatagcgcctagagccgatcaagacgcgacggcacagcacatagacgagcaccgtcgagagagcctgggacacagaacgatccactgccgctcgcgcggtcatctggcagcaactcgggcaggagagacagagcgcagaacacacgagagagctggaagtaatcgagacgaagcgagggca

SEQ ID NO: 526747 - DNA, 315 bp, Homo sapiens
gattgtggtgccatgcgcctgctactcaggaggctgaggcaggataatcacttgaaccagggaggcggaggttgcagcgagccgagatcgcgccattgcactccagcctaggcgacgagcaaaacatctcaaaaaaaaaaaaaaaaaaaggaaaccgcacccatttcccagccgggaaaactttttcctgttttcaccatcccaatgcagaattttcaatatcccggaatgaatgtttggagaggggataaggaaggatgagttctgctgggtcaatttaaccataatttttttaacactggcttggtggcaagg

SEQ ID NO: 526748 - DNA, 202 bp, Homo sapiens
tcggtcgcgaatcaggttaccacagcacagcaacacctggtagaccacgttcacctctcgagccagtggagacccagaataccatggagcaccaatgaatgaccctgatggacctgtgattcgctggcggtacccgagcatcgaaattccgtaactcattggtcactagcttgtttccgtgatattacggggcacccccctg

SEQ ID NO: 526749 - DNA, 254 bp, Homo sapiens
ggcacgtctgtgtgctgcgcgcgaacgtcacgtgcattgctgcccgaactgtctggatcatctgtcaacgcagtaaagcaggttgctctgccgttcttgttgccggtcacgagtaccttgctggtgttgctgaagacttcctgcatggtgtccaggtacagacgctggcgggtgacttcaggggccttgcgatattccgcgaccagtttggtaaagcggtctgcctcacccttggcgcgagacgttcgtcacgt

SEQ ID NO: 526750 - DNA, 228 bp, Homo sapiens
cttgttgcttgccagcttctgcaggcatgcagactgcacacacttgtagaaggcagcgggtacctccacctagatttcaaaggctctctctgaaagcctcagggcccaggtagagcagctagccagggatactgcagagaacctccactaggcaatgtcaaataggagttgtagggtataaggcccattgtaagcagagccctagtcaagtaacaagtatactagtag

SEQ ID NO: 526751 - DNA, 190 bp, Homo sapiens
tccagccaacgcgaactccaagcattatgttggcacgtggtcgttagattctaccggcgtcgactgttggagacattatgaacgcggcgtctgcagcgcacacgcgcacgaagtcctcaggagcccgtctatagcgtagcttacagccctgctgcgtaagtacttgggcggtggttccttcgaccagtgc

SEQ ID NO: 526752 - DNA, 1455 bp, Homo sapiens
ggagcgcaagggcaacctgtcgcgcgccgttcctgtcatctgccgccgacgcttcgcgtctctgtaacgtgaccttgctcatccggtgtggatgctataggcgagtcggggggcgccggggtctgctccagcgacgccccgggagtttggagcatcatgggtcgcgggcggcgcgacgtgtgaattgccgtgccgtgtacacgtcagagtgacgtactaaaccgattgaagtgttagatgagcgattaggctccatctggcgacactgcccgctttgcaaacgtcggccagtgtgaatcctgaggagtctcttctccgatcatattcgcagtgcgcataggccccagacggtcgagatcgacggctgcgccgagtagagagaacgctatccaagacatggccacattgttcaaggaggccccccgaaataggtctgacagcgtccttggagaaccgtggccgattccaatctgtcagggtacgtcactacggcacggtgttgcgaaacggcgaagcgacccaagattaggcatgtaccaagcacttttccttggagaggagcccactgattaggttgctcaaggtcgcttgtgaaaccaatctattgaagcttgtccaatggcgcagggccgccattgttcaacgcaaggggccccctgggagagagcaaggattgagcgccagagttcacatttcatttggttaaccccacatatagttcctccaaagagcgtgttccgccgaggagttccagagtcgtgcgcaggcagcccggttctaagaataggggggcacgacagctcgatgtataaatcggttcgcttgggtcacacctcgaagcattatggttaggactgtcaggatccgcttgcgaaactggacattcgatgcagacttggacgcaatgccttgccatttggaagcataaccacgaaaattggtcgagagcagcaatcacaagttccgagaaaagaaagtctccgatgcacaggcaaccaggggccacagagcgtgagaagcagcggccgatcatagggtcgttagccctagtgataccgcaccaaagtacactttgcttagcgccgggggccatccgccgggtattgcactacggagaaggcgttacactaacagacacaggctttaagaacagggagatcgcattggaagcgaattacccagcaaccactatgcgtgcactttccagttccagccccggtggccaagccacggcgcagcttaggcaaagaaacgcgttcgggaagcactataggtagagagcacagggcgagcacctccgccactctatcccatctagtagaaccattcaaacgcgccttgggtgattaaacgccgctccattaaccaattgtcacaatcggaaggtagtcgaagctgaactgcaaacaacttcgcattggtcggactatggaacattacaggataggaagcacg

SEQ ID NO: 526753 - DNA, 960 bp, Homo sapiens
  misc_feature (388)..(388): n is a, c, g, or t
gaaagtgccaaaccattcacgagggatccactacctagacccaaacacctccccctaggccccgtctccaacagcggggatcatatttcaacatgagacttcgaggagacaaatatccaaaccatatcgcccacgtttaggaatgtctctccatggtagatgatttgcaaatagacggtggtatacccattccatggaagcagggaaatatgtttgcacgtctttggttagtcctcttcttttctactgacagtgggcttgtccatgtgtcctgcatgatcaaaatgacaatagcaaacttgatggccacagaagattgaaaagtgcttgggcattgagcttgctctctcttgaagtgcttggagccctgagactgccatgagaccanataaatgatcactagctagcctgctggaggatgagaggtcacttgagaaaccttggctcacagcctgcttacaccagacacatggatgagtctgtcttagactatccagctccagctgagttgccagctgacttcagtcacatgagtgagaacaacagaaggacagcactgagctctgccaaaattgctgacctacagaatcttgagctaatgaatgattgtagctttatgccattaagttctgaggcagtgtgctatacatagcaaaagctaactgatacaaaactaaagatacaatggcacaaacatgaaaagacatgttcaccgaagcattgcctataatagttaaagactggaaacgactcagatgtccaccaactcaggagtggttgaacctactacagtgcattcaccccgtggaatactaagcagctccaacaggggtaggaaatttgtatactttcataaaatgatctttaggatatattgttaagtgaaaaaaacaaggtgtagaatagttaatagagtatgctacctcttatttaataaagggagaatataaataaaaaaaa

SEQ ID NO: 526754 - DNA, 101 bp, Homo sapiens
ttgtctcgttgctgctgctctatgcgccagtctgggttctgcctcctcgtcttgcgcctctttctcgggcatccacgtctatcctggtccagctgcgctgc

SEQ ID NO: 526755 - DNA, 745 bp, Homo sapiens
cagaagggaatggatacattcgaggcggactcacgagtggatgcgatctgtctctcctggctccattcttgccgccttccagctctgaatcttgggaatgtttgttacccttggaaaataaagctgctgtcttctagggaactcagctgtctggcgaggcaacagcatggtgtgccagtcatttcacgactctgatgattctcttatctcgtctatgtaggatatccttatcagccagcacgtctccttctcgcagacccacaaacgtcgtcagcactccgagtacacctagctccagatctgcatcgactagctctgatgggcagagcgtgggccccctgaaacccactgagtcttcaagtttgctcttgtgatgtcttggtgtgcgcgtgttcccctgtgtcgcttctcgcactggggcatggagtgcccatgcatactctgactgccggtcccctcacctgcacttgacggggtctggtggcagtccctcgctctccccagttgtccacagtcactgacccagacggtcggttggaacagtgagactcgagggctgagcgtggatctgaacatcgacaggccctgtacttgggttgcctcttgtccctgaacttcgtagtaccagtgcatggagagaaaattttgtcctcttgtcttagagtggtgtgtaaatcaagggaagccatcattaaatagtgtcatttctcgtcaatgtaaaaaaaagaggggcggcgggtcataa

SEQ ID NO: 526756 - DNA, 338 bp, Homo sapiens
cgggatgcaagtgtctagatgcttgtagcttttgcaccgtagctcaatcctccacttgccgacagggcgtgctgggccggcactcttgtcagcttctcctgtcctttagtcttggtctcagccaatcagatcagctcttgctcagagaaaaaagaaggctaaggggaacttcctcctctttctccggccagatctagaaatctgcccgtgcttgcctcctcccctgccttttcccccatgaggtggaagccgtcctgctagggccagtttagtggtgggacccatgccctccagccttctcaggaaccgtgtgcggagtatcacctgtttcccatgga

SEQ ID NO: 526757 - DNA, 129 bp, Homo sapiens
acggcgagagattcgctatcgcatgacaggtgtcacccccaggatgcatgcgctcagtgactaagacaggccatacgggaggcaagatagaaggaggtcaaggaagagcttctgcattctgagaagctt

SEQ ID NO: 526758 - DNA, 288 bp, Homo sapiens
ctgaccccttatctcagcatgcctacgtgtactaaccccactaaagctcataaaaaccctgtgagggttaggaagccaaggcaggcggatcacatgaggtcaggaatttgagaccagcctggccaacatagtgaaaccccctcctactaaaaacacaaaaaattagccaggtgtggtggtgcgcacctgtaatcccagctactcgggaggctgaggcaggagaaccgctcgaacccgggaggtgaaggttgccgtgagccaagatctgtcactgcattccagccaggg

SEQ ID NO: 526759 - DNA, 347 bp, Homo sapiens
  misc_feature (87)..(87): n is a, c, g, or t
  misc_feature (108)..(108): n is a, c, g, or t
  misc_feature (145)..(145): n is a, c, g, or t
  misc_feature (175)..(175): n is a, c, g, or t
  misc_feature (220)..(220): n is a, c, g, or t
aagcacacgcagttctggaggactttgcgggcaacctggcctcccgggtgcggccgcgcgacctccctctgcttcgtgtacccgctngatttcgcagacccgcctggnagcgacgttggaaagtcagcacagagcgcgagttccnaggcctgggagacttcctggtgaagatcancaagtccgacggcatccggggcctgtaccagggcttcagtgtctncgtgcagggcatcatcatctaccgggcggcctacttcggcgtgtacgatacggccaaggcatgcttcccgaccccaagaacacgcacatcgtggtgagttggatgatcgcgcagaccgtgacggcct

SEQ ID NO: 526760 - DNA, 322 bp, Homo sapiens
gcggccgcctactactactaaattcgcggccgcgtcgactgcccgtgtgctgggggctcactggggctgcataagtgtgatgcccgtgtgctgggggctcactgggggctgcataagtgtgatgccgtgtgctgggggctcactgggggctcactggggctgcataagtgtgatgccgtgtgctgggggctcactgggggctcactgggggctgcataagtgtgatgcccgtgtgctgggggctcactggggctgcataagtgtgatgcccgtgtgctgggggctcactgggggctcactggggctgcataagtgtgatgcc

SEQ ID NO: 526761 - DNA, 448 bp, Homo sapiens
cagaaaataaggacaaggtctgggtgtagtggcttatgcctgtaatcccagcactttgggtgaccaaggcaggaggatctcttgaggccaggagttgcagaccagcctgggtaacatagtgagaccttgtctctgcaacaaaatttaaaaattagccagacttggtggttcccacttgcaatcccagctatttgggaggctgaggcgagaggatcacttgagcgcaggaatttaaggctgctgtgagctatgattgtgccactgcactccagcctgggtaacagtgagaggcctcatttcaacaataaaacccagcttgggccgggcccgcaacaaaaaacctttaatcccagcactttgaaaaaccaagacgggcagatcacgaggtcaggagatagagaccatcctggttaacacggtgaaaccctgtctctacaaaaaagacaaa

SEQ ID NO: 526762 - DNA, 925 bp, Homo sapiens
  misc_feature (93)..(93): n is a, c, g, or t
  misc_feature (925)..(925): n is a, c, g, or t
cagtctctgtgtaaggtctacgcgcttagctcgtcgtgaaatatccgtagaataagattttcctctctgttgaatgcactagatatgactatnaactagcttacccaacaatatcctcggagtcacgggtgttgctcatacgcatatcgcattagacggtttacatgtctttttaatcgctcaagttgtataatattactataaattaatttgtcaatgatgaaaaatgatgtagacccactgtaatgataggagataaggtgaggaaggcaataacgtactaccggaggttagctaaaatatgacaggaggttgttgatgtagcttcttctgtgtagtactccttgtatctaagaggaatagttgcgtgagataggtactactaaaacacgtaattaattctcaaattagaagtgaaacggtatctatatttaataattgacccgagtgattgaaagagattcaaattttccctctaaactaggtctgttgtggtgatctcttacaatgaatctgaaaggcgatcttgtggaacggagataggcatggaggtgatgaacatgatgcattgaaaatacaatgacgcatggggatttgatttatccaaagcttagtttactccattccactgaatactccagacgttccagggtcgccattgagtgtgggagtggtagagcatgaagtcatgcgcagacaccccaaacgtggatgtggacaggctggatccccagcactaccgggagcgcaacatactggctgtcaaacagtatggcctgtccaagaccacacacatggtttggacgcaaaaggctgtccacccccgcacggtaggagggataacaagacagctcgggtccacaagcttggcggatgccatcaaccacatccataacccacccgcctcgcgcgatctctctaccan

SEQ ID NO: 526763 - DNA, 294 bp, Homo sapiens
tgatcgcttagtgggtcctgccagtcctccgcgacaaataatcgactacagagaccaccgggttgaagtgcgcaccggaaaaagtggagaagcacacgatcagcacgtacaagctacgtcgccggtatgccagcagcatatggcagagaacgcgctagacgcatacgtttaccgttacgcacagacgcgtgacccatagattccaagaaccaagctacggtgcacacgcagaactgactgtaccgcagaaactcagccaaagatcttccgctgatagtactcagttgggatagc

SEQ ID NO: 526764 - DNA, 1523 bp, Homo sapiens
  misc_feature (1102)..(1102): n is a, c, g, or t
tggggctctagaagggggtagagggggtgctatagggtaaatacgggccctatttcaaagattttaaggggaattaatttcttaggacgatgtgggcattgaaacgtggtggttggcctccacagattttcagagcatttgaccggtagttatacccccgggtcggtgtagcggttgaaaggtggttgggtttaaaacgctccgggaaattgtgcttcgtggttttataagccctaagtggtggggcaccagctctcagtggagtgtgcaagaacgtctctggggaagtggtacattattatacgaaagtggggggcttcaactcggggaggtcacatacctcgcgagtgtggctcaaggtctcagaggagagtctcgccgaggtctcgccgcgtgggtccatgaggaacattaagtgggggaacagttattgtgtacgggagttgtgaaagaaattagatcgcggcgcggatagatccgggtggatacctcgcgatgaggtgttcagaggtcacccattgtggcgtggggcccaaagtgttgatttttgagagtgtgtgatagagggagggagagcgaaactcgtgtggagaccctctcgtgctctgtgggtaagtgtttaaacaaggaggagttcgcgtgttatgagggagatctgtgggagaagctgtggtgcgagaaattagagaggaggagctactaaagagagattagaaatgtggcgcgcgggtgaccaaggggaatataattgttttccacaaagagacggggggagagtctaccttaaatatttcccctgtgagaagcgctgttctgtgagaaaacaagatgtgttctcaggaagataaattataaggagttgaaggaatatatggggggatgtagtggtaaacgatttgttgtttttcaggggcacaaacccagcagggcggggcgatcattaacccgacggggggcgaccgattaatgtggacaaagaaagacgccaggaatcatttataggggcgcgagcaacacaacagttggggatgctttttaataataagaaaggggggggggaggggtatgggaaacaacccccaggtttggtacaaaaccaaancgggggtggtcggttgcataaaaaaacagagagcgctctcctatcttctattaaaagatggagtaaaacacacagggcgcgcgggggaacagaagataatacatgcagagaggtcttctcttttgtggtttgtatgagacccccccccaaaacaaaaatgttgggcaagagcaacctttctttcaccagctagagcgagccagagacaaaattgatagccacgaacttttctcgtacagagaagaaaccccccctatatatttgtagtcattatcaacaccaggaggggcgaacaaaggtctggggagggtgacccaacgcatggtggttggaaggaagagattgtgtcccccggtggcagagaacgaagaagaagaaatatgtcggtggtcggttatcatatttaatttcaattgaacag

SEQ ID NO: 526765 - DNA, 265 bp, Homo sapiens
cattttttgtgaacgtcagaagtgtaaacacgttaaattttatggggaaaacgttttcgtttaagatttagtgagattgtcgtggacacagtgatatctgatcttaatatggtacaagagacgattcgtttaaaaacagaaagaatttgagtgggaggaagagggatatcacacgatttgaggtgggaagacgacgcttcctctgtccacataaatctgctgtgtgtgtgagtcgtcttgatcgttactgagagacgggacattg

SEQ ID NO: 526766 - DNA, 345 bp, Homo sapiens
ccagaggacagcgatggggcagcgactttatgcccggtaccttcaagcgaacacgcgtcggcaaggcatctatggcaaagggatgaaccgtacctcagcagaagaacgacaggagtctcgaaaaagtatcgacaacaatctagtcgaaactcgcaggcaaatagcacatcggtcgagaatcatacattacggagtagtacatatgggatcatcgtcattcccgaagaaacgattgaggacatccgacgggctgtcgatcttgtcgatgtaataagcgattctgtccagctcacgaaaacaacgacaaaattattatggactatgtccgtaccatggggagcaaag

SEQ ID NO: 526767 - DNA, 431 bp, Homo sapiens
cgacctatcgtatcggggtggggttcatgcgcgtgcaagtagctccctcagtcgatctgttgaaagtcagcccccgatccaagggtttgtagagataataaaaggttttaaaatggggaaaaataagtaaacttttgtacatcaaagatcatgaccaatagcgtgaaaagaccacctacagaatgaggaaatgtatttgcaaattatctgataagaggtttttatgcagaatatataaagaggttgtacatctcaacaacaacagaaaattaaaccacccaattcagaaatgggcaaagaaggggcttgagtagccatctctctaatgaaggcccacaagggccatttcccacatgaaaaggtgtccagcatcaccagccaccagggaagccaaatcagagccacaggtgagacgcacctcagaggatgtg

SEQ ID NO: 526768 - DNA, 175 bp, Homo sapiens
  misc_feature (84)..(84): n is a, c, g, or t
  misc_feature (99)..(99): n is a, c, g, or t
  misc_feature (157)..(157): n is a, c, g, or t
gccaaggagcaatagaatcacagggccactgggacttggagaaccatctgattatcgggggggttctttagatttttttaaacntataattggaacacnccttagtattttaaagaatatgctctttgaaaagatgaaaagagtttctcccgggagncggaggctgcagtgagcc

SEQ ID NO: 526769 - DNA, 852 bp, Homo sapiens
tggggtataaaaatttattatacataaagaatataaccactaacaaatgcaaacaggctaggacatggtacggggtggaggacggctagctcttgggaaagtgaaaggttgggttggcgtgggcctcatgccacactgatgggtcagtagacggggggcacatgccaaacaccacagggcatcagatgctgctcggtgtgctcacaagtgtccccggtcttatcggggccttcgaagggagcacacccagaaagcgagcaactgaagcgaaggggcttcctaaggtgccccttccaggctgtgtctctgaagtcacagcaacacggttttaagcagtatgttctaatgggagtgattctcccacaaactatccacgaagctttctaaccatcacaattcagctgaagtacaaacacactgagtttacaggcggggggaacgagagggcagccccaatggggggccccttctaatacgggctggtcctaggcggcagggagagcgcacaggtcttttttaaaccaagcccctcatttcatgtccacagcgaattcactcccgatgcgattattaaatctcgtttctgccacaccatcttgggccttaaacaagcaaattactacttcttatgttgggggcggccacgcgtggcgaggcaacagccatggacgtccttcgcaaagccggcacaggggcatcttcgcgggggaaccggtttcggtggccctgtagcccctgggcgggccccacggttgccccactttctcttccgcggggctcccaggacgcgcgaattttctcttctctgctccccttcgttggcctggagctttcgccggcgggcccgcgaca

SEQ ID NO: 526770 - DNA, 184 bp, Homo sapiens
ttcatcgtatcgagcggatgtccatggtagcgatagtagcaacccgctacccgaaagtacagtagcgattcgctgttgatttttcggtagcgactcgctaccatgactttcatcccggagatagtcgggccagccgcaagccttcgatcaggcggcttgcggcttgtacggatacggcggggct

SEQ ID NO: 526771 - DNA, 176 bp, Homo sapiens
gtcggctatatgccgttaatttgaacagtgacaatgatgtggaagaaggtcaagaacagccactgaggatggctcctcagctgccagaagaggtgccactgtagagtgcaaagcagtctgaagctgaagttgtaactgaaatccagcttgaagaggatcagcctaaagtgaacgga

SEQ ID NO: 526772 - DNA, 128 bp, Homo sapiens
  misc_feature (15)..(15): n is a, c, g, or t
  misc_feature (58)..(58): n is a, c, g, or t
atagtgaactggaangctgaactagtctcaaagtctcatccacagagcggcaacaggnaggtcatttacagtgatctgccgaagaataccctcatcatcacgtttcctttttttactcacctgcctca

SEQ ID NO: 526773 - DNA, 793 bp, Homo sapiens
aatttcttcagcaatcaccagtagaccacaggaatttaataccttgccaccaaaacttaggcaaattaagtccccagctagaaggagctacactcaatacacagaaagacaaatgttaaggtgaccagcaagtgtaaaaagcaggcagagaagggataagtcgtcatgcttgttgccattatggagagggtataaccttaagaagttgctaatcacatttctattgatggcagggaggagcacctgactttatgcatgagctgttcatgtagttaaatgactgttattcattagaaatacagtcactctgtaaatgatttgtaatgaacacttaggcatacgctgcctggtacatctcctgatagccctggcctggaaattctgctgctgactctgttgagaattagtcctgagactttgggcaaacatagttttctcatctttaaagtgagggagtctgacccttgcaggtctaaaattatttgtctctggtcataaacatatctcgaacttcagactcatttttggttcttatttcttctttttgtgttaatcaccaagttctgttggtccttccttctaggaaggaaattgtttttgaatctccctgttctgtctattctcacagctacacatctgctgttacatcatggttggaccattatagtagcctcccaaatggtctccttgtctctattttctcccatccttatttgtcctgggaaatctctcaatctttttgaaataccaatttccctacctcacttttttgaataaaaactttggagataaa

SEQ ID NO: 526774 - DNA, 435 bp, Homo sapiens
gggaaataggtactctcataacagctgacagaagtacatattgaagaggacaatatggcaagtccttcaaaattataaaagcactaactctttgatccacgtcgtttccacattctagagaacttaacccttcacgctatattttcaccacgctataaaatgaccataccgtacacgaagttacttactgcactcatttgtaactagctaaagacttacgacaacaattacatcgctatggaaccccttaaaacaaggtggctctaaacttccttaagacaagatatcccaaaacaacattacaggggacacaacgggacgggattgcatacaacagcatgttaacattaacactaatttgtctcaaagcaatggggaacagcagaagcggtagtcatgttcaccttcaatcctttgccaactcctgcctttaat

SEQ ID NO: 526775 - DNA, 702 bp, Homo sapiens
gggtaaagtctagttattctgactgcttatcattattactgttgattctggtagtgaaaaaaaacttttgaattccattgagatagtaatgaacacagaattgtaacaatagacagatggaagtaatataaaaacactgttgaatttgaatatttcttgcttttttgctttcacagaaacacattattttacatttactttatataagtgaggtattttatggtgttttctaaattctattaagaacattctaaaaagaaaaggtgactgtgacagacagattaaaatccaatccacaggcagtcccctttggcaaaccactctgattaagtggctctattttatttcaagaatatatatctcttgcccctttaggaaatatgtgaatgttttccaaaagcaagtaaagagtgccacatcttaagcactagaaagcctatgagctttatctgggatctttgctttcataggcttgtgaagaaaatctgaacatgcagacaggcagtcactgtcacatattgaagtttaacagtgactagaggaactataaaagcccaaaactctatattcattctgcagtcatacaaagagcagagggtgaataatttaacttccaaaacaattagtccagtcctttacttcaaattcttcaataatcctccttttcctatagcagtcatcagacatgtacataatacctct

SEQ ID NO: 526776 - DNA, 200 bp, Homo sapiens
taagatatgaatggtgaacagaatgacaaatacagagaggaaaatggagatatatgtggaaaagtacagaaggctccaaacagagaggcagaaagaaaaaggaactgaagttccacagggtctgaggtttcttactcttcattcactccctgcagtttattaggtccaaagcaccagcgcttaccagtgtggagagaggt

SEQ ID NO: 526777 - DNA, 385 bp, Homo sapiens
  misc_feature (24)..(25): n is a, c, g, or t
  misc_feature (115)..(115): n is a, c, g, or t
  misc_feature (130)..(130): n is a, c, g, or t
ctactactactaaattcgcggccnntcgacgttctttttaaaaaaaaaaaacttgtgtgaaataatttccgagtagctgggactacaggcatgcaccaccatgcccaatggtggnacagcctgtaatccntagcactctgggagactgaggcaggcagatctcgagtcccagagtttgagactagcctacacaacatggcaaaaccctgtttcaacaaaaaaatacaaaaaatagctggtcatggcggcatgtgcctgtagtcccagctacttgggggctgaagtgggaggatcactaaagctcaggaggtcaaggctgcagtgaactgtgatcgcgccacttgcactccagccttggggcaacaagagtggagaaccttgtctc

SEQ ID NO: 526778 - DNA, 284 bp, Homo sapiens
  misc_feature (47)..(47): n is a, c, g, or t
  misc_feature (80)..(80): n is a, c, g, or t
  misc_feature (92)..(92): n is a, c, g, or t
  misc_feature (98)..(99): n is a, c, g, or t
  misc_feature (105)..(105): n is a, c, g, or t
  misc_feature (107)..(107): n is a, c, g, or t
  misc_feature (181)..(181): n is a, c, g, or t
  misc_feature (195)..(195): n is a, c, g, or t
gcaagagtccatggatgtacgccaagagggggcaggagtggcgctgnatccacattcacttcagaagttgaagattccanagaggagaatangtggcnngagggnanacaaggaagagggtttggccctgcttcaaggcccactgcgtgcgtaggtgtgttgagcaagatgacgacagatnggaggagagctcanagccagggccctagcgcaccatgtattcgttgcgcttattgagccgaacttggcagaccgagatgcctccgaggaggaggtcaaggcct

SEQ ID NO: 526779 - DNA, 294 bp, Homo sapiens
tcgtgagtcgccgtgatcgcatatgatcaggcgcgcgtgcatgccgtgtgggcagtggccgatcgtttaacagcgtgagcctgcgcaccgccaccttcatcgtggcgtgcgagcgcatctgcgcgcgcgcgatctgcgtgggctctacccctgaaaccccctgctcaatccgcccgggggcgcgctactgcagcggccccttgagcagcggcagatccggcagcggcagcacgggaacgcccttcctccagcaaggccgcggactcgtccggcgtcgcgaacaccgcgaatgct

SEQ ID NO: 526780 - DNA, 466 bp, Homo sapiens
aaggaaatcatcaaatctgacggaggtaagggggagcagaacaaacctccagtaatacatgagctatcagcatctcccacacaagatcactcctacaacaacataggaggatcctccccttcttactgctcacggacttatctaggcttcccagtgcccccaggacagcgtgggctatgtttacggcgtcatccttgctgtgtgtgtacctcatgcattgtggctccagcttatactcagtgatctgtagagagtgtccaccttgtgtcactgtccactcttccagggtgggccccaaccctcccatctctgcaccccacaaacaacatggtcacccacgtatttgtgtgtgtcctcactgaaactgagcgagcagtcttcagagacagccagtgttccgaaggagaggacgaaattatacccatttcagaaacattggcatacacctgtgtctgcccattccttt

SEQ ID NO: 526781 - DNA, 361 bp, Homo sapiens
tttttttttggtagagatggggtctcactatattgctcaagctggtctaggactcctggcctcaagtgatcctcccaccttggcctcccaaagtgctaggattacaggcgtgaaccaccaggcctggctcacagctgattttttttttttttttttttctgagacagagtctcgctctgtcacccaggctggagtgcagtggtaccatcttggctcgctgcaacctccacctcccaagctcaagcaattctcatgcctcagccacctcccaagctcagcaattctcatgcctcagctgagattacaggcatgtgcaaccatacctggctaatttttatatttttcataaagatggggtttc

SEQ ID NO: 526782 - DNA, 168 bp, Homo sapiens
tcgcgaacgtgttactctttcctccagacctatctttacagaaaattgcagctgtcctacaaaacagcaaatagcaactataacaaaaaggcaccccattaatttttttttttttttttttttttttttttttttttttttttttttttttttttttttttttacctt

SEQ ID NO: 526783 - DNA, 1190 bp, Homo sapiens
  misc_feature (443)..(443): n is a, c, g, or t
agcggaataaggctacgggacgagacaacactagtgctgtgcgtgtatgagaagaagccaaacaggttgaatcacagggtgactgacgactcagtgagaattgaacagagagtggtatcaagatcgcatgaagactacatgcttcagtagaggccggcaatccaaaatttcagggctagcgttccggtggatcacagtaaccaaggaagaaagctcaacagggatgagagagaatggactgactgtccaatgctggctggaggctgaaagcataagtacagaacggatgaaagcccctggtatgccgactgggcgtggaagaaagaacgggagaaggcagcgccactagcgtgccgaacgcagaaccctagtcactgtgctccaagcctgtgactgagaccgctggcaaaaagaagggagaaacgtcacttaccagagagagnaaagaagggggaggggtcgatgctggccaacgagaggcaggctaggcccacaccgagggctgctctgcaatcgcatcgaaggagcgagaatggccgtgctcaggccatggaaggatctagacaaagggttgcccacctaacacatgcgtgttcgcgaactagaaattaaagcatacagggcctgctacccttcgcgatagggtgcgtagtaaagggactcgcgcgcaccagtcgcggaatgcgcacgggacggccctaatagagcaaaggtcctgtacttgtgggcctgggcctgtcgttgggttcagtggcatgtttgtggcgggctcccaacccctaacaccctagggttggttcctaggtcaagacggggagaatagcatgtggctttggcgccaaatgtggggcgaaacacgatttggtcacgaatcgccccttaccaagaacaaggggaacagaatgctgggggccagaacagttaaggtccaggcccctttacgacctgggaaggggaaaggaaaaccaatttagggaaaaaggcaatcggtacaggaagttgggacactatccggggacatccctttacccgcgggcaggaggcttggccccctaatgtcaagggaaccggaaggggttcacaactgtgaacacgacggacgtaaaacccatagggaagagggacttcggcagcccaacgcaaaccatgtgggcgcgtggagacaccttcgtgatacacaaggaatggtg

SEQ ID NO: 526784 - DNA, 437 bp, Homo sapiens
cgatctccgaggtgtctgcaaccaaggaaggcatgcgactgcagcactataacacatcagctgcagttgtaagccaggcactgtgcacagtagcggtttgcagcaagttgtagaaatgggccatttccactcaagagcatcaaccaccattgcatttatgcctggctgagctggggaggttgtcttcatgcaggcatcttctaaatggtttcaggtgtcattatccctccactggtagaggccatggggaatgtgaccatagcataaatagaagctccagttcccattcctttggtagatattttcatgaagagcaaaatatggtgctggagtcctcttgagatgtcatggaactagagccataggatccctagagtaaagagttgagtagaataaggatttatcagttattggaagaatacagaacaccgtcgaag

SEQ ID NO: 526785 - DNA, 97 bp, Homo sapiens
acggccgtgtattactgtgcgagagatgggtattacgatattttgactggttattataaaaccggagatgcttttgatatctggggccaagggacaa

SEQ ID NO: 526786 - DNA, 982 bp, Homo sapiens
tggaaatggagtctcgctctgtcacccaggctaaagcacaggggtgtgatctcactgacaacctccgcctctgtgggtttcaagcgattcctcccaccttcagcctcacaagttagctgtgggaccacgaggcactgtgccaccacaccgtggctaatttttggtattttaaatacagacggggttttcaccagtgtggcgccaggcatagtctcaaactctcctgtgaaccttcaggttgactccggccaaccttctgtgccctcccaaaaggtgcgtgggaatttacaaagtgtggtagaccccacctttgccaagcgcctaatagggcgccccctgtgtataagtataaccattccattcggttcttttaccacccccagcgtgcaccattggctaattacacattcaccttgaaaacctcgaggggctcttaagtgcctctctgcgaaactccaaagaaacccgtgggttctcaaaaattcccgcgggttctcacgaaggttatatatcacccgtgtgttgtgtgccacatattgtgcgcgcccaatgtgtctccacttttaaaactttctccttccggagaagcccccctttttgcgccgctcccatttctaactcacacacagtggaagggatagtggcgtaaaattacaagacacccccacacctgtgtgacagccccgggggtgtcgccaaattgtgcccccgcgagaatttctgtggaataaatctcccccgaaggtcccatcttccgagggaaagcccccccaagaggcgtaatacagggcaagggggggctcccccctttttgaggggccccaaacagaaagtctctgcggaaaacaacccaaggcctgtggggcgccaaaccctatatcgcgaaaagaaaccccgtgtggagtactccatcccccgagaacatgacaacacacaacacaccaacgcaagaaccgacgcaaacacgcgacacagaatacga

SEQ ID NO: 526787 - DNA, 646 bp, Homo sapiens
cgggagcagctacccaggcttccctggagttcggccccacggatcatgcggctggtggccgaatgcagccgctccaggcccgggcaggcgagctgtggctgccgcatgggacagtggccactcctgtgttcatgccagtgggcacgcaggccaccatgaagggcatcacgaccgaacagctggacgctctgggttgccgcatctctgtatctacactggtctagcgtggggctctgcgcgcggagcgcagcggagcgtggagcatgagcgtctcatgcgacactctccaagtcaatcgaccagctgtattgagcgcccccaatgaccaggccttgtactgggcgtgaaagagcagcagggactaaagctggccagatctgtctcccaagaagggcccccaggacgcggtcacccctaacctgacactttcttccacaacccaggacccgagctgatccagaaagccaacggtctccacggcttcatgaattggctcataatctgctaacggtgagctgaggagagagccgacgttctagggcccttctctggagtgaagggtcccatctccacccctgacagctttgcggtggggtttcccttaggacagcggggtttccagatggtgtcgctggtgtctctgtcg

SEQ ID NO: 526788 - DNA, 584 bp, Homo sapiens
tctgagcaaggcacatgcttgttcacactgtatgaggctgtatgcaaaatccagaggggggctcctatggagggggcaacccaaagcctgtctgtaacctggaacccctacacctgttctgccgattacatgccatcttatataaattcctttaattcttcaccttcttctgataagctaaatgcactccttctgctctgcagaagaaaattcgcattaaaacgaatgcataccacccaacagcactggccatatgccacaagttcactctatgacaaaacaccgatgttccccaaggaaaatttactgagatctgcaagccatggcaaccaaccgagagacagaaccaggaaggcaaggacagcgatcatgatgctagagccttgtttgcacacacagtataaacagacagtagtctacaagctgactagggcctatgcatagccagatcaaccccacagactgtgagccaggccttaagctgcctatttgtgctgaagcgggctgcagaacgacccgtgttatccaccctgagcaccatcaacactaagcacaaatgacaacaccatgtcacctgtaccctg

SEQ ID NO: 526789 - DNA, 522 bp, Homo sapiens
tggatatctttgaagttatgtgacttatggtccagccaatagtctattcatggggactgggaggtacatgaaaagaatgtaattttcaatgtgggtatggtgttctgtaaacaacaattaggtcatgttgactggtgtggttcatatcttctatacagtgtcccttgctatccacaggggactggttccaggacaccttgtggagaccaaattttttgatgcccaagttgtatataaaatggtgtagagttgcattattacctatgcacaaccttctgtatattttaaaccatctctagatttttataatacttaatacaatgtaaatgctatgttaataattttaatactgtattttaaaaaattgttattttttactgtccaattgtgtttttctgaattattggtgcattgctattggttgaaatctgcctatattgaagaggctgattacatatactacctacattcttgcctacaaggtgcctattcaattactgaggattataattgtggattcca

SEQ ID NO: 526790 - DNA, 281 bp, Homo sapiens
aaggatccccggtgggagacgggggtctcaggcagaagccagatgggcagccagggctggacggggcctcctcctcgagggggcggagacagccacggggtctcccgagggtcccacagggctggtcctcatggcagcccaagccagccggagcacgggagccccaattcccaaccaggtctccctcagaccccccagaaaggggcctcgaaagggccgccgctggcgccctgggggaaagggctggccggtggcagggcctggggccatgccggggttgg

SEQ ID NO: 526791 - DNA, 253 bp, Homo sapiens
gcaggcagtatgtcatattatggaaatataaaagcatgcctaactacaacaaatcccagagctactgtcttctgcagggccagaaatcaccatgctatgaggggaatacatagccacaattcagacagatgacgagcctatctgaagcaaacagctcagaaaaatagcagggaaaggaggtggggagaggcagaagcagtggcaatatttatctccagtgaacaaaactgagctttttaaagatggcagtcag

SEQ ID NO: 526792 - DNA, 125 bp, Homo sapiens
cagacttctccaaagccacatgtaaagacttggttatgtttatctactgttgggtccagaaggaattctttccatccctgtgaggcaatgggggaatgataggacaggaagagaagttctcagac

SEQ ID NO: 526793 - DNA, 356 bp, Homo sapiens
tagatatggggcagtagtgtgattgcaggtggcagtagcattcaggcgtagtagaagtagaggttcaggagggtgatggtggctatgatggtggggatgatgaggctattgttttttgtgaattcttcgataatggcccatttgggcaaaaagccggttagcgggggcaggcctcctagggagaggagggtggatggcaattcaagggtgttagtcatgttcagcttgtttccaggtgcgcagcatagtcagtagggtcgtgcgtgctcggagtttcaagttgcagtcagtcaggcaatgcggtcagtagttcaggcataatcataaatcagttcaacattcaagcaatggttcat

SEQ ID NO: 526794 - DNA, 858 bp, Homo sapiens
aatgagaaggaaccggaaaaacaattctggtaatataagaaaacaagcttctttaacacgcagaaaagatcacactagctcaccagcaatggatccaaacaaagaatacatctctgaattgccagaaaaagaattaagaaagtcaattattaagctactcaagaaggcaccagagaaaggtaaatatcaacttaaagaaatgttttgttttttgtttttttgagatggagtctcgctctattgcccaggctggagtgcagtggcgcgatctgggctcactgcaagctcggcctcctaggttcatgccattctcttgcctcagcctcccgagtagctgggactacaggtgcccaccaccacacctggctaattttttgtattttttagtagagacagggtttcaccctgttagccaggatggtctctatcccctgacctcgtgatccactggcctcgacctcccaaagtgctgggattacaggcatgagccaccacgtttggcctaaagaaatgttttaaatgatacagtgtatgaatgaaaaaatctccagaagaatagatggcataaatttaaaacaatcacaacttctggaaatgaaagacacatttagagaaatgcaaaatacacgggaaaaactcaacaataaaatggaacaagtagagagaacttcagaacttgaagacaaggcttttgaattaacccaatcaaacagagattaagaaaaaataattttaaaatataaacaaaccctccaagaagttggggattgtgttaaatgaacaaacttaaggataaatggggttcttgaggagggaagagaaagctaaaccgtttgggaaagcatattgggagggaaa

SEQ ID NO: 526795 - DNA, 393 bp, Homo sapiens
  misc_feature (102)..(102): n is a, c, g, or t
ctgcccaaaaagtgggggtggaggaccgagggttcagctccccacgccccggtcccccagagcatttgccccaggtacacctccccctgggccccgcacgantgggggagccagactgtccagggaaacagcctctcttttttttacacactcagccccaaagccccccagctcccaccccgggtcccagctccccttttttgtaagtatgtgaaaaggaaaaaatgccaacgttggagtttgggctggagctcccccccccagctgcgacttttaactatgtaataatggacaaaggaagctgttggggttttaaaactctggggggctgggccatttttggacctttgcaattagaaaaattaaagatttatttagctattttaagcccga

SEQ ID NO: 526796 - DNA, 130 bp, Homo sapiens
ccctccctacccctccccagtttttggggtcaggaagaaaccttattttagggtgtgttttggttttgtataggagccccaggcagggctaggaacagtttttaaattaaaggccacaggtcatgttcca

SEQ ID NO: 526797 - DNA, 110 bp, Homo sapiens
tgcacactcacatgtgtgagcatcatgatgaacgtaattatgtatgtagaagctcagataacggtgaggatcaatgtgaagagagacactcttggaagaagagaccattt

SEQ ID NO: 526798 - DNA, 873 bp, Homo sapiens
  misc_feature (67)..(67): n is a, c, g, or t
  misc_feature (147)..(147): n is a, c, g, or t
ctgcgagcgcgcgcggacgtgcacaggcggggagccggtatgggcccgctgaccctgggcgccggcngacgagcaccagcctagagccaggactgaagcttcaagatggctgaccaggaccctgcgggcatcagccccctccagcanatggtggcctcacggcaccggggtgcgtgtggttaccttctctctttcattgacgccccgttgtgtactgtggttgaagggttcgcctgcaagttctcagcggcccttcccatggccagcgagcttggattgcccttccttccaagaacgtgtggaggcctctccctataccaaaaatggaagtgcctccgtgttattgcacgtggtgtccgtggagcctcttgtactcttgttgccccaaagtggtgccccgttgtgttgccaaccgttggttttcaaggaccccttacgcgcgtttcacgttggcaccaagtgggtatgcccttctgttgaacgcctcggggagggggcaccgaggggcaacccaagtgacccctcctggaggcggcttcccgcgccacccttggttgatgactgtgttgccaagttaagccgggccattctatgttcgaccgtgccttattgaacccaaagtgtgagagggccttcccgtgtggttgggtccgacgcccttggacccttgttgtaccttctaccggcacccctttgtgttgggctggggcggcggcttgggcccggcctttgtggacacctggtggactgtgtggactccaggccccccgttgggagggcttagtgcgtgggacaaatgcttgcaggggctccacgcagatgtggtccgtacccgggacgtctggggttgccttggtggttcggaacttgcgg

SEQ ID NO: 526799 - DNA, 393 bp, Homo sapiens
tgacaataaaatctctggctgctttattgagtgccgctctctcatcctaaggtttttctgctcgcccattcctccgaaccccggggacagagtgggtaatggggagggaggctgaggcagcctggcaggggatacacgcattgacttgggattagttccaaggggccacatggtgtagtttcagaaggacgccagggagaactttaccatagggacaagagagagggagaaaacggtcctagaaaggggttgggcaaagtccagggcttagcagtgtagttttctgtctctagtggcccgaaactgatgaatgatcaccctggcagcggcaggccgggcgctgagagtctctctcatgctttacctgacccctccttagaagtactgtattgg

SEQ ID NO: 526800 - DNA, 686 bp, Homo sapiens
  misc_feature (123)..(123): n is a, c, g, or t
caaaggtccccggcttttcctttaaaggggggggatcagggggagccgcgccccgcccttaattattttttttttgagacagtctggctttggggcaggggggagggagggggagaatttagntcacgcctcccccccccccggggttcaagggttttcctacgcctccaaagtaggggggattcagggtcccccccacgccccagccaatttttggttttttagaggagacgggatttttccatgttggccagggtgatttcaaactcctaccctcaggggtgatccgcctgcctgggcatcccaaaggggtgggattcaaggggggagcccctgggccgggcccctactttattttttaaagagaaaagaaatccaaaaaaaaagaaattgggggcgggtaggggccccttttatagggaactattatatgaattccaccttttattttttgggttttaaattttccccaaaaatttagggttctaaaaagggctaaaatggttttgcagatttatttgaaagggaaaccccgggattttcctggggacccccttaaatttatagaaaaatttgaaaagactggggatttccccctttttggttttcccggggggggacaggggaaatcttttcctttattgatttttttaatggggggaaacccttttttttttatcctttta

SEQ ID NO: 526801 - DNA, 1026 bp, Homo sapiens
  misc_feature (441)..(441): n is a, c, g, or t
  misc_feature (513)..(513): n is a, c, g, or t
agcgggggtacgctgccagaagtaaagcagagagaaaggacgcaggcccgtttgggaagtggtgtgatgacgatcgcccaggtcgaaatggtgagacccaagccatggaggccgtttgccctgggcatctctagtctcgcatcccagtcgagcgcaggaaacatgaggagtcctacgcgtaaccaagaagacggttcctatatgctaaagcaacctccccaagtctctgtgacgtcgttcatgcagtactctgaggaatccagattgcgttgacagctctcatatggtaacatgtgcagtgctggcttgcatcgttcgtttaagcctagcatgaataaccctggtggccctacctgtggagcatgtcgtaccatttctattgagagaccatgcggacgtaacctgcgtgaatggaacggacacgtgaatatctatcttaantatgttttcattagctatgtagttggtaaacatcatgtcatcgggaaatcatctcttcgtcgagtgtacccnaataagcaactagcccctctatatccgaaattgaatgggtgtatacatgacttgcaattactgtaccctgtgtatatatttcagaacgaggtaaaagatggaaaaccatataggcaggaattcgtactgggatcttacattctgtatgagtgagtacaccgccagaaagatttgcattctttttcccttcactagtagtgaaactattgattgttcgcgcccgcttccttggttggttattcattacctcttcgtgcttttctaggcccgtttcttttgtgccccttatcccgttacattcgtttttcgctccgagttaaatgcttaggcaaagggacaccggcccaagtatgatagggatgtgggcgtttgaacgtagcttgtaaaccagagggcaaccattggtggggggatacaaccgttggccttacgttccattccaaccggaacggtgcattctaaccaagacttcgtaggaagaactttcccaggtaaataccggtggtacttccc

SEQ ID NO: 526802 - DNA, 765 bp, Homo sapiens
taaaaaatgtttacagtaatggggtctcactacgtttcccagcctggtcttgaacccctggcctcaagcaatcctctttcctcagcctcccaaagtgatgggattacaggcataagccactgcgcccagctccccgttaattgtatgctgaacaaaccttccattccaggaacaaatcccacttggtcgtggcttataatccttttcatatgctgaatttgatttgctagtattttgttgaggatttttgcatcaatattcatcggagataatggtctgaagttttctttttttgtggtgtctttgtctggctttggaatcagggtaaagctggcctcatggaatgagcttggaaatgttccctcctcttcatttttttggaagagtttcaggaggattggcgataattcttctttaaatgtttggtagcattctccgatgaagccatctggtcctgggcttttctgtgttgggaggtttttgattactgattcaatctctctcattattggtctgatcagactttccatttcttcatgattcaatcttggtaggttgtgtgtttcctctagaaattggtccatttcttctaggttattaaatttgtaggcatacaattcttcataatattctcttataatcctttttatctctgtcgtattggtaagtaatgttccctctttcatttctgattgtagttattgaatggtctttttttttcttaatctagctaaggatttgtcaatttgggttgatcttttcaaa

SEQ ID NO: 526803 - DNA, 326 bp, Homo sapiens
ggttttagctctcttcggtcagattccggtctctcccactccccctaaataaaatggacctgggttagaatacccttttctggtcagctcacagcaatttctccagtcatttctgcttgaaataacggtgtagggacattattcaagcaaagctttttttccttcacagttaatatgtgactcaataatggctggagtgtggataaacatgtttgggagattcaatcattggctaatttagtttttataatgtagggggggtttgaagtgagtactgagccatttttctccatttcacaattctttcccccaagagcgacggacag

SEQ ID NO: 526804 - DNA, 687 bp, Homo sapiens
aggaaacaggattatctctctaacgggtactatacactgagtcatactcactttcactgtcatgaccaattcaatttaccttcgtgcaaatcgggaaaggcttctcttcgtcaatgaagattttaattatgatattactgcacatcatgaaagccctgctcaaagaagaggtcaaatgttacagctttaccttcataaagagaagcccacactctcagcttttcactacacccccaccacatgccagggcacgtgtgctgtaagcacgtacatttaattggcccatgcctaggaaaggtgactgtgtcaggtttcaaagtgggtgagagacagggattaggaacctaagagtggcagagaagaagtgacaagagaagccacctttggggacatccaggaggcagatgcaatggtgcagcagacacatgtatgtgtaccataaagtggtgtgtgtatgtgcatagagggtgggctggtggaattcatgaaggaagagttctcttctgcagctccaggattcaactgtgaagcctgaaatctctacaccagccactctcatgttagctcatgtctaggatgtgaatggcactccctttgatgtggtgtcttgtcttccggagggcacaatataagaatctgacatggactcctggagtgtcacactcctgctcactttgttaattcctc

SEQ ID NO: 526805 - DNA, 129 bp, Homo sapiens
catctgcatttcaagaggaatcctaacccagattcttagattcccagtatgtctccagggtttccgtattacgctgcatgcctgcggaggggacttgcagcggggaacacacaggtctttggcgctcag

SEQ ID NO: 526806 - DNA, 1116 bp, Homo sapiens
cagagccacgagggaggccatggatattatggtggttatggaggttctcgatgactatgcgtggctataataattacggctatgcggacatgatggctttgactgacagactgacagcatggaagaggtactggcgacggacactggctactggttgcgagcatggtgactgcacagttcagcgcttcttcatggctgcgtcacttctcgctacactatgcacgcagcggcttcgccctctcttcgctgcaaccctgcaacacatgacacttgcgtcacatattctttctcaccgactaacatccagataccgagcattcactacttgacctacttcgcgcagcctgactgagcacagagccaccacgcgcacgacacgccacgactgctacgcacgcttctgcttgaccaccagtgtatccgcactgcccacgctacgccttgcacaatgctcctacacagcactcgacaacactacacctagctgccacaaccactcagccaataactacttcgacagcctcctataccttgcacactctctagcatcccatgggaaggggccaggctacctgcgcccacttggcgcacgcggattacctagcgacacttgcgcgcacgggacataacggcgtatcacaccgacctggcacacttgagcactaaatccacgcaggcacgcgacctacctgcgaaatccaagcatacttcggaacaggaaaataggcgcgccaacttgagcgccccgcaccaccccactctactaatcccaaggcctcggcgaaccgacgcatctacataggcagccataactttctctgtttgcacacttcggcattatcctagggcgcactggcgattctcatttgtcgagccccagcttgcggcctaggcctcgcagaacgtcgccaccacttgtctcacgcgactttcaccctcaactgtcgacggccccaaccgacccccggctccactcggtcacgcttgccgccccgcctggcgccaattgtgccgcgcttcgcgccaacttgcttcaccctggcgacaccaactcccaacacataaaccacagcgccatccccaatcagcccacaagattacattgcacacccacac

SEQ ID NO: 526807 - DNA, 197 bp, Homo sapiens
cgacggggttctgaggtcaggggtggtacgagcaggggctctgcctctggaggtgcgtactcagcccagagcccgctgagaatcaaggaactcgctctcccagggcggtatgtagcggtacaagtggggaatgagctggtcttcttcagggctcattcctgaacgaaagtgtgtgatacctacatcggtctgttggg

SEQ ID NO: 526808 - DNA, 1098 bp, Homo sapiens
ggctggatggactggagccctaacaggttgaaccccaattgaccttcttcatactgcatgatatcaacgagtgatggtgtcctgtgatgagcaggagctggagggattcttcagcaatggagctggagaaagtgtacgaggcctaatagaatgaggaggatcgacatgtcgggtagatggacggaggagctgagctgcgcatgtcgggagcatgtgatgaagaatgtggactccaatcaggaccgcctcgtgaaccatggaggagttccgtcgctatcctagcgtcagtaggaatggagtttgtgggacagccgcggagagtggctgggagactagtggtaggatgcgaaccctggctactgcacgtagggatagagctagatcgcagctgttggatagtagcgacgcatgcgatggcaccggagggacgtggcagacgtctagtatatgccgagggggcccagcgacactcggtccatggaatatcctaaggcctctacgggtgggtccccgggatctcctggcagggcccgtaagacgaagagctaggatactggagctggtgccgtcacaagtgtgcagtcaagcggataggcatgcatgcaaggcaggcagacatgcaatgggcacccacggggcccaggggtgcactcacaccgtgaagggggcaggctcatcgttgccacgcgccagaccgtcgagacacgagtggttcaacttgggtcactcaagtgtccaagcccgagagaagaccatgaaaggggaatgggtgcgactcctttgggagaaacacttggagagacggttcgcatcggagcgggggtcgcctggatcggatgagagaggtggctcccacgtgcactcttgtggtcatgtgccctcccgggggaaggccgcctggtcgcgttgcacgagagttcactttggcttggcttccctgaggggggagcctgggcttcggcctggctgggtagtgcccctggtcgggtagttgcgcccaaggttgtccccgttgggggggttccccggggtgggtcgagaaggcttggaggcgctttgccctggggggtgacgcaggtggggccaccttgggccctg

SEQ ID NO: 526809 - DNA, 608 bp, Homo sapiens
cagtcaaaaaaaaaaaaaaaaattttaaaaaaaaaaaaaaaaaaaaaaaaaaaaaaaaaaaaaaaaaaaaaaaaaaaaaaaaaaccttgtgggccgcttgggcccggtcgtttttggattggggcaggtttttgcttgcggccgaatttggggttccttgggccatttggccttttggggggtcgttttccatttcatgggccgtggttttccacggtcgggctggggaaacccttggggttccccattttattggctttgcggcaattccccttttcgccggttggggtattaccgaaggggccggcccggatggcctttcccaacggtggcccaccttgatgggcgatgggaatttgtgggcgttaatttttggttaaatttcgggttaatttttggttaattcagttctttttttacccattgggccgaattgggcaaatccctttttaattcggtttggcccgggttgggtttgagggttgtcccggttggcaccaggagcccctttttaaggaccggggcttccaacgtcaagggcggtttttggggttgaggcgcccgaagggtttttcggcccttaggggggcccccgtttttggttggcg

SEQ ID NO: 526810 - DNA, 449 bp, Homo sapiens
  misc_feature (125)..(125): n is a, c, g, or t
cagccccgagagcgcttcccagaaaccctggaccaagaaagcccagcttctgaggggggttgcaagccactggggcccggcctggattcactgcacaagaacagtgtcagccaaatctcggtgcntcagcgggggcaaggccaagtgctcacagttctgcactacaggcatggatggcggcatgagcatctgggacgtgaagagcctggagtcagccttgaaggacctgaaaatcaaatgagctgtgcagactagactgctgccctcatcccagctgctgggagggagggaaagggggtcggggaggctaagggctgctttgctaaatgtttctaggatgcagtacactgctacaaaggaagaggcaggaggggaactgcctatttaacaaaatgtgccttttaaagaaatactctttattgcaaaccaaaaacaaggccaaaaaaaaa

SEQ ID NO: 526811 - DNA, 385 bp, Homo sapiens
tgtgtggtagcatcaatacggataagtggaatctatatagtcagcaacaattatgggttgatgaggtgcattcagatgctgaatttgatgccctggtttctgaactcttagccattaatcagatgcgtaactttttgaatgacgagaagcctgggccataaacaggaagactccaatatcatggtgagattatttggtaataatttgcttgtgctttgtcaaaactatctatggccatttaatccagtaactcatcacaggaggacagtgaatacctaaatatttcaaggactattggacacagaatttgaattaaaattaatatttgttgatatttgtcatcatgacctcttagaataggaacagtgggagctacataataaat

SEQ ID NO: 526812 - DNA, 405 bp, Homo sapiens
cacgagggccccgaagggctcggccagcatgacggcggcggcgatcgtcgcgcgatcgccctgtccgccggaaaggggggccatgatccgggcccagctcattcgtccatccttcatctgccccgcgtctggacccaggggacctgcccctgcattgatctttctcaggtcctgggccagttcacggcctcgactgtggagggaatgcgccggtgaggaaagggctgcgtcgcggcaaggaaccccgggcctggcagcgcatgctgtccggccgccgcctggacctgctcgacccatcccccatggacatcgagatcgaggacatcgcccacggcctggcgcgcgtggcgcgctggaacggccagacggtgggcgagcacgccttctcggtcgcccagcactcgg

SEQ ID NO: 526813 - DNA, 540 bp, Homo sapiens
  misc_feature (45)..(45): n is a, c, g, or t
  misc_feature (124)..(124): n is a, c, g, or t
  misc_feature (149)..(149): n is a, c, g, or t
  misc_feature (163)..(163): n is a, c, g, or t
  misc_feature (165)..(166): n is a, c, g, or t
  misc_feature (168)..(169): n is a, c, g, or t
  misc_feature (172)..(172): n is a, c, g, or t
  misc_feature (174)..(174): n is a, c, g, or t
  misc_feature (187)..(187): n is a, c, g, or t
  misc_feature (214)..(214): n is a, c, g, or t
  misc_feature (220)..(220): n is a, c, g, or t
  misc_feature (224)..(224): n is a, c, g, or t
  misc_feature (233)..(233): n is a, c, g, or t
  misc_feature (247)..(247): n is a, c, g, or t
  misc_feature (266)..(266): n is a, c, g, or t
  misc_feature (295)..(295): n is a, c, g, or t
  misc_feature (399)..(399): n is a, c, g, or t
  misc_feature (418)..(418): n is a, c, g, or t
  misc_feature (535)..(535): n is a, c, g, or t
tagccccttcctctgtgctgtgctgacagggagggagccagtgantggacaatctatgaacccaagtttgtggaacgtggggcttcagctgagggtggggtagtgtgatttcagcagtgtatanacaatcccaagaaaaaaaaaaaagnattgctctgttgtnannannagnanagtgtcgggacantgaccggaagccaaacctgtgcctggnggccanaganaagacacanggatatccgtgaancttgctgctgtgccctcancgaggccagcgccccacctgctggaacancaagccggagcagttctgtctgggccacagctgctcagcctgtggactcaggtgttatcctgaagaagttacaacaaattctcaaagaataaacaatgggcttnaaaaaaaaaaaaagggggnttaacagaaactcacagtagctgtggctcaccatgtgccaggcactgtgccaagcacttcacatttagtgctcattacaaccctatgaggtaggccgtaccactatccccactttanagatg

SEQ ID NO: 526814 - DNA, 280 bp, Homo sapiens
atacgactcgagctcggtacctacattattagcgtgtctctcaagcctacttgcataaatacacaattatatgtatttaatgaattcactcttaaacagctgtagaaaatgtgctttactaataggggggcatccagtcagataaagcagtcataacgcgttgcgcggcgcgcgtgtgtgttcagatatgtcaaagccactttcgtagtctatttggtgtcaactggagttttttacaactcaggtgagtttaagctttattgggaaggagggatgagca

SEQ ID NO: 526815 - DNA, 985 bp, Homo sapiens
  misc_feature (135)..(135): n is a, c, g, or t
  misc_feature (173)..(173): n is a, c, g, or t
  misc_feature (226)..(226): n is a, c, g, or t
  misc_feature (288)..(288): n is a, c, g, or t
  misc_feature (312)..(312): n is a, c, g, or t
  misc_feature (331)..(332): n is a, c, g, or t
  misc_feature (337)..(337): n is a, c, g, or t
  misc_feature (350)..(350): n is a, c, g, or t
  misc_feature (407)..(407): n is a, c, g, or t
  misc_feature (447)..(447): n is a, c, g, or t
  misc_feature (449)..(449): n is a, c, g, or t
  misc_feature (453)..(453): n is a, c, g, or t
aaataggctaggtacgaggctggtgtaatcggcaccgaggctaggccggatgccgagatgtcccgcagctcggggccggtcatgcttcgtggtccgtggctgccagctttgtgctctttttcctgctgctgctcncgggcgcgctgagccccgcggcgcctccaggccgtggnagggaaccgacgagccgggctcggctgggcctggccgggcttccagcgcctgnaggagcagctcagggcggcgggtgccctctccaagcggtactggacgctcttcagctgccanggtgtggcccgatgacctgtgacngaggacgaggaggcagccnncgggncccctgggcttgncgccttcctctgttgggccagcggtacctggacctcctgaccacgtggtactgcagnttcaaagactgctgccctagaggggattgcagaatctccnancaantttaagcagctgatgagccagatccgggagatgcagaagctctgacaccagagcctgttcatcttcgatgaagcggagaagctgcacccaggctgcttggaggtccttgtgccacacgttagaacgccgggcccctgagtggccacaagggctgagtctccatggactatcttactgtatctcaggcaccttacaggacatggagaaggccctggagtccatgcccctaggatggggtgagggagtatcacgtcgtgaggggttacaagaagaccctggagtcctgccattgcagccccatgacaaggtaagtctcaggggggtgatataatcaatgaggttgagtcctaagagttgcctcaacggttggaatggtcccggggaatgaaatttacgactggaaaagcatggagtccccaagctacaaggtgaaagatagtgggagaaccatagacgacatgtgctctggccaaaaccccgacttgtaacagtaaaaaccttgcatggactacttcatacccctatctgactt

SEQ ID NO: 526816 - DNA, 1286 bp, Homo sapiens
  misc_feature (135)..(135): n is a, c, g, or t
  misc_feature (173)..(173): n is a, c, g, or t
  misc_feature (226)..(226): n is a, c, g, or t
  misc_feature (288)..(288): n is a, c, g, or t
  misc_feature (312)..(312): n is a, c, g, or t
  misc_feature (331)..(332): n is a, c, g, or t
  misc_feature (337)..(337): n is a, c, g, or t
  misc_feature (350)..(350): n is a, c, g, or t
  misc_feature (407)..(407): n is a, c, g, or t
  misc_feature (447)..(447): n is a, c, g, or t
  misc_feature (449)..(449): n is a, c, g, or t
  misc_feature (453)..(453): n is a, c, g, or t
aaataggctaggtacgaggctggtgtaatcggcaccgaggctaggccggatgccgagatgtcccgcagctcggggccggtcatgcttcgtggtccgtggctgccagctttgtgctctttttcctgctgctgctcncgggcgcgctgagccccgcggcgcctccaggccgtggnagggaaccgacgagccgggctcggctgggcctggccgggcttccagcgcctgnaggagcagctcagggcggcgggtgccctctccaagcggtactggacgctcttcagctgccanggtgtggcccgatgacctgtgacngaggacgaggaggcagccnncgggncccctgggcttgncgccttcctctgttgggccagcggtacctggacctcctgaccacgtggtactgcagnttcaaagactgctgccctagaggggattgcagaatctccnancaantttaacaggcttagagtgggacctgaatgtgcggctgaaattggcccagaatttgtgtgttccaggcagcttggtcctaagaaacagtgaggggctacttagagacgccccatgccaagaaaaggcccttgctctgtcgtccacggattggtctggcacaggcaaagaacttcgtgggccacggatgctggtggaagaaccttgtattcggggaacggggctgatgagttgaccgtggtgtccagggatgtcaatcgccacgttccactttcctcaccccaaatatgtggaaccttgtacaaggaagcagctgatgagccagatccgggagatgcagaagctctgacaccagagcctgttcatcttcgatgaagcggagaagctgcacccaggctgcttggaggtccttgtgccacacgttagaacgccgggcccctgagtggccacaagggctgagtctccatggactatcttactgtatctcaggcaccttacaggacatggagaaggccctggagtccatgcccctaggatggggtgagggagtatcacgtcgtgaggggttacaagaagaccctggagtcctgccattgcagccccatgacaaggtaagtctcaggggggtgatataatcaatgaggttgagtcctaagagttgcctcaacggttggaatggtcccggggaatgaaatttacgactggaaaagcatggagtccccaagctacaaggtgaaagatagtgggagaaccatagacgacatgtgctctggccaaaaccccgacttgtaacagtaaaaaccttgcatggactacttcatacccctatctgactt

SEQ ID NO: 526817 - DNA, 251 bp, Homo sapiens
gcggagggagaggccagtctagcgtccccggccatgaccgcgggtcatcagccatgacagtgtggacaaggtcccaggggtgaaggctaaagctacccagtgtcatcatgaattctctgatcacaaaacagacccaggaaagcattcagcattttgagcgacaggcagggctgagagatgctggctacacaccccacaagggcctcaccaccgaggagaccaagtaccttcgagtggccgaagctggatca

SEQ ID NO: 526818 - DNA, 218 bp, Homo sapiens
gtcgacacaaattgtgtaagaacatattatgaggaatgattgggcctgtccttatcacagagccgttgttaattttgctgaaatcccacatccagaaagagtcaggcactgcccacatgtcatctgagatgccactgttttgtattccccccaactttgacttaagtttaaggttgttgagaaatgggatatggtcttaatgcggttccttgtttcca

SEQ ID NO: 526819 - DNA, 799 bp, Homo sapiens
  misc_feature (1)..(1): n is a, c, g, or t
  misc_feature (10)..(10): n is a, c, g, or t
  misc_feature (106)..(106): n is a, c, g, or t
  misc_feature (125)..(125): n is a, c, g, or t
  misc_feature (142)..(142): n is a, c, g, or t
  misc_feature (147)..(147): n is a, c, g, or t
  misc_feature (189)..(189): n is a, c, g, or t
  misc_feature (191)..(191): n is a, c, g, or t
  misc_feature (240)..(240): n is a, c, g, or t
  misc_feature (255)..(255): n is a, c, g, or t
  misc_feature (274)..(274): n is a, c, g, or t
  misc_feature (300)..(300): n is a, c, g, or t
  misc_feature (400)..(400): n is a, c, g, or t
  misc_feature (452)..(452): n is a, c, g, or t
  misc_feature (478)..(478): n is a, c, g, or t
  misc_feature (485)..(485): n is a, c, g, or t
  misc_feature (492)..(492): n is a, c, g, or t
  misc_feature (506)..(506): n is a, c, g, or t
  misc_feature (535)..(535): n is a, c, g, or t
  misc_feature (541)..(541): n is a, c, g, or t
  misc_feature (559)..(559): n is a, c, g, or t
  misc_feature (566)..(566): n is a, c, g, or t
  misc_feature (609)..(609): n is a, c, g, or t
  misc_feature (736)..(736): n is a, c, g, or t
  misc_feature (767)..(767): n is a, c, g, or t
nggctgacangcggtggggcggctcggcccctggcggagtcggcggcgggcggggacgcggcgctgggaggacgcggcggcgctgggaacggacgcctgggcgccncgaggcgcgggatgtggancggcccaccccagccanaccanggcctcccgccgccccttgcagctgtcccggtcccctggaanancacggacccctgccaaggccacagggagtccccaagagccctggtgganacctctgcaggggangaggcccaaggccaaaaangccccgcagccgcccaactagacatnttgcgcctgcgcactcttccatggaaatccgaaaaaagggctccgagttcctgaaggaggagctagcacaaagcacaaaaggactgaactaaaggaagangaatgtgacggctgtccaagtgcgggacactaaaaaagagctggaagactgnggccacctgtttgagaactcacaaanggttcgngagccanctgaagcagcggcncaaaaaacactgaaggagctcggggcaantcgacngctgcagcagagtgacancttgaanacgctggtcatcacgtccacaccacctctcccaaccgcgagcntcaccccagctgctgagccccaccaaggccgggcccgaaaggccactctcgccacaagagcaccagcagcacctctgcccgccgtgtgtgccgctgcgggacacacctcaccccagacagagagggnaagaggtggacacatgctgttttgcagagtnccaggctggagggaatgccccaccctggacaa

SEQ ID NO: 526820 - DNA, 269 bp, Homo sapiens
cgttctagaggtccctggggcacgggtgatgggattggtcccacccgccaggccccctagtctatgtgcttgtggtaccccaaatatcatgaatgtctgttgcctcctcgtttccagctggcagcatgcaggatgcatgctcctgaatgcagcatgcagcagcaccatgtggcagcatgcatcaacatgggctctgccccttcctaccccatgtgcccctgtggtcccaccgtctcgttgtacctatgctctaacttcagtaatcattg

SEQ ID NO: 526821 - DNA, 338 bp, Homo sapiens
cctagacccactccaccttactaccagacaaccttagccgaaccatatacccacataatgtataggcgatggacacagaaacctggcgcaatagatatagtaccgcaaggcaaagatgcagaattataatcaagcgtagtataacaaggactaacccctataccttttgcataatgaattaactaggaataactttgcaaggagagccacagctaagacccacgaagaccagacgagctacctaagaacagctgagcacacccggctatgtagcagatgcttgtgcaagatcgaagcttacttcaacttttatgaccacagccctctagttcctttgg

SEQ ID NO: 526822 - DNA, 157 bp, Homo sapiens
gaagtttttttcccccgggggtttttccgctttgaaaccaaatttgtttttttaaaacaaaccaatcttttgggtgggggttttaaaaaatttttgctaaactccccaagtaagtttttcttttttaaatggccccgggtctgaaaagcttttttta

SEQ ID NO: 526823 - DNA, 850 bp, Homo sapiens
ctcaaaaaaaaaaaaagggccacaaaactcaacaataaaaacaaacagtccatttagaaaaggggcaaaagacatgaatagatgttccactgaagaggatctatagatggcaagtaagcatatgaaaaggctggttaaactccataagtcatcagggaatgcaatttggaaaccacagcgaggctatgacttacttatctcaatgggctaaagaaaaaatagtgaaaataccaaatactggatgaggatacaaactgggatattttatacattggctgacagggaattgtaacaatgggtacagccactcggggaaagagtttatgaatttcttatcaagttaaacataattttttaatcaagttaaaccataagacccagcagtggtgctccgggactttcatcccagagaataggaaaacctattatggtactggtactcaaattattctataggagctttaatttggtaatagccccaaaactgggaaacaacccagatgtcctacaacgaggtacttggttaaacaaaccatccataactgggaatacggctcgggaatgaacagggaactaactgttgatacaagaacttggttgtacctcaggggtattcagggtgaccaaaaaaaaaaccagtctcaatgggtcacctatagggtatgatcgcatttatttaacattctagaggtgacaaatttctggaattgaagaaccagataagtgttgccaggcatagggacgtgaagggggtgagggggaatgtctgactataagcgatacgcaaggagtcccttgggcctgatggaccagtctatatgcatatgatgaatcacaatgttggataata

SEQ ID NO: 526824 - DNA, 161 bp, Homo sapiens
taggatcgcaagagcaagaaggggttactgaggcgaatagctgtctgacccaggagaaaaggaactatacagcatagtggagtttgtgtacgaaagattgctatctactggtcctttggaatggaagtagtagaaacctaaaggcttagcggatctctaga

SEQ ID NO: 526825 - DNA, 226 bp, Homo sapiens
gtccctgtggttttggagattgtgtggggaagcaaacgtcatctcaagatgaaacccttccaaatgagcttgacactttcaggaattgaggcctccacttcagacttcccctctcagcttaggcctaaggctggctcctcccatgatgcaaatacggtgcaagctggttgcaaagtgagggtgagaatctctcttgcaaaggatgcattatttcaggaagcatcac

SEQ ID NO: 526826 - DNA, 706 bp, Homo sapiens
agtatagcgtgagcctggtggtcgtgggaacccaggccccgcctatgcggcagagatgcgtggggagcccggacgtgctgcaggatgctgaagatccaccggagcgacccgcagctgatctgtgcagcttgcgattctgcgggcggagccctgtgtgccgtttcctccgcgcctaccggagggggcgcctgcgcgccgcgctgcagaggagcctggcgtgccggctcgcccaggcactcggtgccgctgcatctggatgctgcgcgcctggcggccgatctggctggacgcttttgtggtggacgaggaggcgctgtttgacgtttggaattcttattcccatgctatgcgccggagtcggctccgggatgaagaacttgcgctgagcttgcaggatgcgctgcgaacatcttgaatgtgcggtccgggggcccggcggtgtcagaacgcgctgagtgccgccttcgggcccccctttagtccgccgggtgccccttcctctgtcgggacggtgaatgctgccgcgatcgcctggcatcatgtctcagggactttttctgtgccagggggtcagccttgtagttgcatcggccggtgtccctgagggccctacagtcgttcgtcggcgctctgtggtctcagatgggcaaggtggcgcgctcctgtggagcttctggtgctctcgtccgggttggctttcttggct

SEQ ID NO: 526827 - DNA, 250 bp, Homo sapiens
  misc_feature (39)..(39): n is a, c, g, or t
ggccctgcagcctcagctcaccatgtcttggcggtcagnaccagctgccacactgcttacaccacctctaggtggaaactggggcccagacctgggcctgggtacagctggaatgtcacctgcgcgttctaacagcctgttctgagtcctgccacctgtgcctgtggccaggcttccctgtctccatccccagaggaggcagcccaacaacccactccctcttgccaattcacacctcctcaaaaagttg

SEQ ID NO: 526828 - DNA, 887 bp, Homo sapiens
ggccggccgcttgtcggagcgggttctgaagccatcgttcttcgatccgcctgccgggcagtgtcacccgttggtccggggacttccagggtacccccgcagccttgtccgccctcgaggccctgatggccatcgggaagtttccggatccttcggggatgcgcaggtcccccgagattcgcctgcctttcgaggtgccacacagggttttgatcagcgggatctcgcctccccttatgagagcttttaggaagctcccgccccctgctactctgttggctatcccggagtcgtcttcttaaggctttgggctggcccttattaggcccctgccccactccctggggttttttttacccattggttggaccttggggaggggggagtttaaaaaaggacccaggaagaaattgtccgagaaccccatgaatgggatccccccagtccccgtgtgtgtccccagcggcgcgccagtcgttcccccgcggcgatacctgttctctcgttgttcattcgtctcccccccagcctggttccgtcgaccgttctcgtccccctttccatagccgtcccatgatcgcccccccccatgtgtgtttaaaaaggccagtagcctttgcagggaacactgtctgtccccgaccatgtgttgacaccagtgtgcgtcctccagattctgtgttccagaaggatttgctgccattgagacgttgaacaccctttggatagggggaaaaattatatataaatatatttttttgttctgtttgcattttttaatttggtgcttggaaaggtgttgaagtgcccagcctaatgattccatgcgagaccagattggcgtttgtttttttggaggtttccaaattaagagcccttcttcatta

SEQ ID NO: 526829 - DNA, 473 bp, Homo sapiens
  misc_feature (318)..(318): n is a, c, g, or t
tgctgagcctcagtttccctatgaggcaggcacacttcaccatctcctttcaggctggatattcattctaaggccacacatgaatatgagaatattcaggccttttaggtagaatattctaagaatcttaaacgatggtacctcttagtggaagcagtattctgacaaaccaatggggcagggagggtgggaaatggtgttttatggtcactctgggaccccaggcaaggtaatcctaatggaagctcaggcttttggggcgggcttttttttttcctgtctacgaatggaaacatgaagcagatttcgcagtatctncccagggaactggacagtctactttggggccggcgcagaagagatgacccctgaccacctcccggtgtgctggctgcggctggacccgagggcgcgtcctcccgacctctgcggctactcttctcgccgcccccaggtggtgctgcaggaccaca

SEQ ID NO: 526830 - DNA, 235 bp, Homo sapiens
  misc_feature (27)..(27): n is a, c, g, or t
  misc_feature (82)..(82): n is a, c, g, or t
  misc_feature (122)..(122): n is a, c, g, or t
  misc_feature (148)..(148): n is a, c, g, or t
  misc_feature (154)..(154): n is a, c, g, or t
  misc_feature (177)..(177): n is a, c, g, or t
atttactggtctgaggagatggagganccggctgcaggccctggagaaggacaagccatccctgagggtcatctcctgaggnctcttcctgctgctggctgctgccctggacgaccggcctngagggcaaccctgggggcccaccagncccctnccatggctctcaccctggcatancctaggtttggaagagaaacgcctgcagaatccggcttatttctggccagtatatttt

SEQ ID NO: 526831 - DNA, 227 bp, Homo sapiens
gttttttcccccccccctttttggggggggccttgggttactcccccccccccccccccggccccccgtttttaaatttttgtgggggaaaggggaaagggttggccccccccccccccccccctttaggggggccccctttttggggccccccccttaaaggggggggggggggggggggcccccccctttttttttttttgggctttaaagttttttttccccca

SEQ ID NO: 526832 - DNA, 109 bp, Homo sapiens
gctctacgaggatctccaagaaaatagatgcttctaaatcttgttgatgaagtttagatgaagttgtgcagatatttagacaagagaaggctaacttctacttattacc

SEQ ID NO: 526833 - DNA, 236 bp, Homo sapiens
gcttgggggcggctgaggtgcccctctgtcctccagcagagcatgagtaacctgagaggccactcaggcagaagagacgcaagctgagccgtccaactggtttcaactgccaggttaaccaatgcagcatatctttcacaattaaattaacttacaaaaaaaaaacagattgcatcaccaggtagtttactcgattcaggagccagcctgcccaggatgggcctgtccctggccgg

SEQ ID NO: 526834 - DNA, 1627 bp, Homo sapiens
  misc_feature (712)..(712): n is a, c, g, or t
  misc_feature (992)..(992): n is a, c, g, or t
  misc_feature (1178)..(1178): n is a, c, g, or t
  misc_feature (1410)..(1410): n is a, c, g, or t
ctgtgtcctcctcctcttctgctttcgtatgattatgtggccctcccttcgtggttgatcgcgcgggggttctcttctccggcccatatctttatctcgcaggcggaggctcttcctcttctccgtggtgtgaatttctcctcccccgcgggattcctttctccacgcgcgccgggtggtgttctctgtcttttcgtcgcccgacagacataattggttgcgcgtcccccctcttctcttctaaagaagaggcgcgctcctctcatagggtggtgtgctgtccccctccgccccccgccctgccgctccctcgtgagttaaattaacccgctgcggtgtggtgtttctcactaaaatgagggcgctgcgcccctccctcagaacacgacgccctcgccgtgggtgtggaacacctccgtcgtctctctcctctgtgtttgaagagggaggtgcttcttcccccccctccgccccctcccaccagacagattttggtgtgtaaaacacaccaacaacattgtctgtaaacaccaccagggggttgatacaacaccccccccgcgtcgttttataacaaaaaaatatatatgtgaagatgtccctcctcccccctcgctggtatattatcgagaggaacatgtttttagagaaaccccccgaccacaaattctctcctgtctttttttttggagcctcgtgttttctcgccggnccccccacacgcttttctctcctgtggagattcaaaattgtggggtgagaataaggagaccccaccgctctcacagagatttgtttattgggagcccccccctctcctcccaccacagatgagcccacactggggggtccccaccagcagagacacagcagcttgggcccccttctgggtgctgataagacttctctcctgctgtggtgatgaagaaagacaataatgtataattaatataagacagcctattttttctctcaccaatccacacctctcncctcgagaggagagtttctatcccacacctataaaagagtgtgttattaaggggataaagcgggagagcccttcgacacacatcttattctctgagagccacacctcatcagtcgctggttgggcctctctcgctcacacaacagagtatacgaatattgccacttttatagtttttttcacacanattataccccccctttctccacgagccacacattagagggggccacaccacagcgcttttatacacacaatggggagaatataattttggccggcagaaaaggggctcgccacgcaatggggagaatagtccaccgcaggagtttcacaccttgtgtcttgtggcacactcacataactctcccacaacgttgtcttcacacgccggcccactcgtttctttgttgggaganaacgccaccacacctcgaagatgtgtttttctcttaaaataggttttgaaagcacactatggaaatgtaatgtgtaaaacactggagtgtcttttctggtaatcaggaagcctagaaaaagttttgaactttgttataccaccacttttagaataatgaatatggcccacatttttcttgaactgttcatgaataaatccctcattggtcagagcca

SEQ ID NO: 526835 - DNA, 1331 bp, Homo sapiens
  misc_feature (45)..(45): n is a, c, g, or t
gagaccaaaagccttcatacatctcaagttgggggaggcagccanggcttacctgtacactgacttgagaccagttgaataaaagttcacaccttaaaaaaaaaaaaaaaaaaaaaaaaaaaaaaaaaaaaaaaaaaaaaaaaaaaaaaaaaaaaaaaaaaaaaaaaaaaaaaaaaaaaaaaaaaaaagaaaaaaagagaaacagaaagaacgagagccaagaggaagagtcggggagaacccggacgggcacacaagagggagcgcgacgagaagatagaagcagagacgaacgaaacagggagagacacagacgaaaacaacgacagcccgcggggggacaaaaggaggcgagcagaggagagaaaaacagaggggggaaggagaggcacaagaggagagcggagggagcgccacacaaagaggagaacagaagaaaacgaggagcgaggaagacgaagagaaaggggggggcaaaaacgaaaggaagaaaacaacgagggagaaagaaacgcgacagaaaaaaagacagaagaagcaaaagggaggagggcgagacggggcgagaaggagcgagagggagaagaagcacgagaagaacgaaagaggagaacaaaccaagagaaagaccaggaggcggaaggagaaggaggagcgaaggcgagaggagggggcgggggagggggggagagggcagagaggcggacgggaggcagggggggggagagggggacgaggggggagggaacgaagggaaggagaggcgagggggacgggaggaggcgaacagacagcgcaacgcaaccagaacgcagagagaagcagagagagagagaagagaaaaagcaggaggcaaggagagcgagcaccacagccgacacgacaggaagaagcaacaagagaagagaaggaagaagaaagcggagaagaaggacgacgaagggagcaaagaaaagacacggccgcgaagcagaacaacggcagggcgacgaacgcgaacggaacacacagaaagacaagacacagaggagagaaaggaaggaggaagaagaagggaagaaaggagagggaaagaaaaaaagaaaagagaggagagaggaacgaagcaagacgaagaggggcagacagaaggaggggcggagacggaaagagcaggcaaaagagagagaagagagaggagaagaaagaaaagagaaagggaggagagggaagaaaggaggaggaggagaggggggagaagaagaaaagaggagaacaaggcgccgaggaggagggagaacagagaaggagacaaacgaagagagacgggaagaaaaggagaaaaaagagga

SEQ ID NO: 526836 - DNA, 152 bp, Homo sapiens
atctcctctgataaaacgaggtgttagcagcacccagagcacgccagcatcagccgcgcgcagaccctccccaccagacgtcgtcaccatcacacagcgagtccagtcccggcaagcgggaaaaggacaaagagaatatattctaaaggggg

SEQ ID NO: 526837 - DNA, 268 bp, Homo sapiens
gttagcccttcaacctttagaggatggcttgaggctaggagtttgagaccagcctggtcaacatagcaagactttgtctccacaaaagaaagttaaaaattagccaggtggggtggctcacacctgtagtcctagctgcttggaaggctgcggcagtggaattgtttgggtctatgagttggaggttgcagtgagctatgatcatgccactgcactcccctgagtaatgaaagtaaatggaacaagacaccatctctttaaaaaaaaa

SEQ ID NO: 526838 - DNA, 521 bp, Homo sapiens
acaaatagactcatcgaacgtgcatgttcccagctgaggtcaaaacaggcaacaacgcgccttctcgtttcagcctcgtactgtcaacaaatggtcttttcatggtctatttatatgccatgatatttacactatgtctgtagcttatgtagtaggtgactgtgctagtatagaacaggtccccaacgcaaagtggtgacagtgctatccagtgatgccttgcacaaaaaaatgcatggattagaggaaatttggtccaggcacgagtggcagtgctgttcgtcgtgagtccaatgttaatgactccacgatatatagtgagtaaggtatctttaaacatgaagcacacattagacaaggttacatattaatcagtcgaagacgactgttgcaacttgaggatcacaggaccctaaccctctattcctctgggaacgattggttcaggattcgctaatctggtgtacgcagcaattttataagaacacacctactgagaataatgggaatcagcagtatag

SEQ ID NO: 526839 - DNA, 889 bp, Homo sapiens
tggggggggtgtgggcgcaggtccgtttgcgaggtccgtgttcattgatgggtcggtgtgtttgccgtgtgggtcaagcatggctgccgggtcgttggcccttttgtggttgtgcgggagtggttgtagttgctggagtgttttttttttcgctgttgttctcgttggggccaggtggggcgtgcctgttgctgttgtgggtccggtgggtggtggcaacggctttctgggggggttcgagtggttgccgggggttgtagcgatgtgtgtgtgtgttcggtgagttaattgctggtctagctcttttgggcttgtttctctgtggagatctcggttcgaggggtgccgcgctgattgtctcggatcttctgtattcatgatgttggtatatggatgatgtttggcagcgattgggggttatcagatgtgtttggggggtcagtgtgtgagttgtgggacttctgccgttcagtgttcctcgctgttctcccaggggctcgttcgcctgccgctcagcatcccttagtgtgtaccggcgattgtgtattcctgctgtctcgcatgtgtggccaggcctgtgcatacctcctgcagatgtgctttctgccccgacctgggacctgccctggaggttggagcagtaagggctctccctggggtggtgtttctcctctagggtatttgggatgcatgttctgcatctgccagccgagaggtgtgtgtctgggggccaccacctatgggacctcggggtcgaaggggcctgtaccctctgtcatttcctttctagcccctgcatctcccaccagtccaagctgacagctggtgcctagagggtcgtaggggttaataaatggcttatccttctctcccaaaaaaaaaatataaa

SEQ ID NO: 526840 - DNA, 397 bp, Homo sapiens
ttggcctaacatatcaatagtgttaacagtgagaaaccatgctgtacattgtgagccttccgtactgtttgatgatctaggagagacatctggagacctacagcagtgtttaagctaccaacactagtgagaaaactcaatacaaccacagtgaagaatggggcatataataatctggacacaccccaagatatggccaatctcttggggcactgctttgcacctacatgcctgcaagtaacatccatagtgcagccccgtttaagaaaaagtactgacatcacactatatatgaggtgaaatgagtagaaggataatgtagtaacaagaatgaaactagtggcaagagttcctaggcatatgatctaaaatatattttatcctcatttatatattc

SEQ ID NO: 526841 - DNA, 416 bp, Homo sapiens
ttgtctctactaaaacaacaaaaaaatacaaaattagccaggcatggtgatacacatctacaatcccagctactcgggaggctgaggcatgagactctcttgaacctgagatgtggaggccgcagtgagtcaagactgcaccactgcaccccagcttgggtgatggagggaaggaaggaaggaagaaaggaaggaaggagggagggacgggaaatgaagaacaagaaagaaagagagagcgggaggtgaggcagtgaggaagggaggacaggacaggacaggacacgggacgggacaggacaagaaaggacgggaaaggacacaaaggccacggaaagagacagaaaaagacagaaagaagaaacgagagaaacgaaacggacggccgaaagagaagaaaggaagaaccggaacga

SEQ ID NO: 526842 - DNA, 632 bp, Homo sapiens
agcggagtgggggtcggtgcggtttgctaagtggtcggttcctggagctagcggtcttctagctagcctgatccagcagcttcagcctactcgccgcaacctacagcccctacggcagccagccggcctgcacccgcaggccgaacgaggagccgcaggagcccatagaattggcaggcggagaacaaggcccgaacgagacctaaataggcggagcaaacaaccagatacgtacccagagaggcggaccccgtaagtactttgtctagctgtgagtgcagatttggtcgcctgactgagcacaatatgaaagccgcatagtggaataccctggaccgtcactaggaaagagtatgtgtaacgtaagaaaaacgctgacgtgatcataaataacgatgcaagatgacccatctaaagatctacgcagtgagaaaatacactcaaattagtacctgcgtgaaacataacaaattcatgtgccgagcaaactgtacccgcaacagccaaatatgcttacgtacgcgagatgtgatcagacacacccaccaattggtattatactcacacggaggagcactatgaatggatgcacacataaccaacaaaacgtctatatttcatatacacacatg

SEQ ID NO: 526843 - DNA, 677 bp, Homo sapiens
gcagcagcctgacccaggatggctctactccccagccttcaatccctggacctggcgtttgcgaattagagcagacttccgtcgagggtcaattgtgcgggatccatggccattccatacaacaatctcacgcacctggcaacaatgagatcggggacaccctcgagcagaggtcagatatcacaagggaccctgggcttttatccaacccgaccctcattacccagacgtggggtctcagatgagtgggacaaccctcaaatatggatcagaaatcatgccaagttcggactctgggccttaggagaaaactcttaacggcagatggaatgtcacgagggatccagccaccacccatccactcattgactggatgaagctcttcgccgcatgggaacaatccaggtcaggagttccgagacacgacaatgcaccgaaccggcagcatccaatacaggagtcccgacgaagctaagcagaaaacagtgcgcggctaagaggagaaacaggtacacggaaagaaaccccccacaaagaccagccgaacggcacacatacacgagcacaaaggcacagacacacaccgacgaatattccagcaaccaacggggaacgcgagacgcggcgcaggcacaacacgctaaccacaagagacagcgcaaccacgccgccctgca

SEQ ID NO: 526844 - DNA, 401 bp, Homo sapiens
  misc_feature (50)..(50): n is a, c, g, or t
cttaacagaattgtttgtagtaacctagtttggaaacccaccctcagtancccatcagtgggagacctaattaaaaagatgttacattccatacaatcaagtgctttgcctgctggcccaggcatggtggctcatgcctattaatccccagcactttggaaggatgaagtgggcggatggcttgagcctgaggagtttcgaggccagcctaggcaacatatccagaccctgtctctacaaaaaatacaaaaattagctgggtgtggtgctgtgtgcctgtagtctcagctactagagaggctgaggttggaggatcacctgagcctggggaggtcaaggctgcagtgagctgtgattgtgctattttactccagtttgtgtgcagagtgagaccctgtctc

SEQ ID NO: 526845 - DNA, 687 bp, Homo sapiens
tcagagattttcaatgatgggtataagctcagtggattttacaaaatcaaacctctccagagcccatcagaattttctgtttattgtgacatgtccgatggaggaggatggtactgtacattcagagacgactctgatggcagtgaaaactttaacagaggatggcaaagactatgacaatggcttctggaaattttggtccaaaaactatggtgaatattggctgggcatataaggacatcttcacttcttgaccactcaagatagactacactttgacaaatcgaccttgcagattgttgaacaaatatagccgttatgcacaatgataagacatttcacaacgttggagatgacaaagaagtgtctacgagtctgaatattggggaagtacttctggtaacagctggagattcccttgctggggaacttgtcatcctgaggtgcagtggtgggctagtcaccacagacattgaaattcagcacgtgggacagagcatcatgacaactatgacagggaactgcgcagacgaagatcagtctggctggtggtttaacaggtgtcactctgcaaacctgaatcggtgtatacttacagcggacccttacactggtatacctgacaatgggattgtctggtacacctggcatgggtggtggatactctgaaatctgtggtcatgactc

SEQ ID NO: 526846 - DNA, 142 bp, Homo sapiens
tgctatggttacagtgagttcaccctctaaatcaccacgatcaaaagggacaatgcataatgcacgcagcacatgggctcataactgcttagcctagccacacccccatggacaacagcatgtgattaacctattagcaata

SEQ ID NO: 526847 - DNA, 301 bp, Homo sapiens
  misc_feature (108)..(108): n is a, c, g, or t
  misc_feature (140)..(140): n is a, c, g, or t
tgggctcatcttcttggggaatgaaggcaaatgttaacaagaaggcatcaggagggtggatggtaaaagagttggcaccccagttaggaaggcaggcaggggacaggngtttggcctaatggagtagtagtgaataatgnagggtggtagtggtggtgaggaaggagtttggatgtggactcaatggaagtgtttgcaaatgagagttctcctgctcaaataggatagggaggtagcaggcctaaaacttggggtgggtatctaaaactgcctcctgggtcagtcaactagtagaggggaa

SEQ ID NO: 526848 - DNA, 881 bp, Homo sapiens
aggcttaggagtcttttggaggagtctttgaagtaggtagaaaattatatcatcagtaaagacagataagttgattttctcttttcttatttgagtgctttttctttctttatcttgcctgattgttctggctaaaactttcagaactatgttgaataggagtggtgaaagtgcacattcttttcttctttcaatttcttaggaaggatgcattagtctttcacctgttcagtatgatgttggctgaggatttgtctcatatggctgttattattttgaggtatgttccttcaatgcctagtttctttgacgcaactcttttttcatacaactagatattacattttattacttgctatttccacatctattcgaggctaatgctggtcccgttccctactcattctctcatatgttcgaatcacactttatagcatttcaccatgttccaccccattcctgctttcacagtaataatgtccacatagttgcagtgaaataactttgattcctgaggtcagtttgcaacgcattcatgaataatttcgtgtctgtattcatcaggcatatcgcgcctgcaattctttctgcgtgtctttacctgatccactatactcacgatgacgactggattctttactctgactcgacttacattacggaaggagtcccactttgcatctcctgggactacctctcttgtaaattacaggcactcatttcgctataccgctgctccctcctgcctgggccttgcttctgctttagccctttctattactcgctcgctttttttttccccaattcccttgctctcccttcggctctcctcaccctccttcctctcgatcctttgcccgctgtcctcctcgcattactct

SEQ ID NO: 526849 - DNA, 107 bp, Homo sapiens
gcacgcgtggagcatcaggcacacactctgcatccgacacccactccctctttgtgtacttcagtcttggagttggaactctaccctggtaggaaagcaccgcagca

SEQ ID NO: 526850 - DNA, 309 bp, Homo sapiens
tggtccgacatggcgactccctaggccctcccctcttcaagtgggtctacatgcaactgtgaggaggggagattcagtgtggtgggggactgagtgtggcaggcactccccagcagtgagggtctctctcttcctcttgtgctcttgctggggctggtggtccaggggtctttctccttgtgtggtcatgtgtgccatgaagtccacctgcctgtttctgtagtcgaattcgttgtcattccaggaaattagcttgagaaagtggtctttgagggcaatgccagccccagcgtcaaaggtggaggagtg

SEQ ID NO: 526851 - DNA, 342 bp, Homo sapiens
aatagtcgggctatcgaaataaccgatactggcatcatgtgtcgagaagccgccaatagcgatagtcgcaaagctatggccgatggcatcaaaggcatccattccggcaaaccacgccgtttccgcaattcgcgggcgcattttgttatctttcagcgggccgggcatttctgcgcgatagagctgcatcccacccacgccgaggataggcagtatcgcaaccgccaacacgatgatccccatcccgccaaaccattgcagcatctggcgataaaagaggatggcgtgagggagcgaatccagccccaccagcgtagtggctcccgtagtggtcaggccaga

SEQ ID NO: 526852 - DNA, 187 bp, Homo sapiens
gagattttgtttcctgatgcctaacatatccaacattataacacatgatcgtaacaagggctatgggagttatgagacaggaaccatggacataaaccaatatatgtatcatgacaccacactcctgccattagcatcttttatgactaagagcatgatttgccagggaatttaattgagcgagaac

SEQ ID NO: 526853 - DNA, 495 bp, Homo sapiens
acacactgtcagatcgcctcagggtgccttagtggacgggtctctttgtatcagccaaagttttaggcacaacttacatcaaatgaggaactcttctggtgtttggcttataaattacttcaatttaggtgaagtattttcttttttagaagatcttataagtttggatcaagatcttggttcttatgggtcagtggacatatatatgtgtgacctgagtacttggccttccagcgtcatccgggcatctccatttcaaccacgcagcctgttctgtcagcattcctttgctcctgtctgtgccgctgagcttgggttttcctggtcattttgcatgtggctcttgttctccccatccctgtctccaccattcctctctgcctccgtcctcgtttttgatttttggtatgaattttatggacatttggcaggagccttggttgggatgagaaaacccatggcactagtgttaaataaaactcagaagttgaaaaa

SEQ ID NO: 526854 - DNA, 200 bp, Homo sapiens
tgcacctttttgcacaatactaaattataactttataatacacatcacacatttcacacactctcacacgctactttcttacatcaactgtgcttggggaaactccatttgttgaatgccactgtgaggcatattttgctaatactgctgtctccaggctatttctgctttggaacacactctatcacagttaagtgtct

SEQ ID NO: 526855 - DNA, 241 bp, Homo sapiens
cctggaggaattgtatgtagagaggttattctcaaccagtcctgttttgtctgcagggctgatggaatagacagggatgcccttaggggagaactctggagcactaactgtgtgttccctacagatgctgcccaccacctcccccgccggctaaagccccggatcctggccaccgagatcccctcaccttcacgccagggaagccttgacccccagtgatcctggtgccgatgaatagcga

SEQ ID NO: 526856 - DNA, 460 bp, Homo sapiens
  misc_feature (23)..(23): n is a, c, g, or t
  misc_feature (76)..(76): n is a, c, g, or t
  misc_feature (112)..(112): n is a, c, g, or t
  misc_feature (124)..(124): n is a, c, g, or t
  misc_feature (141)..(141): n is a, c, g, or t
  misc_feature (147)..(147): n is a, c, g, or t
  misc_feature (235)..(235): n is a, c, g, or t
  misc_feature (248)..(248): n is a, c, g, or t
  misc_feature (288)..(288): n is a, c, g, or t
  misc_feature (308)..(308): n is a, c, g, or t
gaaaaaaaaatgcatcggaccgnacacatacagccttttccctgccgctgtgcatgaaacaatacagtgaacagcnattacatattattacatcattaggattacaagtaanctagagatgaancagtgtaagggtgtgcngtgtgncagtatatgatttgatgtatggagtgtccgtcgtcagttatatgcaagactacaccattttatatcagagacttgagcatctgtgganttgggatctgagnagactaaccattcccactgatactgaggggtgactgttgnatgctgcacaaatcccagantcactgtgatttgttgctagctcatctaatcagtattctagattttttctacatttttgcttgtggctcactaaaatatttaactttctccctgtatcttatcttattttgacatttttaatattatgtataatatctcattttgaatttaa

SEQ ID NO: 526857 - DNA, 226 bp, Homo sapiens
gaaaaaaaccaacccccaacttccatctttggaaaaaaaaattcccactttcctttaaccttaaaataaagctggaaggaaataaggccaaagggccattttttttccccaagggggggggaattaaggggggggtttctttttccttaataagttttcggaccttcccccaggtggcggaataaaggaccagcccctttcaataccgaacggttaagaaaaggtt

SEQ ID NO: 526858 - DNA, 101 bp, Homo sapiens
  misc_feature (94)..(94): n is a, c, g, or t
tcctggaccctggggcaaacctgtgacccttttttactggaatagaaatgagttttatcatctttgaaaaataattccctcttgaagtaataancgtttta

SEQ ID NO: 526859 - DNA, 559 bp, Homo sapiens
gctcggtccttcgtgccgtcctccccgctgggaggggcagctccagctccgctcggctcgctccgcccggccacaccggctttttccccatcaggcggtccgagtgcggctcctcgcgagcctgcaaaggagcagcaggcggttccttttcggacgacctggagcgaggcctgcgggactgcgcgccccggcgggcggcgtgcggctcccggcatgcgcggcggctgcgttcccgccgcctccgagctcgcctggggctgccgcccgcctcctgccgggccctcgggctcgcccggcaccgcggggcttgatcagggagatattttagtacaacatcttttcatcacagaaatgatatcttcagggaaaagacttcgaaaaagtgcctgaagtgacacaacacatgttttcttctggtatctggctaaagccttctcttctaagcagcataaactactgctgcctacatgttgcctgttcataaaggctgaggcaggggagtcgcttgaactcgggaggcggaggctgcagtgagccgagatcatgccatttccctcca

SEQ ID NO: 526860 - DNA, 426 bp, Homo sapiens
tttgcccagcccatgtaactctaagggaataattatatactttttaaattaaaaaaaaatttatatcagaattgtaatttatgatattaacaaatatttttgtgtaatgctttctacatgtatttatgtaatgggtatatgagaagataacttgagaagacctttgaatatttcttgggaggcattttgtattttgagggtatttttaaacttgttctttaagtctttgtatgattgttcttaataaagtaataattcctgggacaatgcaatatctaaagccaaagaggataacctaattttctgaagaaacatattaatatggcttcccataacctaagcagaaaaaccacaggtgtgatatacagaggaccaagtccaagttttattgtcttaaataaaatttgtatgaatttggttaaaaaa

SEQ ID NO: 526861 - DNA, 808 bp, Homo sapiens
ctgcgcaggagccgcagggccgtaggcagccatggcgcccagccggaatggcatggtcttgaagccccacttccacaaggactggcagctggcgcgtggccacgtggttcaacacagccggacccgtaagatccgcagacgtaaggcccggcaagccaaggcgcgccgcatcgccccgcgcccgcgtcgggtcccatccggcccatcgtgcgctgccccacggtatcgggtaccaccacgaaggtgcgcgccgagcgcggcttcagcctggagggagcctcagggtggccggcattcaccaatgaatggtgtgcccggacccactggcatatctgtggatcccgaggagggcggaacacgtccacggagtccctgcagggcccaaacgtgccagcggctgaaaggagtacccgtacaacactcatcctactttccccaggaagcccttcggaccccaagactgggcagacagtctgctgaaggaactgaaacttgggcccacacaagcttgacccgggaccggtctcatgccccgtccgggacccgttctattcacgcaaatggagaaccggctcgagttcatcacctgacggacgacgcacgaccttccaaaggccgttacggtacgatctcccgaagtgggcccgtgcagacgcccggacaacttacggattacgggacacaccagcagccacgcaagcccgcaaacagcatgcggcacgacacataaagcccctggggactggaatcgaagcagacaggatgggcaacacagcgaggtcgcgcacaccggagcccgagcaactgg

SEQ ID NO: 526862 - DNA, 233 bp, Homo sapiens
cggtcgacctcttgaggactcccctgtttgtgggcgcgtggttgtgtgggttgtgggctgcggggcgtccttcgttgtgggcgcaccgctcgtgttaggacccgaaagctggtgacctatgcctgggcagggcgaagccagaggaaactctggtgaacggtccgtaacggtcctgatgtgcaaatcggtcgtccgacctgggttgtgggggcagaaagaataatcgaaccatc

SEQ ID NO: 526863 - DNA, 160 bp, Homo sapiens
caccaacagagactgcgactcgctcaagggggctctgcgcatcatgggcaacgtcttctcgggctgcatgctgttcccccacatctaccccctgtgaaggtgcgcgtgctcatgctcctgtactcgtgccagaagaagaagccacaagggcctcaatccc

SEQ ID NO: 526864 - DNA, 153 bp, Homo sapiens
atcgaagtaacgtaatcaatcacccacaaggtaacacataggagtgacacagtcacggtacgagtagtgtgtacagccagtgtaacacacgagtatacgttgtatccgtaacatatcactcagcgtgtctctgtaaataacgtcgcggtaact

SEQ ID NO: 526865 - DNA, 1382 bp, Homo sapiens
gactgtggaagctgccaatgagctactcagcagcttcagcgtgtgatgcactcactggtacaggaagacagagatcaacacgactacaagatgaagcaaggcagagatcatggtagagtccggcgccggagtaagaaagtgggtgactgggcaaagagggcatcggtgccaagcgcaacgtagaaccaccctgtgaatcctatcgaatgccaagtgacggattaatcggcgcaggtcagcgcgagccctcgaggtgagaaggacatcaccgaagagaagacgtcggactgcgtgtggatgccgtatgtcatcaccgtatcgcatggcactcaccacatcggcacgtgctggatctgtgtactgtcctatgtcgctagaccactggtgtactcgtgtatccaaactggggtggtgtacccacatttacttctgccgattttacatcatatgtgcggaaacgaggggcggtagtaaacccatggcgggaagcgatgccatatgcatacaccacgcacgagcatagggtaagctctgggcaacccaatctgtgctgcctcttttatctcagtaatcgactgggttgcaaaatccttcggagtaaaaggtaccaagcatatgggaccgaccttcatgtggggacccatcaatagggcgcgttagccggtgggtggtagcatgggcttgattcctagggggttagacaccattaatatcaatctacaagttaaggtaaccccaccggaagtaagcacaggaggttggcaagaaattacttcaggcaacggttggcggaaacaatggagggttgggggtatgggttgacaaccatggttggctccctccctaggagaagttccgaccgttgaataaagattccttcggcttagaaggcgttaccggaatgactttgctgtccacccaaaaaggacacgttcaggaagtaaaccaaaggggacccaaacacgcggcagccctttgaacacaagggcaataaacccttattgggcccctaacgttagaacaaaagggctaagagcgcatattgaaaaaacaacgttgcggttagaacacaggcgatatgatgccgaaacgggatagttaatcccgtaaggtgaaaccacactctaccaacaacacatcggttccaactttacgtcggccccatttgcgacacagttaacacggataaccaattctactctacctcacgtatgccgagaaaaccttaagaaacgaacctacacgtgacacacaccagagattcacacataaccaagagaaagggccgctctccaaaacacacatgcgaggacgcggaacagcacagacgtggggtatcaaacacacgggcgggaggcgacacaaagctcggcggcgcaccg

SEQ ID NO: 526866 - DNA, 564 bp, Homo sapiens
tacagtttctatacctcaaacaaccgtatgtggaactgatatttctggtgtataattcattacactactatagacttcacaaatgacacaacatttcaattgctttttcaggaactgctatatcatcattatataaattgtcaggtattggtttacggtttttgtgatccttcagttttggcagactgtcaatggcatttcacggttcttttataccatagcaaggacactgaatatggcttcagggaggccatagaatggattcgggtaccgagtctccaacttcgatagctcgtccgtcatggcttctatcctgtgtgaaaaccctggtgaaccaagcgggtctcttatcgtagggaacccccttggccggattgggtacccagattgaattgatttccttgggtccattcccagcaacgtcaacggtggttctgaaacccagcaggcctacgtgctgtcctatctgcgaattccaggctcttagacaagtcccgagggcctcatctccaggaaaggctcctcctcccttcccggccgaccgagtgtgattccagatcactc

SEQ ID NO: 526867 - DNA, 903 bp, Homo sapiens
ggctcgggttagagcctaggagaccagatcctgagtgtggaaaccaaatgtgagagggggcgtgtttgatgctggggtcatccgatgctctcgttagtgtgagagggaactcacgttagcacattcgagcgagacatgttgcggtgatgacagacgtgggctgagctcggacgcaagtggagtggggagcgcagcagtgggtcctctacgctggtgtcgagcggcccgtgtcagcgcatggtgccagagaatgcaggagaactggtagcgcacgtctctggtgctctgctatggacgtgaccacagctggcggcccagcggctcctccgaggtgctcagcggcgccaggaacagtagctgctcgtacttggcgcgaatccacgactcgcgctcctccctgcaaagaccagggatcaacggaaaaggctctagggacccccagccaggacttctgcccctacccacgggaccgtcctcaggttcgcacaccctcagcaacctaccccccgctctgttccctcacgcttaccgcgaagagtcccgcgagggcttggcacggcctcgcgtgtcgcctttcccacacgcggttggcccgtgtacgtatgccaatagcccgtcagcaccagggtcagcctcccgttggccagtcgtccaagtccagcgagcgaacgcgggacaggtgtgtgcccagggtagcgggtggatgccagaacactcgatgccgatgacgggggccaaggttcaagctgggctccaagtggggtctgcgtgaatcgcacgtagaaggtacggctcccagccgggcacagccacagggcaccccggtattcactacactccctagccctcggtgccttctggcatcactgggggccccgcaatccaagctgattgattcccttg

SEQ ID NO: 526868 - DNA, 103 bp, Homo sapiens
agcagtgtgtatgcttcatcttcctgcagtatggactcatgggcaagtagtcttgatgaaggagacacaacttccctttggaaactccagcgatactccgccg

SEQ ID NO: 526869 - DNA, 991 bp, Homo sapiens
tgctgtgcgcggcggacgtcggagtgcagcggtggagctggagcgtgtggccgccgtgggcctctccagggccgcagcgtgcatgcagttgtgtgccccccgccccgtgccggcgtgacctgaagaacgcacgtgactgggggccggtggggacccgccccccggccggccgcagccatgaactccaacgtggagaacctacccccgccacatcatcctgcctgggtgtacaacggacggtgactgacactgaccgcagacccacccagactggcatcaacggctctctccccaaacgacgcgaggacctcaccgaacctccaggtcacccactcgagcggccctgagcgggaacccccaatactgctgcacggtacttgtactcctgcattgaacacctccttgcttggcggaacgtgacttcccttagcctccccactccaactgggctactttccttgaccacccactctatccaccccgacactgtcgcggctgcccactggcccacgatcttgcctcaaccggtgctcaacgaacggacctggaccgtgctgacgcctgggagcatccgcacaacgtacctgcctcgaccatcaacgctgccctgcctgatctcatccctaagcctccgagttctgcactccacctgacggcaagcgccgctgcccggccctgacattcagagggacgcaacctaaccgacggcacgctaatgccaccgctccgcggcccacggcctggctcaccagacaactcccagcgtgagtgccagccgggtcgttggcccagcgcggcatgcggcccgacacgctcggcatcggggccccctgcgcccaacgatgcgcccctgccaccgcattaccctcgcaaaccgagcgcccgtgcgggccccccaagtggagtgcccccggcgaacgccgcctgcaggggcccccagtggcccaacgacagcgatgccaagcgcacagccccccaaacagcaccccct

SEQ ID NO: 526870 - DNA, 129 bp, Homo sapiens
tgctatatctattcacaacgtgacttccaatatgacaactgcttagatatttaggcatgtgctataagttatcttagttgacatatgaaaaatgctttagatggatcacattctgagtatattggatta

SEQ ID NO: 526871 - DNA, 99 bp, Homo sapiens
ctcagaggatccttcattctgtcatgtggtggttggggatacatcacaatgacagaaatgacacaaggcctttaacttgtcttctagtttagagacatc

SEQ ID NO: 526872 - DNA, 184 bp, Homo sapiens
tacgatgcccgaagccaaaaaggttgatgctggtgccaaggtgaaaaagggtaacctcaaagttaaaaagcccactcaggggaagccccattgcatccgcaaccctgtccttgtcataggaattggcaggtattcccgatctgccatgtattccataaaggccatgttcatgaggaagtactca

SEQ ID NO: 526873 - DNA, 859 bp, Homo sapiens
  misc_feature (109)..(109): n is a, c, g, or t
  misc_feature (165)..(165): n is a, c, g, or t
  misc_feature (258)..(258): n is a, c, g, or t
  misc_feature (289)..(290): n is a, c, g, or t
  misc_feature (293)..(293): n is a, c, g, or t
  misc_feature (300)..(300): n is a, c, g, or t
  misc_feature (316)..(316): n is a, c, g, or t
  misc_feature (319)..(320): n is a, c, g, or t
  misc_feature (326)..(327): n is a, c, g, or t
  misc_feature (338)..(338): n is a, c, g, or t
  misc_feature (343)..(343): n is a, c, g, or t
  misc_feature (348)..(349): n is a, c, g, or t
  misc_feature (438)..(438): n is a, c, g, or t
  misc_feature (455)..(455): n is a, c, g, or t
  misc_feature (468)..(468): n is a, c, g, or t
  misc_feature (472)..(472): n is a, c, g, or t
  misc_feature (484)..(485): n is a, c, g, or t
  misc_feature (601)..(601): n is a, c, g, or t
  misc_feature (642)..(643): n is a, c, g, or t
  misc_feature (855)..(855): n is a, c, g, or t
caggtgaggccgggtgttaatcggacgaggctagagtcctctgctgtacgactgcactcccgcaccctcccctaaatcccccctcttcggcctgtttaccttttaactnggcttcgttgcacgtttggtgtgtgtgtttgctcttcgcagcctcttgagcgtctnttgtacttaattcttacactgtggacgctctctcgcgcccgccatcccccgacccctctgatctccgatccttgacgatgtctagcctgcatngattggcccttttccctgggtatggcagatnnatngcttgantgatcctctccccccnaannaattcnnacacaggagcngtccngaggnnctggatacttattcttcaaatggctttaccctcccagtagctccagggaccctccattttccatatccaggaaaatgtgatgcgccacnaggtatcagcgtctggntcgccaattcaantttntatgcacaagtnnactcatgtggaagatccagagtcaacagaggctcgtcaggaagatgtctacagaaaaggtagaccaaaaggaggaagctggggaaacaagaggtgtgcggagaccagatcaaaggnaccggacaaagaggaggaaccaccagctgctgcatcccatnngccaggggtggcgtccaggtggcagagcagctaggaacgcaaggctgaactggggccagaacctgctctcccggcatggtcagacctccaattactgcttactgtgggcccaggaggtgggccaagtcttggcaggccgtgcccgcagctcgctgctgcagtttgggggtgctcttctgcacaatcctccttttgctctgggtgtctgtctnctct

SEQ ID NO: 526874 - DNA, 399 bp, Homo sapiens
  misc_feature (242)..(242): n is a, c, g, or t
  misc_feature (281)..(281): n is a, c, g, or t
  misc_feature (335)..(335): n is a, c, g, or t
  misc_feature (343)..(343): n is a, c, g, or t
  misc_feature (363)..(363): n is a, c, g, or t
  misc_feature (387)..(387): n is a, c, g, or t
gcaagggctcatgacgacccctcctgaacactgttcaagggcgacggctagcattcctcgctgtgagtcctgaacagcagcttctcgaatatgaccgacgtcatgtctggcacccctacgccccgacgatcggggcagacccaatgctcgcagtgacggctgccaacggagtctggctgcagctgcatgatggggaacaccgccacgaggtcatcgatgcgatggcctcgtggtggtggcanattcacggttaccgaaacccggtcctcgacgaggccctnaaccgtcaaagctcccagttcagtcacgtcatgtttggcggacgcacccataangccgcggntgacgccgtcatattcctantgcgcctggccccggggcccctcnaccggatcttac

SEQ ID NO: 526875 - DNA, 1108 bp, Homo sapiens
  misc_feature (109)..(109): n is a, c, g, or t
  misc_feature (165)..(165): n is a, c, g, or t
  misc_feature (258)..(258): n is a, c, g, or t
  misc_feature (289)..(290): n is a, c, g, or t
  misc_feature (293)..(293): n is a, c, g, or t
  misc_feature (300)..(300): n is a, c, g, or t
  misc_feature (316)..(316): n is a, c, g, or t
  misc_feature (319)..(320): n is a, c, g, or t
  misc_feature (326)..(327): n is a, c, g, or t
  misc_feature (338)..(338): n is a, c, g, or t
  misc_feature (343)..(343): n is a, c, g, or t
  misc_feature (348)..(349): n is a, c, g, or t
  misc_feature (438)..(438): n is a, c, g, or t
  misc_feature (455)..(455): n is a, c, g, or t
  misc_feature (468)..(468): n is a, c, g, or t
  misc_feature (472)..(472): n is a, c, g, or t
  misc_feature (484)..(485): n is a, c, g, or t
  misc_feature (601)..(601): n is a, c, g, or t
  misc_feature (642)..(643): n is a, c, g, or t
caggtgaggccgggtgttaatcggacgaggctagagtcctctgctgtacgactgcactcccgcaccctcccctaaatcccccctcttcggcctgtttaccttttaactnggcttcgttgcacgtttggtgtgtgtgtttgctcttcgcagcctcttgagcgtctnttgtacttaattcttacactgtggacgctctctcgcgcccgccatcccccgacccctctgatctccgatccttgacgatgtctagcctgcatngattggcccttttccctgggtatggcagatnnatngcttgantgatcctctccccccnaannaattcnnacacaggagcngtccngaggnnctggatacttattcttcaaatggctttaccctcccagtagctccagggaccctccattttccatatccaggaaaatgtgatgcgccacnaggtatcagcgtctggntcgccaattcaantttntatgcacaagtnnactcatgtggaagatccagagtcaacagaggctcgtcaggaagatgtctacagaaaaggtagaccaaaaggaggaagctggggaaacaagaggtgtgcggagaccagatcaaaggnaccggacaaagaggaggaaccaccagctgctgcatcccatnngccaggggtggcgtccaggtggcagagcagctaggaacgcaaggctgaactggggccagaacctgctctcccggcatggtcagacctccaattactgcttactgtgggcccaggaggtggcagtctggggcgtgccgcggtgtgtggtgggtgctcctgacatcctcctttgctctggtgttgtcttcctctatggtccttctatttcctattgcgcagtcagccacctcagccctgtgcatttctactacaggacgactgtgattcctccacactcatctgctccttccctgtgccaatgtctcgctgactaagggacgtatcgtgcgagttggacgcgatcggtacttaagcttgactgcaagtcctggatcaagattgggctgttctggcacattctgtacacagaggtgcgatatctcattcttcggtcggtgatgtgataacggtcaacctgtcagatgt

SEQ ID NO: 526876 - DNA, 150 bp, Homo sapiens
aatagagtgcttggttaataatacgcaactgataagtcatcgtaaccaattggttcactacattacacacctgtaccgatcttggcatgtaccattcaaagtcaccaccgtaggttaaaatagcctttaaggtaaccagcgcaggcccca

SEQ ID NO: 526877 - DNA, 124 bp, Homo sapiens
tttttggaccggtccccccccccttttttgttttgttttgttttgttttgctacgagcccccattcctgtttgtaacccttggttcgcccggttttttgttttcagtaaagtctcgttccccca

SEQ ID NO: 526878 - DNA, 238 bp, Homo sapiens
tatccccagggaaggaaaggctcccccatttgggaaagtggtttttacgtcactggacaccggttttgagcattagtttgaaaactggttcccgaatgggctttcctccctttcccctgcccccctcaagtttaataaataaggttggactttttttactataaaataaatgtttgtaactgctgtgccctgctgtaaacttgttaaaaaaaaaaataacctgcatgtgggctcctca

SEQ ID NO: 526879 - DNA, 671 bp, Homo sapiens
ttttttttgagactgagcttcactctgtcgcccaggtaggagtgcagtggcatcatgtcagctcactgcaacctccatctcctgggctcaagcaattctcctgcctcagcctcccaagtagctgagattacaggcacccaccatcacacctggctaatttttgtatttttagtagagacagggtttcatcatgctggccaggctggtctcgaactcctgacctcaggtgatctgcccacctcggcctcccaaagtgctgggattataggcatgagccactgcgcctggcccattcttatgttaataaatatttgagttatttctactttttctgatatcataagcaatgctgttgtgacttctgatatacattatagctagcctctctgcttatacacccaggaactgctggctcatatggtatatgttctttcacttcagtaaataatgtcaaagtattttcaaaagtggttgtccctcatttacacccctcaccaacagtgtatgagatctgttgttcttatgtaccatggaacttaattttatcaatctggtgagagtgtaaataacatctaatagtaattttaatttgcactccccaattactaataaagttgaacagcttccacgtttattggctatttcaattagtaaagtgtctctggaagttg

SEQ ID NO: 526880 - DNA, 204 bp, Homo sapiens
gcggtctccacaggagttaaagttcctcgtaattttcgcttgttggaagagctcgaagaaggacacaaaggagtaggcgacggtacatttagctggggccttgaggatgatgaagatatgacacttacacggtggacaggcatgattattgggccaccaggacaattatgaaacagatatatagctgacagtagatgtggacct

SEQ ID NO: 526881 - DNA, 163 bp, Homo sapiens
gagtaacgcgacgtacatctaggactagtcagtagaacattagacatgtagaagataataagtgtacgagcggaaggtaatggttgatattgctaggttggcgcttccaattaggtgcattagtagtttacctgggttacggtctacctgggtttaggttcta

SEQ ID NO: 526882 - DNA, 514 bp, Homo sapiens
  misc_feature (102)..(102): n is a, c, g, or t
  misc_feature (156)..(156): n is a, c, g, or t
tatataaaaaaagtaggagtgggctttcccccagaaaaatggctggcatggcaaacctaccatgatcaccagtgtgaatggggatgtggtcccattataatntgaaaggccctttaaaaataatgagatttccttcatactgggccaggaatttgncgaagtccctgcagatgacaggaaagtcaagagccccataaccttagatgggggtgtcctggtacatgtgcaaaaatgggatggaaaatccccccccataaagagaaaacgagaggatgataaactggtggtggaatgcgtcatgaaaggcgtcccttccccgagagtttatgagagagcataagccaagggacgttgccctggactgaagttcgcattgaactctccaccattctgtgggatatattgttcaaaaaaaaattgttgttttccatgatttagcaagcaactaattttctccccagctgattttattcaaaatgggtacgttggttaaataaactttttttagatttca

SEQ ID NO: 526883 - DNA, 156 bp, Homo sapiens
tctagcaggatcccatggtaagcttattctgagagctgtagacgcctattggattccctgtcatgcacgagaacaatccgtgcattacataattcttacctgtccgttgcctcaccccacttttgggagcagatggcatagcatcagaacaatgat

SEQ ID NO: 526884 - DNA, 647 bp, Homo sapiens
  misc_feature (178)..(178): n is a, c, g, or t
atcgcaatggcattcctaaggcttgaccgaacgaacaaattctaggctatatacaactacgcaataggccccaacgtcgtaggcgccctacggggctactagcaaccgcttcgctgtacgccacgaagagactacttcagccaatggatgccccataaaacctcggcacagtctaccnatcaccgctctatcatcactcgtcccagaccgtctagctctcagctcatacgctcgttctacgtactgaagcgcccccgtccgcgcagtacgcgcacaccgcactcctgggtgcgacagctcgtcacagacctaggggccgtccctgattgaagtgtcatatagcacgagcgctgcctaggcccctagagcgccgctctgacgtgcaagtgcctctggagtcgagggtcgacgcactcagaatctcaaatctaatgactcctgcatacgcgcggacaacgtggccgaggccacgtcacgccccatatagcaaattctacaatggctcgataccgtccacgcccttacggccaagtgcagttgcataccgaagttcacatcacttaacgtacactaccgtgggcctcacttttagacctgctgccaccgtagagtgcacaaacacaagaacctgctctggcttacggccg

SEQ ID NO: 526885 - DNA, 202 bp, Homo sapiens
  misc_feature (9)..(9): n is a, c, g, or t
ccccttttnttttttcccttttccccccccccacaaaaaaaggaagccccccggggttttttcccccccctttttttttcccggggttttcctttttcttttgggacaaaaaaggcccccttaatgggggcccggttgggggggggttttttttcccccccccccccaaataaaaaaaaaggtttttttttgggggccccca

SEQ ID NO: 526886 - DNA, 127 bp, Homo sapiens
ttactaggccttctcgcatgttgagcctgggagtccgtgagggtcccagagctcctgactcccccttctctcccttcgggccttctgcacactgaatgcggggcatccggtggagattcagaacaca

SEQ ID NO: 526887 - DNA, 164 bp, Homo sapiens
  misc_feature (88)..(88): n is a, c, g, or t
  misc_feature (164)..(164): n is a, c, g, or t
aaaaaaaaaggattagcaggcatggtggtgtgtgcctgtagtcccatctacttgggaggctgaggtgggaggattgcttgagcccagnaggtcgaggctgcagtgaactgtggtcttgtcattgcacctcatcctggacaagagagtgaggccctataactttn

SEQ ID NO: 526888 - DNA, 374 bp, Homo sapiens
  misc_feature (35)..(35): n is a, c, g, or t
cccggtctgatgtttccctttgtgggcgtcccttntaggggtttttctcccctgttttatttggtccaaggggttaaattaacccgttggaaaaaaaaaaattgggtttgggggggggggggggggggggggggggtatttagggtatcaccataatttttgggggaattttccaaatgttttccccccattttttttccccccccccctttttttccccccccttgaatttgttggggcccgaaaaaatttttccgcttaacccccgttttccctgtgaaagtgtgaaaacccgttcccaatgcccccggggtgtggggggggttcgattgttgtttttgtttgaaatccccccggtttttaaattgccccca

SEQ ID NO: 526889 - DNA, 264 bp, Homo sapiens
gccccccccccccccttttttttttccaggatgtttttttttgggggcccccccggtgtttttttcccccgccccccccccccccttcccccccccgtttttttttttcccggccccggggggtttttttttttttttttttttttccccgggttggggttttttcccccccccccccccaccccccccttcccctggggggggggcccctttggggggggggggcttttttttggtttttaggggtgccttggggccccctta

SEQ ID NO: 526890 - DNA, 462 bp, Homo sapiens
tttggcgaggcagtctctctgttgccacaccttaacacctattttttagcccaaacattccaatagaattataagttgctattatatgctatgttctttacccctgcacattcatacaaacagttccttcttgctgaaaacaggtgcttacctctaccaccctagaatgaacaatcatgttcacttctttccctgctggataactccttctaatagttaagtttcatttcaaatgtctcctcctctggtcagatttctctaaccacttggtttgtatcagctatatcacttcactctcctttaggaccacctatctcttacagtatactgagagttcactggggataaacattattaatgtgtgtattttcatcatcaagatagcaacttttatttaaaaagttgcttacatatttgatgaataaatgagtaaaaatcattttactacatcttcctgtcaat

SEQ ID NO: 526891 - DNA, 420 bp, Homo sapiens
  misc_feature (10)..(10): n is a, c, g, or t
  misc_feature (24)..(24): n is a, c, g, or t
  misc_feature (48)..(48): n is a, c, g, or t
  misc_feature (136)..(136): n is a, c, g, or t
  misc_feature (343)..(343): n is a, c, g, or t
ggcgggcaancaggggatcacttnagcccccggagtttggaggcctanagtaaaccttcagttgtgttattgcattcccaaccctgggcaacagagcaaggcccctgtttcctaaaaaaaataataggccgggcanagtgtctcacacctgtaatcccagcacttcggaaggccaaggcgggcggatcgtgaggtcaggagattgagaccatccctggcgaacatggtaaaaccccgtctctactaaaaatacaaaacaaaaaattagctgggcgtggtggcgtggtggtgtgtgcctgtagtcccacctacttgggaggctgaggcgggagaatagcttgancctgggaggtggaggtttcagtaagctgagattgcgccactgcactccagcttggtgatagagctagactctgtctc

SEQ ID NO: 526892 - DNA, 120 bp, Homo sapiens
cgtgtgcttatcgcgtgtgctaccgtcgtctaagacaccggctcctccaacctgtgagtgccctcagtctactgctccagtcttgcctgcaccaaccacaacctctttccatacaaccag

SEQ ID NO: 526893 - DNA, 146 bp, Homo sapiens
gaatatgctgtctcattctacatccttgacctactactatgctgtctagtattctctatactggatagctcctactaatagcacttggatttgtcacgtgatacccctaatacatctgtttcaactcagctatagaaactgctaga

SEQ ID NO: 526894 - DNA, 1589 bp, Homo sapiens
  misc_feature (1122)..(1122): n is a, c, g, or t
  misc_feature (1588)..(1588): n is a, c, g, or t
taatgtgtggtcgtgcaggtaaaggcttactaaaagggtgaaaacgtaggctgggattaaggcgacagggattccaaggatagtcagtaaaattaaaattcgtggaaaatggataatgtggtaaaggagaaggttaatgggttggatattggctagggtgggcggcttccaattcaggtggcatagagtaggtgggcctgcagtaaatgttagcggttaggctgtacggccagggctaatgggttggaatggatgtaggctggatgggttctcgataatatacactaagttatgggggatcaaggggtggtaagagtggtggcctggtgggtcaaaaatgtgggcgctaagggctatttttaaatcttaaaagcgcgaaagcccataataatccagcggggccccggcctcaaataaggggaagtggcccagtgggcatagggttcaaatagaaataggtggggagtggctgcgcggcggcaacagtgagcgtgaggccagagaagtctcgcgaggaaagggctaacgatgtgtggtggcaattacaacacagtgcactctacagggcaatacctaggctattacaagaagaatcagggtctcgctcctatatagagggctgggcgatagtgcggtcaaatccacttgcgctaatggaaggataaagattgcgaataaagacacactgggtggaggaggggagcacaaaagccctgagctcagtgggcagagatagaaagactactctcgggacagcccgcgccgccaccccaactcacacacggcgcgcgacaaccttcacgccacgcggatcccaggcaccacaggccgagccgagagatcacagcgccccctacggagacttctggtggcggcgaggcgccacaacgcgacatatgacaaccgcgcacacaccacgacatccagccgcgacaccaaacttagtagggaggcaccaccagaggcggcctgcgagaacacccacacagtcctactaaatcctcacccaacgggggagcacgtctgcggaacacaacggaacagcgactagcggctcgggccaacagtcgggcggcgcttcacacacacaactctcaacacacacgtcgcaacgaataacgnaacagccacccaagctgacacacagcagacgaccaatagggggaacaaccaacaatctcgcggcgacccaccaccagacgagcaactaagctagacacactagcccctcatcacaaagatagacagaaacacccccagccagcaaggagcccccaaacaagagcggggccacccacaagccacccccaaaaaggagaccacgcggcaacaaccaggagtagatcacatcaacctaccaagagaggcccctaaaaatagagcagaaacaaccgagaaacaccacaccaaggcgggggaacagcagagacagaccactagcgccaaacccacctgcagtagtagcgagcgagacagcgaacctaaacaaggatcagtcagcagcctacacaccagcaacacagactaagacagcagcacacaacatcaccagtcctcgccagccaccacgctcgcccccctccccggnt

SEQ ID NO: 526895 - DNA, 515 bp, Homo sapiens
  misc_feature (104)..(105): n is a, c, g, or t
  misc_feature (121)..(121): n is a, c, g, or t
  misc_feature (232)..(232): n is a, c, g, or t
  misc_feature (250)..(250): n is a, c, g, or t
  misc_feature (412)..(412): n is a, c, g, or t
  misc_feature (443)..(443): n is a, c, g, or t
  misc_feature (510)..(510): n is a, c, g, or t
tttagtatagcaccttcagggagaaaaaagtttagaccaaaggacattcgtgggggagctgatgggccagcagagactcagttggcaagcttccgggtgacttnnggaatgtctccccccncgaggcagccaaagaagaaacagatggacggtatgtgatgggtcacacaaacctgtcgcttgttgggagcaagagcagctttctgtctggaacattaataatgatctaaancggcctatttaatatgtnacaaggcacttgagtatggttgcatgtccaaatataaatgtttttaaattaacgggggcatttgtttataaaagtttaaccataataatagaatttttaaaacacgcttgtcctcctccaatattagcatatttttccaaaaaaaataaagctcgagtattnggtctgtgttcacagagagagactgaggcanacttgtaaatatgtgtctgtgacagcccgtgctagaaagctctttcaggaaatagtagtgtagtagnagctt

SEQ ID NO: 526896 - DNA, 325 bp, Homo sapiens
ctggacaaggttttggatcggttcacccctggcaccatcttaagtggatgcactgaagaagatgttgtgggatcaggggggctttgcccggggccctctaggctgctttctcccactggtaggggcacttaatggactgtcagcccaggacaactgggccaaactacagcgggattatcctggagcccttatcaccaactactatctatggcctgctgtcagttagccaacttttacctggtccccttgtattacaggttgtccgttgtccaatgttgtgctgttatctggaactcctacctggcctggaaagcacatgggtttt

SEQ ID NO: 526897 - DNA, 574 bp, Homo sapiens
  misc_feature (439)..(439): n is a, c, g, or t
  misc_feature (566)..(566): n is a, c, g, or t
  misc_feature (570)..(570): n is a, c, g, or t
aaaatgcacgcccaaagcaatttacagatcagtgctattcctgtgaaatcaacagtgtcactctacaccgaattataaaaagctatttcaaaatttatatggaaccaaaaaagagcctgaacagccaaagcaatcgtaagcaaaatgagcaaagctgcaggtatcacactaccttacttaaaactatactataaacccatacaaacaaaaatcgtttgattctggcacaaaaacagatgcacagaccaattagaatagaatagaaaaatcagaaataaagctccacacctacaaccatctaatctgtgacaaagtcaataagaataaacaatgaggaaagaactcccaattcaataaatggtgctggaataactagctgtcatatgcagaagattgaagctggacacctactttttaacataggcaaaaattaactcanaatggattaaaaatttaaatgtaagacctcaaactctaaaagtactggaaatcaacctaggaaatactcttctcaacatcagcctttgcaagaaatttgtgctaagtcccccgcaattacaacaganacanaata

SEQ ID NO: 526898 - DNA, 122 bp, Homo sapiens
gatgttcaggcattgtagtttcgtgcactcatcatttgtgagctacttctcagatgtatggttttgcagggattcagaaagctgtagtggctgggacggtggctcatggctgaatcccagca

SEQ ID NO: 526899 - DNA, 422 bp, Homo sapiens
  misc_feature (7)..(7): n is a, c, g, or t
  misc_feature (46)..(46): n is a, c, g, or t
accgccntttacaactatcttatttcctatcttaaaagtagcaatntaactttcacttcatgatacagggacatcatcatgattaattatcttgcacgaagcatacagagataaaagacacagtccatgcacttacgggtatggtctaagagagacagaacagtaaacaggattggggactatggaagctcaaatgataaatccttatataagtgacatctgagcttagccaggaaaggacacagcatacacaaagatgtgtacaggtatgggagtagaagagggttgtgtctgtgcacaactgcctcctgtgtgtgtgtgtgtgtgtgtgacagagagagagagagaagcatatttaaataactgaacagtttagtatgactagagcaacaagagatagttgtaaatggcggggcaccgag

SEQ ID NO: 526900 - DNA, 1120 bp, Homo sapiens
agccggatgccccgctggtggaagtgggctgacgcgaggtggtgctgcagtggacatgccccgcacctgtgtgagtgcccgagtgggtgctgcccgtgtgagtggatgtgtgtgcttgcaacactggctgtgctgatgctgcgctgctggcaacctggcagaactgccctgccatttgtatgcccctgtgaccccctgctgtcccttacccttgccctgactggctgcatctgtgctcctgtgccctgctggctgtactgtgacccaggatgccggatggacctggggttgggctcgctgctcttctgtacaccagtgatgaaaagttcctgggggtgccccctttggactggttagtggttgccctgggcgaatggtgaatgccgggacggtggaccgggtataggcgaacagcgcgctgacgtggttgccttgagcagatgtagagacgccctgggaacctggtaagagaagggtacgagatagggcaggcatggagttaccacaccggggccccgggtaccagcgcacgggttcgcaccaactttgggttggaggccggaagccccaaaaggcatacaacctccctctaccagacgctcgagatcccattcttggcatcacagcggacacccggaagacggggtattcatttcccaagggtggaaaacccttcccgtgtgtgccaactccttcggacggaggaacttccatgccgggcagatcggcccacgcgtcccgcaccagccagaggacatgtactggcgcaagcacgcgcactgggtgcaagcagcccatgagctagccggcccagtcgagatgcaccgttcgagccactgagcgaaaccccggagccgatgggacaggaccgtaccccggaagtgcccttcccaccggggcgcctcgccgtggaccctgggcggaccagaaagacggccaggacgaggagcgaccgcggcaacaccgaacgacccgaccctccgcgccgcgagaaacccagtcaacagaatggcaccccaaaaggcgaccgacgccgaccccgcgcgagcacgccagggagaacgaaccgcacggcccgcgcacgaaagcggtccggacgagccgtgcacgacgcacaccg

SEQ ID NO: 526901 - DNA, 1828 bp, Homo sapiens
agaacgtgtatcccttggtctggacccaggtagtttcttaatatgtcgatttatgtaagatggagcaaccgacatgaatgcgacaagagagcatatggagaattgtagcaagtagggatatctcaagagactgatgcttgagcaaggacattaaatcgtgaagcctgattgttcggaacgagacaatgccagagtgcatctcttcactcacaactctttatcctcaaagtgtatgtctagggctgctggagatagccatgaacgtacgaagtacttactggatagacaggttgtaactacgaatttctgaagaggaggctcttagctccttatcgataatgagcttggagcgaatcgatgaggtattggagaggtagttgtgctattgaagagcaagatggaagtagaatcgtaacaatctattgcgcttgcgctttggacacatcgataagaattcggtaatatgggaagtcttattccaatcaatcatacttctacataccaacgtcattcgtcgattagaaaccctagtaaagacacgaacgagacctcgcacgtacacaacttgagaatggctccaagtcatgggattttccctcatatggcatctgggttaaaaataaggcgtctcgaagtccagggccgaaaatgacacggtaatttggcattagggcaaaattagggagcacatttctcgatggaaactaagctagtgtgatgaataatatgtatacaaggcagagtcacactgagggaatgattataacattaacttaattattatatacttagagttaactcgtgagaatacgggccaaaactaagaggttatggaattcgtggcacgttttaacatggtgaaggtttccaattcttccaaaaaaaatttaaaagagctttttaggaaaattaaagtgggcggccaaaatttttccattggtttaagttggcgccttttaaaaggttccccaaagacaaaaggggttacacaacctctttggagacacgaacttgcggcaggggggcaatcctcttataggtgtttaaagcaaaaacaacccccagaaacgcaagtagaaccgacgaaaagaaaaactttccccccccaagaaaaagttaatttactttgcgacacacatggggacatctgcgggcgcaaacaggcgccagacccaacggcgtgccatcgagcgctcacagagaggggcgcgctgtgcccacagacatggtgttccgcacaaggtgattgttggacgacagagctgcggtgcgcaacccccacaccaagcaagcgggggccggtacacatatggcgcacactacggcggggtacaacgagaaaacacgggggagagcgactaggcgtataacaaaaccgcttggtgctcggtgcaccaccagcagtgaggagaacaccatgtaaataaaacaccccgaggagcgggggtacaccccactaacccactcagaagccggggcgcagtagtgacacgccagtggttcataggagcagaaaacaaaacaccgcgcggcggaacagaagacagtgtcaaacggactcgacagcgccaacacgagtcgacaagcgaaagaccgaccacgcagaggacgcaagcacaacgagagagagcggcgcggaggagacaagaagagcagaggagaggagcacaagcactgaaagacagaagacggagatggagagagagcggagcgaggagagaaggatgaggaacagagagcgaacgacgagaggaccaacaaaactgacagagaccgaaggcactcaagcagcatgacagccaaggccacggacagagacggagaagag

SEQ ID NO: 526902 - DNA, 416 bp, Homo sapiens
  misc_feature (339)..(339): n is a, c, g, or t
cacgaggggagcgcgaccccgcgctggtcgagctggaggtgcgtcgcggactggtcaccgtcgacggcgcccgccggtacggggtcgtgatcggcgacgagtcggccaccgcggcgctgcgcaccgagatgcgcgccgcccggcccgccgagctgccggtcttcgacatgggcccgcccatggagacgatcctcgccaactgcgaggccgagacgggcctgcccgccccgaagcgaccggtgtggacctgaccggcgagccgccccgcgagtcggggcctcgtcgcgtgcgagtcggggcgaccgtgagcaggggtgcgcggtgaccgggccgcacggngcctcgttctccgggcgggtcggatggggcgatcgggcggggctgctcgtcgtcgacctcgtccgggcctacaccga

SEQ ID NO: 526903 - DNA, 952 bp, Homo sapiens
  misc_feature (442)..(442): n is a, c, g, or t
ggtagagagatgcgtgtatgtagctggcatgattacagattgggcaaattgggggcagaaatagatgatagaaagcctagactcactcgaattgttagcagatttgtacttgcgttgtcaaaaggaagcccttgcagagaaggagcataaagttggcaaggagtacataagcgcaagctagcctatggagtttccctggtgcgctaatagaagctcaggtcccggatccagagcctgccagagttatctcgatttgcccaatgtcactggtcagccacgtgcacctggcctttgcgggagacatctacagtgaaggattgatggatcagacctctttccaggtcccaggactttgcgagagatggacgacaggttaggtggattagtcctgataggtgtatatttagggtcatatggtcgagaaccgaagatcgattaacanaaagggacaacgaggtaatttagtaagaatgtgtgtagacagtgtttggtcgggggaacgtattcttattggggtagagttaagcatggactttaactttgtgaaccaaaatgttgcatgacttgtggtggtggtagttacatagaggctccaccaaaggtaagtggatttagttgttcaaacaagactctggttgcggtcaactgtttactttggggattccaaagggcctttggtgaagaaaatcctcggtggaacgggagatcctcctcacaagagggtattttatcaacctgggtggtgcgtgctttaaatttcatctgtgcaggccattttaaaatacaccggggtttacaccatgtgtccaattcacccgaaagggcggagagacacccataattaggcgagctgcggttggaagaaccttgtcttacgggggacaacgttgaggaacatctgatcatgtgtctcacggggaaatcacatgtggcacgcacgttgatagtttta

SEQ ID NO: 526904 - DNA, 271 bp, Homo sapiens
ttgagagacggagggggggatctactccccttgatactgaggcaggaacttggtcacgtctctcagcatcccgaccagcccaaggtcttccgctgagcctactgagatccagacagatgggaacgtggtcatcgcctgcctggtccaagggcttcttcccccatgagccactcagtgtgacctggagcgaaagcggacagggcgtgaccgccagaaacttaccacacagccagttatgcctccggggacctgtacaccacgagcagccagc

SEQ ID NO: 526905 - DNA, 274 bp, Homo sapiens
cgcgcgcatgcctcacgcttataatcccagcactttgggaggccaagggaggtggatcacctgaggtcagcgagtcaagaccagcctggacaacatggcaaaaccccgtctctactaaaaatacaaaaattaaccaggtgcgtagtgtgggcgctacttgggagggtgcaggcaggcgcatccagcccgggaggcagtgtgtggcaagtgcagcctgagcaccgtgcctaatgtactcccaccttggcgcaacaagagcgcaaactgctgtagt

SEQ ID NO: 526906 - DNA, 248 bp, Homo sapiens
aggctgagcaataccgtgcggacatgatcatcctacccgagaatggtgggcagcatggttgggcgtctacaacggcaagaccttcaaccaggttggacgatcaagccccgagaatgatcgcgctactaccggtggcgagttctccatcacactacaagcccgataaagcatggccgggcccggcattcggggccacccacttcctcccggtttcatcccttctcaagttatggctcagcggcgggtac

SEQ ID NO: 526907 - DNA, 465 bp, Homo sapiens
  misc_feature (66)..(66): n is a, c, g, or t
ccacccaacactggcagagatcctatgtttggagaagccagtgtggttcaacaaatgtaagttctncattctggctcctgtaattgctgagctatgtgatcctggatatgacacttaatcttgctatacttcgaatttcttacctataaaatgggaaatagctacttaatatggcttcagtgagatcatgtaaaatgattaagataatgtctgtcatatagtgcttaataaatgttggccatgattatcatcttttcatgatccctgtgaagtcagcattgtttaccccatttttagaagagcaaatggacgttatgagagtttttctttcctatgaccattactctgttcccaggaatgttttcaaattgcctgatctaatctgttgtactttaaaaccaactggctcctctcatgttataaatgtttattagtctgattaaataaatttacatttaaaaacga

SEQ ID NO: 526908 - DNA, 892 bp, Homo sapiens
gtgttagtctgtatattcaagataaagaaggcttgtcagctttggatcttgtaatgaaggatagaccaactcatgtaatattcaagaatactgatcctacagatgtctatacttgcgggcgatgaatacaaagttttaccctgggtcatgggaagccagaatagcaacacatcatgccatagtaggtggatctgtatctccaggagtgtggatttgatagtcaaagacaggtgagtgctttgctaaatttacacatccggtgttgctgtctcagtaaagggcaggtttactaccgtgtggtcatggttcctggaagggcgataaggacatggtagatgaaccagacatgcttggtccctcggcttgtgccaaggactgaatggtcataatggttcccaagtggcagctgcgtgatggatcatactgtgtatgaactggaagatggatgtgtttatacgatgtggtgctacacatttttcatacaagttaggaattattaccgaccggcttgccagattgtaatgtacccagacagagtacaggctaaaatatctgaagggaaggaaatcataggggtagcagaaggcagggtttcataagtactatggagtagagaagtgcttaccctatgggactaaactggtggacaactgggttgtttggcgagaatcccaaggccggcagcagtgtgtactggcccctcgatcaggtctctggcgtaccagtaaaaaacttgggctgactgttggttgcccaaggatgggtcagctggttcccaagggggattcctacctggcaaagtggaaagaagccctaacgtgtctcaaatttggctcggcctaacgagaaccattttaaacagggcacagccgccaccagacatcacacctac

SEQ ID NO: 526909 - DNA, 246 bp, Homo sapiens
ggcccgcttattaccaggtgcagtcagtggtggtaagtcattcatactcttgtacagccatcaccaccatctgtctccagaacccttcatctgtaaaactgaaactctatacccattaaacactgcctccccatctcccctccctgaagcccctggcaaccaccattctactttctgtctccaaatttccccttctaataaggacatcagtcatattagattagagcacactgggttaagtaagca

SEQ ID NO: 526910 - DNA, 104 bp, Homo sapiens
cacgtctatatctgatcactgctttatcagttgcccatctttcttcttgggcagtcatcgtagcctttcttttataaaacacatgatccctagtactcatcttt

SEQ ID NO: 526911 - DNA, 121 bp, Homo sapiens
cattgcaaccgggccataagccatatcgttaagcacgccaaagctttttcccttcgctgtgtgtttcctcgcaactttaactccggccactcactaagccaaggcgtgaggagagagacta

SEQ ID NO: 526912 - DNA, 135 bp, Homo sapiens
  misc_feature (3)..(3): n is a, c, g, or t
  misc_feature (24)..(24): n is a, c, g, or t
  misc_feature (40)..(40): n is a, c, g, or t
  misc_feature (100)..(100): n is a, c, g, or t
ttnctactcccgatgaatcctgangaggcacggaatgatntcctgaagagacaaaagacggggaagattcggcaaacttgcaggaaggaaattaggcaangcttcttgcggtgtttttgggttcctgatgattct

SEQ ID NO: 526913 - DNA, 136 bp, Homo sapiens
  misc_feature (97)..(97): n is a, c, g, or t
  misc_feature (133)..(133): n is a, c, g, or t
tcagcaggaccagtagctggatacgtgtcagctggagcagctgttgtcggattctgggcagagaccagaaagatggaaactcccaagagtaccaggnctgctaagaacttcatggtggtgacctgaagatcanggg

SEQ ID NO: 526914 - DNA, 2185 bp, Homo sapiens
  misc_feature (1629)..(1629): n is a, c, g, or t
tcagaactcattcgccaccagattacacatactggagagaaaccttatgaatgcatgaatgtgggaaggcatttcgccgtttctcacaccttactcgacatcagagcatccatacaaccaaaaccctataaatgtaatgagtgtgggaaagcttttaatcagagctcagtccttattttacatcagaggattcatactggagagaaaccctatccctgtgatcaatgtagcaaaaccttcagtaggctttcagatcttattaatcatcaacgaattcacactggagagaagccttacccatgtaatcagtgcaataaaatgtttagtcgaggatgagatcttgttaaacatcacagaattcatacaggtgagaaaccctatgaatgtgatgactgtgggaaaacctttagtcagagctccaaccttattcttcatcagagaatccacactggagagaaaccttatgcatgtagtgattgtactaaaagctttagtcgccgttcagatcttgttaagcatcaaagaatacacactggagagaaaccatatgcatgtaatcagtgtgataaaagttttagtcaaagctcagacctcactaaacatcagagagtacactctggtgaaaagccttatcattgcaatagttgtgagaaagccttcagtcagagttctgaccttattcttcatcagagaattcacactggagaaaaactattatctgtgcacacagtgcagcaaaagtttcagtcagatctcagacctcattaaacaccagagaatccacactggggaaaaaccatataaatgcagtgagtgcaggaaggctttcagtcagtgctcagctcttaccctacaccagagaatccacactgggaagaaaccaaatccatgtgatgagtgtggcaaaagctttagtcggcgttctgatctcattaaccatcaaaaaatacacactggtgaaaagccgtataagtgtgatgcatgtgggaaagccttcagcacatgtactgatcttattgaacaccagaaaacccatgctgaggagaaaccctaccagtgtgttcagtgcagcagaagttgtagccaactctctgaacttactattcatgaggaagtccattgtggagaagacagtcaaaatgtgatgaatgtgagaaaacctttagtgtgtacaccaactctattcagtaccagagacactgtaccagaaaaaaatctaatgaatgctgttgattattgatgagtatgaaaaaggttttaatcagtgttcaactcttatgctacattaaaaccgcactggatccggatacgtgtggtggctcacgcctgtaatcccaacactttgggaggcagatgtggaagcatcatttgagcccaggagtttgaggctgcagtgagctatgattccaccattgcactccagtctgggcaacagagcaagaccctgtctatttaaaaaaaaaaaaaaaccaccaataccacatgggagaaaacattaattcagtttttgtaatgaaaggttaactcagagctcagacattactaaaattaagaaaaattctccagcctgaccaacatggtgaaaccctgtctctaccaaaaaataaaaaataattagctgggcatggnggcaggcgcctgtagtcccagctattcgggaggctgaggcatgagaatcacttgaacctgggaggtgggggttgcagggagccgagatctgccactgcattccagcctgggcaacagagtgagactctctcaaaaaaaaaaaaaaaaaaggaaaaagaaaaactctggagggaagagtcctggcggatgttggtggggaaacactttcaaggtggaaaaactttttactggattggtcaggtttaccacattagaaacaattttctatcttttctataagggtgggaaaagctctagtcttatgcaggacataacctacgggaagagagtggtatatatggtcaagagatctaagggcagaactttaatcaggatttggtaacacactcaggggggggaggtatttacagtcaaaaagttcggaaggaacaggtattactcgataataaattgcaaccctttaaaaaaagccttaatttaacccaattggcttattcaaatttgttggacacaatgtagcggaacaatttatttccccctcaataatcttaattgg

SEQ ID NO: 526915 - DNA, 423 bp, Homo sapiens
caacccagactgtggttcttactcttcccagggttctgcatgtatgcccagtgaacccagggctgcgtgcaaaggaggctcaggatgtgtcaccagaaaaactcgcgtatgagagcctggagtatccttccatttctcagccaaatactcatcttttgagactgaaatcacactggcgggaatagaagatagtgccagacttctcttatgggcacctagccgccttcaccttcttacctctacccctaagcaggaatagggtgtcctccctatctttcaaagcactatgctatgcatttaataatattcatttaagagtccttcatagagctcagtcaggaaggggatggggcatcaagccaagcccccagcattgagagcggccaggccacagctgctgctcccgtagtcctcaggctgtaa

SEQ ID NO: 526916 - DNA, 2403 bp, Homo sapiens
  misc_feature (260)..(260): n is a, c, g, or t
  misc_feature (1847)..(1847): n is a, c, g, or t
aggagaaaaaccctatcaatgccgtcattgtagtaaaagttttagccagcgctcagatctggttaaacatcagagaatccatactggagagaagccttatacttgtaaccagtgtaacaaacattttagagttctgatgtgataaaacatcaaagaatccacactggggagaaaccatataaatgtgatgtgtgtgggaaagccttcagtcagagctcagatcttattctgcatcagagaatccatactggggagaaacnatatccatgtaatcagtgtagcaaaagtttcagtcagaattcagaccttattaaacatcgaagatccacactggagagaaaccctataaatgtaatgagtgtgggaaagcttttaatcagagctcagtccttattttacatcagaggattcatactggagagaaaccctatccctgtgatcaatgtagcaaaaccttcagtaggctttcagatcttattaatcatcaacgaattcacactggagagaagccttacccatgtaatcagtgcaataaaatgtttagtcgaggatgagatcttgttaaacatcacagaattcatacaggtgagaaaccctatgaatgtgatgactgtgggaaaacctttagtcagagctccaaccttattcttcatcagagaatccacactggagagaaaccttatgcatgtagtgattgtactaaaagctttagtcgccgttcagatcttgttaagcatcaaagaatacacactggagagaaaccatatgcatgtaatcagtgtgataaaagttttagtcaaagctcagacctcactaaacatcagagagtacactctggtgaaaagccttatcattgcaatagttgtgagaaagccttcagtcagagttctgaccttattcttcatcagagaattcacactggagaaaaactattatctgtgcacacagtgcagcaaaagtttcagtcagatctcagacctcattaaacaccagagaatccacactggggaaaaaccatataaatgcagtgagtgcaggaaggctttcagtcagtgctcagctcttaccctacaccagagaatccacactgggaagaaaccaaatccatgtgatgagtgtggcaaaagctttagtcggcgttctgatctcattaaccatcaaaaaatacacactggtgaaaagccgtataagtgtgatgcatgtgggaaagccttcagcacatgtactgatcttattgaacaccagaaaacccatgctgaggagaaaccctaccagtgtgttcagtgcagcagaagttgtagccaactctctgaacttactattcatgaggaagtccattgtggagaagacagtcaaaatgtgatgaatgtgagaaaacctttagtgtgtacaccaactctattcagtaccagagacactgtaccagaaaaaaatctaatgaatgctgttgattattgatgagtatgaaaaaggttttaatcagtgttcaactcttatgctacattaaaaccgcactggatccggatacgtgtggtggctcacgcctgtaatcccaacactttgggaggcagatgtggaagcatcatttgagcccaggagtttgaggctgcagtgagctatgattccaccattgcactccagtctgggcaacagagcaagaccctgtctatttaaaaaaaaaaaaaaaccaccaataccacatgggagaaaacattaattcagtttttgtaatgaaaggttaactcagagctcagacattactaaaattaagaaaaattctccagcctgaccaacatggtgaaaccctgtctctaccaaaaaataaaaaataattagctgggcatggnggcaggcgcctgtagtcccagctattcgggaggctgaggcatgagaatcacttgaacctgggaggtgggggttgcagggagccgagatctgccactgcattccagcctgggcaacagagtgagactctctcaaaaaaaaaaaaaaaaaaggaaaaagaaaaactctggagggaagagtcctggcggatgttggtggggaaacactttcaaggtggaaaaactttttactggattggtcaggtttaccacattagaaacaattttctatcttttctataagggtgggaaaagctctagtcttatgcaggacataacctacgggaagagagtggtatatatggtcaagagatctaagggcagaactttaatcaggatttggtaacacactcaggggggggaggtatttacagtcaaaaagttcggaaggaacaggtattactcgataataaattgcaaccctttaaaaaaagccttaatttaacccaattggcttattcaaatttgttggacacaatgtagcggaacaatttatttccccctcaataatcttaattgg

SEQ ID NO: 526917 - DNA, 403 bp, Homo sapiens
acggagagcatctacagataggagaggtaagatagtacagagcaacatactaaggccaaatacctgatcggaactaacataagtacggactatagacatgatgcacttacctccttctcaaattgcagaaggagctttatgcttagcactgcaaattctggatactggtgaatggacaccaactctacaacattacctgtcatatactgacgaatctcttctaccagttatgcagcaactggctaagcatgtagtcatggtaacatcaaggacttaccacgcacatgactgtcaagaacaagtatgccacatcgaagcctgctaagatcagcactctaccacagctgaatactgcactagttcacgatttagccaaggctgtggcaaaggtgtaacttgtaaa

SEQ ID NO: 526918 - DNA, 678 bp, Homo sapiens
  misc_feature (56)..(56): n is a, c, g, or t
  misc_feature (77)..(77): n is a, c, g, or t
  misc_feature (82)..(82): n is a, c, g, or t
  misc_feature (87)..(87): n is a, c, g, or t
  misc_feature (91)..(91): n is a, c, g, or t
  misc_feature (93)..(93): n is a, c, g, or t
  misc_feature (95)..(95): n is a, c, g, or t
  misc_feature (103)..(103): n is a, c, g, or t
  misc_feature (105)..(105): n is a, c, g, or t
  misc_feature (117)..(117): n is a, c, g, or t
  misc_feature (120)..(120): n is a, c, g, or t
  misc_feature (123)..(123): n is a, c, g, or t
  misc_feature (153)..(153): n is a, c, g, or t
  misc_feature (159)..(159): n is a, c, g, or t
  misc_feature (165)..(165): n is a, c, g, or t
  misc_feature (181)..(181): n is a, c, g, or t
  misc_feature (195)..(195): n is a, c, g, or t
  misc_feature (197)..(197): n is a, c, g, or t
  misc_feature (202)..(202): n is a, c, g, or t
  misc_feature (204)..(204): n is a, c, g, or t
  misc_feature (207)..(207): n is a, c, g, or t
  misc_feature (212)..(212): n is a, c, g, or t
  misc_feature (214)..(214): n is a, c, g, or t
  misc_feature (216)..(216): n is a, c, g, or t
  misc_feature (223)..(223): n is a, c, g, or t
  misc_feature (231)..(231): n is a, c, g, or t
  misc_feature (234)..(235): n is a, c, g, or t
  misc_feature (266)..(266): n is a, c, g, or t
  misc_feature (280)..(284): n is a, c, g, or t
  misc_feature (321)..(321): n is a, c, g, or t
  misc_feature (328)..(328): n is a, c, g, or t
  misc_feature (334)..(334): n is a, c, g, or t
  misc_feature (344)..(344): n is a, c, g, or t
  misc_feature (358)..(358): n is a, c, g, or t
  misc_feature (394)..(394): n is a, c, g, or t
  misc_feature (448)..(448): n is a, c, g, or t
  misc_feature (519)..(519): n is a, c, g, or t
  misc_feature (583)..(584): n is a, c, g, or t
  misc_feature (587)..(587): n is a, c, g, or t
  misc_feature (593)..(593): n is a, c, g, or t
  misc_feature (647)..(647): n is a, c, g, or t
acgacagacaaagggagactctcggcctcaggcccccaggctcggccctccccggntcctcctagagcccgcccggncctgnccggnccgngngntcactggngnacttcttgacgnggntgnccttcttgaggggggggggggtcagcttgnagtggnagttgncctcccagaactcggnaaaccagatgttgngncgggngntgnccagngngngggtggngaagtagnggnngaagcctggcagggaaccaggacgtcagggnctcactggccttcnnnnncaccagccccagccctccccgcctcccccaggataanatatggnccaggnggagggaganagaccaggaggagnacatcctctgatccaggagaaaacaaaatgtggagnatttcgtttctttcaaaatgaaaagagctgtattaggtcccagggggatcgtgngtaatctacaactgctgcctttatggaagagaagcacaccgatgaggatgtttccacggcctttaaccgcnggaatgctaacagcgggctttgagaaggagccgcctgggagtcctgagattacagcacagaggnnggngggggngcccaacccggggagcacctgaagaggagaccaggccagacaaggagggagggnaccacccagatcacacagcaagaccaggacc

SEQ ID NO: 526919 - DNA, 241 bp, Homo sapiens
tgcccagtatactaagtggaaatagatggggtataggaataaacaacaaaggcacaggctagaaggaatggctatcgggataaaaagaatccagactctaggacagcttataccctgatgtacacctgcatacatttctttcccttcaccccacgaggtggtacgtccagaaaggtctgcatatcacagatgagctcaccgggctcactacacgattacgcgctgagatgcagcaacaaga

SEQ ID NO: 526920 - DNA, 320 bp, Homo sapiens
  misc_feature (58)..(58): n is a, c, g, or t
tggggaaacatagctttattttttttgcccctctgccccacaactttctgtaggattncacatgggggtgttggacatggagacaaagctaagcactgggaaccataggttctaaaaatcccaacctttccattgaccactaaggcattatttattgtctggtgccttgcagttggcaagccgactcctctttccttcagtctgagctttctcctggaggtttctaagttcttcatgcaaataggcttctggcagatgtcctctcagacatatctgttcaaaactcagagtgttcaagctgggaccttgtttcacgtcat

SEQ ID NO: 526921 - DNA, 108 bp, Homo sapiens
ctagcgatcccttacccggttctgggtagctgggactatacatacctgcacaccatgaccagctaatttattttatttattttatttttgagacaggtctcgcttttt

SEQ ID NO: 526922 - DNA, 82 bp, Homo sapiens
gatcagttgttttcacctggaagcatttgtgtctactttgatatgactgtttttcggacagtttatttgttgaggagtgtga

SEQ ID NO: 526923 - DNA, 853 bp, Homo sapiens
aggctcattgaggcatagcagcatactattggagggggagcaggcagtgctgtgtctgctggctcccatgccctgttctgacctcagccttggaactcctcaagaacctgaagattccagtggtcagtgtcggtggggggtgggaggagagagcggcagagaagctctgagagccccttcccccacgaacaaagtctagctctagatcgtgtatagtttaggcaaaactttgtacgtcttctttcccttttatgatggattttgagtaaaaggtacaaaacagggtttttcttgttttatcacctttgaattgtggaaagtttagtgagcacccaatgctcttctagtacctagtttaaacgtccaccaaggggacctgcagcgtcctagagacatgacgcatcaaggcctcgtgaatttgtaacactgcggaaatgtggcactctagcttcctccggtcctacctgcccaaggcacgacgaggcattgctccagggctgctgggtagttatacacgtacccttctataggcatggagtaggcaactgacatcacaggcttcataacacccaccagcggcaagcttcccctgactactacatgcagtctgcgactagtacatcagtgagaatacctgtgttaccaagaatcagcgaccacctgaaactagaaagatagcagaaacgacaaacaaaacaagacatacacacagcagcgaagggggacccaccaacaggggaggaactagacaatacaccggacataccgcacgacacaagcacgcccaacacaacgaaccgaaaagccaagacacacacaagcaaacgaaaaacaagaaacaaccacaaccaaa

SEQ ID NO: 526924 - DNA, 238 bp, Homo sapiens
gaaaacagagcctcctagatgtaacattcctgatcaaggtacacttctttaaattcactaatgattgaggtccatatttagtggtactctgacattggtcactttctattacacgagtgctaaacctaaaaagcattttgaacatacagatgtctattgcatagggaattttcttctcacccagtgaggtagaagagtatatctggtagcaatacttcaaccctttcctactgtatgg

SEQ ID NO: 526925 - DNA, 463 bp, Homo sapiens
tgtactttagaaatgtcagtcgctgcattcctaaactgtttatttgcactatgagcctatagactatcagttcccttggggcggattgttgtttaacttgtaaatgaaaaaattctcttaaaccacagcactgtggagtgaaacattgaactcatatctgtaagaaataaagagaagatatattagttttttaaggggtattttaatttttatataggcgggaaagaagagaggtgatggaatattgttaattacacccccggggtgtagaaaaagtgggaagcagtcaatttccacatcaaaggacgccatctaggaagttttggtccggcccggaaatattttaggaggggttcaggaaaggtgaccggattttcccaactgttcaaaattttaccagggaatttttggccggcggtcccttttaaaaggcaaatccattaattccccaaaattttaaaaa

SEQ ID NO: 526926 - DNA, 1194 bp, Homo sapiens
gcctttccaagggagtggttgtgtgatcgccatcttagggaatgttctcgtccgtggcgcacctggcgcggggcgaaccccttacaatcacggccatatctgcagctggtgcacgatggtctcggggaccgtccagcagcagcgtccccagggcccacggcgccatgcccgaccgacctcgcaatctgagcagccgctcgtcggtggaacgagtacatgattgtgaattttggctccgcgaagtattatgcactgtgtggctttggtgaggtcttaagtcgtggatcttgactacaaactgctgtggttcccctgcgatatgacgctgaaatgccagtatgctaggtggagcccctatgagagtacacagggcatatgtaaccggtattctcagttcatacttaccatgacggatggtgtaccgtggtctatgggtatctggactggggctcacgagctgtcgccttgggctaactctccatgcacgaggactctgcaaagttttcggctttgctatggagagtcttttacaacgggctgtgctcataggcaattattcgccgtgtgccaccacggagaagtcactgtaatctgtggcctgcggcatgaactagtatgtcggcctagtccttctggtcaggtggatcgaaatgtctcatgggtagagcatgtgttgcccgtggggtacctaattgggaaggctagcataacggtttcggaattatcagaacccctaaagcagggtaattgcccaaccatttttagaagcgcgagtagcaggcctcctcaatagtttgtggtcataaacgggatagcaaagggtctgtggcaaggcgatttctaactaagtggggggtcatggattctcggtctccgtgcgattgatgaacgacgatatccaataacaccgcaatgatagacacgttgtcggcgtgactcttggatcatccgttacttggtcttagaaagggcagactgggtgccaaacgtatatgctgctttcccttaccagggcgccgcgagaggcaattggattcgagtatggcaaggaaggcaacactgagctgtggatcgcattttgcgcaaggcagctgttaccatatggcctgggaggccctttggggttgccaacacgtcttgtccaccccatggctgagactcaaggggcatcttcagctggggactcatggagac

SEQ ID NO: 526927 - DNA, 167 bp, Homo sapiens
ataattttatatttttatgggcttgggtgagggaggtaggtggtagtttgtgtataatatttaaagatccttttcaaagttgtagtattaaaacaaaaattacagagacaattcgggtaaaatccagtgctttctctagtacgaaacctataagacaaagggaaaca

SEQ ID NO: 526928 - DNA, 137 bp, Homo sapiens
agcgcgacatctagaggatccctagcttttggcacttcctgggactacgcccctttgacagatggagattgggcagcagggccttgttgaattgttatctgctgttccgacttggttttcattagtccaaaggcagg

SEQ ID NO: 526929 - DNA, 168 bp, Homo sapiens
cattggctcatgcctggaatcgcagcactttgggaggctgacatgggagggtcacgagctcagatgttcgagacccgcctgggcaacatagtgagaccctgtctcaaaataaataaataaataaaaataaagaagcaactcttttagcattataagatagggcagagg

SEQ ID NO: 526930 - DNA, 137 bp, Homo sapiens
tcagtgatctcggagcaagcggaggatcatagagctcaggatccagacagctgtgcacacagcagagacctgtctaaacaaaaatagtatagttggtgtggcagcatgccttggtctagccactcagagactgggcg

SEQ ID NO: 526931 - DNA, 329 bp, Homo sapiens
  misc_feature (194)..(194): n is a, c, g, or t
  misc_feature (214)..(214): n is a, c, g, or t
  misc_feature (261)..(261): n is a, c, g, or t
  misc_feature (270)..(270): n is a, c, g, or t
  misc_feature (292)..(292): n is a, c, g, or t
  misc_feature (321)..(321): n is a, c, g, or t
aggtagagtgtagagattagacaatagtaaaagatattatataagtgtcgctattagagatggtttggggataatgttggagaggagtgtagggaggcccctccccccattccaggccccctccacatccgggttggcctccctccaggactccacccgggctcccggacgccagttgggggtcagaccccacnggggcaaccttgcagaggangacccggggtactgccttgggagtttcaagtcggtatgtaaatcagntttcccctntcacccctcccacccattaatntcctcccaaaaaaacaagtaaagttattntcaatcca

SEQ ID NO: 526932 - DNA, 172 bp, Homo sapiens
ggaaagctagcagggcaacgtcagaagccgaatacctggtctaggggcaccaacgtacaagggggccacatcgatgatgggcaggcgggaggtcttggtggtttatgtatatcaatacactagtcttgccccaaggctaccaggagtgactacgtgcagccatctgacagtg

SEQ ID NO: 526933 - DNA, 200 bp, Homo sapiens
tacatatgaagagagctatcttcaccaacaggactatatggtcgagcccgagctcttgcgcggcccgtccaggtctgatctggcagtcagtgacttgcattcccagatgctgacagtgtccacataaccaggtgcatgatgaggatctccagtcttcttctgaagatggagggcaaggatagggaaagctcagatggtac

SEQ ID NO: 526934 - DNA, 126 bp, Homo sapiens
atagaggatccttatgtagtcgctcttggcccacttctacctaatgctgttgcagcaacctgcttctggaaggagcaagtctggaacccagctcctcttcctctcctcccacctcacgttcctatt

SEQ ID NO: 526935 - DNA, 194 bp, Homo sapiens
ccggttgcagtgagccgagattgcgccactacactccagtctgggtgacagagtgagactccatctcaaaaaaaaaaaaaaaaaaatcagctcatgttactcccctgctcaaaaatttccagcagtttttactacaattaaaataaaaaaagtcagatgcagctgagtgcagtggctcacaccggggggtgggg

SEQ ID NO: 526936 - DNA, 1333 bp, Homo sapiens
caggggccctcccacagctctgacctccttgcccggagaccattgctggagcaaggtggactgtagcctgtcccagaacaagagcgccctggactgcacctcatcagacactctagacgtaccgcacggtgaaggaggagcagatctgctgacctcgagggcctgacagccggtgggacagagctcttctttcccaaaattagggagctctttgtaccatgaaaagccatgtttctgatgcttacagtctgggaatctgatgcgcatcctcgtgactccacgtcaaagcagcggtgacgggccggttcttaccgatacagcactggctggatgtgatttgcttgccacgagacagtctgcgtcatgatgccaacatgggtctgccttccaagcgcacaacctgggacgctcctacgagtcgacgaacgtgtcgtttggacacgggccgactctcggccgcccgccctttttggcctacggcccttccaattccctacagtcgtcgtctatggggcccaaaagtcccatccgtgcgcctagggctaccccaccaagggcatgctccgggtgaccccctccttagccccagcactacgtacagggtactgaccgaacaggctgcccttgcccactatagagccacggagaaggctgccactcttcaccagtgggacacagcccatccacactgctgcgtgctacaccaacagggcgcaacgcacggggacctacaccggcggcgcaaacacacgcgccctggccgaacgagacgaccccccctgggcgcaccccttcgcacactgatcccctggcccaagcgccagagacacgccctatcgcgacatcacctccccacacgccccccacaccaaactgacctgcggatcccagcaaacacaccaaccccccatggcacatgaaaaagtcacccatgcggccatacgccatatcaaacacaaaccaccccaaacgaatcagcgggccacatcggaccacgccatggaccggcgccaccaggaccccgaggcgcaaccacacacacccggccactaccccccaacgccgcccagcagccctggccatccaacctaacgggcaaacacaccctacgagcccaagtgacacctagcgactcatccccaacgcacacgcaccacgcacagcgcaccccacacgaccaggcgacagcgtcacacagaacacaccttccgtggcacgcaccaccccgtctacccacgacccccagcactcaccaggcgcaccgccacacacacagagcaccgccaccacctcagcacaaccgccgcccacacgacgaaccacccacgagcct

SEQ ID NO: 526937 - DNA, 348 bp, Homo sapiens
  misc_feature (186)..(186): n is a, c, g, or t
  misc_feature (226)..(226): n is a, c, g, or t
  misc_feature (304)..(304): n is a, c, g, or t
  misc_feature (335)..(335): n is a, c, g, or t
atttcctgtatcttctcaataatgcttagaaagccttttatgtaaagatgaaccacgaatatagaagattgaagaaatatagtaacaaatagagcaaataacctggacatagaagttcctcattggccaatggctctcttctcaactgttatcatcacgtaatcactacaattcgcaatctgcatntcacacactacactcgacacatgtgcactctcaagaggtntcctcacatgcgactcttggcgcttcttctggtgtttagactttcttacatatttaaagttatattctctactgagantctcttcgcaaaattgcaaatttgactcatnttttggtgcgtaa

SEQ ID NO: 526938 - DNA, 190 bp, Homo sapiens
ccaaggggacaatcacccgggtcaccacgtcgtctcccggtgggtcgagagtgttcacacatagacacgacaggtcatcagtggtgcgttcattgggcaagtacttgtgcattcacctcacccatagggatgtccctgtggtcataggatcccagaccattgccctggatactcgaccttacctgtctta

SEQ ID NO: 526939 - DNA, 205 bp, Homo sapiens
  misc_feature (33)..(33): n is a, c, g, or t
  misc_feature (159)..(159): n is a, c, g, or t
ggtgacagaagactccgtctaaaaaaaaaaaangttggaagatttcatttcagaggcaggattacttccagacagagtattaaagggagactttttagacgggttttggaggggggggggaaaggcttatttctggtctcttagacggaggaatttaantccggtcgtatggtgggggggaaatcagaacttttggagcagggcg

SEQ ID NO: 526940 - DNA, 804 bp, Homo sapiens
ggccgggcgcgtggctcacgcctgtaatcccagctctcagggaggctaagaggcgggaggatggttgagcccaggagttcgagacctgcctgggcaatatagcgagaccccgttctccagaaaaaggaagaaaaaaaaaccaaaaggacagacaaaaaattaggcggtaatttcccttaaagggaaaaacccctcttcccctcctttgtgggtatactttcacttaaacgaaatgggtcgggcgaaaaaaaaaaatgaaatagaacagagaagaccaaagcaccaacaatagaaaaaacaaatatgaaataaatcaaatacattaaaacaataaaatcatcgaaaaaaataagactatatacgcatcagaaagcaaaaacaaacatcggaacaacgtggtgggggggcgccccgacaaagaatatttaatcatccagaatattgcgaggggggcccgcgcgcaccgaatatcttggtaataatgccattctcatagttgccatagagaaaacacgagctgaaaacggggagcgggggtcataacgcgaaaaaaagaggggggggggcagcaggcgtgtgataataacacccctagacgagaggtgtgatgcgatcaagccgggagccctatcatcgagagagcacaagcggcgcacatataaaaaaaccgcgcggcggggcgcgagtagaacaccgacaacgcaggacatagagtcacagaaaccaagacggacacaaagaatcgacagagaggagaaggcaaaggctgagatccataacccagacaacagcgtgcaagtgcga

SEQ ID NO: 526941 - DNA, 209 bp, Homo sapiens
tctccaagtcgcaggagctgttgctcttcaggaagaaggatactagtatggtggtgtaccatttaatggccatggcacatatgtatgtgtctatcgtgctactcatgcgctcaactcctgtatctcaatattgatcacatgtcattccacggaaatggtggaggaagtgaatccagactccgctccaaccagataacagctataccttt

SEQ ID NO: 526942 - DNA, 549 bp, Homo sapiens
tactttccacaggtttactggccacggtccttggagtgtcaggctctgaatctctcaaaaggtgccgtcttgggttcctcatggctggttatctggtctataatgatttcatggataagacaaggtgggaattacataaccaggcatggcactaaaaagtgatgtgatttatgcatttatggcttgtgaactaaatagattttaagattcctacttaaacgaaaactttccatgacagtagcatacggatgagacaacacacacacacacaaaacaacagcaacaacaacagaacaacaacaaagcatgctcagtatggagacactgtcaagataaagttataccagcaaaagtgcagtagtgtcacttttttccggtcaatatatagagacttctaaatcataatcatccttttttaaaaaaaagattttcaaaaaagatggattggacacactcaccatttaatcatttccagcaaaatatatgttgggctgaaattatgtcaaagggttgtcatatagggtatgtaggcggctatagatggctatg

SEQ ID NO: 526943 - DNA, 266 bp, Homo sapiens
gctcgacaaaatttaacacccatagtaggcctatatgcagccaccaattaagaaagcgttcaagctcaacacccactacctaaaaattcccaaccttttatctgacttcttcacacccatttggaccattctatcaccctttagaggacctattgttagtataggtaccatgaaaccatcttcttcggcttaaccctggttcaatttaaacccctgactgaccatttaccagcccattatctacattcacccaccaaaaaaaaaaa

SEQ ID NO: 526944 - DNA, 701 bp, Homo sapiens
  misc_feature (195)..(195): n is a, c, g, or t
  misc_feature (200)..(200): n is a, c, g, or t
  misc_feature (204)..(204): n is a, c, g, or t
  misc_feature (210)..(210): n is a, c, g, or t
  misc_feature (220)..(220): n is a, c, g, or t
  misc_feature (225)..(225): n is a, c, g, or t
  misc_feature (228)..(228): n is a, c, g, or t
  misc_feature (235)..(235): n is a, c, g, or t
  misc_feature (238)..(238): n is a, c, g, or t
  misc_feature (245)..(245): n is a, c, g, or t
  misc_feature (247)..(247): n is a, c, g, or t
  misc_feature (249)..(250): n is a, c, g, or t
  misc_feature (258)..(259): n is a, c, g, or t
aagaagagaggcccaagatggagcggcggcggctgtagcggcgtgacaggagccccatggcacctgcccagccctcacctcagcccatcttgacaaaatctaaggctccatggagccaccacggggcccccctgccaatggggccgagccatcccgggcagtgggcaccgtcaaagtatacctgcccaacgagcnacgcncggntggtgnctgtccgggntggcntgngtgtctncgnctctctngncnnggccctgnnggtgcggggctctgaaagtcacggtactgctgtgtggtctacgcgaacgtctatcaaggcgaacgcaagagacggtcactgcctgggtactacaggccaatagcttcccctggatggacgatggagctgcactatgtcgatggatcctatgaaagatgtcccgtctgacgcatggcagcaatctctcagtagcggacagaccttgttcttgcagctctgtgccgttgctgtgacgtgtcatgcctataaaagattatctcgttctcatggctttccggttgcgcaatacctgtggcgtactagaggttccacacagctattgttcctcacaaggtccgccacaagtgctggtgttgacatgagtacgcaagcgacaactagttctaccagagtgtccgaggatttgtcctggaggctccaagaccagcatgaggctcgcttc

SEQ ID NO: 526945 - DNA, 443 bp, Homo sapiens
cttcaggaaacgagtacttctgcttttgaggggtgaaacccctttcacactgtctttgctcacgctacagcttgctacgtcatacatgcaaccagctagctctgtcgtcaccatcacaggcttggagagcttggctatttggaccccagtattttgtgttctactaaattgtattttgctagcttcaccctaccattctgactgtcgagatatatttagatcctaagcttgtctacgaagcactctcacggggtccttccagctccctgtcatcctcggatttaataactctgccacctgcgccccatccgagacatcagcagccacaaggaacagggagaaggtgctgatagagccctatggcacatctctagagacctccctctatgtttcttctacttgttaatcagctttcatttgttattcaaccaattacgaatgat

SEQ ID NO: 526946 - DNA, 851 bp, Homo sapiens
tccgaatcagaaagtgcccaggcttaatttacaatgccgacactgcagtgaaatgaacagcctccatctgggcctctcgggtacaaaaccatctttttggagtcagggcgcccagccccaggcctcccaggtcatcagtcctactgccccgaatccccgaaaagctagatgggagctggaagcagcgccatggtttgcgcaggtatcacaatggcaggcaggttctagcgtgacactgaatgtcaagaggacagtcaccaacaagcactagtctgggtacctcagagacctcgggatgagatttagggaacgccacaatcgctgggtgagtgtgtgttgcgcccacaaaaatagtaaagacattgcaggggcacatctgaggagacagagattgacacggcgatgtcaagtttacggtacaagaagggggtgtaaacaacgcataagatgtagtacaagggcgcatagaaaggaggctagaattgtagaagtggagaccctgaagaggggtatccacacattcaagatggatctccaagaagtagaatccatcacagtggccgtgaatagaaatcagagaaaaatgtccacctcaacgggtttacttggtccttgaattgtacccccaaaaaatattactgactccccaatcaacaaggggtgggactcgtgatatgaggtgttggtgttagcaccaagtgtgaaaatcgttgaaaattaagagaaagttgggcccaagggagaaaacattgaaaggtgtgtaaaggagataaataggtggggagacaatacaaatggtatgcccttcatggaaagtttagtcaaaaaaatagggcacaatcactgatagt

SEQ ID NO: 526947 - DNA, 713 bp, Homo sapiens
  misc_feature (195)..(195): n is a, c, g, or t
  misc_feature (200)..(200): n is a, c, g, or t
  misc_feature (204)..(204): n is a, c, g, or t
  misc_feature (210)..(210): n is a, c, g, or t
  misc_feature (220)..(220): n is a, c, g, or t
  misc_feature (225)..(225): n is a, c, g, or t
  misc_feature (228)..(228): n is a, c, g, or t
  misc_feature (235)..(235): n is a, c, g, or t
  misc_feature (238)..(238): n is a, c, g, or t
  misc_feature (245)..(245): n is a, c, g, or t
  misc_feature (247)..(247): n is a, c, g, or t
  misc_feature (249)..(250): n is a, c, g, or t
  misc_feature (258)..(259): n is a, c, g, or t
  misc_feature (271)..(272): n is a, c, g, or t
  misc_feature (277)..(277): n is a, c, g, or t
  misc_feature (295)..(295): n is a, c, g, or t
  misc_feature (303)..(303): n is a, c, g, or t
  misc_feature (314)..(314): n is a, c, g, or t
  misc_feature (316)..(316): n is a, c, g, or t
  misc_feature (334)..(334): n is a, c, g, or t
  misc_feature (336)..(336): n is a, c, g, or t
  misc_feature (342)..(342): n is a, c, g, or t
  misc_feature (347)..(347): n is a, c, g, or t
  misc_feature (361)..(361): n is a, c, g, or t
  misc_feature (385)..(386): n is a, c, g, or t
  misc_feature (388)..(388): n is a, c, g, or t
  misc_feature (399)..(399): n is a, c, g, or t
  misc_feature (402)..(402): n is a, c, g, or t
  misc_feature (409)..(409): n is a, c, g, or t
  misc_feature (423)..(423): n is a, c, g, or t
  misc_feature (432)..(432): n is a, c, g, or t
  misc_feature (448)..(448): n is a, c, g, or t
  misc_feature (469)..(469): n is a, c, g, or t
  misc_feature (489)..(489): n is a, c, g, or t
  misc_feature (499)..(499): n is a, c, g, or t
  misc_feature (502)..(502): n is a, c, g, or t
  misc_feature (508)..(508): n is a, c, g, or t
  misc_feature (534)..(534): n is a, c, g, or t
  misc_feature (547)..(547): n is a, c, g, or t
  misc_feature (549)..(549): n is a, c, g, or t
  misc_feature (558)..(558): n is a, c, g, or t
  misc_feature (565)..(566): n is a, c, g, or t
  misc_feature (577)..(577): n is a, c, g, or t
  misc_feature (579)..(579): n is a, c, g, or t
  misc_feature (586)..(586): n is a, c, g, or t
  misc_feature (589)..(589): n is a, c, g, or t
  misc_feature (605)..(605): n is a, c, g, or t
  misc_feature (609)..(609): n is a, c, g, or t
  misc_feature (615)..(615): n is a, c, g, or t
  misc_feature (627)..(627): n is a, c, g, or t
  misc_feature (651)..(652): n is a, c, g, or t
  misc_feature (704)..(704): n is a, c, g, or t
aagaagagaggcccaagatggagcggcggcggctgtagcggcgtgacaggagccccatggcacctgcccagccctcacctcagcccatcttgacaaaatctaaggctccatggagccaccacggggcccccctgccaatggggccgagccatcccgggcagtgggcaccgtcaaagtatacctgcccaacgagcnacgcncggntggtgnctgtccgggntggcntgngtgtctncgnctctctngncnnggccctgnnggtgcggggtcnncctcnggcctgctgtgtggtctnccgcctcntcccgggccgncngccggtccctgcctgggncnccgccnttgcncccctggctggcgnggcgctccttgtcgcggtccttgnngntgtcccgctgnccntgccccnttttgtccggccgnccttcttcngcctggcgttctgtgncttctgccttccgtttctgtnccctggcttccgttgccccncctgtggctnccngttccncccgccttgttcctccccggtccccnccgtctgtgttgncntgcgtcccncccgccnnccgttctcccncngtgtccnggntttgtccggcgctccngacngcctgnggctccctcganccgccccctgaatgagttgctagnnccccagggtcccagcccccgcacccagcactgtgacccggagcacttccccntccctgccc

SEQ ID NO: 526948 - DNA, 213 bp, Homo sapiens
  misc_feature (100)..(100): n is a, c, g, or t
  misc_feature (126)..(126): n is a, c, g, or t
gaactttcttcgtgtccttgagcagtgcccatttccctcagtattgactgtctggattttgaccttctgtatcctgccatcaagggtgacaccattcagntctacctgggggccaagttgttggantcacagggaaaggtgaccaagtggttcaattaactctgcagcttacctaacaatgcccaccctggacaacatcccgttcagcctcat

SEQ ID NO: 526949 - DNA, 288 bp, Homo sapiens
tactgacagcgcacgatggcgcgtcatctctctgggacccactgaaaatcggacgttcaactcacctggcagcactcccagagcccctggaactctggcccaaggctctctgagtgactccttcccagatcttctcggcttagcggctgaagactgacactgcccgatcgcctcggaagccccctagaccatcacagacgccgagcttccggtaactctcacagtgcaagatttaccggaacattccaggatttttacgtacacttattgacgcgccatcgtgcgctt

SEQ ID NO: 526950 - DNA, 462 bp, Homo sapiens
  misc_feature (135)..(135): n is a, c, g, or t
  misc_feature (328)..(328): n is a, c, g, or t
  misc_feature (354)..(354): n is a, c, g, or t
tccatggggagggggctcacagggcaccaagtttgggatcctaggactggcaggacctgctggagccttaaatgggccccaggggcctgaggttgcctcctcctgtccaaaaccagccttggcacctcccaaaantgccaagggccctaccatggccccacagcccccaggggtggcagttccatttaggagggtgcctttaggccccactttcaggctaggatggaaaggcagatttgggcctggcgaggtgacctgcttttggaggggcagggccgcaccccaaaacagggacaggtgcccgaacacagggtttccaggacgtagngcccccccgcaaacttgaatgtatgngggtatttattgctcacgtttgtgccatgttgtcaatgggtcctttccaacccaaaagggacatttgtttttttgtttttcctgaaaaataaagtcggccaagtgaga

SEQ ID NO: 526951 - DNA, 237 bp, Homo sapiens
  misc_feature (162)..(162): n is a, c, g, or t
  misc_feature (176)..(176): n is a, c, g, or t
atttactcagaaagacaggtttatcccatttgagtaaatgattcaatgatgtatcaaggatgaagacggtggttgaagaccagaggtcttcacatcgttttgatgattactgatgtcttgattcggtggtacacccaacgacgaggtaataacgtggtgatncgtccacgatgtgncttggacgatcgaccggatacggcgacggggggatccctctagacgtcgaccctgcacggc

SEQ ID NO: 526952 - DNA, 119 bp, Homo sapiens
cgggcatggtggtgatctggttactctgggagtgtagatactcactgaggctcgcgtagtgcgactgccgcggaacagctgtcgtttcatctagctccgactgatgcgtgagggtgtag

SEQ ID NO: 526953 - DNA, 251 bp, Homo sapiens
tacgaagtgggctagggcattttgaatcttagagcgaaagcgtataatcactgcgccgttcataaggggatggccatggttggtttatagatagtggggtggttggtgtaaatgagtgaggcaggagtccgaggaggttagttgtggcaataaaaatgattaaggatactagtataaagcaatccaggtcgtccttttactgttggtgtatggtgtaccattggtcttcgcaggttcagctttgcattcag

SEQ ID NO: 526954 - DNA, 487 bp, Homo sapiens
ctggcttcggaccggcttgtctacgtcacatttttgtttcttgttcggacggctgcggctgattgcttaatggaaaggcaacacgggcagagatctgtgaactgttaaaggattcccgtttttttgaaccagatgtcaccagaactcaggtaaatacagtagtgagtggtgcactgattcgcttacttacgaaaaaagatccctttgtgaaatacggcattggacgaaagctgtggatcttcctgcatcgtgaccggagtgaagaagagtttgggcggattcaccaagcacaagccgctgcagttaagccaggaaagcttttcagcaaaaacccaagcccccattcaaggtgaagttcagttgcaaggggggctccataaaggtcctttgcagtggcccttttgagcagagccagatgagccttagtgaattcagtatgccacccaccccagtcacacctgtaacccccaccacaccagcattgccc

SEQ ID NO: 526955 - DNA, 906 bp, Homo sapiens
  misc_feature (212)..(212): n is a, c, g, or t
gggacctccttgcgagttccgagttgcgatgctgtacttctctttgttttggtgcgagctcggcctctgcatgagatgtgggcagctggtcaggatggccattgcggtgctcagcacaggcaacgcatgcccagactcatgactgagggaacgcaaacacgcgggctcggagcatggccatggatgagccttgtcagtgactagtgatcctngaagattgttggcgatgtttgctgctcgaagcggagaacgtgacattgcaggtgctcgtggccgtggacgctcaattggcttcatagatgaacttcgtgcatgccgagctgcgcatggaggccctgggcgtcctgtctgaagcaacaatgtactcggagggtgatccgtggcaatgagagtgctaatgggggggaagcaagaaggattggttgcgatgagggctgtgaagtcatagctggtgttgcaggaagcgctggatgcataggggaagacgcgaatgtttgagaacgtgtgggatgcgctgggaacattgttgagcgtaagatcgtactagttccctacgatgacctaaagtaccgtggttgtactgagagtgccagaacacgtggggtccggattcagtactgcagagacgtcatgtcgtggcggaatcatctagtggaagccggccacatccagttgtgacgcaatgcgtaggcacctagaaagcatcgaaagattgcagagagtcgtgcgcaggcggttaaccgaggcacagtgggttgtaaccaattggtactcggaaaagcgatttcgaaattgcgggagatcattacattggacccaacgagttacaaattcttttcactaatgcggtaaggttcttaattggcccgcgttagtaaaagggctccaacaagcgcgcgccaaata

SEQ ID NO: 526956 - DNA, 539 bp, Homo sapiens
  misc_feature (354)..(354): n is a, c, g, or t
  misc_feature (388)..(389): n is a, c, g, or t
  misc_feature (416)..(416): n is a, c, g, or t
  misc_feature (470)..(470): n is a, c, g, or t
  misc_feature (512)..(512): n is a, c, g, or t
  misc_feature (516)..(516): n is a, c, g, or t
  misc_feature (518)..(518): n is a, c, g, or t
  misc_feature (526)..(526): n is a, c, g, or t
ggattgcggcgctactctcaatactcttaactaccagcgccaattctgaatgctggattgtcacaaacctgcacgggtacggggcaatgaatggcgatcgttacgagtttacaaaagacagcacggaagattccgttttcaacgtaacaataaatggcgataaatcatcagtttatgaatcagtttctggcgtctatccagagatgaaatacactgctttgtcatcgaacactatggtaggagaataccagtctggaggaggcataaccgttgaaacttggtcaatcactacagacaaaaaagctctttactccaaagtaatgaacatcccaggtatgcaacaacttacatcanccaaatcctttgttggtgatgtagtcggaacctnnaatcagtaatccccacctcaatctcgntaacaaaaaaacaaactattttccgtttaaaacaatggagtttgtttttcacgnccctttttcaatattattgttcaacatcaacttcttgaattnagcntngaggcggnctgccacattgag

SEQ ID NO: 526957 - DNA, 973 bp, Homo sapiens
aactatggctaggtcgaggctggtggtgaatcggccgaggctcgccgccatgaagcagcgccgcgtaccgacttcttcgcgcgccgccgccccgggactccccgatcgcgccgccagctggcctgccgcacccccagccccgccaggcctgatccgcgcccggctccgtaccagtggcagcgaggcgcacacgcaggccacgacagccccagggacgcgaacaggacaggcacaccgccactagaaggagacctgcagagctgtacaggtggaacaaggttatccagaacacagttaccacatagatgacacacaagaacattcgagaagacaatgcacacatacatccaagagcaagtaatactaaacgaacaatacaacaaactaggataagacagctaccagagcagaacactagacataagaacaattcagacaacaagaaatccaagagaacaacaattcatctaaaaacataagacgttcaattgccatgaaacacgagcacacgagtaatatatgcaagacaaaagagtcagagagacacatgagaggactaagtgccacaggcattgaagcaagaacatcaatgaacccaaaaaacgcaagaagacgacagaacttgaagataaccccatgatagcagaaaaaaagagcagccagaactaaacaaaagtcaaccaaaatgcacaaggaacacaacaaccgagaactgacgagagtgaaacacgatacagtgacccataacaagataacaagatgactgacacacgaacatatttcacacagcaataatacacccaatgaatgaagaaaatactcacaaaacccacaaccagagaaacaccaacctatagaccaaaacaacaacagtagacaaccaaaaaaataaaacaaaacaataacaaaaacaccaagaaacccaaataaaacagaaatcagaaaaaaccaaaaaacaaaagaaaaccccaaa

SEQ ID NO: 526958 - DNA, 326 bp, Homo sapiens
tggaccgttactagacaagtgggcgtagtgctgccaacctgtggaactaggataggctcccatgccctgaaacggggctctcatgctgtatcagcgcgtcgtgcgtccgagtgtacctcaggcaccacggtaccgtagacagaatcatgaacgaactcaacgggcgagccctggacgcggtggccggatctaaccaggaacgtcctgccaagactagaccccgcagccgaaggacaagtgaagcaggcccctgagcctcacaaggacctcctggctggtgaggagggggccgcgccagtgctcccaggcctccacagccagttcag

SEQ ID NO: 526959 - DNA, 741 bp, Homo sapiens
ggtgactcgcgtttttcggacggaagccattggagcaattttagcggtttgacatccgactgcccgggacacccagtaagcagtgaacagcactatcacactagaatcgacatggaccgcaaatacattggcaactgtctcgacgactacagttgccaccgctatcacgggctaaccccctactgcgtaccacgcgcctatcgacatcaggtcggttatacgccgatcagcggactaaacacattcgcccgctcaattcacgtaggcttgtcacgggcccaatctccgcgttcggccatcgacaggcgcccaacttagcgcaattctccgaaatcctacttctatcagtttgaggattcgtcggcgtgctccggccgattacgcatgtatccaagagagcgcgctttgccgtagtaggccatttagcaaacggcctcttactggtggcctgatgcatgggggcttcatcaagctagattttactaacaggaggctggaaagccgctcattcctgtacaaacaagcgcttatctcgcgacgttgcctaattattaagacgtcactttatcccaacctcggtgaatagcgcgaccaggtatatgtcgaaccaatcccaatgcctcctagtgtaagctcgtcgttttcgacaggcgctcctttgtatcaagcgcgatactaacaacttctgctgattttcggtggtactcgttcctgtctcctagattcatctggccctctccg

SEQ ID NO: 526960 - DNA, 778 bp, Homo sapiens
gccggtagccgtagccaccgtcgccagcccgtgcgccctacggcgcgtacccgccggcgtctcccataccccgccgccggccaggtgcgcgctacggtcgcccggacagtgtaccgctgcggctaccgggcgatggccaccaagatacgacaaagaggctagccgggcggcgtacaacctggtgcgcgacgacggctcggccgtacatactgggtagcactattgaacatatagcacggtccaccatacgtccccggcgagcagggagcggagtaccagcattcataccagcagtgcacagatagacgtaccggttgtatgccttatcggccgctaacacccacggggaatgccatgagccaaggagggtccaatgttggccctcatacacgtgcatacggttgaaaccggtcaggcgggtttgcaagtcgcgcaaaaaccggggacgggcacaagacccctggtgacaggcaggtcgtacacgaattgcgcatacggcagtgtgtgactcagtgcatcggcacaggagctgggcaggaagattcatcacagagcgagctgaacacggcgggggggacgccaattaacgacgctcagaccggagaaacgcccaggccccgtaaaacaaccctttgccaaagtaattgcctgctctccgggggaacaagacagtcgggtctttaagttaaagctccacaggtcacccgggcgaaaagacacctgaaaggccggcccgtacactgtgggtaacgcccccacagtaccgatcttaaacctg

SEQ ID NO: 526961 - DNA, 269 bp, Homo sapiens
attaccggtcggtcgctatatactcagagtacactgattttctcatcaaacgagttacccaccgtatatcgatatgttcgtaagcacgcatattcttcataccatcaccttgtgtatatgtaaacgattagtatttaattctcactgttcactttgaactgacaaagaaaaacaagtggaaactacagaaactgtggtagaacatttaacttgctaggtctggtcttggttgtacccatctttggccagtcacataactactctggaaa

SEQ ID NO: 526962 - DNA, 376 bp, Homo sapiens
accttcttcatacacgagcatgcaagttctttccttccctgccagccgagatagatacacagatggtaaagacaggcgcggctttcgttgtcagtagtactttgatgtgaagcggtcagcacggtcatttaagcttgatccaccctctttgcatcttacaaagttaaacggctcaaagaagtaaaataagaagccactgcttgtggaacctgttcactcgtttctttgaaagccagtggatttttctcaagcgtctctgtcttcttcagtttcgacttatcgaatctctcgatcacagccatctcgggtttgtcacacatggctgcggaggaaaagcgaagcgaggcgcgcgagtaagagcgaagtgtggtgtgcg

SEQ ID NO: 526963 - DNA, 415 bp, Homo sapiens
  misc_feature (39)..(39): n is a, c, g, or t
agaaacattttgtaatgatgtaagaaaaaaaagacacanaattgatttttaaaaaaacatgcatatggataatgcctggaagataaatgggaaaaagtgaaaataatcagtgtgttgaagtatttggcttaaaggcaaactttaaaaattttttatgttattactgttacaaaaagaaggaaagaggatattatacagcaaaagactaagaaagaaagtggcaaactaatgaccaaaactaaaagccagttatttaattcttccatcaaaaatagccaggtatagcccaggcgcagtggctcatgcctctaatcccagcactttgccacgctgaggtgggaggatctcttgagctcaggagttcaagaccagcctggccaacatagcgacctcacctcgtgtctaccaaaaaaaa

SEQ ID NO: 526964 - DNA, 536 bp, Homo sapiens
cggccccaagcaggaaggcgcccccagcacaccagcccctctcagcgcccccagcgggcccgggcctggagggttaaggcgggcgcgtccgcgggtgggcggggggggggtgggaccggtgccgggagctccgctgccctggcgtcccctgggtccaggcccagtcgctccttgggcctctctcgcggggccgcctccgcctccttccttgccgagacgggcgtggggcacggggtcgccgcccggcggggagctcatccggcggcgcagacgccccgcggctccggggagggacttggcctgggccccggccccgggctcctctggggaggagccgagaggctgcagctggcggcggcggccccgggcgggagggggtcccaggaagcggccaggccggagccccacactcggccgcagctgctggcctggccagaaccgagcgcgccctcccggtctccgccgcttccctctgcaaaccgcgggcaggaggagccctctccttagcgggcccggagctcagaggcgtcgcgggg

SEQ ID NO: 526965 - DNA, 123 bp, Homo sapiens
ttcagctcggctccccttcgatgtgagagatagaggagaggagaggattaggaggaggagggagaagggaacaaccgtaccaatcttaacactactaaatatctaaaaaatgtgcgagtagtg

SEQ ID NO: 526966 - DNA, 379 bp, Homo sapiens
gatcactgaggctggcagttcgagaccagcgtgacaacacggagacaccccctctctacaaacaaaattagccatgggtggtggtgcacacctgtagtcctagctactcaggaggctgaggcaggcggattgcttcagcccaggaggtcaaggattcagcaaactatgatagtgccactgcgctccagcctaggtggcagagggagatcctgactcaaacaaaaattatatcatgggctagtgtgtcaagcatagaaaacatcatttcatcctgaagaaatactacctatggggagcaagaaaaatacaaaatatatttcataagcccatgattttcatggcctgtatgaatgaccctgtactggcataatctacacga

SEQ ID NO: 526967 - DNA, 1626 bp, Homo sapiens
ccaggtcccggtggtggcccacatccccctcatactccctcccaccacaggcacccgaatcactcgaagacgcagcccaaaccacagcgaccgtgcaggccacgcgcaggccgctctcacagacaaacacactgataagataacgagcagagagaaagccgggaggagcaagcaggaggatagcatgacagacatggacattcctggccagcaaacacaatcccaaggagggccccaggagagacaagactagacctatccagcagaataggcagaggcggtagaacaagacactaaaaggcacaacagaaagtaacagatgggcgagaggtggagacgcaagaagatacacagtcaaaatacaaagccacatagactccgtcaaatagcacaccacgtcactagagacccacgcaagaaagaaaaaccaaggacaaaccggaggaagagtcaaggaaccccgacatgacacaagagacaacagaggagccagccaggagagacagagtgggcgccagacaaaccaagggacctaggacgcacggccacgatgcgacatacaccgaccagaaggataactacacaccaagacaaacctcatcgggggcaaaagacacacgacgagcataggggacacgagcactcaaccccgtggacggcatccgaacacaaggaacaccacagcacccgacggccacaggaagcaccaaacaccaatagagcaacgaaaaaacacagcacccacaacagcaacacacgcgccacgaccacaagtcaccacgaaaactaaagagaccaacaaggcagatggagatgcgacacaaacttgccacgcgacaacacacaacacaagagacaaacctacaccgcgcacaaagcccagaagcgcaaacgcaaaaaacacacgaccaggaggcaaaaaacaccgacgagagaggaagcagagcacacagaataagaagagagcctgcacgaaccaggaaacaaaccggccaaccacacgtaggggcacatacacaaagacccacgagacgacaaaatgcacaaacagcaccgaacagagccatgaccacatcacaaacacaaaacaacaccaacaccaaggcaaatctaacaaaccacaaacagacaaaagaagacaacacagggagacaacgaacacaacaacacaacacgagcaacccacgcgacacgccagacggaaaacacacagaagaaacaaacacacacacaagaagacaagagacacacaacaacaaccaccgagacatcacaacatcggaacagcagccacaaagcagaagaaagcaaaaacaagagaccaacacacacatcacaaacatagaagacgcgcacgacaaccacacaacacgacgcaacaccaacaaaagcgacgaccaacaaccacacacaacacaacaccaagcatacacaacaaccacgagacaccaacaaaaaacaagagacaacaacacacacacaagcaacacgcagcgacaaacaacgaccgaccacagacaaacaagacacaaacagaaaagagaaaacagaccacgaatgacggcgaaaacaaagaggagcaaccacacagaaacagaaacacggcgaactagaacaacgcacaag

SEQ ID NO: 526968 - DNA, 483 bp, Homo sapiens
tcactgtttcgtggcctccttctggacccccttcttccagacagaaatcactctgtgctgatctggtggtggtccatgatagcgccattacattgcattatcaaggctgaaaacattttcatttaggaaatatttcaaaccttcagaagagtacaataaataatatgacacccggtgtatgtacccttatagaagttaatagatgttagcattttgtctacgctttgcttcagatctctcttttacagaatggtaatatagatgttacagatacactgaggcggaaactgtttattacgaatgtagcttatctctggttccgatgatgaattctggtgccaggctctatgtgggatactaaggatatgagtgatgttctctggcttctgtgagctcatcctccagccgggaaggcagactcatgaacggacgattgtcctacaatgtgacaactgctgtactggtgaaatatactagagcaat

SEQ ID NO: 526969 - DNA, 961 bp, Homo sapiens
tgcagcgggggggccgggggccctggttggccctgggatggggaaaccgcggtggcttccgcggaggtttcggcagtggcatccggtggccggggtcgcggccgtggacgggtccgggccgaggcggtgtagctcgcgtagggaggccgggataggagtggatgcccgtcaacaatttgggcgattgtacgaggacatgaagtatcaagtccctggaggagatctatctcttctccctgccataaggaatcagagatcattgatttcttcctgggggcctctctcaagggatgcaggttgagaagattattgccagttgcagaaggaagaactgtgccggcaagcgcaccaggtacaacggcaattgttagcatatcgggaactacaaaatggccacggtcgggcactggggtgtaagggtgcctaccaaaggattgtggccacgcgcccaataccgttgggggccatcattccttggccaaagcctctccaatcgtcccccgtggcgcaagaaggtcatacttggggggaaaccaaagatcggggcgaagccccaaactgtccctttggaaaaggaatgaacaaggcccgctgccggaatcctgagtagaataaacgccttaaatccctgcacccaggggcattggtgatagatcttcggaaaccttgtggcctaaaagaagctgctccatgatggggtggaatcgaatgagtggtacactcaagcacggcgctgcacttgccccctgaggcaaactacgcaaaggccaccttgatgcattcaaaaacctaaagtaacgaaccccgactcttgaacgagaatgtatcacaagttccctataggagtatgacactcttagacccaccaatttcgtgacgaaccaagacgcgtggtaaccaacgctttaccaacaaaagggtaggggaaaaaaaaaaaggggtcaaaaaagaggcataaacc

SEQ ID NO: 526970 - DNA, 765 bp, Homo sapiens
gaagcctcctaaggaatctgctttacggagctcctggagcaggaaagaccctgatgctcgagctgtagaacaaatgacactggagccttcttcttcttgatcaatggtcctgagatcatgagcaaatggctggtgagtctgagagcaatcctgtcgtaaggccttggaggaggctgagaagaatgcttccttgtccgatcatcattcattgattgagctagatgccattctgctctccatacaattgagagaaagactcatggcgacggtgagaagcggagcatatgtatcacgagttgttgacgcctctatggatggtctaagatgcagtagggcgacatgtgagttgttatggcagcaaccaacagatccaacagcattgacccagtgtctacggcgatttggtcgctttgacagggaggtagatcttggagaattccatgatgctacaggacgcgttagagattctttcagatccataccaagaacatgaagctgggagatgatgtggatctggaacaggtaggcaattgagactcacaggcatgtgggtgctgacttaagcgagacctgtgctcagaggctgttctgtaagaccatccgtaagaagatggatctcattgacctagaggatgatgagcattgatgccgaggtcatgaagtctctagcagttactatggatgacttccggtgggccttgagccagagttacccatcagactgcgggaaaccgcggtaaaggtgcacaggtagccggggaagaa

SEQ ID NO: 526971 - DNA, 188 bp, Homo sapiens
  misc_feature (4)..(4): n is a, c, g, or t
  misc_feature (91)..(91): n is a, c, g, or t
aagntgatgaggaggatcgctgagctacaggaattgaaggtgtagtgagacatgatcatccatgcatcaagcctaggcaacagagcgaaancccgtctataaagatggcaacgccaggtgtggtggtgctgcctgtaatctcagctactcaggaggctgaggaaggagaattttctgaacctgcaagg

SEQ ID NO: 526972 - DNA, 114 bp, Homo sapiens
gcggccgcctactactactaaattcgcggccggtcgacccgggagcccccagccgaggacgtgggatgtcatcgtccttgctgctttgccaccccattcccgtcaataaagtgg

SEQ ID NO: 526973 - DNA, 792 bp, Homo sapiens
  misc_feature (171)..(172): n is a, c, g, or t
  misc_feature (178)..(178): n is a, c, g, or t
  misc_feature (196)..(196): n is a, c, g, or t
  misc_feature (209)..(209): n is a, c, g, or t
agagcggggttgatggaccgggccgcccggtgcagcggcgccagctccctgccactgctcctggcccttgccctgggtctagtgatccttcactgtgtggtggcagatgggaattccaccagaagtcctgaaactaatggcctcctctgtggagaccctgaggaaaactgnncagctnccaccacacaatcaaagnggaaaggccactnctctaggtgccccaagcaatacaagcattactgcatcaaagggagatgccgcttcgtggtggccgagcagacgccctcctgtgtctgtgatgaaggctacattggagcaaggtgtgagagagttgacttgttttacctaagaggagacagaggacagattctggtgatttgtttgatagcagttatggtagtttttattattttggtcatcggtgtctgcacatgctgtcagtaagtatttttaaacttaattttaagtaaatctgagaaacagtatttgctcatagtttttcttcttttcttcctccttacattctcttttgctttttctttgattcaaataaatctactttttgagctttgccattgttgatatagaagtattcataataaaacacataatacatgatttttatcatttactgaataaaattgttgtaatttaaaataaaatttgtatagtaggctacataagacttctattttctaaaactgtaccataacacagtaacattgaaagataaaaacaaaaatttgtttttgctttgccacattaaaataataaactttatgtgtaaaccaa

SEQ ID NO: 526974 - DNA, 689 bp, Homo sapiens
  misc_feature (171)..(172): n is a, c, g, or t
  misc_feature (178)..(178): n is a, c, g, or t
  misc_feature (196)..(196): n is a, c, g, or t
  misc_feature (209)..(209): n is a, c, g, or t
agagcggggttgatggaccgggccgcccggtgcagcggcgccagctccctgccactgctcctggcccttgccctgggtctagtgatccttcactgtgtggtggcagatgggaattccaccagaagtcctgaaactaatggcctcctctgtggagaccctgaggaaaactgnncagctnccaccacacaatcaaagnggaaaggccactnctctaggtgccccaagcaatacaagcattactgcatcaaagggagatgccgcttcgtggtggccgagcagacgccctcctgtgtccctctccggaaacgtcgtaaaagaaagaagaaagaagaagaaatggaaactctgggtaaagatatgactcctatcaatgaagatattgaagagacaaatattgcttataaggctatgaagttacctccaggttggtggcaagctgcaaagtgccttgctcatttgaaaatggacagaatgcgtctcaggaaaacagctagtagacatgaattttaaataatgtatttactttttatttgcaacttcagtttgtgttattattttttaataagaacattaattatatgtatattgtctagtaattgggaaaaaagcaactggttaggtagcaacaacagaagggaaatttcaataacctttcacttaagtattgtcaccaggattactagtcaaac

SEQ ID NO: 526975 - DNA, 460 bp, Homo sapiens
gtcatcgcttaagtctaggagttgaggcagccgggaaaatatgcaagacctcatctctacaaaataataacagagaaaattactttaaaaaatgcatcagaggctgggccggtggctcacgcctgtaatcccagcattttgggaggccgaggtgggaggatcatttgaggtcaggagtttgagaccagcctgagcaacatggtgaaagcccatctctactaaaaatacaaaaaaattagccaggcgtggtggcctgcacctgtaatcccagctccttgggaggctgaggcaggagaatcacttgaaccccggaagcagagtttgcagtgagtccagatcacgctactgccctccagcctgggtgacagagcgagactccatctcaaaaaaagaaacaaaacgcatcaggctgggcatgggtggctcacgcctgtaattctaggaatcggggaggcagaga

SEQ ID NO: 526976 - DNA, 545 bp, Homo sapiens
tcacgccaaatcaacacctgtacgttcttttctctatatctttgaaatattcttttcggaacaccaaattttgcctttgatcaatcctcacgacgctccgcggtattaccccctaaatctaattcttaattaataatgttctttaaattgtttgcaaacttctcatcaccgtggtgtagatggtaggctcacacatttatcaagaaaggcggtagttagtctgaataatatgtattcgctcaactttaaaacatccttaatatgaatgctctctcatcttaccacccatagtttttcccccagtgtctgttcaacgcagtctctttttgcagacatgtatttctcttagttctaataacaatgatcacctaagagttcttttatgattaaccaacaccatggatctttattgtagcttttcttctttcaccatttattcggctttatcaaacatattattttcacaacattactgtttactgacaacttgttaacgatcatcctttcttataaaaaaagtttttttaaccaaccatcatatacaa

SEQ ID NO: 526977 - DNA, 92 bp, Homo sapiens
  misc_feature (23)..(23): n is a, c, g, or t
  misc_feature (88)..(88): n is a, c, g, or t
gcggcggcggcggcgacagaacnagcgcggcgcggggccaccatgggggcccagctcagcacgttgggccatatggtgctcttcccantctg

SEQ ID NO: 526978 - DNA, 200 bp, Homo sapiens
tgacgcgtaacctttgagaaggtctcgcttctgtctcatgggtggagtgatggacgatcttggctcacattcaacctctgcatcctgggctcaaaaaattctcctgcctcagcctcccaagtagctgggactacaggcatgcaccaccctgcctggctaatttttgtattttttgtagagacaggatgtgtccccaaggt

SEQ ID NO: 526979 - DNA, 561 bp, Homo sapiens
gcatcctggcgcaagtattatgcttattagactactgaaggttaactattgacagtcattctaaaaatatcttaagctgtattacatgtgctatatattctccttgtgtaaggaaaaaagtaatagatcgctgtccttagcgcgttggatagtgaaaaaaaatacctccatattacctaatggtctgccgattggtcccctgaattatgaaactccaacaaaacattattttggcaaaaagtcctttagcccaaagtcaggtgtctctgtatgggtctcttggtaaaagaactctctgttcatccattctctttccctgggaccgtaaaataatggctgaaaaagtcttcatctggtactgtcggaccctttgtggtagcaggtggtggagcacatctttgatcatctaatctggatccttgacattttacaaggatgtcaaagaaatcttcatcagcctctttgttgtcattagtcatcaggtggctaagtaccgactggctgttttgtgttagacgaagccctggcaaattactgaaactagccctctggtcatccaga

SEQ ID NO: 526980 - DNA, 420 bp, Homo sapiens
  misc_feature (371)..(371): n is a, c, g, or t
  misc_feature (373)..(373): n is a, c, g, or t
atgtaaaagagcaagcttttaggtatccatttttaatgcaatataatgttgtaaacatccctattgcaatgacagcttgtctttctccccaattttatcctgcactattaggtattaagaatatttaatgtggccgggcatgaaaggctcctgcctgtaatcccagcactttgggaggccgaggtgggtggaacacttgaggtcaggagttcgagaccagcttgggcaacatggtgaaaccgcatctccactcaaaatacaaaaattagctgggtgtggtgatgcatgcctctaatcccagctactcggaaggctaaggctggaaaatcatttgaacccaggaggtggaggttgcagtgagtcgagatcantnactgcacttcagcctgggtaacagagccaaacactagctaaaaaaaa

SEQ ID NO: 526981 - DNA, 117 bp, Homo sapiens
tagagggtcagtataagaaacaatgatcactggatcaagagatactctgatagttggagtagggccaaaacaaagttggtgagctaaaaggcttgtaagtgatgtggatgttcctac

SEQ ID NO: 526982 - DNA, 135 bp, Homo sapiens
gtagggtgctggtcacgacatctctccaggacgcttccccgaggccctggacgagctgcgctgccccccattcctgcagccgttggacctcactggcaaaggctaggcccggaggcacctatgcgctggattttg

SEQ ID NO: 526983 - DNA, 383 bp, Homo sapiens
tgggttctatactgacaggcaatcgtaggctcctactatgatagcacacggttacttcagcgtctatagcatgtgtgatggacacactgttcctctgacttctaggaggacctggagaggaatgacagctacggccgagaggccttacttcatgtcttccaccctcaagaaactcttgaacaagaccaacaagaaggcagcggagtcctgaaggccccgtgctccccagctctcacggagtctcatgccgcagggtgctcagtagctgggtctgttcccccagccccttgggctcacctgaagtcctatcactgccgctctgcccctccccatgagccagatcccaccagtttctggacgtggagagtctggggcatctcctt

SEQ ID NO: 526984 - DNA, 895 bp, Homo sapiens
ttgtgtcacgccccacagtggatatccgccccgttcctcccggttaaatgaggctctcgcggatctccgcggggggtccctcccaaacgagaagggtccccaccacaagggggtgtcgccccccagaaggggctgctgcccccccccaagcggtcctctcccgcgcctacgggcccccccaccgcccaggaccttcgccccgccggagcgttctccccccgctccagcgtggccccccccaagcaaggggttggcaacaccccccgacaggaagggctcccatccccaacccaggggccaaaaatcgtccacagtcccaaaaggcacaccctggtgtaacagagacggtacttttccaccctcgaggagcatttcttgaaggacttttcgagtaacacgcggactaggtggttgaaaaaactgatagctgtgccccccccccgcgcttgattgcacgccacgttcctgcccccgtccccacgagggattcaaggcaaccacattacgtgggccttctcaatagtgatgtgaatagggatggacgcgtcgtgtccactctggcggaaagaagtcatccttcgttcactaggtacagacctattggcggtcactccccccccctcctcatgggtgaataccaccccgcccaaggaggtcccatggggtaaacgccaatcaccctggattgggaccaacattcacagagaggcaccatgagtgccggcggagctgtcgcaccgcacaaatggcagcaagatgagttacaagaaggaaacccaatcagagaaggcaggagtacaaaacagcaggagtggcataaagcactccccggaacacggcccccccggaaggcccaacgagggtccggcccccccgacccctcccgaccccatac

SEQ ID NO: 526985 - DNA, 622 bp, Homo sapiens
aaaaaaccctgtaagtgatcttttgaacattttcatgtctcaatttctttcaattcagctctgattttagttaattcttgtcttctataagctttgtggtagagttctccttgcttctctaattctttcagttatgatgttaggttgttaatttgggatatttctaattttttgatatgggcattacttcttatgccctactctaaattttgttcttctagaaaactcagaactatgctttctaaaccaattcaaactttctcagtgaatcaacctggactccctgaggccaagttaacaattttccattacaattggttctctttctctgtaagaatatctaatgcaacaattcaagtgtttctttccctcctggtaatgcggggaactccttttggctgagaccaagacttaaaaccttgttctttcaacattattgaagatctatttagaaagcctccatttttgcacaaaagatatataaaccccaatgaaaatcattattaaattatttgacatacaattatattgtggaaagactgattaatagtgaataagccctaaaaaaaagatatgattaaatggattaaattaaactggctgtttgatattaagttcataa

SEQ ID NO: 526986 - DNA, 218 bp, Homo sapiens
gccttctacagagtgcgagagagagaaaactcgtgaaagctgaaaatcatgaagatagggttaaaaaaataatagaactgaaaaggaaagtctgtggctgcattcagctaaagtgattgtgtttgttattacatcaacaagggaattgacccgcttttccttatgatgctctttcaaaagcaaggcatagtcgcgtctgctgcagacgctaaaaggag

SEQ ID NO: 526987 - DNA, 225 bp, Homo sapiens
  misc_feature (121)..(121): n is a, c, g, or t
  misc_feature (200)..(200): n is a, c, g, or t
aagaccagcctgggcaatgtaggaagacttcatgtctacaaaaaaaaaaaaaaaaaatttcattagccaggcatggtgatgcatgcctatagttccagctacttgagaggctgaggtgggngaaccccctgagcctgggaggtcgaggctacaagaagctgtgttcgtgcaactgtactccagcctgggcaacagagcangaccctgtctcaaaaatttatatag

SEQ ID NO: 526988 - DNA, 287 bp, Homo sapiens
tgtctatgataaacagatgttttggctctgacagcagaacttcgctttgattgttctcatgcgtttactttggtgggttcaggaatgggaagtcaagccacacttcattatttctattaagcaatttgacaggactgtggtagcctgcagtgtagtaaaccttctcatcgaaaacttgtccatcttcccttaaaatgcttgctaatgtcaaaagttgttcttgattcttttgggcactagaaaatccatcgaaagaccgtacaaacacagtcatttcggctctatct

SEQ ID NO: 526989 - DNA, 214 bp, Homo sapiens
gctatacagcataaattgacagaacactgtaaatcaactacactctaatcaaagtaaaataaaataaaatgtctccagaatttgccaaatgtccctgggggtaaaaaccatacctggtaagagccattggatgagagcaacatcccccacttggcctccaggattttatgaaggcatctctcatgactcaacagcttccatgagaaacctgttg

SEQ ID NO: 526990 - DNA, 335 bp, Homo sapiens
tccatgtattagtttaagaagtaatatatacgtgtgttgcattctattttctagaagaaaaaagtgctcaccaatgcctgtgtgggtgggccacagatgaaagcgacacttgaaggtcttaacggtggctggctatgaaaaaacgaactgtgagtgtttaaattcttctttgtttttggctgtgttctgtagttctacttgttttataatgaggaaaaacatatttaaatttaaaaagattagaaaactctatctatactatgacctcaaccatatttatttatttatttaagagatatggtctcactatgttgcctaggctggtccccaactct

SEQ ID NO: 526991 - DNA, 739 bp, Homo sapiens
gatagaacagggcgcagattccatctctccccaagcccctttttagtgactaagtcatggccccaatctcccctcccccagcctacgctgagctatattgcgagttcattctgtagctaagtaagtctccgtccatgcaggcttcactcattgttgctggttttaggaccaccccgagcatcgatgacaatgtattcacttatcccgtctgcaatgtcaagtctctagtatttaaagaatgctcacattcgcttcaggtctgatagtgcagcagtaatgtagtattatgagatgggggaatagatccttcatagtattgctgcgtcggattctctggtagcgtagggtaattacctggaagaagtgaagactgcgcgcagctagcgtgaagagctgagatatctgctctataccgttttccccgggagcgtctcgtagtaccatttggtacctacactcggttgacaagggctaccaacgtacgagacgcggagacgcttatagaggaacgggaatttgttgaaagctatctgtacataacagcgcgtgaacacattgtgtgctttgtatatttaaacatgccatcgtttagatggcatcgctactcaattatttactgatcatataggcttgggggtacaaccccccatataagactttcactacacacatcttacccaaccagaggacttattgaggaaacgtttcaggcctggactaggctgggtgtggcttcccc

SEQ ID NO: 526992 - DNA, 232 bp, Homo sapiens
tttgggacccaggcaactgcccccttgtccccattaaaaaatttggggagggcttgcatgctaaccaacaggctcctgtttgggggccccggggccagcattttggagggagcttccttccttcctttctggacaggttgtcataatggatgccctgactgaccgtttggggctcaggctggtgtgggattcaaccggcccattaaaaaataaagccctattgaatggtcca

SEQ ID NO: 526993 - DNA, 263 bp, Homo sapiens
gcgactagctatatgacatatgaaagagaataacaagtaaaccaatctccgaattgtgcaaatgcttgagatatagtcttacactttattgcttggactgatttctatatgcgtgtcttggttagaggttgctgtgcctgcttgttgctttatttctgggaatgagggaggataacatttttaggaatcttactgtcacattaaagagagtcacataagaaagcaaaaatgttatctccctcacctagaataataagaagaca

SEQ ID NO: 526994 - DNA, 999 bp, Homo sapiens
  misc_feature (761)..(761): n is a, c, g, or t
ccagacatgacggcatgtcatccacaaagctctcctttggggacacgcgtacagggtccagaacatccatggagctttcaatgctctcggggtgagcagacagactcacctccaaccccctggcctcccacgattacatcctgaagattgtgcccaccggtttatgaggacaagagtggcaagcagcggtactcctaccagtgacacggtggccaacaaggaatacgtcgcctatagctatacgggccgcattcatccctgcaagtcgtggttccgctacgacctcagccccatcacggtcaagtacacatgagagacgggagccgctgtacagattcatcaccatcgagtctgtgccatcattggcgggaccttcgccgtcgccggcatcctggactcaatgcatcttcacagcactctgaggcctggaagaagatccagcatgggcagagaatgcattgatgcgcaccatccgcagcctaattgtgcgagggaccctgggcatcgccagtcttgcctccagtgccctgtctcctttggccctcaatctgtgtcccagatctggctgttgtcccccaggtgtgtgtgggcgtgggtggggcacagttaaggatggtcgatgtgttgcaggctacctcttttcccgtgttcttttcgacaaattacctgctgaagttgcgttccccttttctggtgagcccccagaaccggttccggcacggtgcgagtcccgatacttggcgaccctcctaagaccgagnatcttcctcaggaatccgaatgcgatagtaagtcagcaggttgaaagttccacccctagggtgacataagattgttgttccggggaccagcccaagcacaccgggttattgacagcgcccagactaaaacagccaaaagattccgaccaatgtcaaatatattgacctcaacaaagacaatctattacacacaaacaaggttcctcccttctccgccgcggattcaccatcgaccaac

SEQ ID NO: 526995 - DNA, 794 bp, Homo sapiens
tcctcttttaactttttaaatggggtctcaaaattctgtgacaagtttgttgggccaatttgttccctttaaaaagtcactgtttttaaaacctatataccttaaaatctgccccccccaaaaaagaaacccaaatgttggctcccacaaaacatttcctcctttctcccttctgaaggttttaacagactgctttgcttattcattatagcgccagctcttttacttacataacctttaaatgcgccaatttgaaacaaacagttctctgagaccgttctctcccaccacgtgatttaacgagtgtggggtgtgggccgcgttatttaggggtataatattattcctattataacgccttcctggagcctttcctggggcagatcttcgtgtggcccttggccagctcccaggcagccttccttgtcccacctggctttgtgataagacccccaccgcaactggtctggtctctattatacacgaacagcacaagctgcccccaaaggtttggatagctctgagaaagctctcaacacactgtgggctgtgccaggacccattttcaccacagtggcagccatccccagactctcaaacgattttggcggccatcttcccagtttttatccccagaccggcgaatcaacttttttccttcagtctccagcaacacttgcttgcattgtgccgccgggtggcacccattcacgggcctagccgggccttatttggccgggaggccggattatcccctagcgggaacccgcgctcccttggggcctttgggtccg

SEQ ID NO: 526996 - DNA, 720 bp, Homo sapiens
  misc_feature (347)..(347): n is a, c, g, or t
  misc_feature (583)..(583): n is a, c, g, or t
agcagtgtctcacacctctaatcccagcactttgggaggccgaggtggacagataacctgaggtcaggagttcaagaccagcatggccaacatggtgaaaccccgtctctactaaaaatataaaaattagctacgcatgggccgggtgcggtggctcatgcctgtaatcccagcactttgggaggctgaggcgggcagatcatgaggtcaggagatcgagaccatcctggttaacatggtgaaaccccatctctactaaaaatataaaaaattagccaggcatggtggtgggcgcctgtagtcccagctactcgggaggctgaggtaggagaatggcatgaacccgngaggtagagcttgcagtgagctgagatagcaccactgcactccagcctgggtgacagagcgaaactccgtctcaaaaaaaaaaaaattaacttggcgtggtggtgggcgcctgtaatcccagctactcaggaggctgaggcaggagaatcactagaagcttggaagcaaaggttgcagtgagctgagattgtgccagtgcccttcttgggcaacaagagtgaaactctgtctcaancataattataaattaagtggcctttataagtttggtggaaggattaatattggtcaggcccccaaatatatttaatggattatgggaagcggtttatacattattaggataactcttactgggcgccgtcttggtct

SEQ ID NO: 526997 - DNA, 150 bp, Homo sapiens
ggcaagcctatgaccaaatttgatctaacgaccagtaaatagctctaatcagcattgactgtctgtagatctttgaaagtgggatcaggtgcataggtagcctgagtaaagacagtagtaggtgactcttcacccttctgtcgtcttctc

SEQ ID NO: 526998 - DNA, 277 bp, Homo sapiens
cgatccgctgctcctctcacgctcctgcctgggtctgctggggaagaggagctgggtcacaccacccgtccaggggctgagcgccagctcaacagataagatgcagtttcatgccaccaagcttctgccgtctcccctggcccctcctgaggtccgctgctgtgcccgactgggtgtgctcagcggcacaacacacacccgctccaccagtcccaacgtgacaatcaagatgtggccctgaggccgggcgccgtggctcacgcctgtaatcccagca

SEQ ID NO: 526999 - DNA, 716 bp, Homo sapiens
  misc_feature (48)..(48): n is a, c, g, or t
  misc_feature (142)..(142): n is a, c, g, or t
  misc_feature (146)..(146): n is a, c, g, or t
  misc_feature (566)..(566): n is a, c, g, or t
tgcccctgggtgtctgttcccctcaatctgaaaaagcgtgaaggcccnacagccgtcaactgcaacacagctgccgtcaactgcaacacagctgccctcccactgtcgggaagcctccctcctgccccacctgccccagganaaantgcgctagcgtgcccctgggcaagcgccctgctggccacctgcctgcacctgggttgggggtggggggaccagctgagcacccaaatcctggcctctgcccccagcgccagagcagatttcagaacaatttgtaatgacgaaaccccacgtttccctttatctctgggcaaggctttcttcgtcctaggcaattaatccaaaagcaacaccagccgagtgggctggactccttgaagatcaaaactgcccagcgcaggcattaattaagtcattatctcaggcccccagcgactagggatcaggcctttccagttcacactctccagaaagggagataactgccccgccagcagggtgggaaggctctctctccatgttgttttaactccctattaaatcattttattttaaatacacanacagaaatgaagttgaaaatagcacaggagcccactatcactgtgtgaacattttgtgaatgaagacatgtatgaaaggatgtttggaggcttcaagaaacgaaagccgagagtctagctagaccagagccatccagcccaggagcgatc

SEQ ID NO: 527000 - DNA, 214 bp, Homo sapiens
gcccccctttttttcccgggggggcccccctggggggccgggggttaaaccccaaaccttttttggggggaattttttcccaggggttttttttttttgacttttcccggggggggccttccccttttttgtgaaaagtttttcccccccccccggcccccccctttcccggggtttttcccccttaaccccccctttaccctttgccggggga

SEQ ID NO: 527001 - DNA, 360 bp, Homo sapiens
  misc_feature (113)..(113): n is a, c, g, or t
  misc_feature (341)..(341): n is a, c, g, or t
tcagtgatctcctgctcactacgagtagtgggataagggctgcacatgccagtaatttgtatgtagagatggggttcatgtgtggcaggtggtctcgaatcctgactcatgantccgccgctcagcctcccaaaatgctgggattatttttacttttttttgtagagatggggtctctttatgttgcccaggctggtcgcaaaagtcctggccttgagtgatcctcctacttcaggctcccaaagtgctgggactacaggagtgagctgctgtgcccagcccacttcattattttaaacactcaagaaacaggctgcctgacttggcctgagttaccaaancctaacacagtaaggaaca

SEQ ID NO: 527002 - DNA, 406 bp, Homo sapiens
tgaggtgattagaggatccactaacctaatcgctgtataaagaatatttttaggctgggcacagtggctcaggcctgtaatcccagcactttgagaggtcaaggcaggtggattacgtgaggccaggagttaagaccagcttagccaacatggtgaaaccccatctctactaaaaatacaaaaattagccaggcgtggtggtgggtgcctgtaatcccagctacttggaaggctgaggcatgagaatcactggaacttgggaggtggaggctgcagtgagccaagattgtgccattgcactccagcctgggagacacatcaagactctggtctcaaaaaaaaaaattatggttttcaagtttacatttcttactatggtgtacattgaatgcgattagggttagtg

SEQ ID NO: 527003 - DNA, 131 bp, Homo sapiens
agcggactcgggaattgtaggaggacgaggctcagctcttgccaggccaaattgagacatgtctgacacaagcgagagtggtgcaggtctaactcgcttccaggctgaagcttcagaaaaggacagtagct

SEQ ID NO: 527004 - DNA, 120 bp, Homo sapiens
cgactgtggctgccgagagatggctctatggaagagctacttttctggcaggcgtgcgacggcaataggaaaatgtgagagtgtcactgtggatgtggttcgtggttgcccgcaaggatc

SEQ ID NO: 527005 - DNA, 1006 bp, Homo sapiens
  misc_feature (961)..(961): n is a, c, g, or t
tgaatatcagtactattaacttatctagctccagacttgtacatataagtgtaccagtgctcagaagctcctcaagactattgactacattattagcaagtaaagtcagtctgcaggctaatattctatggaccatctgatttatatacaatttcattcatctatttatagtatgtatgtataattctatattacactgtcaaatataaaatatgttatatgagtagaaatcacttaaatttttttgtgttgtgaatttgaaacagtgtaagaaatcacttttaagaaaacatttttagaattcctttgtttttttttttttctttttggaaacaggggtctcactctgttggcccaggctgggagtggactgggcgtgatctcggctcactggcaccttctggcctaccgagttcaagcgattctggtggcttcagcctcctgagtagctggggactataggcctgtaccgtcatgcctgggctaattttggtattttggtagagacagggtttcaccatgttgcccagtctgttctcaaactcgtgagctaaagctactcgcccactgggatgtcccaaagtgctagatcccaggggtgagtcaccagtgctgggccacatttttagtattctaataaaccagtgggtcatcagaactttagaatggtagcctacagaaacttacaatttggaatttcatcagagtttcagtaaatatttccagaattaatgaagcatgtagcttaaatttttccacatgtgagagaagtcactttataacactcaagaggtcaccgaggttatagttataggggaaaaaacttctgttatcgataaatcctaaaaatatcagtaccacgctggaatttatagcaccacctgtgtggttaacatgccagttattttacctttgtgttaaaaccaagtgattcccatcaaaacaggataatatttttccncttttggaacaatccattttaaaacgaacttttcgaagttctaag

SEQ ID NO: 527006 - DNA, 424 bp, Homo sapiens
atggaactgctcttcctctagaacatccagataggtcgctactatcagctagttcaggtgtcgcagtcatctcagtcaggaattccttgttgtatataaaattacaacactttgtccccacatcccttacatagagttgtacatataccgttagtcttctccgaatccgagacttatcctagttctaacttcttacataatattgatgtactatcatacacactgcagaatgtcccacagttggggtttgtcagatgttctctcattaggcactgaagttatgcattctgaaagccacatcaacacagagctgatgtagtcttctcaagtgcatcatatgtgctgcctatcttccaatatatgagtgcctattatgtgaatatgtcttattaccggtgaaagtggtgcatcctggaagtttgtc

SEQ ID NO: 527007 - DNA, 478 bp, Homo sapiens
  misc_feature (10)..(10): n is a, c, g, or t
ctggaaaggngacaattatggtgtgactgcattagcaagatttattataccactaacattggtgcctttaaactgttcaccaacgtcctcattcatctctagtactacacagtcaatgtcatcttcaacttcacactcttctacaactgttggccaaccaacctctattatacctgagttgtgaacatcagagccagtttcatactccaaagtatatgtccttacaacagagttgctcccatttaaaagtgacgcatctgattggagaatgttgttcctcgtggaacattcagcaccattggaccctacagattggatatatgtgatacacttagaagattgcccaccctctgactgaagcatctcatcctcttggctcttctccttaccacaaaccgccaacaaatccacactttcaccatcaaccaagtaaggtagagctttaagctatagcatcaaagtatatatgaggctcact

SEQ ID NO: 527008 - DNA, 111 bp, Homo sapiens
aggtgggcccagtgaacttttccagtaaatgaagcaagccctgaataaaaacctcctgaactgggaacaaagatttacaggcaagcaagatgcccccccaacaggcttatt

SEQ ID NO: 527009 - DNA, 806 bp, Homo sapiens
agcgggcgtggccgttctgagccgagccggaaccctagcccgagacggagccggggcccggggcgtcccccgtgaccaagagaccacactgggcagcaggggtctgctgcagaacgcactgtcggtctctggctgcgcgagatagctgtgcaccatggctggcctctcgagtgacctcctcgggatggtctctcatggtgtgacacggacggggccagcggggcagacgttgtgctgccgtgtgccttcgtagcccgttacttgtcgttgtaagttccgtgtagtcgctcttcgatccaacacgcacgacggacgcgggtcacattgtgggaccggtcgtctccgtttagcgcagttcctgccgacagccacggcggagcccgcttcggggatatcgttcgccttagctcgttgggccgacgtgagcggcctcgctctcgcgcgtgcgagtatcgtgcttctttcatgctacgtgccctgccgtcggggtgacttcacgcgtgcgcctcaataatggagggcgtcgtcgctatgatctctccgtcttctcgctcgagtggcgtgggtggtccccccggtgatccccggtgcggtctttgtggttcccgcccgtgtcggcggtgtgcgcggtggctttatactgtcgcccgagcgtcctcttggccgcgtgtacgctcccaggtgggcgtcccatacgcgcgctgtggtcccccccgtgcgtgggtacaacacccggtgatgcagccccggaggtgctcacccatcatgggtcgccccgcggcggacgacatatgccgagcaccacc

SEQ ID NO: 527010 - DNA, 343 bp, Homo sapiens
cgtcatcctcgcgtcgactctagtagtgatccccaattatgacatgaggagttgcggacaaggaatgtcacgagttccctgaatccaatacaaatctctatgcacttcaaggctgccttatagagccagctccaggactctgccaccagctttcagtctctgctgaatcctaatccattcccaggcctgcgatactacttggttagcctgtcgcgttttgcacgagacttcttttattaactcttggtctttggccatccataaggcctctttctgctccgggctttctgcagtgtctttagttgacattgtcctcacgcagtggctggaatgttatcatggg

SEQ ID NO: 527011 - DNA, 274 bp, Homo sapiens
tcacgcctgtaatcccagcactttaggaggctgaggagggaggatcgcttgagctcaggagtttgagaacagcctgggcaacagagcccaagccgtctcaaacatctctacaagaattaaaaaaaaggaaaattagctgggcatgttggtgtatgactgtagtcccagctacttagaaggctgaggctagagaatcacttgagcccacgagtttgaggctgcagtgaatcactgcactccagcctgagggacacagcaagaccctgcgtccaaa

SEQ ID NO: 527012 - DNA, 545 bp, Homo sapiens
  misc_feature (101)..(101): n is a, c, g, or t
  misc_feature (112)..(112): n is a, c, g, or t
  misc_feature (122)..(122): n is a, c, g, or t
  misc_feature (125)..(125): n is a, c, g, or t
  misc_feature (131)..(131): n is a, c, g, or t
  misc_feature (403)..(403): n is a, c, g, or t
aaaagaaaaagatggttccggtgcccaggcaacagtcccctgtcccggatgttgaggattccgcaacccaggagcctggggagagcttttgtacaaggtcntagatggttcnggccatgctncancggctncaaacctggtggcacggggttttggcctgggttaaggaaaaggtggtggccctggtccatccagtgcaggccctctggaaacagttccagagtttttgctgctttctgtcagagcttttcatgtcctctttccagtcctacggagccccccgggggggcaaggaggagcttcccccccaaaagtgctttgaaccccaatcctcaaaatgaagatactgaccccccctttgccctccccgtccccgggcaccccccctgacccctccctcagntgtcctgtgccccgccctttcccgcccactcagtccccctgcctggggttcctgccccagctttgacctggggctgtcgccctggcattttaataaaacctgcttatacttccctggcaggggagataccatgaaaaaaaaa

SEQ ID NO: 527013 - DNA, 390 bp, Homo sapiens
cagggaatgttccaagtacaaagaagtgacgacttgtttgcaggtggtatctaaactcaccatgatatgttacactacacatcgtgtgcaggcatcataatgtcatatgtcccttaggaatatgtaccaccataatgtttcgatataaaaatgaattgtaaaaattcgctgactatcagcaagaactggtaggagtctgtcgacattattaaccgtggagcgatccgatccccgttctagccactaccccagcttccatggccagaacagttctactaggtcattcacatcgctgtcctgtgagctttgcccccagaaataactaactatatggagcagagcatgggaaattccattaacagaaacaataatggttagttggcaatcacg

SEQ ID NO: 527014 - DNA, 125 bp, Homo sapiens
tctgtggggctaacacggcaggtagggttggttagattcttccctctggggctggactggaggggctggaggctgagtggcaatggtgcagctgccagcacccagtgagagaagtgcatggctac

SEQ ID NO: 527015 - DNA, 694 bp, Homo sapiens
ctacctaatagggttgttgaaaggataaaatggattagtaagtgtaaaatatatagaataatgcctggcatgtagtacatgtccattagacttcagcggttattgtcagtaatgcagatggagaggtggatagaatcagtagctatttagatcaagttgaccggatttgatgatagcttacatatgtaaggtcggaaggtaagtgcaacaagagcgaaactccgtctccaaaaaaacaacaactgtggctttaatagcaccttgatcagagttgtgaggcacagtgaaatagggtgtggttaatcattcttactttctcctgaagtagtaattccaattggccttggattatactaagcttcatagaatggttctcactcactgaaatgattaacagtttcgggaacaaagagagatgacctggagaacacggtaacacttactaaagtcatactggtatttcagacagtctgccaaatcccttacaaatcaacaaccttgagacagggtaaggaccaccatcatcatcatcatcaatcatcatcatcatcatctcctactttaccaattgaggcaaacggaggcttcgaaaaagttcactgggctgaagtcaacagccaatacgtgggcacacggcaagacttcagaagccatgcctgtcctgaattgtcaaaaggtccagtgcatcttccag

SEQ ID NO: 527016 - DNA, 157 bp, Homo sapiens
cgagatcatcagacacgggcactgacacgataggccaaggcctccttgtaccacctatagtggggcaggtgcccagacctagagccaggatagggccgctcctacctcgactgtcaatagagcacatatggtgctctagactccacgtagttaggta

SEQ ID NO: 527017 - DNA, 205 bp, Homo sapiens
gtccatgcttggctcagggcctggggcggggttctgggtaaagtcctaaccccaaagccccagcccctcatgttttgccgcccttcctccatgtgtttgtaaaaactctggcatcctttggccctgaaaaggtttttaaatgtgttatttacttctctaaacatggcgattgctataaaaataaaccaaagtttagaaaaatgta

SEQ ID NO: 527018 - DNA, 452 bp, Homo sapiens
ccatatggagaaaaagcagatgatgctgtgcggatcctcaggtcgagaagaaatgtgggaacgtcgcaaaaaagcagaaagtccagaatgtccatatgtatactcagatccaaatagcaaccgatgtgaactatgactgaatttcttgggcttccggctcccctgtgtgattcaaaaggttcattggtggccatgcatgctgctggctttgcttatacttaccaaaatgagactcgtagtatcattgagtttggctctaccatggaatccatcctccttgatattaagcaaagacataaaccatggtatgaagaagtattctgtacaatcaagcacggatgctaagaaactgatgagtgatgaggacttgtgagaattcagtctactggatttaagggaatggcttatggagttgttatttcataggcattgaaaatggttttctaaactcc

SEQ ID NO: 527019 - DNA, 357 bp, Homo sapiens
aagcattattttgtatggttctgggatgggagaggagggaatctacagattcgcgtttagttgaaaaatcaaaactccagcataggaaattaggccgttcaacatagccggtcaacatgtgaggtatcatcagtgtgagacaaggtcccggtctgtacctattggcctagctgacgctaacaaaatgggaggcttatggctctgcacagcaaattccagcaggacaagatgactttaagcccgtattcagagccctagaagcagggcactactgagtatgtaatatttagaggtgaaaatagtgcaagagcccctgatggtgcccctctacctgcttggtccagtcagccttgctct

SEQ ID NO: 527020 - DNA, 537 bp, Homo sapiens
  misc_feature (5)..(5): n is a, c, g, or t
  misc_feature (29)..(29): n is a, c, g, or t
  misc_feature (46)..(46): n is a, c, g, or t
  misc_feature (56)..(56): n is a, c, g, or t
  misc_feature (107)..(107): n is a, c, g, or t
aattntttgaaaaccttatggaatcctgntccaaaaaagctttttnaatcttcttncaaaccccaaaactttcaaagttcttaccctgtcagcggtttgtggagaantacacagagctttcagaatcttggagaaaccagatgaagagaagttatttgtagaaacggggaaggctctgttggcagaaggcatcattttaagaagagttcgagaagcaaggactgtcagcgtgagactccaagcttcatcagaaggacatgagcctcaggaagacgatgacctggcgcagcgggggcaggtgaagcaggagccagaaacagccccgtcccctccctgaggcccttcagcgcatgagcacgcccatcaccgctggcccaagctgatggactctgatggcctccatctctcagcacgtgtgccttctcttagtccctgttttcgggatgttatgaatctcagtactgtggtttgaaagcaccagctttgtgaacttttatttcaagacatggttaaataaagggttctccaatgcttaaa

SEQ ID NO: 527021 - DNA, 177 bp, Homo sapiens
aggctagaacctacaaagccatgaaagcggtacaagacgagagtactacaattagacttctgctataagaaaagtcagtcttttacctgagcagtataatatagtacaatgcttgtcatcgaaaacaaaaaacaggcccaatgaaataaaatactttgcaaggcgcaaaccaacccc

SEQ ID NO: 527022 - DNA, 834 bp, Homo sapiens
  misc_feature (656)..(656): n is a, c, g, or t
ttttttaacagcacaggaagataatatttattatatttataccctaaaaacagagcagatagcaagtccaccaggtaaaaatttttttccttaaattatgcttaaccaccaataataaaaacacaagtctcgtgcctgggtatattgtgggctccactataatggatctctccgaggggccacaaaagccagccagcataagagaaacacagttgaaataagtgcacgtgcaaaattttggagtggtgccaaaacacaaagaatcacgtgcatataacacctccttaaattgtggttcaatatatatctctataaacatgtgacacaattaattataattatattgtgggttaattgtgcgggcaaaaacttactcaaaaacatgtgcacacattaagtataatctccccataaccaaagaagattatgtgtgccctataaatagtgggggtccaatctattataacgcgccataaagcctatattctccctccctccaaaaaaatcatcaaagtgagttaaagtggttccccggcctccctccataataagtggttaataaagggtggtatacgcgtggggataaatatagtgcacaagacgtggaattttgtggtttcacaggggggtgtataagtatacgcaaggattgggancctctccgcattttgtgggtgggcccacgccgtggtgtttcccccataattttcttccagtccataaatttctttataaaataaaaattttaaatttaccattttcccaataaaggccctggggaagaataaccggtgcataaagggcaatggataatacctttaaaatcaatatacg

SEQ ID NO: 527023 - DNA, 193 bp, Homo sapiens
tgattttgtttggttcctttgccaacatttgggcacaccctttgcccaaacacgagggggaaagcagttttttttcctcagtttccaaagtaaatggggaatcccagcttttttttttactagcaaatgaccccaccatttatttttgccttttttttccgttcattgtgaggaaaaataaaactggttgaga

SEQ ID NO: 527024 - DNA, 319 bp, Homo sapiens
ctatgtgtgacgcgccgcggcagatccacgttacagccgctgctggcaacgcccgcgacggctactggccggccggcgcgctgatggagaccgacgcctcgacgggcaagtggcaggagctgacgccaacgctctcgaacagttgcgaggtcttcccgcacagccgcacccgcgtgcaggcccagcaaggcgactacgcctgggccttgtggcggccgtactcctgctgccggcgtcgtggccaggtcttcctcggcagcgtcgatttcatgtgaggaacccacgatgaacgcctcccttcctgacttcctgcgccgtg

SEQ ID NO: 527025 - DNA, 522 bp, Homo sapiens
  misc_feature (366)..(366): n is a, c, g, or t
  misc_feature (375)..(375): n is a, c, g, or t
cgcgtgcatctgtgcctctgcccgggtctcctggtccttctgccctcaatgccgagatgttcatcgtagaacccccacgtgccccgcgcctccgtgccggacgggttcctctccgagctcaccccagcagctggccccaggcccacccggcaagccccccccagtacatcccggtgcacgtggtcccggacccagctcatggccttcggcggctcccagcgagccgtgcgcgctctgccagcctgcacagcatcggccagatcggcggcgcgcagaaccgctcctacagccagctgctgtgcggcctgctggccgagcgcctgcgcatcagcccggacagggtctacatcaactattacgacatgnacgcggccnatgtgggctggaacaactccaccttcgcctaagagcccccgggaccccccctgtctgcgctggctccccccgggaacccccccccccctgtgttttaggcccccccccccccaccttctggtggggagaaataaaccggtttagaga

SEQ ID NO: 527026 - DNA, 471 bp, Homo sapiens
agaataccaacacaaacaaaactcagctatccttcaggaagaatgtgaaaagtgtataagtagtaagtcagctttagaataaaactttctccttactattcaagttatttgtgtctgaatcccaaatgactacagattagagttataggtctgcagtgccacacaggtgcaaagaataaaagcgctctgcttaccctctccaccaggactgaagcaaaaacaacagcgagctatctgtgaaagcaaaagcaacagtcaggcggcttgtgttctatttctagtccacctcagcaaggcaacagtaacccttatttgaaccacctcccaggcccttcaaaagatgtggactgttctttcccaggtgtgctgggtgttggtgacaggaaaccccatggagggagatgtgccacagagatcctcatccgtggacttggtgctcgctcctgctaccatgaatgctgagagcagagc

SEQ ID NO: 527027 - DNA, 788 bp, Homo sapiens
  misc_feature (195)..(195): n is a, c, g, or t
  misc_feature (235)..(235): n is a, c, g, or t
  misc_feature (240)..(240): n is a, c, g, or t
  misc_feature (259)..(259): n is a, c, g, or t
  misc_feature (280)..(280): n is a, c, g, or t
  misc_feature (283)..(283): n is a, c, g, or t
  misc_feature (288)..(288): n is a, c, g, or t
  misc_feature (294)..(294): n is a, c, g, or t
  misc_feature (296)..(296): n is a, c, g, or t
  misc_feature (306)..(307): n is a, c, g, or t
  misc_feature (309)..(309): n is a, c, g, or t
  misc_feature (314)..(314): n is a, c, g, or t
  misc_feature (316)..(316): n is a, c, g, or t
  misc_feature (320)..(320): n is a, c, g, or t
  misc_feature (351)..(351): n is a, c, g, or t
  misc_feature (361)..(362): n is a, c, g, or t
  misc_feature (373)..(374): n is a, c, g, or t
  misc_feature (380)..(380): n is a, c, g, or t
  misc_feature (386)..(386): n is a, c, g, or t
  misc_feature (390)..(390): n is a, c, g, or t
  misc_feature (412)..(412): n is a, c, g, or t
  misc_feature (414)..(414): n is a, c, g, or t
  misc_feature (442)..(442): n is a, c, g, or t
  misc_feature (475)..(475): n is a, c, g, or t
  misc_feature (559)..(559): n is a, c, g, or t
  misc_feature (566)..(566): n is a, c, g, or t
  misc_feature (571)..(571): n is a, c, g, or t
  misc_feature (579)..(580): n is a, c, g, or t
agcggagtctgtcggagtctgtcctcggagcaggcggagtaaagggacttgagcgagccagttgccggattattctatttcccctccctctctcccgccccgtatctcttttacacccttcttcccaccctcgcttcgcgtagccatggcggagccgtcgggcggccacttcagtcccattccatctcctcgtcngtccttcggaggcccgagccgtccgcgcccggcgtgcggngggangcccaggagcctgacccgncctggggacgaagagctgcantcntcccntgatgncnggtgcacganncntgatntnttcnggagagatgtgaagaagactgggttagtctntgggcaccannctgaatcatgnntgcttnccctgngcangctttcagatgtcatcagtgtngntttcttacctcatcctggctcttctctntgtcaccatcagcttcaggatctacaagtccgncatccaagctgtacagaagtcagaagaaggccatccattcaaagcctacctggacgtagacattactctgtcctcagaagcttnccataanttacntgaatgcnngcatggtgcacatcaaacagggccctgaatagctcattgattcgtctctttctggtagaagaatctggttgacgtccttgaagctggctgtccttcatgtggctgatgacctatgttggtgctgggtttttaacgggatcccccttctaattcttgcaggaactggtcattttcagggtgccgattgtctatgaaacgtaccagaccc

SEQ ID NO: 527028 - DNA, 731 bp, Homo sapiens
agcggagtctgtcggagtctgtcctcggagcaggcggagtaaagggacttgagcgagccagttgccggattattctatttcccctccctctctcccgccccgtatctctttgcatcgcttctctccggcgcatcgacttcttcgttggcccatgcgtcggtggctctgtcgggaggctcgacctcgagatcccgcatatccgatcgtcctcgtccgttccttgcggaagcccagagcctgtacgcgtgccacgagtgcgggcgaagggtagctcccggaccgcacttgtcacacggccgtgcgggcacacaagcacgtgtgctcagactcctgtctcctcgtggcaggggtgcatccgatatcatgagtatccctctgcatcatgacgtcgttcaatagatagacgcatgcggctgagttcattgttggcatcctagcggaagtgctctagatgctgacttcctcccctggcgaagacctttttgtggccccgggtggttcaagatagaggcgtgcttagaagggtgccatatactgagcccggtcgaatttctcccttgtggaatcccaatcgctcctaccatgggtactcagccggaattgcgaggcgattaggacggcgaactcactaaatcacaaggttggcacgaatttcattcccgcaaaaaggccctggttctgccggggaaaaattccaagaaagaggcgagctgggcacgacctccccaaag

SEQ ID NO: 527029 - DNA, 90 bp, Homo sapiens
agttgtgcttgctgtgcaagtttcattgactagtagaactcattctgtcttagtgtatatttcactataaatgtaaacattttgctcaag

SEQ ID NO: 527030 - DNA, 172 bp, Homo sapiens
ctgcggcccgttgctgggggtccttcatgccttctccagggccggtcgcatgggccgtctcgtcccacggcagcactgcccccatgtcgccttccacaccaggtgccctcggccagcacacacgggctttggctcacagtgcatggccgcgtcgcgccatgggtcccgcagc

SEQ ID NO: 527031 - DNA, 114 bp, Homo sapiens
catcttgaggatccccgaaacctaattacgcagtgttagggtatgctatcatctgtataaaatacagagaacaaaaaaggaaaaaaatgcagatacagtagcttagacgtaata

SEQ ID NO: 527032 - DNA, 545 bp, Homo sapiens
agtggacaaactggaagacagaagtacgggaaggcgaagaaaacgaatagagaacgatagggaaattagaagataaaaacatacttttagaacgaaaaaaagataagatttaaactctgaaaagtaggaagcagaagaaaaaagacaagcctaggcaacacaacaaagctaagggcaaaatgtacaacacttagaacgaaacattggacagatagaaaccaagaatagacaaactgaaacatatcggtcaagaagctttcaggactagcacaccagtggaacacacacccaacggccctaaagacacaacgcctcactcgcgccgcaacgctccctccgcacacgcaccacccaccaccatacctaaatgcccaccaaaacccgggcactcacacctaaaccaccggacaacacccctgcacgcaacctccacccgcgccaaccccaaccccagcccccacccacagcccccagtcacaaccccaacctccgccccggcgcagggaaggccagcaccgcctccacccaaagcgtcacacaggcct

SEQ ID NO: 527033 - DNA, 989 bp, Homo sapiens
  misc_feature (409)..(409): n is a, c, g, or t
gcggattttctccccgcggatattttccgtgcggaacactcccgggggtcccgcctctctggtaatggtagaaaagagttaggccccgttttattatcccgggaccgacaatgtgcccctggtcccccagaaagaagataaattgtgagaaaaaataattgtggaatttatgcccacttgtgtcagcgcacgcctctttattttggagggttaacttctccggtttttctcacaaagggaagcgtttgagggagatttttagtgcccctcttctcgccacgtttttttcttcccccaaggctcgtggtcccccgtggagagattgttccaccccctcctgggaggcctccatcaaagaaaacccctcatgggaaagagttgaatgttaaaattgtgggctcgtccactngtgcctcaaattttcccggattctcatgcactcccacactgggaaccctcgggaaaaaaaccccgctggagctctttataaggttgaaaaagagagttttcccaaagcacttttcccacactataagttatcaccaatagtgttcccaaaactctcttttatattatgtaaaccccccctctcctcaattagaggaacaccccaagttactcatattggaacaccacttggtgtaaaacaccccccacttccctctcggaatttttttttaaggcccacatttatggaataaatagcgtctatattgtccacccgctccaggattagccttttaaaatatatggttggaatattgataaccaccacccgggaagattttccttggaaggcacccatccctttctgccttttctcttttttctttgagagatctataagagagaacctgtagagttgttttccctgaccacgcccaaagactaaatgtgcacccaaatgaaggccacttgtataagaagccgatgccaaccttgtccaatatttaataaagaattatggaagcctgggaccttttttacca

SEQ ID NO: 527034 - DNA, 130 bp, Homo sapiens
  misc_feature (47)..(47): n is a, c, g, or t
ccttggctgctctctgctgacttggtcccctccaaccctgcttgggncggcccctcaaattgacagggaaaatgttgccaggccccattttccaaagtctgccacagagcctgaggtcaaaaaaaaaaaa

SEQ ID NO: 527035 - DNA, 276 bp, Homo sapiens
cttttttttttttgggggggggcggcgccccctgcccccaccccctttttttttcccccaagggggggggtgccccttttggggcccccctttacccccaggggaaagggttaaaaattttttcccctttggaaagggcgccccttttttaccacccctttaaaaacaaaaaccccctgggttttgggggggcctttactaattttcctttttttccccccctttggggttttaggacccctctttaaaagccaaaaaaaccttggtttcctttta

SEQ ID NO: 527036 - DNA, 300 bp, Homo sapiens
gcagacagcggtgggagccactgctcttgtcatggggtcagaaccacatgctttcctgcggatgacagcgaaagagactgaaggtttgatggagggagacctgtgtagtataagaccttctgctatgaagtgttctaccaggttttcccaccccactcatgagcccttttctcacaacaggtacttgccggcaacgatggactaggtgggttgggccaatcttcctgatgaagacaattagaaaagcaagataaccatcactcttcacagaactagaaaaaacaatcctaaaattcatat

SEQ ID NO: 527037 - DNA, 251 bp, Homo sapiens
tagctgggattacaggcgtgcgccaccacgcgcagttaattttgcagttttagtagagacgaagtttctccatgttggccaggcatggcttgaactctcgacctcaggtgattcgcccacctcagcctccctaagtgctgtgcttacaggtgcgagccaccatgcctggccactccattcctttttatggctgtgcaatatttcattgtatgtttattcaataatttgtttatctattcatccacacgcgg

SEQ ID NO: 527038 - DNA, 89 bp, Homo sapiens
gatttgctggtgcagtacaactaggcttaatagggacatgcctgtgagagaggagataaaaaaaaaacgttagaagcttgaattcgagc

SEQ ID NO: 527039 - DNA, 179 bp, Homo sapiens
taatgttctggaagctatgtgtttaaatatttttctggtgacttggtaataaggtctggattggtttaatgtgtgggcttaagctaaaggttccctaaaagctatcttctaagtaagctggctcactgtggttggctaaaattaaaatttggggcgtgtcaaaatgtgcaaaaaaaaaa

SEQ ID NO: 527040 - DNA, 1023 bp, Homo sapiens
  misc_feature (1)..(1): n is a, c, g, or t
  misc_feature (3)..(3): n is a, c, g, or t
  misc_feature (9)..(9): n is a, c, g, or t
  misc_feature (136)..(136): n is a, c, g, or t
  misc_feature (178)..(178): n is a, c, g, or t
  misc_feature (188)..(188): n is a, c, g, or t
  misc_feature (200)..(200): n is a, c, g, or t
  misc_feature (217)..(217): n is a, c, g, or t
  misc_feature (222)..(222): n is a, c, g, or t
  misc_feature (231)..(231): n is a, c, g, or t
  misc_feature (236)..(236): n is a, c, g, or t
  misc_feature (239)..(239): n is a, c, g, or t
  misc_feature (251)..(251): n is a, c, g, or t
  misc_feature (272)..(272): n is a, c, g, or t
  misc_feature (287)..(287): n is a, c, g, or t
  misc_feature (291)..(291): n is a, c, g, or t
  misc_feature (293)..(293): n is a, c, g, or t
  misc_feature (297)..(297): n is a, c, g, or t
  misc_feature (299)..(299): n is a, c, g, or t
  misc_feature (309)..(309): n is a, c, g, or t
  misc_feature (342)..(342): n is a, c, g, or t
  misc_feature (408)..(408): n is a, c, g, or t
  misc_feature (503)..(503): n is a, c, g, or t
  misc_feature (510)..(510): n is a, c, g, or t
  misc_feature (516)..(516): n is a, c, g, or t
  misc_feature (520)..(520): n is a, c, g, or t
  misc_feature (583)..(583): n is a, c, g, or t
  misc_feature (590)..(590): n is a, c, g, or t
  misc_feature (608)..(608): n is a, c, g, or t
  misc_feature (625)..(625): n is a, c, g, or t
  misc_feature (884)..(884): n is a, c, g, or t
  misc_feature (989)..(989): n is a, c, g, or t
nanacccantttaccagctttacttttttaaacctaagcttaacattacatatttaaacaattgtcaaaacttactaagttgccagcattcatgcacaactagaaaacatccttaatttatattaaaccagaaatntattaccattaatgtattaatatctttcactactaaatactnaaaaaaattnaaattatttctntagaagaatcgtcctgncaatnttaacttcncagcnggncgacactacgtngctcacatttcagacacaatnaaaagcaggtccatnctgntnttantntacaatcttntcctacactaaagagtcaagactcaccttggantacgtttaataaaaaatcaaagttcatacagagatttacaacaattttaaagacaaaaaaaaaatngtcctattattttgtcccaacaatcaactcaaaagtctattacaaatagaggctccgattagctttttataaatactttaggtacaattatactnaaattcnatttcntttnaaatcttcaaaaaaattttccttttaatcctcaaatggtgcttgttatagtttaacatttctnttaagtncgtgcgttgaattacttnttatccaagcgcagagnctgctccttaccatttattgttaaggactttaactggccatcttcttcaacttctactctttcttgaccgttctcgacaattctctttgtagtgatttttctgccattaaccattttagttgaagttgatatcgatttgaagttgcccatgccactaccaccaaatgacgtggaagagaatgaagtgaggcccccgtgacctagtgacccaaatgaagtaaatcctgtatcaaaagaagaaaatccacttccaaaaganggaaatccactgaacgcagagaaaaacgaccccgtccctcggcttctgcttcctcggggaccccttcgattccaaagaagtcctcaaaagggtcttcaagaagtnaattgaaatgggtccttcaccaaaaattcctgaa

SEQ ID NO: 527041 - DNA, 269 bp, Homo sapiens
tatatgtcatcatcggcctgtctgtggctggctccctattcccatcccacgcctgggaacggcgcacttgctaaggcaggtcaaggacgatgcagctagacctgccgcccaagccccacgaatactagagcaacagcttcagcctacggtgggccttctcgtactctctcactcgcatgcccgcccgcggctatccatgcgcgtcagagtactggtcattaactacaatgtacgaaggaagtacgtattcgccggcggacaggacggca

SEQ ID NO: 527042 - DNA, 1022 bp, Homo sapiens
  misc_feature (1)..(1): n is a, c, g, or t
  misc_feature (3)..(3): n is a, c, g, or t
  misc_feature (9)..(9): n is a, c, g, or t
  misc_feature (136)..(136): n is a, c, g, or t
  misc_feature (178)..(178): n is a, c, g, or t
  misc_feature (188)..(188): n is a, c, g, or t
  misc_feature (200)..(200): n is a, c, g, or t
  misc_feature (217)..(217): n is a, c, g, or t
  misc_feature (222)..(222): n is a, c, g, or t
  misc_feature (231)..(231): n is a, c, g, or t
  misc_feature (236)..(236): n is a, c, g, or t
  misc_feature (239)..(239): n is a, c, g, or t
  misc_feature (251)..(251): n is a, c, g, or t
  misc_feature (272)..(272): n is a, c, g, or t
  misc_feature (287)..(287): n is a, c, g, or t
  misc_feature (291)..(291): n is a, c, g, or t
  misc_feature (293)..(293): n is a, c, g, or t
  misc_feature (297)..(297): n is a, c, g, or t
  misc_feature (299)..(299): n is a, c, g, or t
  misc_feature (309)..(309): n is a, c, g, or t
  misc_feature (342)..(342): n is a, c, g, or t
  misc_feature (358)..(358): n is a, c, g, or t
  misc_feature (362)..(362): n is a, c, g, or t
  misc_feature (370)..(370): n is a, c, g, or t
  misc_feature (409)..(409): n is a, c, g, or t
  misc_feature (419)..(419): n is a, c, g, or t
  misc_feature (445)..(445): n is a, c, g, or t
  misc_feature (467)..(467): n is a, c, g, or t
  misc_feature (472)..(472): n is a, c, g, or t
  misc_feature (491)..(492): n is a, c, g, or t
  misc_feature (495)..(495): n is a, c, g, or t
  misc_feature (502)..(502): n is a, c, g, or t
  misc_feature (507)..(507): n is a, c, g, or t
  misc_feature (516)..(516): n is a, c, g, or t
  misc_feature (518)..(518): n is a, c, g, or t
  misc_feature (521)..(521): n is a, c, g, or t
  misc_feature (541)..(541): n is a, c, g, or t
  misc_feature (582)..(582): n is a, c, g, or t
  misc_feature (589)..(589): n is a, c, g, or t
  misc_feature (607)..(607): n is a, c, g, or t
  misc_feature (624)..(624): n is a, c, g, or t
  misc_feature (883)..(883): n is a, c, g, or t
  misc_feature (988)..(988): n is a, c, g, or t
nanacccantttaccagctttacttttttaaacctaagcttaacattacatatttaaacaattgtcaaaacttactaagttgccagcattcatgcacaactagaaaacatccttaatttatattaaaccagaaatntattaccattaatgtattaatatctttcactactaaatactnaaaaaaattnaaattatttctntagaagaatcgtcctgncaatnttaacttcncagcnggncgacactacgtngctcacatttcagacacaatnaaaagcaggtccatnctgntnttantntacaatcttntcctacactaaagagtcaagactcaccttggantacgtttaataacccngccnggtgcctncgggggtttcccaccattttaagggcaaaacaaaatggncctattatgngggccccgccctcccctccccggtcnctggcccatgggggctcgcggngggcngtttttccctcctttgggnnccnttgtccnggggncgggttcgntnggnatcttcccggacctgttccngttgatcctccgctggtgcttgttatagtttaacatttctnttaagtncgtgcgttgaattacttnttatccaagcgcagagnctgctccttaccatttattgttaaggactttaactggccatcttcttcaacttctactctttcttgaccgttctcgacaattctctttgtagtgatttttctgccattaaccattttagttgaagttgatatcgatttgaagttgcccatgccactaccaccaaatgacgtggaagagaatgaagtgaggcccccgtgacctagtgacccaaatgaagtaaatcctgtatcaaaagaagaaaatccacttccaaaaganggaaatccactgaacgcagagaaaaacgaccccgtccctcggcttctgcttcctcggggaccccttcgattccaaagaagtcctcaaaagggtcttcaagaagtnaattgaaatgggtccttcaccaaaaattcctgaa

SEQ ID NO: 527043 - DNA, 805 bp, Homo sapiens
agcggaagagagacgcgcgcgcagtcgcgcgcgggtcgtgccgtaccaccgtcgcgggcaggctcggccacgagcgccagagccccgcgcctcccctcgcgtgctgtcccaagtccctgccccgaaactagagcgtcacttccgacatccccggcagcggtaggagagcggggcgcacggggggagggggccaggtcggagggaagcccgcccgtgccctgaagcccgacgcccgagcagggactacatttcccgaggggcctcggcaggacggcatgcgagagaacgggacgcggaaaacgtcccccggaagtggagcccgggacttccactcgtgcagtgaggcgaagaggagccggagaacagagaaccaagagggccgagactcgggtttcttgaccaagtatgagccgggggctggaccccgtcaagtgaatcatcaaagggataaagcaccaagcagtttatggactgggcggaggaaccgcaggtttcccttggcattcaaaggccaggaaaccagcatgaatgaggcgaatcagccccggattaattttatcaattgtgggatcatttgactgggacccatcaaggaattcacaccccatttggaagcggacgaggaatttttataacaccgtggtaaacgttattccctttgcccagaaagaaataccgcaaaggggacagccactaaaaagtacggtgttacatgacgcaaaaatatatgcaatccctaagtgtaagaacaagtaggcgcacgacattagtgtgtagaataatgtggaaagaatgagtggtcccc

SEQ ID NO: 527044 - DNA, 457 bp, Homo sapiens
  misc_feature (171)..(171): n is a, c, g, or t
ctgcgtcattctagaggatcccgcaatggtcctgtcggttgcacagcaaggctcgtcctgccgccgtgctgtgatcacctttggtgccttcctcatcggggccctgtccactgtgcactctggtacatctactcgcacacgcgtcccccagcaagcgggagcccgtgttgncggtggctgccccggcctcctcggagagcagcaagaacaaccacagcatcgggagcaccaagagcaccccctgctcgaccagcagcatggaatagccctggcccccggggctcgcccagcaggaaagactgagcagccggcagctgggagcactggtgtgaactcaccctggggagccagtcctccattcgacccaagaaattgcaggctggctctcggcgccatacctttcccggcatccctctcaagagggccctgcttgcgcagtgcgcccactgggtttgga

SEQ ID NO: 527045 - DNA, 302 bp, Homo sapiens
gtatatagtgctctatttatatagtcaactatatattaactatacgtagcctgaagtgtcataaaaagtattaagtcatctgttttctacctggttgtctttgtctctttttataatctcctgaactcttcatagtttaatatgaactcataatggagacaaatgttacatatttgttaactttgtctctgatattgcacaaacttatgtctcaaactttatcagtgatttcctctgtcatttcttccagaatttctttttttttctgttttatatggggaaaaggggcctggcccggtcca

SEQ ID NO: 527046 - DNA, 523 bp, Homo sapiens
caagtactagacaaagcagaaatgtacaatatactggtctgtgtataccagagaaatacatagaagaagagaatagaggggatgatgtgacttgaagtatatgcagcttattttcccccccactgtcagggcagaggcccattattaatgaatgtggttgcatgagctgttcttatgttaaccacatatttttgtcttcccaatgccacacagtaggtgatatcccgtgtgacatattttcttcatagtccctaatatagtcatcctctacagagttggcgtgctgtgtgcactggggataaggaacagcagtggggctgtaaccgagtctcttctctggccctttgcctttatgtcagcttgcagctttcgcctcatttattcctagtcagatcccaacggcctgacttaagggaccagaacggagatagggatattacaatgcagagggggaggggaagggatggtagagatagacagctctcccctactaggtagggtcatttcccctaataactataga

SEQ ID NO: 527047 - DNA, 800 bp, Homo sapiens
cccaccgccgtcccgaatcctggaattaatattaaatggcttattgaaaaggcccccagggtaggaaataaaaaaaaaaaaggggttccatttaagcccctaagcccctaataattaatggttttttctggtccaaaagggaaaaaaccaaaatttcttcaaaatagggaaatttcttaaaaaaaataattttaccttaaaagggtaaaaaataaaccctacctttaaaaaatggtttttaatttcccaagtttgggaaagggaaaggggtaccaagggggaggaaaaatccgccaaatttattttttaggggggaggaaaggtaataattttaatttattaaaggaatgggtgggtcccctccaaaaatttaagcccctaccccattgggccaccggtaaggggggccaggccagccttattattttaggaatttttaccttaagaagggttggccttaaaggtttaagaaaaccaccttaggggctttttttaatttggaggggccaggggggtttttaaataaatttggattaaggaatggccttttttttggtttttgggggtttggggttttcttttcttgggggaaggaagaaaatggggagggggaccttttaaaggttaggaaaaggtaagcctttccttggattaaaccaaggaccttttttcttaggttaggccaagggttttcccacctttccccaccgggggttaaccccttttttttaaggggtttccaataaaggtaatccttttttttcaccccaaagggtaattttacccaaaaataaaaggcc

SEQ ID NO: 527048 - DNA, 522 bp, Homo sapiens
  misc_feature (1)..(1): n is a, c, g, or t
  misc_feature (517)..(517): n is a, c, g, or t
ntttttataattactgaactctctgttaaacctttcgtgtgtgtgtatgctgtatgttgtcttcatgccaaacgcctttctggttctggccaattttggggtccaggctgtgaccagaggataaaggttagtcagagaatgtgaatgatctgaaaaatccatctcatgccctccccttaagtagaaagtttcctcgtctaggtctcccttcagaatgggctggctggttagatttgtacctaggggccacccacagactgaaaagataagcctgctatggtccctgggatggccggtggtttaccctggtggtcttccaacatgggcttgacttaacttgaatttctggggcaccattttggacctaacaggctcttaacctgcacctataaagacaaaaatgaaaccaaacccagctttagttgggaggctgaggtttttagcagctagtcattttttcctaggtgcattttctctctgaaatgatagggactggataacttctaaattccttccngctaa

SEQ ID NO: 527049 - DNA, 940 bp, Homo sapiens
tctattactttccccccccctaactaagggactattatggtggggggtttaaaattaagctctaagggcttagctatgggggttttctgggcgggggtccgggctcccggtctcccgggtcttcccccggcccggccctgggggccccaagggcccctcggtctcctccaagcccggcgaggagtggggggcgccggggccggcctttaaaaggggagggccaggggaacgcagaggcggggagaccgggccggaagactccgggcgcccctcgcacctcctctccccatgaggagggcgcgcaataggggacctcccgggggccctcctcttttcactcagagggcggggcggagaagacacgcagaaaggggggactgcgcctcctcgcgggagtggcgcgcgcgcacatatctctcgcggagaacctcgggggcgacccacttcccccgggggcggcccacacaccaacaccgagactcgcggacaaggggagcgtgggggaagacgcgggacgcggaaatacaacacaccggggacagcgagaaatagtaacgcgaaacgcgcaggggggcatggggaaccacatttaaataaacgcacttcacaaaataatacaacgcacactctggggatcaagggacgcgactaaaaaggggagatcccatacagagcaccggggcccaccaacggcgcgggggacgggcacacccttataccccccgttagggaaaccacgcgacgaggaggcgctacacaaaaagacgcccgacatccgtaaggtggagaagtcaggagagacaacactcgccgggacaacaggcaccggaagagggcagggacaacggagagaagcagacgagacccagagaaagggtacacggagaaagcaggagccgcacagggaacgacgcagaacaccaaaacgcgacggcaaaag

SEQ ID NO: 527050 - DNA, 117 bp, Homo sapiens
aaaccctaattacgggaggctatgtgttcatggtcatcaattagttaacttcttccatttggtgaaggtttaatcatccgtaaaacaacttatgaaatgtgcatcagatcctgttat

SEQ ID NO: 527051 - DNA, 1489 bp, Homo sapiens
gcggcgtcactgacgcttcgctccgtgtcctcggatcccgagcgcggggagtgcagaccagacatgtgagcatgcattgatccccaatcctgcgtgccgtccatggggacacagaagcccatccgatggatgcccgggtgattggattggagccaggacctcacttccatcacatcatgaacccatgacccatgacaccatcccagacaccctggaaccaacaacccatgacagaacaccagaaaaccatggatcatggaaccctggggtgagagaaagagcgatcacagagaaggaagatccacaaaaaaaaagagcacatgagaataaaagaagacaatgagcaaacaatggacatacacataggagagagcaaagcacacatcacatgcaaatggggacagcacgatcatagaaacaaggccacaagacgccacaaccaacaatcgggaacacaacatccgaaaggaagaagcaagcctacagcaccaaaccaagagagaaacggaaagaaacatgcagcaaaccacgagaagcaccacacaacaaccaccacgaccgtggcaccaacacgagcgagaaaaaaaccaggcatgagcaagaactaggaacgaggagagcaaacaagcaccaaaaacagacgagagcagaagacgaagaccacaacaagaagcgagcacaaacaaaacataagacgaacaagagacaaacccagaagacagacacgaaaacgaaacagaaaagacagcacacacagcagcgacaaagacgcagcgagaagacaaagcagaaagaggacaaaaaagcccgagaggcaagagccaacaagcaagagcgcagggaaaggacgacaccaccggcacaccacggccaggaaagaaagagggcacaaacgaccccccagcagagcagcaagcaccaaagaccagaagaaaaggacaaagaaacgaaaaaagaaacacaagagaaaagaagaaaacacgacgaacacaggaaaaacagaaacaaaaagcaaaacaaggagcagacaaaagaaaaacgagaaaaaagaaaaagagagagaagagagagcggaacacaaccggcaacagacacacacaaaaaaaagaaagcgcaacgcaaacacgaggaagagggcgaagagacgcggagacggggccggaggaaggaaagaggagaaggacaagacaaggggcgaagcagccgaacgagcgagggcgaggaagagagaggagccgaggcacaaagacagaggcgaagagacgggagggagagggagagcaggggccgagagggcgcgagaagagacgggagggagagcggagaggcgcagaggaagcgagagagaaaggaagagaacgagaaacgggagacgggaggaggccgaggaaagagagagaaagcaagaggagaagcgacggcaacgaaagagagaaagcacagaagcagaaccaagacggagcgagcgcgcgaggcgcaaggagagggg

SEQ ID NO: 527052 - DNA, 319 bp, Homo sapiens
agcaggagatctgccgtactggggagggctgctgagtatttgtgcgggctgtgggtgtctccgagtttggggagatcatttagggaaggaacggctggcagaggaggatgcctcttctgcggagtcctctccttccctcaccaaaacttggcatgaaagggtgggtcggtcccacatccccaagctgcgcaggtggcaggcggctgctttattcaagcaactctggggctcgactgacaggtagaggtgcatcaggcgtggagcctctatgccatatactctccttacagattacccctgtagctggagggaccggctg

SEQ ID NO: 527053 - DNA, 739 bp, Homo sapiens
  misc_feature (39)..(39): n is a, c, g, or t
  misc_feature (97)..(97): n is a, c, g, or t
  misc_feature (103)..(104): n is a, c, g, or t
  misc_feature (113)..(113): n is a, c, g, or t
  misc_feature (123)..(123): n is a, c, g, or t
  misc_feature (141)..(141): n is a, c, g, or t
  misc_feature (187)..(187): n is a, c, g, or t
  misc_feature (193)..(193): n is a, c, g, or t
  misc_feature (200)..(200): n is a, c, g, or t
  misc_feature (229)..(229): n is a, c, g, or t
  misc_feature (233)..(233): n is a, c, g, or t
  misc_feature (258)..(258): n is a, c, g, or t
  misc_feature (267)..(267): n is a, c, g, or t
  misc_feature (272)..(272): n is a, c, g, or t
  misc_feature (293)..(293): n is a, c, g, or t
  misc_feature (296)..(296): n is a, c, g, or t
  misc_feature (301)..(301): n is a, c, g, or t
  misc_feature (304)..(304): n is a, c, g, or t
  misc_feature (329)..(329): n is a, c, g, or t
  misc_feature (342)..(342): n is a, c, g, or t
  misc_feature (434)..(435): n is a, c, g, or t
  misc_feature (474)..(474): n is a, c, g, or t
  misc_feature (484)..(484): n is a, c, g, or t
  misc_feature (495)..(495): n is a, c, g, or t
  misc_feature (523)..(524): n is a, c, g, or t
  misc_feature (578)..(578): n is a, c, g, or t
  misc_feature (600)..(600): n is a, c, g, or t
  misc_feature (629)..(629): n is a, c, g, or t
  misc_feature (691)..(691): n is a, c, g, or t
tttaaatttacgttactggccatgaagatccagcaaganaccaccctttcccccacacttcagaaaaaccagccaattcctgtcctacgaggattgntcgtgnnttaacagtncttggctctnccttgtcagcatccaganatcccgcgtgttcagatctctgtaaacttgaggagttcagcagtgnccaatnagctagnaatgccccaccatcttcttcactgcattncagngtagcaaggcacctaccaacaatgnagtttgggnaatgngccatgaaaaacataatggcntgngagtnagncatacatcctaggtctgccaattgnatgaggacattantgggaatgtaaaattccaggagagcattctgtttattgctcactctccaagttactagcagtgggcagtatcagagagaaaacagtagaggnntgtggcaatagctcatatgtgataccttagtagagctantaccaaactnaacaaaatgcnaactacagtgggacaaagaactgactcnnatttgagttttatttgtggcttcaagcaacctccaaactaagaggctcataatntaggaaataattttaatgcacngagggatcagtaatttgcattagaatatnattaaatttatgttttgtaagagttgcatatacttcattgttgaattcggtgccaacagtanacaaataactaaatgagatataacctcaaatatacccacttgcaaaac

SEQ ID NO: 527054 - DNA, 302 bp, Homo sapiens
  misc_feature (54)..(54): n is a, c, g, or t
  misc_feature (93)..(93): n is a, c, g, or t
  misc_feature (159)..(159): n is a, c, g, or t
  misc_feature (216)..(216): n is a, c, g, or t
  misc_feature (267)..(267): n is a, c, g, or t
tagaagcctaggcacagtggcctcacaccctgtaatcctcagcacttttggagncccgggcgggaaggattacttgaggacaggagttcgagnccagtgtgagcaaaatatggagaccttgtctctacaaagaatagaatagttgtgggtgtggtggtnccagatgtggtggtacacacctgtgtagttccagctacccgacaggctgaggcgggnagagctcttgagcccgggagttcaaggctgcagtgagctatgattgcgccnctgcactttaccctgggtaacagagcaagtccttg

SEQ ID NO: 527055 - DNA, 318 bp, Homo sapiens
tgagacagagagtcgctcgtcgcccaggccgcagtgcagtagcatgatctcagctcactggaacctccacctcccgggttcaagcgaatcttctggctcagcctcctaagtagctgggactacaggcacctgccaccacgcccatttaagttttgcatttttagtagcgacgggttcaccttgttggccaagctggttttgttggccaattggctctaaactgctggcaaaaaaaggaatggatcagattggcttgaatagggcagagctaacctggaatcacctgtgtgatgagaaacagctttgactgcattttac

SEQ ID NO: 527056 - DNA, 1302 bp, Homo sapiens
cctgaggacgccgccgcggtgctggcgccgcacgtgtgtgcggccggctgcctctcacgtccgctacgagcccgcgcgcgtgtgcggcccggcgggtgtgcgctggtgaggctgcggttgctggtaggcatgtgcgtcacggccgggtgctagggttgcggcgcatctgctgcggcgtgccctccggggctggctgggtgcggtgcgtgcagcgtgcgtgtgtgttcttgtcgtgtgttggtcgtgtgtggtgtgtggttgtttgggtggtttcatgtgggggggttgtgtgtggtgtgtgtctgtggtttgtggtgcgttgttggtgtttttcggtgtgctcttgggtgtgtgtgtgtcgcttgtgtttcagccgctggtggtggttatcgggctaccaagtgggaggcccagggcccctgttaggttgtgccgaagcaaacaaagagggagtttgtagggggggaccaactttttaggaactgtcgtaaagggagtccccacagagtgtgtgtgggtgcgcaaagaagatagcccagcggcgtttggtgtaaagatgggctggccccgagggggacttgagtttacacgggttctctaaaggggtttcgcgagagcccattggagttggcagaaatgtctggccaaacagaaggagggcgccgacaccttgtccgataagtgggagacgcacgctctgcccaaatggtgatggcggcaaatgggtggcacaagttgggatgggtgctcggtggcgcggaacgtgggatctcacaaggtgtgtctcgtggagtctacaagaaggaaattatagcgcagaaccgtatcaagccagcgtggagccccccaagtgtacgtttgatagggcgccccccaaagtttctcgtgtgcgcggtatctccagggactggagttcccaccgcaagagccttgtggggcatggagacccggccaaccagacagagccaaagagtgttctcgtgggtgggtccagttaagacggagaatctcgggcccaacgcgaagaccgtgccacacctctcatatatggtgcgggacaccacccatctcacaagaatgctctgcgaccacaagcgctagcagccatctagacaccatgatctcaccaagaacaagttccgccccagacacatgcgcatggccaaccatctcccatgggccagcgccatctctgcgcaacctagaagcactgtgatggtgaagaaggataacggacccgcccccccaagagctcctgaggccccctgcccccagagccaattaaatcaactggctttttcc

SEQ ID NO: 527057 - DNA, 251 bp, Homo sapiens
  misc_feature (133)..(133): n is a, c, g, or t
  misc_feature (183)..(184): n is a, c, g, or t
agtcacggagactctcctgctgctctgcggtttttgggctgtgttgacatcaaggatctaccagtgtctgagcagcaggagagagccttcacgctggggctagcaggacttctcggcgagggagtttttaacnttggagaactcctcatgcaccctgtgctggagtccctgaggaatactgannccggcagtggctgattgacaccctctgtgccttcaacagtggcaacgtagagcggttccagactctg

SEQ ID NO: 527058 - DNA, 346 bp, Homo sapiens
aatgaaggggaccctgatcgacaatcagttcaaataatcaagatctttctgggttcagactggaggcagcagttagatgaggaagagtagcttcaagatgtgttttcgtttctgtttctcccagaagggttttctgaccatcctattggttttctgacactttttcttttcttccattgaagtccttgactccatttcacttgctttctaggaggtagattgtttgtaaaatctcctgtatatatgttttctgtctttcttgtctttgagatcaggtcttgttacataccagagtatggccttgaactttgtgagcctcctctcctgtcttagtctctctctctct

SEQ ID NO: 527059 - DNA, 236 bp, Homo sapiens
atttcacttcttactatttcttgagacagagtcttactctgccacccaggtgtggagttcaggtggtgtggtggtctcggtcactgaaacttcacctcctgggttcaagcaattctcatgcctcagcctccccagtagctgggattacaagcacgtaccagcacgcctgtgtaattttctgtcattgcagtgcacatggggtatcgacatgttgcgcagtttgttctcaaactcct

SEQ ID NO: 527060 - DNA, 295 bp, Homo sapiens
gggattgaacccaaaacctcatggttcctagtcgtgatttgttaagccaggagccacgacgtggaactcccaggccaggggttgatagtcactagctgtttccgtcgtgtctacaccagagccacagcaacgcgggatcccagccgtgtctgcaacctacaccacagctcacagcaacactggatccttaacccactgagcaaggccagggatcgaacccaaaacctcatggttcctagtcggatttgttaaccagagccacgacgggaactccgttcacttaatgccgctagcg

SEQ ID NO: 527061 - DNA, 921 bp, Homo sapiens
aacactggaaaattgagagaactctcattacatgttcttaacacaataacaatcataataaaacaattctaaagatgaataaacataaaattcaagcatagtgtatagtctgaggagaaggccacatgggtcatggtgcaagcacacaggtggatgtggccagtagtgtaatgttctagtatcttcaagtaaagtaagtaagaggttcatggcgtatcactttctatacatagcgctattatatacttaatcttttgagatcaacctaacattaccttaaccacaacaggtaacaaccatctgtctacaactcaaagtgcatgtcattaaaagtggaaacaaacaatgtacacttgaagaggaccatggtaaatgtaatatgtatcattttatatagggggaagaaaaattataagatatatagataactagtaaacaaaaataaaagaataatatactaaaatttaaggaaaatggcacatacaaggccatacgaatcaacacatccacagctgtacaacagaaacgacaagtgaccaggactagcaagatggctcaaaacctaatactacatccctaagacaataaagcgaacgagccaaaaagacagggagagaacaacaaccctgaagggccaagagaagaatgagaaaccagccaataggcccaacaatgggcgaaaaacacccaaagcacgaacaacacaaacaacggaagacaaaaacatggagatgaaagagtgaaacaacaattaaggcacaaaccggagatacaaacgcgaaagacaaaaacgacaagaaaaaacaacaataaacacacacaagccaagagaagaaaaaagagacgagaaaaaagacaacaagaaacaaaacgccctggagaacagaagggaccacaaatgacaacaacaacacaaaaaac

SEQ ID NO: 527062 - DNA, 546 bp, Homo sapiens
  misc_feature (57)..(57): n is a, c, g, or t
tccgcttctccacccacccctcctgcatgcaagtccttccccaggaagctgagcagncaggcctcatgggtccctcttggggcacctggtggcttcatctcgggatttggcttgcttgatgccaagtcctgtctgtgccctggaggtctggcccggtttcaagtgcactgaggggcaggtggctgcaaatcgcacttcctcccccgggcgtaagcttctctctggtgatgctgcttatgggctgggggcttcctgtgggccagactggtccctggactgcagggtggccacggggctgaggtctccgctgcctctctgggcagcccctccccaccatggtgcctgggcctggggtgcctctagcaaggctgggttcgctctgggggcctctggtccgagtgtgcatatccgctacagggacaagctgccccgagcaggaggtgggggattctgggctccaaagggcagaaggcctggctctttggggtgggccttgtggggttgctggggtcaggagctgaggtggtcgtttcccttccagaggcc

SEQ ID NO: 527063 - DNA, 1168 bp, Homo sapiens
tttccaactttccagaagtttctcgggacgggcaggaggtggtgtggtggactgccatatatatgatccctggtgagcagggtgagctgggcataagagtagaatctgatgtctgctgtgctctgagagctgagatgtcactgtccctggctgctagcccagccctgacccagtgcccaccgtggtgcacgcaaaccacttcctggccatgcagctccctcctgcttctcagactgccttcttgcctcctggaggctggccctgtgccgccgaggtgaagaaacctgcagcctgaagcagctcctgtgcactgcggagaagtatgagccccaatggctggacacgcttgccgagcgcagcgcctggctggccattcagcttgtaccaggccatggccaaggaccaggcagtggagaacatcctgggtgtcacaccgtggtgcgtggactcgatcgactggtggctctgtgtcagctggcccggcaatcgtgaccacaggacgtacgcaaggccaagtgcagtgctggagacgccgaagcagctgcagagaacgagcgacggtgcacgcccgggccttgggcagagctgctgacgcctcaactccagcaaagatccacgggcggcgcaaaggtgacctgggaacgactggcgcagcctcgactcggtacgagcacccaggcacacggtgcaccctccagccagcatagaccaccacaagcggcaagacaagacaaagaaagcaaaacacacatgggagacagacacgcccaagacgcacattgccggaaaacacgagaccacagcgacaggaagcccaaacagacacatgggcacgcagcccacaaaacccaccgaaacagcgacaggcactgcgcacggcaggcgaccacgcagatggaaacgggacgcacgggcgaccgagacaaggagaggcccccgcgtgaggtcaacgcggaccagtaccaagccaacgccacagacaggcagatggaagaaagcaaccaccagaaaacgaaggaagggaaccaacgcaggagcaaatgcaaacgtcggcaaccaaaccgcagcggcgcctcacacataacgacaccacgaaacccgacacacacaaacaagcgagaagaagagcaaggaagcagagaagagacgaaatcacacgcgcacaacc

SEQ ID NO: 527064 - DNA, 170 bp, Homo sapiens
atcctaagctttggtcagttcatcctcactccccatatatgaccgggcaagaagaagatggtggtgatgcacccaatgccccgtgtcaacgagataagcgtggaagtggactcggatccccgctgcagcctacttccgccaggctgagaacggcatgtacttccgcatgg

SEQ ID NO: 527065 - DNA, 370 bp, Homo sapiens
gtagagcataattgtgaccattacgtattgtctttattatgattgattatgtatcactctccggagatgttgtatggcgtttccactttgacacacgggagtggatcatcgtgatgtttaataccgagtgtcaacttgcattggatgcaaggatgcaacgtattgatgctgggtgtgtctgtaagggtgttgctcatggatattaacatttgagtcaatgggctgggaaaggcagaaacacctttcatctcggtgggcaccatctaatcagctgccagtgagtctagaatataaagcagtcagaaaaacatgaaaagactagagtggcctaacctctcagcctacatctttctcctgtgatggatgcttc

SEQ ID NO: 527066 - DNA, 757 bp, Homo sapiens
gatgaaaccccatctctactaaaaatacaaaaaaaaaaaatgggccaggctgggtagtgcacacctggtaatcccatctattcgggaggctgagacaggagaatcacttgaacccaagaggtggaggttacaatgagccaagatcatgccactgcactccagcctaggcaacaagggcaagactccatctcaaaaagagagagagagagatgtaatctacataaaattcacacgtttggaagtggcacaatccagggttttaaatggggttcacaaatagtggggattatcaccacagctgggttttagaacattttcatcaccctaaaagaaagcttttacccttcagtcaatcctcatttctccccaaacccccaagcccctgggcaaacaccattctactttctggtcttaatgggattggtcatattcgggacgttggatattaaagggattcatacaaggaaaaaaaaaaaaaaaaaaaaaaaaaaagtgtgtgtgggggcggctggggcccctggaaaaagttttataagaaccttggggtggggacgcgggggccccaagtgggtatagggaaaaggggcccaaaggggttcccagaaaaaaccggggcaagacaaggggggggattttcccaaatattaaaagaggccgcggggggaaccagagagtttgtggaaaaattccgaaaggggattcggggaggcaagagggagattttaaaagggggagtccaaggagctgaattcaattg

SEQ ID NO: 527067 - DNA, 837 bp, Homo sapiens
tagtgttaaaaacaaactatttaattgtaaaaaaaagtttaaagtctggtttccaaactttgctaggggttctagttaactttagctgttttatatttggaaaaggctttaattaggatctggccccatttacaggtactttcttaggatgtatgtatgtaaaataaagctttcttataaaggcaaaaaaaacaaaaaaaagaaaaaaaaaaaaaaacaagaaaacaaaacaaaaaaaaaaacaaaagaacaaacacaaagagtgggcgacagggactcccaccaagaagagaaaaatttagtccaaacacaacaccggtaggtgggcggcggacgccgccaacaacaaagggaagagaagaacacacgcagcaggaagagcacagctccgcctaggaaaacagacggcgcgataacagacaagacgtaggtggagagcggccccacaaacaaaaaaaagaaaaagcagcgcggggagagcaaaaaaaagaagggacagaacaaaaacaaacccaccggaggaggaaaaacaggagaaactcaaaccaaaggcgcgaaccaaaaaaaaaacagaaagaaacacgcaaaagaacgagagacaaaaaaacacaataaataaacaccagacaacggagagaaagaaaaacaagacaaaccaggaagcacacgacgaagctacgaaaagaaaagacaccagaaaaaaacaagagacgcgacgaacacaagacaaacaacgaacgagaagcaacgacaacaagaacaatccagacgcataaaacaaaagaacgtgagcaataagagccgaacagaagaaccacaagaaaacagaagcagaac

SEQ ID NO: 527068 - DNA, 329 bp, Homo sapiens
ggtgtagctacagctggcatctcacggagagtgcccaggaacgctgtctgaacatctgcagtgcacaggagagtcctccacaaacaacaattagcagattttaaagatgtaacagaaagaacaagtggatcctcttcagatgaaatagcagcaggtgaatggacttggccagggacttaattcagacgctgcaggaaaacgacctgtgactgtacagggctttcgaaccactgaccatggacacgacgactcacatcgctcgactggacatacacttgaagtaaacacagggtcgcacaaacgacattgcacacgctaaccggaacgct

SEQ ID NO: 527069 - DNA, 2782 bp, Homo sapiens
taaggatctgggctggagtgtggaagagccatccagagtgagtgcctggggcagagtgagagcaggaccagcgggcaggtggcggagcgggggtcggtggtggatggcccagccctggaaagccgaggtgaaggttacgagtccctgaggatctgtgggtgtgagccagccgcgtggccctgggcaacggcgctgccggacagaagtggcggttgctgacgcctggaaattcccctgaaggtggagcaccacccaacccccctgggtcccaccctccctcaaggcctcctccacctccacctccaccccgcctggcctggcgtccacctctgcggctcctacctgggtgcaatcgagttaaatggctgataagcagatcagcctgccagccaagctcatcaatggcggcatcgccgggctgatcggtgtcacctgcgtgtttcccatcgacctggccaagaccaggctgcagaaccagcagaacggccagcgcgtgtacacgagcatgtccgactgcctcatcaagaccgtccgctccgagggctacttcggcatgtaccggggagctgctgtgaacttgaccctcgtcacccccgagaaggccatcaagctggcagccaacgacttcttccgacatcagctctctaaggacgggcagaagctgaccctgcttaaagagatgctggcgggctgtggggctggcacctgccaggtgatcgtgaccacgcccatggagatgctgaagatccagctgcaggatgcagggcgcattgccgcccagaggaagatcctggctgcccagggccagctctcggcccaggggggtgcccagccctcagtggaggctccagctgcccctcggcccacggccacccagctgacccgcgacctgctgcggagccgtggcattgccggtctctacaagggactcggggccacgctgctcagggatgtccccttctctgtggtgtacttcccgctctttgccaacctgaaccagctgggccgcccggcgtccgaggagaagtcgcctttctacgtgtccttcctggccggctgtgtggctgggagtgccgccgctgtggccgtcaacccctgtgatgtggtgaagacgcggctccagtcacttcagcgaggcgtcaacgaggacacctactctgggatcctggactgtgccaggaagatcctgcggcacgagggcccctcggccttcctgaagggcgcctactgccgcgcgctggtcatcgcgccccttttcggcatcgcacaggtggtctacttcctgggcatcgcggagtccctgctggggctgctgcaggacccccaggcctgagcccagcacccgctccaccccagccagctgggcagggccggtgtggggctggagccaggcagctagcccaggacggagcaagggaagacccctccccagccctcccgtcggcaggggcagcagggggcagggtgcagggtccacataggtggtgcacacgcaagccccccggggtgctgcctgcaccgttgggatcaatgtctcatttatgtagaaaatgcagaaatctttacattcctcaagctagcccctgccccaatcctgccctggcctgaacacccccagggacagagctggtctctgggctgggggcccccgggcctgggccgggcaggctggaccatacccccagtccaccagctccagtctccacagccatcctggcccacacaggcaccccacacaaacctatttattgaatctgctggacccaagcggctctccagcccttctgtccttccccagccgctcttgtcgccttggcaggacttgactctgcctccctggccagccttgcaagaggactggggtctcctgccctctctgttgagccaggaatcccaagtgaggggttgccctgaggtctgactcttggggcaagcccgccacccactgtgggactttctggtgggctcctcagctcccaccccaggctggggcccagattgtgaggtctgtgtgcatgtgtgtgtgtatgtgtgtgtgcatgcgtgtgtgtgttgtggggatctggcctggcccttggggatggggctgctggggactgccccccttcccgccgtggccaggcgctctgtgtgctgtgtgtgccccaggctctgttgaccccgtccaggaactaacttacccagcttggtctctcctgagtcctccaccctggcctgggattggccagggagcagggcgggcattgggaccagtgtggagcctgagggtgcctgccctgctctggagggagggccaggagctgccacacccccaagtcctctcagggcccaccctcctttttcagcctctgcataaggcccctgggtacactgcagaagccccatccttcccgcctccgggcataaggcccctgaccacacttcagaagccccatcccccctgccaccgggcgatccctgctgtgagccgaagctctccctgccccgccctggccatgtgatcgtgttggtgacagaccctgatgtgctggtgctgtgtccccaaaaccggggccctccacagaggccccttcccagcgacactacctggggctcaggcctggacccccccagttcacggttgctcctgggagctgcccctcccgtcacatcagaaccttggaagctgctgctgctgcttacagaattatatttttttcttttgaagagttttaagaagttgtaactttttgtgtcttgtcatgtcagagaataaataaatattctaagtagaaaaaaaaaa

SEQ ID NO: 527070 - DNA, 2677 bp, Homo sapiens
  misc_feature (13)..(13): n is a, c, g, or t
ggaggcgcgcggncgcgagcggacgcgcctccccgcctaggtgctggccgagcgcggggcgggcaggcgagcgcggcggcggcggcgagcgtggacagaagtggcggttgctgacgcctggaaattcccctgaaggtggagcaccacccaacccccctgggtcccaccctccctcaaggcctcctccacctccacctccaccccgcctggcctggcgtccacctctgcggctcctacctgggtgcaatcgagttaaatggctgataagcagatcagcctgccagccaagctcatcaatggcggcatcgccgggctgatcggtgtcacctgcgtgtttcccatcgacctggccaagaccaggctgcagaaccagcagaacggccagcgcgtgtacacgagcatgtccgactgcctcatcaagaccgtccgctccgagggctacttcggcatgtaccggggagctgctgtgaacttgaccctcgtcacccccgagaaggccatcaagctggcagccaacgacttcttccgacatcagctctctaaggacgggcagaagctgaccctgcttaaagagatgctggcgggctgtggggctggcacctgccaggtgatcgtgaccacgcccatggagatgctgaagatccagctgcaggatgcagggcgcattgccgcccagaggaagatcctggctgcccagggccagctctcggcccaggggggtgcccagccctcagtggaggctccagctgcccctcggcccacggccacccagctgacccgcgacctgctgcggagccgtggcattgccggtctctacaagggactcggggccacgctgctcagggatgtccccttctctgtggtgtacttcccgctctttgccaacctgaaccagctgggccgcccggcgtccgaggagaagtcgcctttctacgtgtccttcctggccggctgtgtggctgggagtgccgccgctgtggccgtcaacccctgtgatgtggtgaagacgcggctccagtcacttcagcgaggcgtcaacgaggacacctactctgggatcctggactgtgccaggaagatcctgcggcacgagggcccctcggccttcctgaagggcgcctactgccgcgcgctggtcatcgcgccccttttcggcatcgcacaggtggtctacttcctgggcatcgcggagtccctgctggggctgctgcaggacccccaggcctgagcccagcacccgctccaccccagccagctgggcagggccggtgtggggctggagccaggcagctagcccaggacggagcaagggaagacccctccccagccctcccgtcggcaggggcagcagggggcagggtgcagggtccacataggtggtgcacacgcaagccccccggggtgctgcctgcaccgttgggatcaatgtctcatttatgtagaaaatgcagaaatctttacattcctcaagctagcccctgccccaatcctgccctggcctgaacacccccagggacagagctggtctctgggctgggggcccccgggcctgggccgggcaggctggaccatacccccagtccaccagctccagtctccacagccatcctggcccacacaggcaccccacacaaacctatttattgaatctgctggacccaagcggctctccagcccttctgtccttccccagccgctcttgtcgccttggcaggacttgactctgcctccctggccagccttgcaagaggactggggtctcctgccctctctgttgagccaggaatcccaagtgaggggttgccctgaggtctgactcttggggcaagcccgccacccactgtgggactttctggtgggctcctcagctcccaccccaggctggggcccagattgtgaggtctgtgtgcatgtgtgtgtgtatgtgtgtgtgcatgcgtgtgtgtgttgtggggatctggcctggcccttggggatggggctgctggggactgccccccttcccgccgtggccaggcgctctgtgtgctgtgtgtgccccaggctctgttgaccccgtccaggaactaacttacccagcttggtctctcctgagtcctccaccctggcctgggattggccagggagcagggcgggcattgggaccagtgtggagcctgagggtgcctgccctgctctggagggagggccaggagctgccacacccccaagtcctctcagggcccaccctcctttttcagcctctgcataaggcccctgggtacactgcagaagccccatccttcccgcctccgggcataaggcccctgaccacacttcagaagccccatcccccctgccaccgggcgatccctgctgtgagccgaagctctccctgccccgccctggccatgtgatcgtgttggtgacagaccctgatgtgctggtgctgtgtccccaaaaccggggccctccacagaggccccttcccagcgacactacctggggctcaggcctggacccccccagttcacggttgctcctgggagctgcccctcccgtcacatcagaaccttggaagctgctgctgctgcttacagaattatatttttttcttttgaagagttttaagaagttgtaactttttgtgtcttgtcatgtcagagaataaataaatattctaagtagaaaaaaaaaa

SEQ ID NO: 527071 - DNA, 2662 bp, Homo sapiens
agcgggtgcgagcccaaggaagaaaggccgacccgtgtgggacgcacacgtgggagttcaccggacatctgtggacaggacagaagtggcggttgctgacgcctggaaattcccctgaaggtggagcaccacccaacccccctgggtcccaccctccctcaaggcctcctccacctccacctccaccccgcctggcctggcgtccacctctgcggctcctacctgggtgcaatcgagttaaatggctgataagcagatcagcctgccagccaagctcatcaatggcggcatcgccgggctgatcggtgtcacctgcgtgtttcccatcgacctggccaagaccaggctgcagaaccagcagaacggccagcgcgtgtacacgagcatgtccgactgcctcatcaagaccgtccgctccgagggctacttcggcatgtaccggggagctgctgtgaacttgaccctcgtcacccccgagaaggccatcaagctggcagccaacgacttcttccgacatcagctctctaaggacgggcagaagctgaccctgcttaaagagatgctggcgggctgtggggctggcacctgccaggtgatcgtgaccacgcccatggagatgctgaagatccagctgcaggatgcagggcgcattgccgcccagaggaagatcctggctgcccagggccagctctcggcccaggggggtgcccagccctcagtggaggctccagctgcccctcggcccacggccacccagctgacccgcgacctgctgcggagccgtggcattgccggtctctacaagggactcggggccacgctgctcagggatgtccccttctctgtggtgtacttcccgctctttgccaacctgaaccagctgggccgcccggcgtccgaggagaagtcgcctttctacgtgtccttcctggccggctgtgtggctgggagtgccgccgctgtggccgtcaacccctgtgatgtggtgaagacgcggctccagtcacttcagcgaggcgtcaacgaggacacctactctgggatcctggactgtgccaggaagatcctgcggcacgagggcccctcggccttcctgaagggcgcctactgccgcgcgctggtcatcgcgccccttttcggcatcgcacaggtggtctacttcctgggcatcgcggagtccctgctggggctgctgcaggacccccaggcctgagcccagcacccgctccaccccagccagctgggcagggccggtgtggggctggagccaggcagctagcccaggacggagcaagggaagacccctccccagccctcccgtcggcaggggcagcagggggcagggtgcagggtccacataggtggtgcacacgcaagccccccggggtgctgcctgcaccgttgggatcaatgtctcatttatgtagaaaatgcagaaatctttacattcctcaagctagcccctgccccaatcctgccctggcctgaacacccccagggacagagctggtctctgggctgggggcccccgggcctgggccgggcaggctggaccatacccccagtccaccagctccagtctccacagccatcctggcccacacaggcaccccacacaaacctatttattgaatctgctggacccaagcggctctccagcccttctgtccttccccagccgctcttgtcgccttggcaggacttgactctgcctccctggccagccttgcaagaggactggggtctcctgccctctctgttgagccaggaatcccaagtgaggggttgccctgaggtctgactcttggggcaagcccgccacccactgtgggactttctggtgggctcctcagctcccaccccaggctggggcccagattgtgaggtctgtgtgcatgtgtgtgtgtatgtgtgtgtgcatgcgtgtgtgtgttgtggggatctggcctggcccttggggatggggctgctggggactgccccccttcccgccgtggccaggcgctctgtgtgctgtgtgtgccccaggctctgttgaccccgtccaggaactaacttacccagcttggtctctcctgagtcctccaccctggcctgggattggccagggagcagggcgggcattgggaccagtgtggagcctgagggtgcctgccctgctctggagggagggccaggagctgccacacccccaagtcctctcagggcccaccctcctttttcagcctctgcataaggcccctgggtacactgcagaagccccatccttcccgcctccgggcataaggcccctgaccacacttcagaagccccatcccccctgccaccgggcgatccctgctgtgagccgaagctctccctgccccgccctggccatgtgatcgtgttggtgacagaccctgatgtgctggtgctgtgtccccaaaaccggggccctccacagaggccccttcccagcgacactacctggggctcaggcctggacccccccagttcacggttgctcctgggagctgcccctcccgtcacatcagaaccttggaagctgctgctgctgcttacagaattatatttttttcttttgaagagttttaagaagttgtaactttttgtgtcttgtcatgtcagagaataaataaatattctaagtagaaaaaaaaaa

SEQ ID NO: 527072 - DNA, 2857 bp, Homo sapiens
taaggatctgggctggagtgtggaagagccatccagagtgagtgcctggggcagagtgagagcaggaccagcgggcaggtggcggagcgggggtcggtggtggatggcccagccctggaaagccgaggtgaaggttacgagtccctgaggatctgtgggtgtgagccagccgcgtggccctgggcaacggcgctgccggacagaagtggcggttgctgacgcctggaaattcccctgaaggtggagcaccacccaacccccctgggtcccaccctccctcaaggcctcctccacctccacctccaccccgcctggcctggcgtccacctctgcggctcctacctgggtgcaatcgagttaaatggctgataagcagatcagcctgccagccaagctcatcaatggcggcatcgccgggctgatcggtgtcacctgcgtgtttcccatcgacctggccaagaccaggctgcagaaccagcagaacggccagcgcgtgtacacgagcatccctagacagtccagggaccctggcctccggctggccccagctggccctggctcaccctgtccccttggccacaggtccgactgcctcatcaagaccgtccgctccgagggctacttcggcatgtaccggggagctgctgtgaacttgaccctcgtcacccccgagaaggccatcaagctggcagccaacgacttcttccgacatcagctctctaaggacgggcagaagctgaccctgcttaaagagatgctggcgggctgtggggctggcacctgccaggtgatcgtgaccacgcccatggagatgctgaagatccagctgcaggatgcagggcgcattgccgcccagaggaagatcctggctgcccagggccagctctcggcccaggggggtgcccagccctcagtggaggctccagctgcccctcggcccacggccacccagctgacccgcgacctgctgcggagccgtggcattgccggtctctacaagggactcggggccacgctgctcagggatgtccccttctctgtggtgtacttcccgctctttgccaacctgaaccagctgggccgcccggcgtccgaggagaagtcgcctttctacgtgtccttcctggccggctgtgtggctgggagtgccgccgctgtggccgtcaacccctgtgatgtggtgaagacgcggctccagtcacttcagcgaggcgtcaacgaggacacctactctgggatcctggactgtgccaggaagatcctgcggcacgagggcccctcggccttcctgaagggcgcctactgccgcgcgctggtcatcgcgccccttttcggcatcgcacaggtggtctacttcctgggcatcgcggagtccctgctggggctgctgcaggacccccaggcctgagcccagcacccgctccaccccagccagctgggcagggccggtgtggggctggagccaggcagctagcccaggacggagcaagggaagacccctccccagccctcccgtcggcaggggcagcagggggcagggtgcagggtccacataggtggtgcacacgcaagccccccggggtgctgcctgcaccgttgggatcaatgtctcatttatgtagaaaatgcagaaatctttacattcctcaagctagcccctgccccaatcctgccctggcctgaacacccccagggacagagctggtctctgggctgggggcccccgggcctgggccgggcaggctggaccatacccccagtccaccagctccagtctccacagccatcctggcccacacaggcaccccacacaaacctatttattgaatctgctggacccaagcggctctccagcccttctgtccttccccagccgctcttgtcgccttggcaggacttgactctgcctccctggccagccttgcaagaggactggggtctcctgccctctctgttgagccaggaatcccaagtgaggggttgccctgaggtctgactcttggggcaagcccgccacccactgtgggactttctggtgggctcctcagctcccaccccaggctggggcccagattgtgaggtctgtgtgcatgtgtgtgtgtatgtgtgtgtgcatgcgtgtgtgtgttgtggggatctggcctggcccttggggatggggctgctggggactgccccccttcccgccgtggccaggcgctctgtgtgctgtgtgtgccccaggctctgttgaccccgtccaggaactaacttacccagcttggtctctcctgagtcctccaccctggcctgggattggccagggagcagggcgggcattgggaccagtgtggagcctgagggtgcctgccctgctctggagggagggccaggagctgccacacccccaagtcctctcagggcccaccctcctttttcagcctctgcataaggcccctgggtacactgcagaagccccatccttcccgcctccgggcataaggcccctgaccacacttcagaagccccatcccccctgccaccgggcgatccctgctgtgagccgaagctctccctgccccgccctggccatgtgatcgtgttggtgacagaccctgatgtgctggtgctgtgtccccaaaaccggggccctccacagaggccccttcccagcgacactacctggggctcaggcctggacccccccagttcacggttgctcctgggagctgcccctcccgtcacatcagaaccttggaagctgctgctgctgcttacagaattatatttttttcttttgaagagttttaagaagttgtaactttttgtgtcttgtcatgtcagagaataaataaatattctaagtagaaaaaaaaaa

SEQ ID NO: 527073 - DNA, 2509 bp, Homo sapiens
taaggatctgggctggagtgtggaagagccatccagagtgagtgcctggggcagagtgagagcaggaccagcgggcaggtggcggagcgggggtcggtggtggatggcccagccctggaaagccgaggtgaaggttacgagtccctgaggatctgtgggtgtgagccagccgcgtggccctgggcaacggcgctgccggacagaagtggcggttgctgacgcctggaaattcccctgaaggtggagcaccacccaacccccctgggtcccaccctccctcaaggcctcctccacctccacctccaccccgcctggcctggcgtccacctctgcggctcctacctgggtgcaatcgagttaaatggctgataagcagatcagcctgccagccaagctcatcaatggcggcatcgccgggctgatcggtgtcacctgcgtgtttcccatcgacctggccaagaccaggctgcagaaccagcagaacggccagcgcgtgtacacgagcatgtccgactgcctcatcaagaccgtccgctccgagggctacttcggcatgtaccggggagctgctgtgaacttgaccctcgtcacccccgagaaggccatcaagctggcagccaacgacttcttccgacatcagctctctaaggacgggcagaagctgaccctgcttaaagagatgctggcgggctgtggggctggcacctgccaggtgatcgtgaccacgcccatggagatgctgaagatccagctgcaggatgcagggcgcattgccgcccagaggaagatcctggctgcccagggccagctctcggcccaggggggtgcccagccctcagtggaggctccagctgcccctcggcccacggccacccagctgacccgcgacctgctgcggagccgtggcattgccggtctctacaagggactcggggccacgctgctcagggatgtccccttctctgtggtgtacttcccgctctttgccaacctgaaccagctgggccgcccggcgtccgaggagaagtcgcctttctacgtgtccttcctggccggctgtgtggctgggagtgccgccgctgtggccgtcaacccctgtgatgtggtgaagacgcggctccagtcacttcagcgaggcgtcaacgaggacacctactctgggatcctggactgtgccaggaagatcctgcggcacgagggcccctcggccttcctgaagggcgcctactgccgcgcgctggtcatcgcgccccttttcggcatcgcacaggtggtctacttcctgggcatcgcggagtccctgctggggctgctgcaggacccccaggcctgagcccagcacccgctccaccccagccagctgggcagggccggtgtggggctggagccaggcagctagcccaggacggagcaagggaagacccctccccagccctcccgtcggcaggggcagcagggggcagggtgcagggtccacataggtggtgcacacgcaagccccccggggtgctgcctgcaccgttgggatcaatgtctcatttatgtagaaaatgcagaaatctttacattcctcaagctagcccctgccccaatcctgccctggcctgaacacccccagggacagagctggtctctgggctgggggcccccgggcctgggccgggcaggctggaccatacccccagtccaccagctccagtctccacagccatcctggcccacacaggcaccccacacaaacctatttattgaatctgctggacccaagcggctctccagcccttctgtccttccccagccgctcttgtcgccttggcaggacttgactctgcctccctggccagccttgcaagaggactggggtctcctgccctctctgttgagccaggaatcccaagtgaggggttgccctgaggtctgactcttggggcaagcccgccacccactgtgggactttctggtgggctcctcagctcccaccccaggctggggcccagattgtgaggtctgtgtgcatgtgtgtgtgtatgtgtgtgtgcatgcgtgtgtgtgttgtggggatctggcctggcccttggggatggggctgctggggactgccccccttcccgccgtggccaggcgctctgtgtgctgtgtgtgccccaggctctgttgaccccgtccaggaactaacttacccagcttggtctctcctgagtcctccaccctggcccctggccatgtgatcgtgttggtgacagaccctgatgtgctggtgctgtgtccccaaaaccggggccctccacagaggccccttcccagcgacactacctggggctcaggcctggacccccccagttcacggttgctcctgggagctgcccctcccgtcacatcagaaccttggaagctgctgctgctgcttacagaattatatttttttcttttgaagagttttaagaagttgtaactttttgtgtcttgtcatgtcagagaataaataaatattctaagtagaaaaaaaaaa

SEQ ID NO: 527074 - DNA, 751 bp, Homo sapiens
ggctggtccgcatgtggtgaggctctccgctctcgaggcactggccaggttatattgtagacatagttaagtccgcgatgccactctacccggaagcagtgacaccgcttgagttgaacaagacttggggcactgcatgtgaaagctcgcctgtacacacataatgtactgagctagtgtcatcggatagactccatgatgacttaaggcctacagcctgagggagggagtgatgcagtgcttactacctccacaagatgggcattataggtggtcgtgttcgagagtcctaataactaaacttaggattgcctagaagtcgttgcaatgcatgtatgcagacgattgaacaacagtccatcaatgaattcgcacgaggtgtggatagaccggtcgcacaattggtcaaacagtgtaatgagccgagaacgcagtagacgtagagctgcgttgacgacagggatagtagcctgtcgccgtacctaatgaaggaaaggtaccatatacatggtagagcaacttcatacaaacagctgaagctcaccgcataagtctggccatcctggcaggaacggggacttgtgcgagcactgattgagaagagtcctgtctcagtaatgacgcttctgagtctactagctaccatgaaggggctgggagtcgacggagggactctctcatgagaatcatcctgtcaagagcccaagcaagagcttgccggcaaatgaacccgcagtcttcacagcggact

SEQ ID NO: 527075 - DNA, 2417 bp, Homo sapiens
taaggatctgggctggagtgtggaagagccatccagagtgagtgcctggggcagagtgagagcaggaccagcgggcaggtggcggagcgggggtcggtggtggatggcccagccctggaaagccgaggtgaaggttacgagtccctgaggatctgtgggtgtgagccagccgcgtggccctgggcaacggcgctgccggacagaagtggcggttgctgacgcctggaaattcccctgaaggtggagcaccacccaacccccctgggtcccaccctccctcaaggcctcctccacctccacctccaccccgcctggcctggcgtccacctctgcggctcctacctgggtgcaatcgagttaaatggctgataagcagatcagcctgccagccaagctcatcaatggcggcatcgccgggctgatcggtgtcacctgcgtgtttcccatcgacctggccaagaccaggctgcagaaccagcagaacggccagcgcgtgtacacgagcatgtccgactgcctcatcaagaccgtccgctccgagggctacttcggcatgtaccggggagctgctgtgaacttgaccctcgtcacccccgagaaggccatcaagctggcagccaacgacttcttccgacatcagctctctaaggacgggcagaagctgaccctgcttaaagagatgctggcgggctgtggggctggcacctgccaggtgatcgtgaccacgcccatggagatgctgaagatccagctgcaggatgcagggcgcattgccgcccagaggaagatcctggctgcccagggccagctctcggcccaggggggtgcccagccctcagtggaggctccagctgcccctcggcccacggccacccagctgacccgcgacctgctgcggagccgtggcattgccggtctctacaagggactcggggccacgctgctcagggatgtccccttctctgtggtgtacttcccgctctttgccaacctgaaccagctgggccgcccggcgtccgaggagaagtcgcctttctacgtgtccttcctggccggctgtgtggctgggagtgccgccgctgtggccgtcaacccctgtgatgtggtgaagacgcggctccagtcacttcagcgaggcgtcaacgaggacacctactctgggatcctggactgtgccaggaagatcctgcggcacgagggcccctcggccttcctgaagggcgcctactgccgcgcgctggtcatcgcgccccttttcggcatcgcacaggtggtctacttcctgggcatcgcggagtccctgctggggctgctgcaggacccccaggcctgagcccagcacccgctccaccccagccagctgggcagggccggtgtggggctggagccaggcagctagcccaggacggagcaagggaagacccctccccagccctcccgtcggcaggggcagcagggggcagggtgcagggtccacataggtggtgcacacgcaagccccccggggtgctgcctgcaccgttgggatcaatgtctcatttatgtagaaaatgcagaaatctttacattcctcaagctagcccctgccccaatcctgccctggcctgaacacccccagggacagagctggtctctgggctgggggcccccgggcctgggccgggcaggctggaccatacccccagtccaccagctccagtctccacagccatcctggcccacacaggcaccccacacaaacctatttattgaatctgctggacccaagcggctctccagcccttctgtccttccccagccgctcttgtcgccttggcaggacttgactctgcctccctggccagccttgcaagaggactggggtctcctgccctctctgttgagccaggaatcccaagtgaggggttgccctgaggtctgactcttggggcaagcccgccacccactgtgggactttctggtgggctcctcagctcccaccccaggctggggcccagattgtgaggtctgtgtgcatgtgtgtgtgtatgtgtgtgtgcatgcgtgtgtgtgttgtggggatctggcctggccccctgccaccgggcgatccctgctgtgagccgaagctctccctgccccgccctggccatgtgatcgtgttggtgacagaccctgatgtgctggtgctgtgtccccaaaaccggggccctccacagaggccccttcccagcgacactacctggggctcaggcctggacccccccagttcacggttgctcctgggagctgcccctcccgtcacatcagaaccttggaagctgctgctgctgcttacagaattatatttttttcttttgaagagttttaagaagttgtaactttttgtgtcttgtcatgtcagagaataaataaatattctaagtagaaaaaaaaaa

SEQ ID NO: 527076 - DNA, 387 bp, Homo sapiens
gatctgctgtctgtcagtatctgcctcacatctccagcagtatcagtcaggtctgaggctcgcatgaaggccgtttgtctgggccatttagctgccacttccctttttttatcagctcatatttcatgccgcctgttcaaaagtttttggaaagaaaacaatgaaaaagtaacacaatctctcaaatatttattgagtatctactatggctcctctggaggattacagaacaggtgattattcttgtttgcattttatgtgtttagaaaggtatagtttggaaatttagaatgaaaacatattcctctttctcagttcattccttccacacccccaaagaattctccgaggaagggtgcgaggctcttccaggtcttttcacgtgct

SEQ ID NO: 527077 - DNA, 1873 bp, Homo sapiens
taaggatctgggctggagtgtggaagagccatccagagtgagtgcctggggcagagtgagagcaggaccagcgggcaggtggcggagcgggggtcggtggtggatggcccagccctggaaagccgaggtgaaggttacgagtccctgaggatctgtgggtgtgagccagccgcgtggccctgggcaacggcgctgccggacagaagtggcggttgctgacgcctggaaattcccctgaaggtggagcaccacccaacccccctgggtcccaccctccctcaaggcctcctccacctccacctccaccccgcctggcctggcgtccacctctgcggctcctacctgggtgcaatcgagttaaatggctgataagcagatcagcctgccagccaagctcatcaatggcggcatcgccgggctgatcggtgtcacctgcgtgtttcccatcgacctggccaagaccaggctgcagaaccagcagaacggccagcgcgtgtacacgagcatgtccgactgcctcatcaagaccgtccgctccgagggctacttcggcatgtaccggggagctgctgtgaacttgaccctcgtcacccccgagaaggccatcaagctggcagccaacgacttcttccgacatcagctctctaaggacgggcagaagctgaccctgcttaaagagatgctggcgggctgtggggctggcacctgccaggtgatcgtgaccacgcccatggagatgctgaagatccagctgcaggatgcagggcgcattgccgcccagaggaagatcctggctgcccagggccagctctcggcccaggggggtgcccagccctcagtggaggctccagctgcccctcggcccacggccacccagctgacccgcgacctgctgcggagccgtggcattgccggtctctacaagggactcggggccacgctgctcagggatgtccccttctctgtggtgtacttcccgctctttgccaacctgaaccagctgggccgcccggcgtccgaggagaagtcgcctttctacgtgtccttcctggccggctgtgtggctgggagtgccgccgctgtggccgtcaacccctgtgatgtggtgaagacgcggctccagtcacttcagcgaggcgtcaacgaggacacctactctgggatcctggactgtgccaggaagatcctgcggcacgagggcccctcggccttcctgaagggcgcctactgccgcgcgctggtcatcgcgccccttttcggcatcgcacaggtggtctacttcctgggcatcgcggagtccctgctggggctgctgcaggacccccaggcctgagcccagcacccgctccaccccagccagctgggcagggccggtgtggggctggagccaggcagctagcccaggacggagcaagggaagacccctccccagccctcccgtcggcaggggcagcagggggcagggtgcagggtccacataggtggtgcacacgcaagccccccggggtgctgcctgcaccgttgggatcaatgtctcatttatgtagaaaatgcagaaatctttacattcctcaagctagcccctgccccaatcctgccctggcctgaacacccccagggacagagctggtctctgggctgggggccccgggctgggcgggcaggtggacataccccagtcacagctcagtctcacagcatctggcaaaggcccaaaactattttgatctgtggccagggttcgcctcgcttccagcggttgtggtggggattgactggtctggcgctgaagaggggctgcccctgtgcgacccgagtggcggtggtttggccccctgttgggggccccgggcggggtttttttgcggggggc

SEQ ID NO: 527078 - DNA, 156 bp, Homo sapiens
cggtggccagagttaatataacttgaaatttgcgaagagagtagcccgtaggcgtctgtatctccaaaaaaacggataattgtatgaggtgaaagatgtgtattaagttgattgtgtcatcagttcccaaaataaatcatcccgttgtccccctta

SEQ ID NO: 527079 - DNA, 530 bp, Homo sapiens
gacgacggtgtactggtcagtttttggttcgttggtctgtatgtgagacggagtctcagtggcgtgacagagtgagactcggtctcaaaaagaaaaaaaaaaaaaagaagtccacagggctgccaggtgcaggggttcaggccggtaatcccaacatttggggaggccaggggggggggatcaggtgaggccaggagttggagaccaagccgggccaatatggtgaaccccggtctctactaaaaaatacaaaaataagcggggtgtggtgggcacgtgcctgtattcccagctactcgaggggctgaggcaggagaatacattgacccggggagccagagtgttgcagtgagtcggagatctcacaatggcactccagccggggggaggggagcgagagtccttctcaaaaaaattaattacaccaaaaaaccaaatgagaaatggtaaaataaccgggtcaccggggtgaaatgggtatcaggggaattctccactagaagtctcggagttggagggttttggaaatg

SEQ ID NO: 527080 - DNA, 669 bp, Homo sapiens
  misc_feature (417)..(417): n is a, c, g, or t
gcgggctccaggcaggccaccccaacagcatcttcctcatcgaccacgcctggacgtgccagtggtggcagcatgcgcgccagcaggctgcagcaggtgcccgggctgctgcaccggatggccaacctgatgggcattgagttccacggtgagctgcccagtacagaggctgtggccctggtgctggaggagatgtggaacgttcaaccaggacctaccagctgggccgcatggcgaacacgcgtgacggacgacagatgccgggtgtgggtatatcatggacgagttcggttcgcggatccagcacgcggacgtgcccagcttcggcgacgggacccttcttgctacagtgccggcagcgaggtgggccctacactgctgtcgtgtggcccactgaggggcacctggtgacagctnggacgaagcgagcgctgacgcctgacgacctctgtggaccttaactgggacgcacggaacccgtagccgcctcctggaatcctgggacacgtggcatgactgcatgcccctggtgccccctacctgacatgctggacctcagctcttgcacacccgagccggccgccgagcactaccagggccattctggacggaaaacaaggacgaagctggccacttggacatcaaaccccgttgagtgcagccctcctc

SEQ ID NO: 527081 - DNA, 611 bp, Homo sapiens
  misc_feature (3)..(3): n is a, c, g, or t
  misc_feature (201)..(201): n is a, c, g, or t
  misc_feature (608)..(608): n is a, c, g, or t
tcnttagatcccggtcccagcacagtttctgttgggatgatgaaaatgttctagaaggatagtggtgatgatgcacaacaatgtgaatgcacttaatgccactgaattgtacatttaaaaatggttaaaatggtcaatttcctgtcatgtatattttaccacagtttttaaaaattcctattttcatagagcctacatttnggaagaggagatagacaataaataaatgaacagataatagaccaagataattctagattatgataagtaaaatgaaggaaaaagagggataagatggagggactagaggagtttattttggggtcctcaacatgtgtttaccaacagcagcttggtacccctagagaattaagactaagagaaaaatcttgggagacagggctagaaaagtagttggaggccaggatccacattatggagaatcttgtatattaagatgctttggctttgtcctgagaatcaacgaagaaaggcagtcatgtggttagctttggccacagtgcatgggaagcattggtgggtgaagccagatgcagaaacacatgtgtaggaggctgtttctgctattctgctctgtggagggaggnctc

SEQ ID NO: 527082 - DNA, 126 bp, Homo sapiens
atatgtagagaaagtggaaaatagggcacgttgcatattatgttagttaaaaagttatatgtgttatgattttttcgttcgcgtttctatttggtgaatggacgttttacatttgtctgttatcaa

SEQ ID NO: 527083 - DNA, 946 bp, Homo sapiens
cgctcctaacaccgccttccctctctcattctttccaagtctcgctctcctataaccttccctatctctcctcttctccacgtcactcgcaggacgtcagcgagtttcagactccacaccatgccgttccccgggcctgtagacatcatctccgaacccccattggctttatgtcgccctcttcggctaaacttggccacctcatggacttaagccagattgtacagtagttctaacatatacacggttgtcactcttaacatgtacatgcgcgatttttctactagagactgatgtccacagacatggtcaaagcaaaatgcttttatgtgttttgcaccaagaatgcgccatttgtaaagacaatgatccgtacaagaggacctggttaggggcagtaaattctagggcagtcactaggagatacatggtggtccgccttgtgtcaaactactgcaagacccccgttacttcgcgaagttcctttcttcaggtccattgcagcctcctgatttaccactctgccgataaaggctgttttctctctctggtacagggacggttatccctcccagaggaatctttatgacctcgacgcatgcagaaagggacaggtcgtctagccctttctgacactccaatttctccaatgtgtgttgtaatttgcccataatcacccttagccaatttggcaaattttgggagtggtatatccttcagtcccttagctactttgaagtatttggtggtgatattgaattattgtggtttatgtgttttaattatcttgtataattatctcatataatttctcatatgaattattacttgcctgacagatgcatgtggtcttttagcattttgttagcatttgcaagttggccaactgttctccttatatacatcattctctccattgaatatcagtgcaagtgattcaagctgg

SEQ ID NO: 527084 - DNA, 122 bp, Homo sapiens
gaggtagtggacagtgtaaccagaatcttccccagcatgtcatggccacaacaactgacgcagcccagcacgaatcccttagcaccagcacgaattcccttagcaccagcacgaattccctt

SEQ ID NO: 527085 - DNA, 234 bp, Homo sapiens
cacgaggccccgccaaacgctccgcccagtcgctcgggcggaagacgcggccatcggtggtgatcccctggatgaaaaactcgcggggcttggaggtcgtcatgggcgggaggtgaatgggccgcttgtggcgggttgcgagcgggatgcgaagtgtaatgtgcgcagccgcgacttcactcctcgaaatgatatcttatataagagtgtcgtcgcgcctggcgggatggaaat

SEQ ID NO: 527086 - DNA, 674 bp, Homo sapiens
gatattccccttcctgtgtccatgtgttctcattgttcaattcccacctacgagtgagaacatacagtgtttggttttttgtccttgccatagtttgctgagaatgatggtttccagcttcatccatgtctctacaaaggacatgaactcatcattttttatggctgcatagcattccatggtgtatatgtgccacattttcttaatccagtctatcattattggacatttgggttggttccaagtctttgctattgtgaatagtgctgcaataaacataagtgtgcatgtgtgtttatagcaggatgatttataatcctttgggtatatacccagtaatgggatggctgggtcaaatggtatttctagttctagatccctgaggaatcaccacactgacttccacaatggttgaactagtttacagtcccaccaacagtgtaaaagtgttcctgttttctccacatcctctccagcacctgttgtttcctgactttttaatgatcgccattctaactggcgtgagatggtatctcattgtggttttgatttgcatttctttgatggccagtgatgatgaacattttttcatgtgtctattggctgcataaatgtcttttgagaaagtgtgatcctcttagaccctgaactggtttgggggaatggggaatgga

SEQ ID NO: 527087 - DNA, 520 bp, Homo sapiens
gtcactcgcgacgtaaacgctgctataatcatagaaacttcgcttacttgctgcgtggccaacgcagggatctagttcagactatgaacaagggcgctgttcatcagccgaattcaaccgtgtagaaggaagcctttgtatgaaatgctcatcagttataatacactgttcaacgttatcgttaaatttgatatgcctctctcgtggcttgcccattatatctctccttttgcgtgccttaaaccagcttctccaaaaaaggttctccaatctttgatcattgtccactttcttgtgtttttgtaacggtaaaacattttcattttttacagtgttgttcgagcttctcacatgcttattatttttattgtaattgtttttactactacaattaataaacttgatgaatttccataaatttaaattcaagattaaacttctttgctcgtgaaagtcgaaatttttcttctttactgctggcaacatgcacatcttttctgtttatttcccagaataggcg

SEQ ID NO: 527088 - DNA, 605 bp, Homo sapiens
  misc_feature (137)..(137): n is a, c, g, or t
  misc_feature (605)..(605): n is a, c, g, or t
tggaagcagaagtggcttaatcagggggtgaagtcctcaatcagggggacctcacttaaccttgggtggggggggtctcagcctaccccccacaagccctgaggcccctcaggaaggggggagcagttgaacaacanaattatgggcgagagggccaggtggaattgggtgattgtggtgggaacccggggtcagggtgaagggggcatggacgctgaaatgggtgggagtgaatgctgaagtggggcatgtgaagagtcttaacccaggtttctaccggggggctggctgcagggtggctgtggtgcatcgggcagaaggggccaccagaagggctgagggctcaaaggggcacagcgagggggaaagggaggtgcttaggagacatgagcgcgacgtggtgaagcgtgggtgcagctgtgctctccttgggctcagccaccaggccgggtggtcggcggtgtccaaaaacacatgcgcggcgacatttgaagaaggtgtccacttttggcgccattgtgtaaaacgtggggtccatccgggggagtgtccttcctttgtggccctggagggaaagtgctggtgaaggggaacgggtgggcaan

SEQ ID NO: 527089 - DNA, 517 bp, Homo sapiens
cactctccagtccggatggaacgtcgagcctctgccttggtggacgttggttgtctcggtgattccgttggcatcgtggttagctgtacggggtcaaggggcttgtggtctctgccgcgcgcagtatctcctgtgggatcgaggcccgtgcctctcaggcggcatggctagtgaatcctggattgcgaggtgtcgcagactgatggatgaaagttgaagcgctgtgcgcggaatgtagctagcctggtggtgggttttgcgttgtcctgccgttttgctcgtggtgtggtcgagagcagtctgtgctggttgcttgcgcgagacggcgcttgccttggttcccatgcgctagcagcacgatatcatgagcgcaatactcagaagcgcgtatgtcctggcgcatcaggctgtggggcttctgtcttctgggtgatagtggctcagcgctccgtggagtcagccatgcttgccagatctagccggtccccgtctggggtgcccttggggactacctgct

SEQ ID NO: 527090 - DNA, 326 bp, Homo sapiens
atgcggcccatcaagttgcaggaccaggcccggcgcagccgctgtgtgcgtgacctggtgcactcgctgcccgctaccaaccacgacactctgcggatgctcttccagcacttctgccgggtgatcgagcacggcgagcagacccgcatgtcggtgcagagcgtggccaatgtgttcgggcccacgctgatgcgacccgaggtggaagagaccagcatgcccatgaccatggtgtaccagaaccaggtggtggagctcatcatgcagcagtgcgcggagatcttcccgccgcactgactgctggcctgtgactggggcggcggccg

SEQ ID NO: 527091 - DNA, 275 bp, Homo sapiens
gaaagaaaggaaaccacaggaaagggacctacctcttttatcatctaggtatttagtactaatggtttagagcaggaattgacaaactgtggcctggactcatggcccaactctggcccaccacctgtttctcagaggaaattttattgggactcagccacattacctcatttacatgtgtcctcgcctgcctttgtgccagtgcagacctagtagctccagcgaggttgtccctctggctttaattacaacagggcgctttaaggaccagaact

SEQ ID NO: 527092 - DNA, 267 bp, Homo sapiens
ttttggaaatttcccccctgaagccctcgggggcccccccctcttgggggatgaggccccagggattcccccccccttttgggaaccccaggtgtccttttattatcccccccctcccaggctccccccccgggggttggccgggaagattttggcctagcaaattgggtgggttttggggggggtgttttaaccaaagagggtgggggttgcccattggctttttttcccgggggggccccccgggttggaggcaattttacccca

SEQ ID NO: 527093 - DNA, 536 bp, Homo sapiens
tgtatggctgcgagcttggggcccgacgggcgcctcctccgtgggtatgaccagtcctgcctgcgagggcaaggattacatctgccctagaacgaggacctgcgctcctggaccgccgtggacacggcggctcagatcacccagtgcaagtgggaggcggcccgtgaggctggagcagtggagagcctaccgtggagggcacgtgcgtggagtggctccgcagataccttggagaacgggaaggagacgctgcagcgcgcggaacaccaaaagacataggtgacccaccatcctgtctctgaccatgaggccaccctgaggtgctgggccctgggcttctagctgtggggagatcacacttgacctggcagggggatggcgaggaccaaactcaggacaccgagcttgtggagaccaggccagcaggagatggaaccttccagaagtgggcagctgtggttggtgccttctggagaagaggagagataccggtgccatgtgcagcaggaggggctgccagagcccctcagcctgaa

SEQ ID NO: 527094 - DNA, 194 bp, Homo sapiens
acggacgcatggcgcccgaaggagtatgaaatgtgtgaagtacttgctctacgtactcctgctggccttttgcgcctgtgcagtgggactgatatgccgtgggtagtcggggcacagcttgtacctgagtcagaccataatccagggggctacccctgtgctctactgtatgccacgtggtacatcaatacgca

SEQ ID NO: 527095 - DNA, 868 bp, Homo sapiens
  misc_feature (414)..(414): n is a, c, g, or t
gcacagagagaggcagcagcttgctgcagcggacaaggatgctgggcgtgagggaccaagggctgccctgcactcggtggcctcctccagtccagctgctgaccaggggacttctagagccgtgcatggccagccaggacctgtgtgtgggaggccctcctgcgtggcttggggtgacgaatctcaggctccaggctacgagggcatgaccggtgaggatcgacagaggccgatgctatggatcctgacagttggatcaagctctgagaactagcctcggatgtcaagaaccctagcgcgaaagcctcgtagtccccaatggcagaggcttcagaacaggtgggggaatccctcatcagtcatagcacttactgagcactgagagagtatcgatcatatgtggtatgtcctcantcgaggctgagttctgagataacaatactgactgtcctcatgcgaggcagtgctactccatcgttcatcgccgagtgatagcagacgtgtgtgactggagcagcttggacttgtcccctatgtgcgggaaggacgacggaagacgactgatagtacaacagagacgtttcccgcgcaagggccctgacagatggcaagatcgcgaacatctacacgagagagacgaagtacgacacatgacagggtgcttggaacatcagtgactggcacggggaaaactggggattctcctgaacctggtattcgggaaagggttacagcagtaacgactgctctggtgaagaaaagactgtacgtgcctgcatggagtctacagacaggaagacccagatttacagagggtgagaggactaggggcagaccagggatctggaatgtagtagaaagtgcgaaa

SEQ ID NO: 527096 - DNA, 752 bp, Homo sapiens
cgagcccctgtgtccccactgtggggcagcagtggcggtgtgggtgtgctgaactgcggagtggtggcggagggagccctgctggctggctggcagacaggttacaatgctgaaattgtgctgtgatgcacctgtggctttgacaccccgtgcggcatgaattcaccaaacgcctgaatgcaagcttgacatggaccgcctactggaaccacccccagcaagttccctcgatgatcggattgtgaagcaacaccgcaaacggtgggcggtcggccgaggccgctatcaccagcttaccgacactccacggggtccaccgacaaacatcttacgctactgttcacgactgacaacgacatctaactgtcagcacacgaacgaatacccggtgacatttagacaattgcgcttggcagaaaggtgccttcaacgacaatgacgagagcacagggtccgtaagttcccacacggttcccttgggtacacgccggtcatacgccactccgactatccccaaattatcgaacgtgcgaccgactgggaccctcttaggattgcacccacttcacactttgcaggaacacgcaatccccacggggacttgccagccacgtattatccccacaaagcgtcgcatggtccatcccttctggcaaacacgacccgaacacgttcggctcccacattgttctcacccacaattcacgctcacttagatccacacgcatctacctccatcctagcctacagcc

SEQ ID NO: 527097 - DNA, 289 bp, Homo sapiens
gagtgagtagcatccactataaacccggctccagatataatatggacgccagtctcttctgcgacgcctcttcatacgtcgtgtagtctcggctaatcccagtgttgtgttcccaccagagcccctccaccattagcctttacaataacaacagttcttccttcatggcttctgtctcctgatttaattgaaggtttcttgatgggaataggcgtttttctgaatccaatataaatttttcatcacgataggttctttggaaatagcttcctggcacgggggaggtgga

SEQ ID NO: 527098 - DNA, 265 bp, Homo sapiens
agtcctagagtatcccaagcttacgaggggtctgaaaatgatagaatgtagaagatacttgtattaaaaaaaaaaaaaagaagtagcttggtctttctctgtgcagggttagttttaagatttataatcttatttgtttggaaacgttgggcaaaattttccacaggaattaaacaagtttactattttaaaccgtgaaccaaatttagttaaattgcacaagcaaggccatttagtgttgttatttatattgccaggctttctt

SEQ ID NO: 527099 - DNA, 726 bp, Homo sapiens
aaattcccgggcccaatatgagccaactggggctcgggggagaaccccgatggggaggttatgacaagtgatctgggtttcaagacacgattgtatgagaggagcactccccacgtgggtgcccaccacacaccacgttcctgtctggtaggtttgtgaagccttcttgaagtgaacggaacggtttcaccacgagtgtgaggaacgtacacggtccacgtcccctggaagaatcgaacctggagctccactgaggaaaattctgaagggccacgcttggaggaaccacacctgaagggaaggttggagggccccctaatacgccctatcacgagtggaggcacgctcaaaacgggagatcctgctgcacccctgagatcacagaagctggcaccacgacaccgggcagagggacaagcgccaggccccgggagatatgtaggccctgctgtacaatcaaggtcaagactggaggctgagatcgccacactaccgccaccctgtctggaagatgtgcgaggacatttaatcttggtgatgcccttggaccagccagccaacgtcccatgccaaacccatcccaaagacccccaccccccggatagatggatggccaagatggtgtttgagacccatgacaacccaagattttgaggccattaagcccagccagaagcagggtaccctttggggagcaggaggcccaataaaaagttcagagttcca

SEQ ID NO: 527100 - DNA, 913 bp, Homo sapiens
  misc_feature (785)..(785): n is a, c, g, or t
ctacttgtgtgatgacgcgcgcatgctttttttggtgcctcttatcgaggtctctccgtgctggtccgaataaattcgctgggtttcttctcatatctgcccggggggattctctcattggcggttatctctggtgatacccacccaatgggtcgcttcttctcttggtttgtctcgacgctaatccgggtgctgttccgtgtcgctgtaaagcttaatgtgggacgcgcccccccagcgcgcgacagtttttcctggaaatcccccttccggggcgtacgtccttctctccctctctggcgtgtgtatccgctccgggagattatagatttagtattgaatggttcaaggccccccgttttcccgctcgtatacgtgtagggtgattttgttccctgcgttccgcacctggagcttagttatctttcgttgggcacaaaacactgctgtgagacagatctggagcagcgtaagctgcttcgtatgcagccaccacactaattgcccataagagcggtcttatagttctctactttgttatgtgctggacagacaagttatcggtggtgtgctttcacaaacataacatgggagcaaagaaagttttgcatgtccttctctcctccctacaaggaagtaatgcccccgaggaacaaagattatagcggctacactgtagaaatttatatacgcgggggatgtcaagaccgtggccacaattgagtgctccttgcccgtagaggggtccctcttctgaagaataatgcgtgctcggggcgttcttnaagcccagatgcacttgtggtacaaagcacagattcgggccaaactgctgtgagcacaggaggtgtcaccacaccgcggaggccccgcgaccgcagggggtattaaaacaacccggcccccacataac

SEQ ID NO: 527101 - DNA, 224 bp, Homo sapiens
tgttagcagccagctatgaaagatgcaggtggatcagtcctctatgccctatctagggaacgctttgtcctcgccacaatctttactacctaccccataggcatttgcattacccctagattctgtgccacctaccttttatggaaatacagtccttgggaatatgaattattgatgatgaattggggatgttagggaaggcaaagattgtcatatatggatgc

SEQ ID NO: 527102 - DNA, 173 bp, Homo sapiens
tgtgctagggatgacacacagagcggtaagagctctcgtagcgcctgcatctacacagctgagcaccccttcatatgctcaaacccaccgaccaccagcatggtgtgaataccatagatgcggatgttctccacaatgtactccagctgcccttggcatgggtctcttggtcc

SEQ ID NO: 527103 - DNA, 194 bp, Homo sapiens
tcttgacatgctgttgactcttgcatatcttttgcgccattcagctactgaggcgggaggatcgcttgagcctaggaatttgagaccagcctgggcaacgtggtaaggccccatctctacaaaagataaagaattagccaagtgtggtggtgccatgtttgtaatcccagctgtttgggtactacgctttggca

SEQ ID NO: 527104 - DNA, 284 bp, Homo sapiens
cacatatatatatgtgtatatatatacacatatatattttaagaatcgctatgtcgggagcttaaatttgccctttaaaagcagattacagcctgagcaacatggtgaaaccccatttttaccaaaaatacaaaccagccaggtgtggtggcgggcgcctgtggtcccagctactagggaggccgaggcgggaggatggcccgaccctcggaggcagaggttgcagtgagccaagttttgcccctgccccccagcctgggcaacagtgagcccccgtttcacca

SEQ ID NO: 527105 - DNA, 301 bp, Homo sapiens
aatttacacttaagtggttaaaatggtaaattttatgttatgaatgttaccacaattttaaaatatcaatcaagaaaacaaagtattggccaggtgtggtggctcatgcctgtgatcccagcactctgggaggtcgaggtgggcagatcacgaggtccagagatcgagaccatcctggctaacgcggtgaaacccagtctctgctataaaaaatacaaaaaattagccaggcgtggtggcaagcgcctgtagtcccagctacttgggaggctgaggtaggagaatggtgtgaacccaggag

SEQ ID NO: 527106 - DNA, 240 bp, Homo sapiens
tctgtaaatagttaagtatggacccgaggccctacttttgatttattgcaatgttcagtcctagtttttacttttatttttaaagcattcagttttgctttcaattttatggaccttagttttgagttaaacctgcaaatgtgtacaaatagttcatatttatgtattgcccataatcatgctattcagccttgatgctatattgtattatgtaaataataaaaaccatgtccagaggga

SEQ ID NO: 527107 - DNA, 220 bp, Homo sapiens
cgctctcgaggatcccaaagagtgtcactcaagacgtaggacccgtggtccgcgggaaaccattcccacgctgctcgacaaaaacacttgggggagaatttccgcaggagcttcgatttcgacaacgatcttgtagtcacagatcaagcgacaggatccggagacgtccaattcgagcagaacaccaagcttctggccagtcctacgtcttgatggacag

SEQ ID NO: 527108 - DNA, 279 bp, Homo sapiens
  misc_feature (129)..(129): n is a, c, g, or t
ccccccccccccccccaaataaatggccctgttttttcaggcctttttatcaactgtaaaatgattttttggcatttaaaaaaaaggggtggtttgctcccccggagtttttttccctttttttgccanccataaccggaggttattatttttatgccccgcccccctcctcttttttgaaaaaaccttgttcccttaaaatgtttttttttggggttggggcctttccccccaaacattggtttggggccaaaccccaaggccaccaaaaatttttca

SEQ ID NO: 527109 - DNA, 241 bp, Homo sapiens
  misc_feature (22)..(22): n is a, c, g, or t
  misc_feature (30)..(30): n is a, c, g, or t
  misc_feature (81)..(82): n is a, c, g, or t
  misc_feature (93)..(93): n is a, c, g, or t
  misc_feature (97)..(97): n is a, c, g, or t
  misc_feature (112)..(113): n is a, c, g, or t
  misc_feature (116)..(116): n is a, c, g, or t
  misc_feature (148)..(148): n is a, c, g, or t
  misc_feature (163)..(163): n is a, c, g, or t
  misc_feature (169)..(169): n is a, c, g, or t
  misc_feature (181)..(181): n is a, c, g, or t
  misc_feature (195)..(195): n is a, c, g, or t
  misc_feature (213)..(213): n is a, c, g, or t
  misc_feature (221)..(221): n is a, c, g, or t
  misc_feature (231)..(231): n is a, c, g, or t
cagcagtgcagtgaccccagtnccacccgnatccctcttgggctcaggcaccaagcctccaagtggggctgacctcccggnnccctcgctgcngctngctcccctacgcagnnctnaccaaaaaaaggagtgtccagtcccgcacccncgggaccatagccangggggncatcggccccgngctgtactagcctncgtatacatattgtcacnaatattanattaaagtgngtccgtgctg

SEQ ID NO: 527110 - DNA, 520 bp, Homo sapiens
ggccaacatgaactatgtgcaccgtgacctggctgcccgcaacatcctcgtcaacagcaacctggtctgagtgttgacttggctgccggtgcgagagaccgagcactacacacagtgcggagacccacgtgacgccgggccttcctacgagtcactctgcacgacttgagcttgcatgtcatgtggaggtgatacctatggacggcctacggatgtcaacacagtgataagcatcaatgatgtccggtcccaacatggactgccccgctcaccagtcatgatcatgctggagagagcgtgccgcgccaagtcgtgactcgtcgctcctgacagctcatcggcccctatcctcaacctgctgattgacccggtgttatcgtcccaccgagaggtcgagggtgcctccgacgggtcgatgctgggtcctcagatcagagtatacggagatcatgggccggtacatgcatcgaaagtgtgcatgacaacgagatcaaggattgcgtgcggtgccgggccaaag

SEQ ID NO: 527111 - DNA, 129 bp, Homo sapiens
gcggcttgccttcacatctcagcagctacaaaatgaaatccactgatacagaaccccttgttgtgagcagtgaggcgagcgagctgtaaacagacacaaattgcgctttctgcacttccaaaaaaatcc

SEQ ID NO: 527112 - DNA, 675 bp, Homo sapiens
cggcggtccgtctcccaatctgtgctatacagagtacgacgacacttgactggccgcatgtggacagctaaatgactggagaatccctgctgcttcccaacatacctcgcgtgcggtacaataccacgtcagcagctgactgaatatcatgatggcccacaccgggcgctacttgctacagatgggcacaacgcatgcccaacgaggaagtggagcgtgcacatgacagacaaatgctctgtcagattgttgttgcccagatcatggtggaaccgataggccgcgcatcgcaagcatccttactgactaaaagaatagacctggatagccttgcatgttcttccagatagtaacaagatggcactatgaaagaacgtggacttccactgagagggcgaaggacacgatataagagggacaggccactacgagagccaacacactcatcgaagactgtgttgtcgaggagccagagagcactaaatcgtaatcctaaagagagctcccccattcatagcactgagcttgccttctaacgcctccagaaaggtaaggtgaaagctgtatccatcgcataggcacatgctaatcttgtggtactctttgcgaagtgaccatatgcgcgtggttaatgtcggatatgagtgccccaacgttcccattacggtgtgcctc

SEQ ID NO: 527113 - DNA, 1729 bp, Homo sapiens
  misc_feature (2)..(3): n is a, c, g, or t
  misc_feature (1086)..(1086): n is a, c, g, or t
  misc_feature (1097)..(1097): n is a, c, g, or t
  misc_feature (1103)..(1103): n is a, c, g, or t
  misc_feature (1226)..(1226): n is a, c, g, or t
  misc_feature (1261)..(1261): n is a, c, g, or t
  misc_feature (1310)..(1310): n is a, c, g, or t
  misc_feature (1317)..(1317): n is a, c, g, or t
  misc_feature (1338)..(1338): n is a, c, g, or t
  misc_feature (1380)..(1380): n is a, c, g, or t
  misc_feature (1399)..(1399): n is a, c, g, or t
  misc_feature (1411)..(1411): n is a, c, g, or t
  misc_feature (1423)..(1423): n is a, c, g, or t
  misc_feature (1467)..(1467): n is a, c, g, or t
  misc_feature (1470)..(1470): n is a, c, g, or t
  misc_feature (1473)..(1473): n is a, c, g, or t
  misc_feature (1481)..(1482): n is a, c, g, or t
anntcccctttcactgttgccgtagtgctagcttttctcttctgtcaaccccacacgcctttggcacaatgaagtgggtaacctttatttcccttctttttctctttagctcggcttattccaggggtgtgtttcgtcgagatgcacacaagagtgaggttgctcatcggtttaaagatttgggagaagaaaatttcaaagccttggtgttgattgcctttgctcagtatcttcagcagtgtccatttgaagatcatgtaaaattagtgaatgaagtaactgaatttgcaaaaacatgtgttgctgatgagtcagctgaaaattgtgacaaatcacttcataccctttttggagacaaattatgcacagttgcaactcttcgtgaaacctatggtgaaatggctgactgctgtgcaaaacaagaacctgagagaaatgaatgcttcttgcaacacaaagatgacaacccaaacctcccccgattggtgagaccagaggttgatgtgatgtgcactgcttttcatgacaatgaagagacattttcatccttacttttatgccccggaactccttttctttgctaaaaggtataaagctgcttttacagaatgttgccaagctgctgataaagctgcctgcctgttgccaaagctcgatgaacttcgggatgaagggaaggcttcgtctgccaaacagagactcaagtgtgccagtctccaaaaatttggagaaagagctttcaaagcatgggcagtagctcgcctgagccagagatttcccaaagctgagtttgcagaagtttccaagttagtgacagatcttaccaaagtccacacggaatgctgccatggagatctgcttgaatgtgctgatgacagggcggaccttgccaagtatatctgtgaaaatcaagattcgatctccagtaaactgaaggaatgctgtgaaaaacctctgttggaaaaatcccactgcattgccgaagtggaaaatgatgagatgcctgctgacttggcttcattagctgctgattttgttgaaagtaaggatgtttgcgaaaactatgctgaggcacaggatgtgttnctgggcatgtntttgtntgaatatgcacgaaggcattctgagtactctgtcgtgctgctgctgagacttgccaagacatatgaaaccactctatagaagtgctgtgccgctgcagatactcatgaatgctatgccaaagngttcgatgaatttaaacctcttgtggaagagcctnagaatttaatcaaacaaaattgtgagctttttgagcagcttggagagtncaaattncagaatgcgctattagttcgntacaccaagaaagtgccccaagtgtcaacttcaactcttgtngaggtctcaagaaacctangaaaagtgggcngcaaatgttganaacattctggagcaaaaagatggcctgtgcacaagctatctatncgnggncctgccanntatgtgtgttgcctgagaaaacgccacgtagtgacagagtcaccaaatgctgtacagaatactttgtgaacacgcgaacatgcttttcagatctggaagtcgatgaaacatacgcttcccaagagagtaatgctgaaacattcacctttcatgcagatatatgcacactctctgtgaaggggagacacatcttgaaacacactgcgcttgttgagcttgtgaaacacaagcgccaggcgacatgcaa

SEQ ID NO: 527114 - DNA, 275 bp, Homo sapiens
  misc_feature (13)..(13): n is a, c, g, or t
  misc_feature (15)..(16): n is a, c, g, or t
  misc_feature (22)..(22): n is a, c, g, or t
  misc_feature (167)..(167): n is a, c, g, or t
gagaggattaggntnntttccngccaacagtactccaccggtgaggccaacgaggccagccgtttattcaagtgacataagcatttatttcaacttgggtggggggggggtcaaatatatactcatttttataaattaatctaccaagatattacaatgactactanattaaaagtatttgggaaacagcctggttatgaaataggacttctatattgaattaacatatttaggcaatgtagtgggggggggggggccatttactgcttcctaat

SEQ ID NO: 527115 - DNA, 702 bp, Homo sapiens
  misc_feature (2)..(3): n is a, c, g, or t
  misc_feature (561)..(561): n is a, c, g, or t
  misc_feature (581)..(581): n is a, c, g, or t
anntcccctttcactgttgccgtagtgctagcttttctcttctgtcaaccccacacgcctttggcacaatgaagtgggtaacctttatttcccttctttttctctttagctcggcttattccaggggtgtgtttcgtcgagatgcacacaagagtgaggttgctcatcggtttaaagatttgggagaagaaaatttcaaagccttggtgttgattgcctttgctcagtatcttcagcagtgtccatttgaagatcatgtaaaattagtgaatgaagtaactgaatttgcaaaaacatgtgttgctgatgagtcagctgaaaattgtgacaaatcacttcataccctttttggagacaaattatgcacagttgcaactcttcgtgaaacctatggtgaaatggctgactgctgtgcaaaacaagaacctgagagaaatgaatgcttcttgcaacacaaagatgacaacccaaacctcccccgattggtgagaccagaggttgatgtgatgtgcactgcttttcatgacaatgaagagacattttggctaaggataagctgtntacagatgtgcaactgtgtnaagtgctgctgtgcaaagtcgtgacttcgatgagggagtcgttgcaacaaactagtggcagctcaaattgagaagactcaagctgcagactgctgacaaattcaagtggtgcgagtcagta

SEQ ID NO: 527116 - DNA, 1638 bp, Homo sapiens
  misc_feature (2)..(3): n is a, c, g, or t
  misc_feature (995)..(995): n is a, c, g, or t
  misc_feature (1006)..(1006): n is a, c, g, or t
  misc_feature (1012)..(1012): n is a, c, g, or t
  misc_feature (1135)..(1135): n is a, c, g, or t
  misc_feature (1170)..(1170): n is a, c, g, or t
  misc_feature (1219)..(1219): n is a, c, g, or t
  misc_feature (1226)..(1226): n is a, c, g, or t
  misc_feature (1247)..(1247): n is a, c, g, or t
  misc_feature (1289)..(1289): n is a, c, g, or t
  misc_feature (1308)..(1308): n is a, c, g, or t
  misc_feature (1320)..(1320): n is a, c, g, or t
  misc_feature (1332)..(1332): n is a, c, g, or t
  misc_feature (1376)..(1376): n is a, c, g, or t
  misc_feature (1379)..(1379): n is a, c, g, or t
  misc_feature (1382)..(1382): n is a, c, g, or t
  misc_feature (1390)..(1391): n is a, c, g, or t
anntcccctttcactgttgccgtagtgctagcttttctcttctgtcaaccccacacgcctttggcacaatgaagtgggtaacctttatttcccttctttttctctttagctcggcttattccaggggtgtgtttcgtcgagatgcacacaagagtgaggttgctcatcggtttaaagatttgggagaagaaaatttcaaagccttggtgttgattgcctttgctcagtatcttcagcagtgtccatttgaagatcatgtaaaattagtgaatgaagtaactgtggagacaaattatgcacagttgcaactcttcgtgaaacctatggtgaaatggctgactgctgtgcaaaacaagaacctgagagaaatgaatgcttcttgcaacacaaagatgacaacccaaacctcccccgattggtgagaccagaggttgatgtgatgtgcactgcttttcatgacaatgaagagacatttttgaaaaaatacttatatgaaattgccagaagacatccttacttttatgccccggaactccttttctttgctaaaaggtataaagctgcttttacagaatgttgccaagctgctgataaagctgcctgcctgttgccaaagctcgatgaacttcgggatgaagggaaggcttcgtctgccaaacagagactcaagtgtgccagtctcatttcccaaagctgagtttgcagaagtttccaagttagtgacagatcttaccaaagtccacacggaatgctgccatggagatctgcttgaatgtgctgatgacagggcggaccttgccaagtatatctgtgaaaatcaagattcgatctccagtaaactgaaggaatgctgtgaaaaacctctgttggaaaaatcccactgcattgccgaagtggaaaatgatgagatgcctgctgacttggcttcattagctgctgattttgttgaaagtaaggatgtttgcgaaaactatgctgaggcacaggatgtgttnctgggcatgtntttgtntgaatatgcacgaaggcattctgagtactctgtcgtgctgctgctgagacttgccaagacatatgaaaccactctatagaagtgctgtgccgctgcagatactcatgaatgctatgccaaagngttcgatgaatttaaacctcttgtggaagagcctnagaatttaatcaaacaaaattgtgagctttttgagcagcttggagagtncaaattncagaatgcgctattagttcgntacaccaagaaagtgccccaagtgtcaacttcaactcttgtngaggtctcaagaaacctangaaaagtgggcngcaaatgttganaacattctggagcaaaaagatggcctgtgcacaagctatctatncgnggncctgccanntatgtgtgttgcctgagaaaacgccacgtagtgacagagtcaccaaatgctgtacagaatactttgtgaacacgcgaacatgcttttcagatctggaagtcgatgaaacatacgcttcccaagagagtaatgctgaaacattcacctttcatgcagatatatgcacactctctgtgaaggggagacacatcttgaaacacactgcgcttgttgagcttgtgaaacacaagcgccaggcgacatgcaa

SEQ ID NO: 527117 - DNA, 1664 bp, Homo sapiens
  misc_feature (2)..(3): n is a, c, g, or t
  misc_feature (1021)..(1021): n is a, c, g, or t
  misc_feature (1032)..(1032): n is a, c, g, or t
  misc_feature (1038)..(1038): n is a, c, g, or t
  misc_feature (1161)..(1161): n is a, c, g, or t
  misc_feature (1196)..(1196): n is a, c, g, or t
  misc_feature (1245)..(1245): n is a, c, g, or t
  misc_feature (1252)..(1252): n is a, c, g, or t
  misc_feature (1273)..(1273): n is a, c, g, or t
  misc_feature (1315)..(1315): n is a, c, g, or t
  misc_feature (1334)..(1334): n is a, c, g, or t
  misc_feature (1346)..(1346): n is a, c, g, or t
  misc_feature (1358)..(1358): n is a, c, g, or t
  misc_feature (1402)..(1402): n is a, c, g, or t
  misc_feature (1405)..(1405): n is a, c, g, or t
  misc_feature (1408)..(1408): n is a, c, g, or t
  misc_feature (1416)..(1417): n is a, c, g, or t
anntcccctttcactgttgccgtagtgctagcttttctcttctgtcaaccccacacgcctttggcacaatgaagtgggtaacctttatttcccttctttttctctttagctcggcttattccaggggtgtgtttcgtcgagatgcacacaagagtgaggttgctcatcggtttaaagatttgggagaagaaaatttcaaagccttggtgttgattgcctttgctcagtatcttcagcagtgtccatttgaagatcatgtaaaattagtgaatgaagtaactgaatttgcaaaaacatgtgttgctgatgagtcagctgaaaattgtgacaaatcacttcatacccttttcctttttggagacaaattatgcacaggtgcgactcttcgtgaaacctatggtgaaatggctgactggtgtgcacaacaagaacctcccccgattggtgagaccagaggttgatgtgatgtgcactgcttttcatgacaatgaagagacatttttgaaaaaatacttatatgaaattgccagaagacatccttacttttatgccccggaactccttttctttgctaaaaggtataaagctgcttttacagaatgttgccaagctgctgataaagctgcctgcctgttgccaaagctcgatgaacttcgggatgaagggaaggcttcgtctgccaaacagagactcaagtgtgccagtctcatttcccaaagctgagtttgcagaagtttccaagttagtgacagatcttaccaaagtccacacggaatgctgccatggagatctgcttgaatgtgctgatgacagggcggaccttgccaagtatatctgtgaaaatcaagattcgatctccagtaaactgaaggaatgctgtgaaaaacctctgttggaaaaatcccactgcattgccgaagtggaaaatgatgagatgcctgctgacttggcttcattagctgctgattttgttgaaagtaaggatgtttgcgaaaactatgctgaggcacaggatgtgttnctgggcatgtntttgtntgaatatgcacgaaggcattctgagtactctgtcgtgctgctgctgagacttgccaagacatatgaaaccactctatagaagtgctgtgccgctgcagatactcatgaatgctatgccaaagngttcgatgaatttaaacctcttgtggaagagcctnagaatttaatcaaacaaaattgtgagctttttgagcagcttggagagtncaaattncagaatgcgctattagttcgntacaccaagaaagtgccccaagtgtcaacttcaactcttgtngaggtctcaagaaacctangaaaagtgggcngcaaatgttganaacattctggagcaaaaagatggcctgtgcacaagctatctatncgnggncctgccanntatgtgtgttgcctgagaaaacgccacgtagtgacagagtcaccaaatgctgtacagaatactttgtgaacacgcgaacatgcttttcagatctggaagtcgatgaaacatacgcttcccaagagagtaatgctgaaacattcacctttcatgcagatatatgcacactctctgtgaaggggagacacatcttgaaacacactgcgcttgttgagcttgtgaaacacaagcgccaggcgacatgcaa

SEQ ID NO: 527118 - DNA, 241 bp, Homo sapiens
aactatatgagtctctcggtcaggaaacttcttcagcatcatataagctcatcctgtgcgtatcgctgtcacggtttcagtgcgattcggctcatcgctgttcggtgtctgatttatgttccctgtaccgcttgtcttcagctgtcactcgaataataccattcacatctatctcaaaggtgactatcaatctgaggagaccccacgaggagcaggaggaattccagtcagatcaaatgta

SEQ ID NO: 527119 - DNA, 101 bp, Homo sapiens
aggaagggggggggaaaacaattttgcttttttaagggcccctttttgaaaaagggcgggaaaaaattcccccaaaaaaaaatttttccccctccggggga

SEQ ID NO: 527120 - DNA, 1693 bp, Homo sapiens
  misc_feature (2)..(3): n is a, c, g, or t
  misc_feature (1050)..(1050): n is a, c, g, or t
  misc_feature (1061)..(1061): n is a, c, g, or t
  misc_feature (1067)..(1067): n is a, c, g, or t
  misc_feature (1190)..(1190): n is a, c, g, or t
  misc_feature (1225)..(1225): n is a, c, g, or t
  misc_feature (1274)..(1274): n is a, c, g, or t
  misc_feature (1281)..(1281): n is a, c, g, or t
  misc_feature (1302)..(1302): n is a, c, g, or t
  misc_feature (1344)..(1344): n is a, c, g, or t
  misc_feature (1363)..(1363): n is a, c, g, or t
  misc_feature (1375)..(1375): n is a, c, g, or t
  misc_feature (1387)..(1387): n is a, c, g, or t
  misc_feature (1431)..(1431): n is a, c, g, or t
  misc_feature (1434)..(1434): n is a, c, g, or t
  misc_feature (1437)..(1437): n is a, c, g, or t
  misc_feature (1445)..(1446): n is a, c, g, or t
anntcccctttcactgttgccgtagtgctagcttttctcttctgtcaaccccacacgcctttggcacaatgaagtgggtaacctttatttcccttctttttctctttagctcggcttattccaggggtgtgtttcgtcgagatgcacacaagagtgaggttgctcatcggtttaaagatttgggagaagaaaatttcaaagccttggtgttgattgcctttgctcagtatcttcagcagtgtccatttgaagatcatgtaaaattagtgaatgaagtaactgaaacatgtggtgctgatgagtcatctgaaaatgtgacaaatactttaaacccttttggagacaaattatgcacagttgcaactcttcgtgaaacctatggtgaaatggctgactgctgtgcaaaacaagaacctgagagaaatgaatgcttcttgcaacacaaagatgacaacccaaacctcccccgattggtgagaccagaggttgatgtgatgtgcactgcttttcatgacaatgaagagacatttttgaaaaaatacttatatgaaattgccagaagacatccttacttttatgccccggaactccttttctttgctaaaaggtataaagctgcttttacagaatgttgccaagctgctgataaagctgcctgcctgttgccaaagctcgatgaacttcgggatgaagggaaggcttcgtctgccaaacagagactcaagtgtgccagtctcatttcccaaagctgagtttgcagaagtttccaagttagtgacagatcttaccaaagtccacacggaatgctgccatggagatctgcttgaatgtgctgatgacagggcggaccttgccaagtatatctgtgaaaatcaagattcgatctccagtaaactgaaggaatgctgtgaaaaacctctgttggaaaaatcccactgcattgccgaagtggaaaatgatgagatgcctgctgacttggcttcattagctgctgattttgttgaaagtaaggatgtttgcgaaaactatgctgaggcacaggatgtgttnctgggcatgtntttgtntgaatatgcacgaaggcattctgagtactctgtcgtgctgctgctgagacttgccaagacatatgaaaccactctatagaagtgctgtgccgctgcagatactcatgaatgctatgccaaagngttcgatgaatttaaacctcttgtggaagagcctnagaatttaatcaaacaaaattgtgagctttttgagcagcttggagagtncaaattncagaatgcgctattagttcgntacaccaagaaagtgccccaagtgtcaacttcaactcttgtngaggtctcaagaaacctangaaaagtgggcngcaaatgttganaacattctggagcaaaaagatggcctgtgcacaagctatctatncgnggncctgccanntatgtgtgttgcctgagaaaacgccacgtagtgacagagtcaccaaatgctgtacagaatactttgtgaacacgcgaacatgcttttcagatctggaagtcgatgaaacatacgcttcccaagagagtaatgctgaaacattcacctttcatgcagatatatgcacactctctgtgaaggggagacacatcttgaaacacactgcgcttgttgagcttgtgaaacacaagcgccaggcgacatgcaa

SEQ ID NO: 527121 - DNA, 169 bp, Homo sapiens
  misc_feature (81)..(81): n is a, c, g, or t
gacagatgactccaggaatccactcaagaagctagccattgcagaagaggcgatcggagtatgacgaggtggtcgtaagtnggtgatcattgaaggagacttggaacgcacagaggaacgagctgagctggcagagtcccgttgccgagagatggatgagcagattaga

SEQ ID NO: 527122 - DNA, 131 bp, Homo sapiens
aaactacaaagctaaagataaagcagagggacaaggtgtcatacaagaatacacttgagtactatgccttcaacatgaaagcaactgttgaagataagaaacttcaaggcaagataaacgatgaggacaaa

SEQ ID NO: 527123 - DNA, 1677 bp, Homo sapiens
  misc_feature (2)..(3): n is a, c, g, or t
  misc_feature (1034)..(1034): n is a, c, g, or t
  misc_feature (1045)..(1045): n is a, c, g, or t
  misc_feature (1051)..(1051): n is a, c, g, or t
  misc_feature (1174)..(1174): n is a, c, g, or t
  misc_feature (1209)..(1209): n is a, c, g, or t
  misc_feature (1258)..(1258): n is a, c, g, or t
  misc_feature (1265)..(1265): n is a, c, g, or t
  misc_feature (1286)..(1286): n is a, c, g, or t
  misc_feature (1328)..(1328): n is a, c, g, or t
  misc_feature (1347)..(1347): n is a, c, g, or t
  misc_feature (1359)..(1359): n is a, c, g, or t
  misc_feature (1371)..(1371): n is a, c, g, or t
  misc_feature (1415)..(1415): n is a, c, g, or t
  misc_feature (1418)..(1418): n is a, c, g, or t
  misc_feature (1421)..(1421): n is a, c, g, or t
  misc_feature (1429)..(1430): n is a, c, g, or t
anntcccctttcactgttgccgtagtgctagcttttctcttctgtcaaccccacacgcctttggcacaatgaagtgggtaacctttatttcccttctttttctctttagctcggcttattccaggggtgtgtttcgtcgagatgcacacaagagtgaggttgctcatcggtttaaagatttgggagaagaaaatttcaaagccttggtgttgattgcctttgctcagtatcttcagcagtgtccatttgaagatcatgtaaaattagtgaatgaagtaactgacacatgtgtcgctgatgagtcagctgttgggacaaagcacttcatgccctttttggagacaaattatgcacaggtgcgactcttcgtgaaacctatggtgaaatggctgactggtgtgcacaacaagaacctgagagaaatgaatgcttcttgcaacacaaagatgacaacccaaacctcccccgattggtgagaccagaggttgatgtgatgtgcactgcttttcatgacaatgaagagacattttaaaaggtataaagctgcttttacagaatgttgccaagctgctgataaagctgcctgcctgttgccaaagctcgatgaacttcgggatgaagggaaggcttcgtctgccaaacagagactcaagtgtgccagtctccaaaaatttggagaaagagctttcaaagcatgggcagtagctcgcctgagccagagatttcccaaagctgagtttgcagaagtttccaagttagtgacagatcttaccaaagtccacacggaatgctgccatggagatctgcttgaatgtgctgatgacagggcggaccttgccaagtatatctgtgaaaatcaagattcgatctccagtaaactgaaggaatgctgtgaaaaacctctgttggaaaaatcccactgcattgccgaagtggaaaatgatgagatgcctgctgacttggcttcattagctgctgattttgttgaaagtaaggatgtttgcgaaaactatgctgaggcacaggatgtgttnctgggcatgtntttgtntgaatatgcacgaaggcattctgagtactctgtcgtgctgctgctgagacttgccaagacatatgaaaccactctatagaagtgctgtgccgctgcagatactcatgaatgctatgccaaagngttcgatgaatttaaacctcttgtggaagagcctnagaatttaatcaaacaaaattgtgagctttttgagcagcttggagagtncaaattncagaatgcgctattagttcgntacaccaagaaagtgccccaagtgtcaacttcaactcttgtngaggtctcaagaaacctangaaaagtgggcngcaaatgttganaacattctggagcaaaaagatggcctgtgcacaagctatctatncgnggncctgccanntatgtgtgttgcctgagaaaacgccacgtagtgacagagtcaccaaatgctgtacagaatactttgtgaacacgcgaacatgcttttcagatctggaagtcgatgaaacatacgcttcccaagagagtaatgctgaaacattcacctttcatgcagatatatgcacactctctgtgaaggggagacacatcttgaaacacactgcgcttgttgagcttgtgaaacacaagcgccaggcgacatgcaa

SEQ ID NO: 527124 - DNA, 869 bp, Homo sapiens
tggggttaaaaatggttttctcccttggcaaaaataacataggaaaaactaaacccaaaaattttgtgaaaaggtgtcctttgggaggacgataccatttttgggggataaaaaacccctgataaaaagaacccaattacccttaatgtaggggtgaagggggacacaatctcatgtagcctatacccattatccctaagtgaccactagtgtaacatggggtttatgggagtgtcatcatcactctcatattatttctcccctcttttaataactaaaataatacaaaagatatatctctccttcatgaacacagtatgggagcataggaattatagacaaccggttgagggaggagtattttcattatttctcataatgtgagtgaggggacagcgacaaaatagtgttggactaaaacactaacggggaggatagaggaggaagcccattgagatctcttaataaaactgggacaagtcccatcatactcgctatttccctcgccagatacatgtgcacttatgctgcgagaacaacgccataattttttacacacgtagggccgagggacctaagaatactgcccaaaaggccacccagggaacaagcatatcaaactagtgtgggaaacaaatcggctatgccaactacaagtcataacatacggccacaaccattaagtgctggagctatttaagaaacccaatactgtgtcaatgtgcgctgctcaaaacaagccgctataacacccccgccttaactgatgacacacaaccattcgtagtctcaacacgtgtacatgacaccatccggacatataatacacctgacattatttaatccaacacacaccccattggcagaca

SEQ ID NO: 527125 - DNA, 338 bp, Homo sapiens
gatgcagtataccctggcctaactgagatttccgcagaaattaatgcctagacaccaaaccacaacatccaggaagctcagagaatgccaagccaaataaatgccagaaaaaaactacaccaaagagtatcatactcaaactgtagaaaaccaaaggtaaagaaaaaaaaatcttcaccaggcatggtggctcacacctgtaatcccagcacttaggaaggctgaggtgggtgggtcacttgaggccaggagtttgagaccagcctggccaacatggtgaaagcctgtctctactaaaaatagaaaaaattagccacacatggtggcatcgataaaca

SEQ ID NO: 527126 - DNA, 682 bp, Homo sapiens
  misc_feature (2)..(3): n is a, c, g, or t
anntcccctttcactgttgccgtagtgctagcttttctcttctgtcaaccccacacgcctttggcacaatgaagtgggtaacctttatttcccttctttttctctttagctcggcttattccaggggtgtgtttcgtcgagatgcacacaagagtgaggttgctcatcggtttaaagatttgggagaagaaaatttcaaagccttggtgttgattgcctttgctcagtatcttcagcagtgtccatttgaagatcatgtaaaattagtgaatgaagtaactgaaacatgtggtgctgatgagtcatctgaaaatgtgacaaatactttaaacccttttggagacaaattatgcacagttgcaactcttcgtgaaacctatggtgaaatggctgactgctgtgcaaaacaagaacctgagagaaatgaatgcttcttgcaacacaaagatgacaacccaaacctcccccgattggtgagaccagaggttgatgtgatgtgcactgcttttcatgacaatgaagagacatttttgaaaaaatacttatatgaaattgccagaagacatccttacttttatgccccggaactccttttctttgctaaaaggttaaaccggtttttacaaaggtggccaaattgtgtaaaaacttctcgcccttgcccaaattcataaatctcgga

SEQ ID NO: 527127 - DNA, 1001 bp, Homo sapiens
  misc_feature (2)..(3): n is a, c, g, or t
anntcccctttcactgttgccgtagtgctagcttttctcttctgtcaaccccacacgcctttggcacaatgaagtgggtaacctttatttcccttctttttctctttagctcggcttattccaggggtgtgtttcgtcgagatgcacacaagagtgaggttgctcatcggttctgacaggactttcgtggagcatagaaagaattttcagaagcatggtggagtagctcgccgtggagcctaggatttcccaaagctgagtttgcagaagtttccaagttagtgacagatcttaccaaagtccacacggaatgctgccatggagatctgcttgaatgtgctgatgacagggcggaccttgccaagtatatctgtgaaaatcaagattcgatctcccagtaatagctgaaggacatgctgtgatgaaagtctcgtgttggatagataatcccaactgtcattgcccgaatgatggacactcgtgattgaggactggcctgactgaactgtgcctttcattttagcgtgcgtgattcttctgttggataaggtaatggattcgttttgcatatagtactaattgtcgtgaagggccaacaggggtatggtcctattccctttggggccacttgtttgttgcagtaaatggaaacttattgccaagaaagggaatgtcctcggaatttacctcctggttcgctagcttggcgtagactcggatgtaagctctgccaacagaacgacttattgaaaaaggcaattccttaagaagaaaggtggcgttgttggcccagggttggcacgtgaaattccctctcatttggaaaatgtggcgttaattgggcccgaaaaggtgggcttcccggaatgcaaatctctgtcaaaacccttctttgggtgggggaacgaagagacccctgtcggaacagtctacatgtccacgaatcacgaaattggtcggacaccgttctgtggaggacaaaccttgtggccaagttttcc

SEQ ID NO: 527128 - DNA, 305 bp, Homo sapiens
caggcgctggactcttgaagacgtcggagaccctgtccctcacgtgcggtgtctacggtgggactgtcagtggttactactggagttggattcgtcagccccccggaagggggccggaactgattggagaagttgatcaaggtggaaatggcaactacaatccgtccgtcaggggtcgcgtctccatgtccctggacacatcgaagaaccaattctccctacagctgacttccttgaccgccgcggacagtggtgtctattattgtgcgcgttatagcgacacctggcataaatatgtccaatat

SEQ ID NO: 527129 - DNA, 114 bp, Homo sapiens
tcgtaagttgtaaagtctctcatgcaaccagcgccgcagtccaccccttaactgaggtccctgccctccccgactgcgctggccgagactgagggggcagctcgcccctgagtt

SEQ ID NO: 527130 - DNA, 204 bp, Homo sapiens
  misc_feature (11)..(11): n is a, c, g, or t
  misc_feature (17)..(17): n is a, c, g, or t
  misc_feature (79)..(79): n is a, c, g, or t
  misc_feature (92)..(92): n is a, c, g, or t
taagagggagncaaacnaagtggcccaggctggtctagaactggtctcagatgaaactcccaactcattgtcctgagtngctgggttacagncatgaggcactgtgcctgccctacttttttatataaaaaaattataaataacatattttagagccaggagggggggcccatgggtataatcccagcaactcaggacaatgag

SEQ ID NO: 527131 - DNA, 961 bp, Homo sapiens
  misc_feature (2)..(3): n is a, c, g, or t
  misc_feature (782)..(782): n is a, c, g, or t
  misc_feature (959)..(961): n is a, c, g, or t
anntcccctttcactgttgccgtagtgctagcttttctcttctgtcaaccccacacgcctttggcacaatgaagtgggtaacctttatttcccttctttttctctttagctcggcttattccaggggtgtgtttcgtcgagatgcacacaagagtgaggttgctcatcggtttaaagatttgggagaagaaaatttcaaagccttggtgttgatagcgcgtttgctcacgtatcttcagtcagtgtccagtatgacagatcgatgtaaacattcagtgagatgatagtaacgtgaactttgcggaaacacatagtgttgcatgatagagtcagcgtgaaagattgtcgacaagatcagcttcattaccacttatttgtgacgacacaatgtatgcgacatgttgacaatctctttgcgtagaaatccctataggtagaagactggcgtgtacgtgcagtgtgacaagagacaaggataccctgcagtagcaagatcgaatggcgttcgtttgcaacgacaataggatggacaagcccagagacctgcccccgcagtggggtgtagaccgagagggttgactgtgatagtgcacggcgttttcatgtacaatgaagagacattttgaaaaaatacttatatgaaattgccagaagacatccttacttttatgccccggaactccttttctttgctaaaaggtataaagctgcttttacagaatgttgccaagctgctgataaagctgcctgctgtagcgaaagtcgatgaactacgggataanggcaggctcgtctggcaagagaaatcagtgtggcaggtcaagatggggaaaagtcaaacaggcgtattgctgactcaaatattgggattcagtataagttccagcacgaggcgaatgtatgttaggggcattttagaaattctttggtgattttcttgtatatgttattggttttcnnn

SEQ ID NO: 527132 - DNA, 251 bp, Homo sapiens
  misc_feature (2)..(3): n is a, c, g, or t
anntcccctttcactgttgccgtagtgctagcttttctcttctgtcaaccccacacgcctttggcacaatgaagtgggtaacctttatttcccttctttttctctttagctcggcttattccaggggtgtgtttcgtcgagatgcacacaagagtgaggttgctcatcggtttaagattgggagaagaaattcaagctgtgtgatgcttgctcagtatctcagcggtcattgagacagaaatagtgatgag

SEQ ID NO: 527133 - DNA, 361 bp, Homo sapiens
agttcatatgtcgcccttcctattgatcacgccctcctaagtatatcatctacgaacgacctaaatcgaacgaccagtagtgcacctatgtttaagactaggctgcagagactgaatgaataaatcagtacagcatatgtgaaatgaaggcaaaatctggacatcttcatatcattacattgatatccgtttaatgctgatatatctgattgtgctaccagacatagacaccttactcctcggatacctctcgtgtgcatcacatcatgctttgcaccataattgagctctgaactgataatcattgactgcttatccgatgtgccaatgccacatttatgaaccagggtctgctggtcgc

SEQ ID NO: 527134 - DNA, 550 bp, Homo sapiens
  misc_feature (490)..(490): n is a, c, g, or t
  misc_feature (504)..(504): n is a, c, g, or t
  misc_feature (525)..(525): n is a, c, g, or t
  misc_feature (529)..(529): n is a, c, g, or t
gaggttcctgagctgccgctggtggttgaagataaggttgaaggttacaagaagaccaaggaggctgttcagctgctcaagaaactcaaagcttggaatgacatcaaaaaggtctatgcctctcagagaatgagagctggcaagggcaaaatgagaaaccgacggcggatccagcgcagggggccctgcatcatctataatgaagataatggtatcatcaaggccttccgcaacatccctggtattactctgcttaatgtaagcaagctgaacattttgaaactggctcctggtgggcatgtgggccgtttctgcatctggacggagagtgctttccggaagttggatgagctgtatggcacttggcggaaggctgcttccctcaagagtaactataacctgcccatgcacaagatgatgaacaccgaccttagcagaatcttgaaaagccagaaatccaaagagccctccgagcaccacgcaagaagantcatcgcagagtcntgaagaaaatccactgaaganctgngaatcctgttgaagttaaccc

SEQ ID NO: 527135 - DNA, 954 bp, Homo sapiens
gaaccaggcggcggccatcgcggcgaggatacagtggcttctcgcagactgccgcagaactactgagccggtggagtgacaggctccaagtagccgcgaatcagtgttatgcttcgcctcatgtgtcctctgtacaaggaggctggttcactggagtctgcctcgtgatgagagcctccaggacctagagagctatgactggcccttcggggtgacggtgctgcgctggaaagagctagtgttctgcatgtaccagtctctggactgtgcggagacagaagcgtgaatgccatgaactcgaggtcttcttggatgagagatgctacgacttgctacaggcgcgcatcttcgcgagaccgctgacggtcgtccgcgggggtgatcctctggtgcgggatgaaatgttcagcctgcaggtattgcgggagtgtactatggcttctgtgcagcgtcctgcaagcccaacggggatgatgtgggccgcattcgagctggtaccgtcggtgattatcctccacttccgatacaggagacccttcacgtgatcggaatgttgcccaccagcccgtgtgatcgcttgctgccattggtggctgattgaccgtgcgttgtggcccttgttcacctgtctgtgccttcggtcctgttgccacggctggtttctccacggtgcccagagggccggcggtgggagggacgagacactgaaggcgctgccagtcatcggtcacccagcggtccatgggggcatcccgcggacacatgctaccagccaggaagggtggtaccggttgcacgcaaagagcacgggtagataaagcagggcgatccagcaagccgggcgcagcaagcccgggatcgcaacgggcgcccagggtgagagcgctcacaacaagaccagcacaagacacccacaacacggagcacagaagcacctcgacgactgtgtcggag

SEQ ID NO: 527136 - DNA, 1117 bp, Homo sapiens
ctccctgtcagctcttcactagcctcggcctgagcgagcagaaggccctgtgagactgctcaatgaactctgtgctctgagcgcgcagctgcgcgatggcgctactcaggctcagcatgaccctgggttccaccattgacaaatgctacctggtgatcctgttatatgtgcttgtgcctccctgactcagtggataccacgagcgtctcatcacttacctctgcctaaccctacactaccccagtacgcaagatccaacacctgagcccccagactaaccctgcctgccctctgcagctactgctgcgcgacgctcaccaccatagcagcacacaccaatcgcaccaacatgctggaccctatcagaaatgccgcgcgcaactgctcgcgacccgatggcgcgctgctccacctcgctcgcacccctcaacgcacgcccacgactcgaccgcgcaccgccctgcaccgcgcaccgcctggcctaactatcaccaccactcgcgcccactcatggagccccccccccaagcacatccctggaccttgcgcacaacccgctaatcaccacaatctatatcaaaccccatggcgcgacgcccttgcctctgcaccttgcgcgcagcaagtggccctcacgcaccgccatagaatgactctggcaacacgctgggcacgcaacagtagccgccgacacatcaacactctgtgaactacgcatcgcactacctttgaccaccgcctgcggcaaccaacgttggcccccagacgtatccacaattgacaaacaccctttccattgggcagtccacccccaacaacgccatctcggccgacgctggtcccatgcccactccctatgtgctcacgccaataactgtacactgccttttccccaaaccggtggccctggccgtcctctacacaatccactgacattaccggcgaccctcatacgcatatcgctgacaaaacacacatgacatccctggggcctcacgcctcacactcgacgtcaccaacaaatgcgtgaacgcttggatatgacggctaggcaactgcaaaccacctgtgcgtgcccggcaatggcaactgcattgctctctatggctcctaccca

SEQ ID NO: 527137 - DNA, 193 bp, Homo sapiens
tcagagcatcccctagtgcactatataagcactgataacttggctagagtataataacggacatagtgccaatataggatttgaagagtagtcaaataggcaaataaaaaagcagaaatataaagcgttgagtcatcctcttcatcttcctcatcttcctcctcttccttcctggttaccgcgctcgacttcg

SEQ ID NO: 527138 - DNA, 180 bp, Homo sapiens
tctgacgtctcccgtttgtcgcgccttctttcaccggccaccatctttcccccttcgcacatctctgtgcaggcagcattattccatcatcgcaccgggcatgaggttccatccacctttccagcaagcctcttctcctgagcagttccggctccgtgccagctccgtgtgcctctatga

SEQ ID NO: 527139 - DNA, 225 bp, Homo sapiens
tgaggaccatcaaatagaaatatagactgacaaaacagactcttgggaataagatacccaattccaacctgactctgatatagcatcgcatgacagatagcagactctgaaggaaatcaaaatattgtatcccaaaatgtttctttgacatattttgaaatgaccctgcaaagctgtcttttctgaatctatgaagaacctccatgaatgcgtccgtcgaagttg

SEQ ID NO: 527140 - DNA, 119 bp, Homo sapiens
ctagcggatccgagaagcggtgtgatatcattaaccccatttgaaatggtcgaaggtgtctaggtattggtggtagttattcctggtaccatcgcgaaacacaattcaaacacacaagg

SEQ ID NO: 527141 - DNA, 922 bp, Homo sapiens
  misc_feature (141)..(141): n is a, c, g, or t
gtcctgatgggcaaacccagacatcctcacttaccagctatgtccgaggacctgatcaggcgatctagagcggagaaggcggcgtgctggagaccgctcctccatcgcgtgaagctctatgctgtgggtgataacccatantgtctgactgtactaccgagcagccaactcatgattccattccaggtaccatgacatcggaaaggcaacagcagtgatgggggcgcgcagaatctaggggccgcggggcacatcggtgcatgtcatatcaggccctcatggcaaatccagtagcttgcagtctccatccttgggtgtgtacatggctgtctacaattcccaggaaccctagctagtccacggatgcctgtccttgtgaggatgcggcgagcctccattccacgggcaccgatacttatgcttcagtccagggctcatggagtgcctcccacgatgagtgaatgacgtgaatgaggctgtgcacgcttggttcttccgcagggcagggtctgggcctttggtagtgagggctgttgccggtggcacggctgagcggggtgagcctggacctgtggccgagtcccattgtgctgggctctggcctgatcactggcgctcaggtctggcgacttggttcccttgccacccttcttggctgccccagtgagtgtggccagttagctggtcgacttggcctgacagacagtgactcgtttatccctgctgcgtaggcatctggtattcgacccggtatggacattctcttggggcccacgttcccagcgtgaccttttcgtgagcatggtctaatcctcatgggccaattcttcattcccccttggtgttgccctcaagtgtcctttcgtcagtttcaagtacggcgaccttctggaaaatggggaggaggcagggtagagaatac

SEQ ID NO: 527142 - DNA, 283 bp, Homo sapiens
gtgtccttttcagccagggaccctttttagcatcgccgatccttctggcttgagaattttctatgtgtttctttagctcaggatttttttcccattctccagtttttagtgccctttttcaatattgtagacagttgtcattttaagcttttttctttcctttattagtacaaattcaggtagtaaaatattttagtaattcatattgttcagtaccaattttctgaatactactttgagcattacacaaagcatgatgtggcgtgccatttactctgagttc

SEQ ID NO: 527143 - DNA, 142 bp, Homo sapiens
taaaaatctaagaaacttacctatccagtttagggcttctaactctaaccttgatggccacatttcacactaaggccgtcaatgtacttccccagtcgttcatctatcatgagagcaaacaagacctaacattctcagaaga

SEQ ID NO: 527144 - DNA, 163 bp, Homo sapiens
ctagaggttacccttccaggcttattgcaggcagtggccacacagctcctgcccggagcacgtaacgatggtgctgggaggagagggcacaggaggacgaggctgcctctctgctccaatgtaaggcacttgcagctggggtggcctgcaatcgagcctggaa

SEQ ID NO: 527145 - DNA, 161 bp, Homo sapiens
ccacctctgcctcccaagtagctgggattacaggcacacacctcctcacctggctaatttttgcatttgttgtagagacagagtcccatcatgtacgcccagactgatcttgaactccggggctcaagcactcctcccacttaggcctctgccaactgctg

SEQ ID NO: 527146 - DNA, 241 bp, Homo sapiens
  misc_feature (64)..(65): n is a, c, g, or t
  misc_feature (174)..(174): n is a, c, g, or t
  misc_feature (176)..(176): n is a, c, g, or t
  misc_feature (178)..(178): n is a, c, g, or t
aactataggctaggtacgaggctggtgtgatcggccgagggcagccctggcagggttgctctgnngattggtgaggccgtgtggctacttctgtggaagcagtgctttgtagttactggaagataaaagggaaagaagcccttgggtgggggaaacacggcttacctgcgcccntngncgatgatggcatttcttaggacaccttggattataatgaaaacaactactctctgagcagctg

SEQ ID NO: 527147 - DNA, 132 bp, Homo sapiens
gtgtttgccgtggttcaggaatgctcagtgaagcttcactttgattcttattattttttatttttattaatttttttttttgagacaagaatctctctctgcgcccaggctggagtacagtggtgtgatctc

SEQ ID NO: 527148 - DNA, 135 bp, Homo sapiens
gttgccctggctttgtgaatggatcatgtgtctctaggtacttaacctgacatcatcttgtccacccggcttacctccaccagatttccccagttctgtctccatcttctacctgcagctgagtttcacttccga

SEQ ID NO: 527149 - DNA, 285 bp, Homo sapiens
gcatagtgtgttgcagctgatttaaatttctcacaagtttcatacaaaaagaagttttaccatgaccacagcaatacccaaatatttattttacatccaagtgtccaggataactatattcaaagttgagcatttatctctttatatgctaacagtagtctaagagtataaatccaatactgcaaactactctcacttcttcctcatattaggacttcaagaacatggttaagcatttaactagaaactcaacgtgtctacaacatcacttaaccagcaaggaat

SEQ ID NO: 527150 - DNA, 112 bp, Homo sapiens
ataacatgttcagtgttgtcacaaaaaactgaagattagaagccaggagaaatacaatgatggcctgtggcatgatgtgatatttattcgagaaaggcgcagtgcccgacgg

SEQ ID NO: 527151 - DNA, 137 bp, Homo sapiens
agtttgagagtcttcagtcacaaacaatagacagcctgaagactgtcaaactggttgataatcaaagaataggtcggttcgattaagtacggttggaattagtaagctatagcttaccagttttccatgtgctggga

SEQ ID NO: 527152 - DNA, 587 bp, Homo sapiens
ctctttcacaccatcctcccccagttcgccccccccatcggatggaaaaagccaccccgttgtttcgcgctgtccaacccgcctgaacaatccacccctgtttgcttaattttaccagcattctaatatatctccctacggttctctccgccctttccatgttcttcaatcccatcaatttatatttcccactccccctcacgatcgccttacgtaatatatttattgcccacccgtgaaaccagacgttatacactgatgcgtaacaccccctctgtatttctgccacgccccgcctctcctcctgtccctcacaggaggggcgctcgtcgccccgcctgtactagcgggctttgtgtgccccaaacatgggggccctctttttcgctagagaaattctcccctcgcaaccgcactatgcctttgattcgtcactccccaccctttattacctccacctctacaccctccttccttacactctcttgattgttcacatataccgcctataatttatttccgaccctctcgactctaccccttctctctcccccataatttctaccccccagttaacaaaaaaaaca

SEQ ID NO: 527153 - DNA, 226 bp, Homo sapiens
agtcgcccgctttcgtgagactccctggaggcgctttccagcacgggaataagctggacagggaggtaaagtaggcgaggtccctcctttttgattcttgggaaggaaaagccccgcccgcaatgcacaaggtcatctttttatttgttcccttgtatgggacccgtcagcgccaggaggcgtgttaatagaaggtccttgttagaagcagcagcttagctcacgg

SEQ ID NO: 527154 - DNA, 427 bp, Homo sapiens
  misc_feature (32)..(32): n is a, c, g, or t
  misc_feature (93)..(93): n is a, c, g, or t
  misc_feature (154)..(154): n is a, c, g, or t
  misc_feature (187)..(187): n is a, c, g, or t
  misc_feature (191)..(191): n is a, c, g, or t
  misc_feature (341)..(341): n is a, c, g, or t
ttcctgactgcgctcctctggcgcggccgcanttcccggcgtcaagtggatcgggaagcaccggcggccgggttcgtgtcgttgcgcgccaanagaacatgatccgccgcctggagatcgaggcggagaaccattactggcctgagcatgcccntacatgacccgggagcaggagcgccggccaccnggtngccgcaaggagggaggccttcgaggcaataaaggcggccgcacttccaagttcccccgcatagattcattgcggaccagctcgaccatctcaatgtcaccaagaaatggtcctaatcctgagtcgtcacccttggattttatggatcacnggagctgaccatctttacctggtcctggaactgaaaaacttgtagctttgtgtgaaaatgagcctttggaccagtctttattaaaa

SEQ ID NO: 527155 - DNA, 617 bp, Homo sapiens
caccttgtgtaaacaaatccatgctctccacgtgagtgagcagagccacatgcccaccccagcgtaacacaactccattcgaattcttgtgctctatcctatcatctgagaggacaagtattgaatagagctggcatcaaatacaatgccgacacaatgaattgtgtcgttcagcgatggggactcaatgtagtcatgatgatttaattcgattgattccatgggattaatctggtatctctcacgagtgtcaccgttcaagatatagaatatgtcatccgtgcacaggccgcgttctttctcactcagccccagtgagtcacacacaataaccgacaggtatttgccatctttccggtctctaatagagtatgtcctatccttctcagatatcccagtgtgtattagtgcccaccaaagcatgatgcgtcacatgcccttggaaaccagccctcattgagttgaaaaagtgtggacttcccagctccaatgtggacacaccagcagaattggtatttgttgaaccagggatccatatggttatctttctttcatacagtgaatctggtgcactgtctgtagtaacagctagatctgagggtagctgctctgtctgg

SEQ ID NO: 527156 - DNA, 356 bp, Homo sapiens
  misc_feature (1)..(1): n is a, c, g, or t
  misc_feature (31)..(31): n is a, c, g, or t
  misc_feature (67)..(67): n is a, c, g, or t
  misc_feature (77)..(77): n is a, c, g, or t
  misc_feature (211)..(211): n is a, c, g, or t
  misc_feature (224)..(224): n is a, c, g, or t
  misc_feature (247)..(247): n is a, c, g, or t
  misc_feature (264)..(264): n is a, c, g, or t
  misc_feature (288)..(288): n is a, c, g, or t
  misc_feature (305)..(305): n is a, c, g, or t
nctgcaggaattcggcacgagtaaacacgtnatcagtgcatgatgagccatgtaatcagtgcccgancagccacgtnatcagtgcatgtccagtcacgtgatcagtgcatgatagccacgttatcagtgcgtgcacagtcccatgatcagcgcctgtaagtcactgatcattgcctgataaacacgtgatcagtgcatgatgagccatgtnatcagtgcctgancagccacgtcatcagtgcatgcncagtcacgtgatctggncttgatcagccacgtgatcagtgnctgcagagtcacggggntcaggggccttctgagctgcgtggattcctgccgggcttcatctgcatgga

SEQ ID NO: 527157 - DNA, 1508 bp, Homo sapiens
  misc_feature (42)..(42): n is a, c, g, or t
  misc_feature (45)..(45): n is a, c, g, or t
  misc_feature (147)..(147): n is a, c, g, or t
  misc_feature (158)..(158): n is a, c, g, or t
  misc_feature (1133)..(1133): n is a, c, g, or t
  misc_feature (1164)..(1164): n is a, c, g, or t
agccctagcccgcctcttagaacctctcatttcctttccatngtngaaatctatcctcaaggaaataacttctcagtattccatctgctattctactgctcctcagggattattcaggccccctcccttccctacacatcaagctcnaggatttgccnccacccaggactggcaaattagctttactcaacatgccccgagtcaggataactaaaatacctcttagtctaggtagacactttcactggataggtagaggcctttcctacagggtctgagaaggccaccgcagtcatttcttcccttctgtcagacataattcctcagtttagccttcccacctctatacagtctgataacagaccagcctttattagtcaaatcagccaagcagtttttcaggctcttagtattcagtgaaacctttatatcccttacggtcctccatcttcaagaaaagtagaacggactaaaggtcttttaaaaacacacctcaccaagctcagccaccaacttaaaaaggactggacaatacttttaccactttcccttctcagaattcaggcctgtcctcagaatgctacacaaggtacagcccatttaagctcctgtatagacgctcctttttattaggccccagtctcattccagacaccagaccaacttagactgtgcccccaaaaacttgtcatccctactatcttctgtctagtcatactcctattcaccgttctcaactactcatacatgccctgctcttgtttacactgccggtttacactgtttctccaagccatcacagctgatatctcctggtgctatccccaaactgccactcttaactcttgaagtaaataaataatctttgctggcaggactatgctgaatctccttaggcactctctaatcagatgtcctaggtcctcccaattcttagaccttttatacctgtttttctccttctgttattccatttagtttcttcaattcatccaaaacggtatccaggccatcaccaatcattctatacgacaaatgtttcttctaacaaccccacaatatcaccccttaccacaagacctcccttcagcttaatctctcccactctaggttcccacgccgccctaatccgnttgaagcagccctgagaaacatcgcccattntctctccataccacccccaaaattttgcgcccaacacttcaacactattctgtttattttttcttattaactataagcaaggcaggaatgtcaggcctctgagcccaagccaagccatcgcatcccctgtgacttgccatgttttacgctcagatggcctgaagtaacttgcagaatccacaaggatgtgaaaaggccctgccccggcttataactgattgacattccaccattgtgattgtcctgccccaccttaatgagtgattaacctggtaattccttctctggttcaaaaagtccccatgagcaccttgtaaccccggacccgtgcacagaaaacagcc

SEQ ID NO: 527158 - DNA, 1042 bp, Homo sapiens
ctcccgcgtttcagatcctggccatttgctaccagcggcggcgcggcggagccaggccggtcctcagcgcccagcaccgccgctcccggaacccggagcgcgcaccgaggccggcggccgagctcgcgcatccagtcatcactcttccacctgctccttagagaagggaagatgagtgagtcgagctcgaagtccagccagcccttggcctccacgcaggaaaatggacagtgcactagagaagctggggccgagggcagggtcgcgcaagcagtctccgggtgagtcccgcggacagcgctggtaggggagtcagagaggagcccagcgaagtggcaacacctagagagacctcgggggccgacccaaagggaaggcgaacaatcattgggtgctgccaagagctggaaaaccaacctagtaagtcctggaatggaaacccatggggcagacccaaaaaaaagttgtagaagcgagtgaacgaggagcggctctctcgcaggagtcctcgtggaggaggagcaggttgacccatgctgtgccgcctggttcctcacttggaggaagcagggctctcctttctgggactgaacgagtttgtgtccgctccccgaagggttgtggctggtcccctcggggcaaccaagtgagcagtcggtgtctgcggcggcaacccccagaatatatcatccttgtgccctctaacctggcgcagcggtaccagggctactctggcaggctgatgcgtcgcctgtggcgtgaatggcactgggtttgccgttggtgtccgctctggcatcgtcgtgccagcgacttgacctgctgccctctaggccgtgctacattcagcttccgcacgtggacactctcgtcccatcccctgaggggggcagtgctctggcgatcggttgggcgccgcacttgcactgaccgcccttgctcacaggggcgggaggtcctgcgataaggcgcgcctttttagagcctatcttctgggacttcatggtggtgccgtccccatttctggggaacaccctcttgc

SEQ ID NO: 527159 - DNA, 1486 bp, Homo sapiens
  misc_feature (42)..(42): n is a, c, g, or t
  misc_feature (45)..(45): n is a, c, g, or t
  misc_feature (147)..(147): n is a, c, g, or t
  misc_feature (158)..(158): n is a, c, g, or t
  misc_feature (1111)..(1111): n is a, c, g, or t
  misc_feature (1142)..(1142): n is a, c, g, or t
agccctagcccgcctcttagaacctctcatttcctttccatngtngaaatctatcctcaaggaaataacttctcagtattccatctgctattctactgctcctcagggattattcaggccccctcccttccctacacatcaagctcnaggatttgccnccacccaggactggcaaattagctttactcaacatgccccgagtcaggataactaaaatacctcttagtctaggtagacactttcactggataggtagaggcctttcctacagggtctgagaaggccaccgcagtcatttcttcccttctgtcagacataattcctcagtttagccttcccacctctatacagtctgataacagaccagcctttattagtcaaatcagccaagcagtttttcagtttatatcccttatagtcctctgtcttcaagaaaagtagaacggactaaaggtcttttaaaaacacacctcaccaagctcagccaccaacttaaaaaggactggacaatacttttaccactttcccttctcagaattcaggcctgtcctcagaatgctacacaaggtacagcccatttaagctcctgtatagacgctcctttttattaggccccagtctcattccagacaccagaccaacttagactgtgcccccaaaaacttgtcatccctactatcttctgtctagtcatactcctattcaccgttctcaactactcatacatgccctgctcttgtttacactgccggtttacactgtttctccaagccatcacagctgatatctcctggtgctatccccaaactgccactcttaactcttgaagtaaataaataatctttgctggcaggactatgctgaatctccttaggcactctctaatcagatgtcctaggtcctcccaattcttagaccttttatacctgtttttctccttctgttattccatttagtttcttcaattcatccaaaacggtatccaggccatcaccaatcattctatacgacaaatgtttcttctaacaaccccacaatatcaccccttaccacaagacctcccttcagcttaatctctcccactctaggttcccacgccgccctaatccgnttgaagcagccctgagaaacatcgcccattntctctccataccacccccaaaattttgcgcccaacacttcaacactattctgtttattttttcttattaactataagcaaggcaggaatgtcaggcctctgagcccaagccaagccatcgcatcccctgtgacttgccatgttttacgctcagatggcctgaagtaacttgcagaatccacaaggatgtgaaaaggccctgccccggcttataactgattgacattccaccattgtgattgtcctgccccaccttaatgagtgattaacctggtaattccttctctggttcaaaaagtccccatgagcaccttgtaaccccggacccgtgcacagaaaacagcc

SEQ ID NO: 527160 - DNA, 784 bp, Homo sapiens
cgtcatctcacgtgtcgaggtgatctcgaacttttaggctccagagatcctcccgcatcggcctcccggagtgctgtgatgacacgcgtgggcacgacggagtttcactcttgtcgcccagggtggagtacgatggcggctctcggctcaccgcaccctccgcctcccaggttcaagtgattctcctgcctcagccttcccgaggggctggaatgacagagatgagccatcgtgcccggctaatttttctatttttactacagatggggtttctccatcttggtcaggctggtcttcaacttccgaccgttggagaatcttaactttcttggtggtggttgttttcctttttcttttttttcttttcttttctttccttctcctccccccccacccccccttgtcggcgtcctcctcctcctcctgctggtacaagtagagatgaggaagatcggtctaaggatagcgcggggatttgtacgagtgggcttatgtgcgggatggtacgctcccgtccgttgtgggtggagagcgggcgtgggtatgttgggcccgcgcgattgatggtttgtaaggggcggaggcacaggagctgttatgatagactgtttgaggggggggctagtaggttgttacacatgtgttcgcgccggtacgccggcgacgcgttgtgcgacgcaggtttcgttgaggattttaaataacgcgatatatgaatgatcgaatggcgctacacctaccccagagttggcaggtgagctgtgggtacgagtcgtggggccga

SEQ ID NO: 527161 - DNA, 1003 bp, Homo sapiens
  misc_feature (42)..(42): n is a, c, g, or t
  misc_feature (45)..(45): n is a, c, g, or t
  misc_feature (147)..(147): n is a, c, g, or t
  misc_feature (158)..(158): n is a, c, g, or t
  misc_feature (881)..(881): n is a, c, g, or t
agccctagcccgcctcttagaacctctcatttcctttccatngtngaaatctatcctcaaggaaataacttctcagtattccatctgctattctactgctcctcagggattattcaggccccctcccttccctacacatcaagctcnaggatttgccnccacccaggactggcaaattagctttactcaacatgccccgagtcaggataactaaaatacctcttagtctaggtagacactttcactggataggtagaggcctttcctacagggtctgagaaggccaccgcagtcatttcttcccttctgtcagacataattcctcagtttagccttcccacctctatacagtctgataacagaccagcctttattagtcaaatcagccaagcagtttttcaggctcttagtattcagtgaaacctttatatcccttacggtcctccatcttcaagaaaagtagaacggactaaaggtcttttaaaaacacacctcaccaagctcagccaccaacttaaaaaggactggacaatacttttaccactttcccttctcagaattcaggcctgtcctcagaatgctacacaaggtacagcccatttaagctcctgtatagacgctcctttttattaggccccagtctcattccagacaccagaccaacttagactgtgcccccaaaaacttgtcatccctactatcttctgtctagtcatactcctattcaccgttctcaactactcatacatgccctgctcttgtttacactgccggtttacactgtttctccaagccatcacagctgatatctcctggtgctatccccaaactgccactcttaactcttgaagtaaataaataatctttgctgggaggactangacatctgattagagagtgcctaaggagattcagcatagtcctgccagcaaagattatttatttacctcaagagtttagacgtggcatatttctcactccttgggagtgggtaccgtagctc

SEQ ID NO: 527162 - DNA, 115 bp, Homo sapiens
aaaaattgaatcaccacagtttaactgaaagcaaagaatctacaacaaaagacaatgatgaaattcatgatgttgctatcaaaagttgagaattgtcagagggaatcatggagta

SEQ ID NO: 527163 - DNA, 514 bp, Homo sapiens
tgaggtatcctgtaacccactcgagaacgtcaagcaatgatcacaggacaaggatggcattctctcctgagccagcagagtgttgatcttttgccggaaagctgctggtaagatgggcgcaccctgtctgactacaacatccacaatgatcactaccttgcacctggctgcgccgtctcagaggtgggatgcagatcttcgtgaagaccctgactggtaagaccatcaccctcgaggtggagcccagtgacaccatcgagaatgtcaaggcaaagatccaagataaggaaggcattcctcctgatcagcagaggttgatctttgccggaaaacagctggaagatggtcgtacgctgtctgactacaacatccagaaagagtccaccttgcacctggtactccgtctcagaggtgggatgcaaatcttcgtgaagacactcactggctagaccatcacccttgaggtcgagcccagtgacactatcgagaacgtcaaagcagagatccaagacaa

SEQ ID NO: 527164 - DNA, 1098 bp, Homo sapiens
  misc_feature (30)..(30): n is a, c, g, or t
  misc_feature (723)..(723): n is a, c, g, or t
  misc_feature (754)..(754): n is a, c, g, or t
tgagcggaccactcggagagtgcaggcatnttctcaggttcttagtattcagtgacagactaatggtctattaaaaacacacctcaccaagctcagccaccaacttaaaaaggactggacaatacttttaccactttcccttctcagaattcaggcctgtcctcagaatgctacacaaggtacagcccatttaagctcctgtatagacgctcctttttattaggccccagtctcattccagacaccagaccaacttagactgtgcccccaaaaacttgtcatccctactatcttctgtctagtcatactcctattcaccgttctcaactactcatacatgccctgctcttgtttacactgccggtttacactgtttctccaagccatcacagctgatatctcctggtgctatccccaaactgccactcttaactcttgaagtaaataaataatctttgctggcaggactatgctgaatctccttaggcactctctaatcagatgtcctaggtcctcccaattcttagaccttttatacctgtttttctccttctgttattccatttagtttcttcaattcatccaaaacggtatccaggccatcaccaatcattctatacgacaaatgtttcttctaacaaccccacaatatcaccccttaccacaagacctcccttcagcttaatctctcccactctaggttcccacgccgccctaatccgnttgaagcagccctgagaaacatcgcccattntctctccataccacccccaaaattttgcgcccaacacttcaacactattctgtttattttttcttattaactataagcaaggcaggaatgtcaggcctctgagcccaagccaagccatcgcatcccctgtgacttgccatgttttacgctcagatggcctgaagtaacttgcagaatccacaaggatgtgaaaaggccctgccccggcttataactgattgacattccaccattgtgattgtcctgccccaccttaatgagtgattaacctggtaattccttctctggttcaaaaagtccccatgagcaccttgtaaccccggacccgtgcacagaaaacagcc

SEQ ID NO: 527165 - DNA, 318 bp, Homo sapiens
  misc_feature (181)..(181): n is a, c, g, or t
  misc_feature (299)..(299): n is a, c, g, or t
  misc_feature (311)..(311): n is a, c, g, or t
gggtgtgcctgcaaactggggaaaacccaacttgactgggctgcccggattcctcggaaattagcaaggaggaaagactaaagtctgctggtccatggagactacaaccaagccctcccctaggggctcagtccccagggagatcagagttctgtccttgacccctggctggagttgttgnagttcctgcagggaggccccactcaatgaggaaggaagggttacggtcagcctaaagagcactctggccgcaatctgccaaagccagtgtgttgggctgtggggaataccgtctaggncccagccgtttncgtctgt

SEQ ID NO: 527166 - DNA, 515 bp, Homo sapiens
ggttgctggtcttcctgtccggtcgccggccgtctaggtctccgggcctccccagccgctcctgcgccctttccggcccgtgctgtccgcagccctggcgctccctcgtggccccgtgctgagtgccgctgcttgccctgtgccagcgcgcgccccgtgacaccggtgcgcgcttgactgacggcaccggttctgtcgggcgtgcgtggtgcgcttctgggctcgaggaggacgggccctttccgtgccccgagtgcgccgaccgactgcttggcaggctgcgccgtggagcccggtatggtccccgctcagtgccgtcgccttctggcgctctagggattgcggccgctggagctcgcgcgcgacggcccggccagcgatgtcgcgctgcagctgctgtgccagcgccgacggcgggccggctcttgcaccggcttgccgattggtatgtgggacctcaatgcctgcccgagtgggaacctgtgctggaggaaggcgctgagcggcaaggagaa

SEQ ID NO: 527167 - DNA, 798 bp, Homo sapiens
  misc_feature (42)..(42): n is a, c, g, or t
  misc_feature (45)..(45): n is a, c, g, or t
  misc_feature (147)..(147): n is a, c, g, or t
  misc_feature (158)..(158): n is a, c, g, or t
agccctagcccgcctcttagaacctctcatttcctttccatngtngaaatctatcctcaaggaaataacttctcagtattccatctgctattctactgctcctcagggattattcaggccccctcccttccctacacatcaagctcnaggatttgccnccacccaggactggcaaattagctttactcaacatgccccgagtcaggataactaaaatacctcttagtctaggtagacactttcactggataggtagaggcctttcctacagggtctgagaaggccaccgcagtcatttcttcccttctgtcagacataattcctcagtttagccttcccacctctatacagtctgataacagaccagcctttattagtcaaatcagccaagcagtttttcaggctcttagtattcagtgaaacctttatatcccttacggtcctccatcttcaagaaaagtagaacggactaaaggtcttttaaaaacacacctcaccaagctcagccaccaacttaaaaaggactggacaatacttttaccactttcccttctcagaattcaggcctgtcctcagaatgctacacaaggtacagcccatttaagctcctgtatagacgctcctttttattaggccccagtctcattccagacaccagagaacaaaccccctttgactgtaattttccattaccttccctaatcctataaaacggccccaccccatctccctttgctgactctcttttcggactcagcccgcctgcacccaggtgaaataaacagccttgttgctcac

SEQ ID NO: 527168 - DNA, 202 bp, Homo sapiens
gttaaagtcatttttattaataatgactagcatttagttcacaatttttatgaaatatgccccttctctattaccactactttctcttattaatcagtatctcagaataatttttcttttcctttagaaaccttgtagagatatgcttagttctataactgttcttatttacttatgaacacatggaatattcatttatctt

SEQ ID NO: 527169 - DNA, 262 bp, Homo sapiens
tcggctcggtaccttgaatgggcacagaaatccaacactgtgttgaatagagtggtgagagagagcatcctgtcttgtgcccgttttcaaagggaatgcttccagtttttgctattcagtatgatgttggctgtgggttcgtcataaatagctcttattatttttagatacttcccatgaatacctaatttattgcgagcttttagaatgaagggctgttgaattttgtagaagggctagtgtgggtctattgagatagtca

SEQ ID NO: 527170 - DNA, 292 bp, Homo sapiens
tggtgataggagctcactcagttgtaccaggattggaggatacaataccagattcataattcactgcggccgtcaaactcctagggtcaaccgatcctcctatctcagcctcccaagtcgctcggcctccaggtacccaccaacaagcacagctaatatgacacttttttagtagagacggggcttatgccatgttggccagtctggtcttaaactcctgagctcaagtgatcccaaagtgttgggataacaggcgtgagccacagtgctagccctgtagtttaccagccta

SEQ ID NO: 527171 - DNA, 203 bp, Homo sapiens
gactgcgcgcggcgctctgtacgcattcgatttaccacggccgcctggggagaagctaaccatgcagaacctcaacgaccgcctggtctcctacctggacaaggggcgcgccctggaggcggccaacggcgagctagaggagaagatccgcgactggaaccagaagcaggcacctgatgcctctcgcgactacagccactact

SEQ ID NO: 527172 - DNA, 267 bp, Homo sapiens
cacgtatggacagcaccgtgcaacagatcatccgcctgcagttgtgaactaccggactccccgatctgactgtgtggccgtggttctacgccatcgctggggggctattcctggacagggcctactattacgcctttgccgccacatcacactggcgaccacggacaccacccgcgtggcaatcatcctggtcgcgtggcacaccaagcctgcatctctttcatgttctcctacatcttgctcaccatgtgccgtagcctcatcacc

SEQ ID NO: 527173 - DNA, 1514 bp, Homo sapiens
  misc_feature (398)..(398): n is a, c, g, or t
  misc_feature (877)..(877): n is a, c, g, or t
gctggtgtcgtgttcttgtgctttacttttgtgtttggtttttgttttgttttttgtgttctttctttgtctttttgtctctgttttttttctcttctgtgtcttgtgccatccttcttcttctttttgttttctttatacactcattctgtcttctctcgtctttttttgtccttttcttttcgtgtgtcttcgtttttctctttttcttttgttttggtttttgtttttgttttctctctttgttttttgtgtgttttcatctgctgtcttcctgttctctgttcttactttggcttcttcatctgtttcgctgtttcttctctgtgttccttcattttgtctttgctcgttctgtctcgtcttgttgtgcatttgttgtctctgctgctttgcanttgttctccgacgcccgtggggtggggggggggggtttttaatattaaagcccacggagtgcgttcctctgtttttatgttggggggacccccccgctctcccgcgggatgtttccttccctcgtgtgtgtatccccccccccgtcgctccccacgcctgctgtgtgtgtgtaccccccccccgccccttaatggtggaggacactccccgcgcggcgggccgctcatgtttcctcacgccttcccccggggcttttttggccctatgggcccccccggggccccggtgttaccccactgtgtcacacacacccgggggacacaccgcgtatttggcgccccccttatgagcgcgccatcatctatataggggagccgcacactcatttattggacacacacatgtgtgggccaccacacacataagcccccgcgcgctcggtgttctacccgcgttctctcgccgagatatttccccngcgcgagatatattctctgtcgcagcaccccacacgcgcgtgtctcgcgcgcgaggacgcgcgtggggggggcaccactcgcgcgcgctcgccacactactctactttgggagcacccccacccccactggtgtggcgcacacgctctctctctcacacagtctgctgggtcacacagagggtgtccccacacagcagatcttctctctggcgcacaggacgcccggtgtttctctcacaggtgccgcacacgtggcacaccacacaggtgtgcgcgccctgtggagatatatctctggggccgcaccacacgcaggcgcgcagttctctctctctcttccgcgccacttgtatatataggggccccgctcggcgcgcgcgggggcgcacactctggtgtccacccctctcttgtgaggtctcacgcacgcgcgcgcgagaaccccgcgcagaggtgtgccgctgaggcgcttggcgtgcctctcgcctgggtctttggagtttctcggggtctgaccccacttggcgccgatgtgggatggtctctgtcccccatcttgcctcccttttttttttccccccccaccggaactgaggatgctcccttttaaaaaagggtttttgtttccagagttta

SEQ ID NO: 527174 - DNA, 387 bp, Homo sapiens
aaaaaaaaaaagtgctcatacacccctcgcaaatacgtcaaccgccataaggaaaaaagccccctgctgctatgagctgtctcaacaggggcgtcctcctgggggacggcgaaaaagcagcagtaattggggctcataacagccataatactccaaatcacaggggcctttccacatgtagactctcaaatctcatattacgcaatccacagcatataaaagagtgtttcacagtgtagactcgcgtgcctcaccggtaatgtgtgagaccccccagtgtaattatagtcccagggtcacctgtgactgtgtcagtgatacgccagctgctccactaaacacttcagatatggaagctgtgtggaatcaggcaaaacctcatgaatt

SEQ ID NO: 527175 - DNA, 349 bp, Homo sapiens
taagtaaaaataatttcatgttttccccaaagaaaaattaagcctccccattttaggatcccattgggcagtagaattcaaagacttttcattcaattttggatcctaagcagctaccaatattttttaaatgttagtaataaaccttggaattttgttttaaaaagttcaaaaccttggaaccccgttttctccctacgtctataaaggcccttacagacccaaggctgttttgcagttttcatatggtgtttgctgaagtccttggaattttttttgcctgctttgcccttttttttacaggagttttgagtgtgaaatgaaaattaaagtttgggccctattttta

SEQ ID NO: 527176 - DNA, 602 bp, Homo sapiens
tgtgaagccggacatgaacactggatgtgggctacttgccaagctgttgcaagcagctgcaggtgcatctgcccgggcctgtgactctgtcatcagcaatgtactgcctttacgtgctggaacagattccacaagcactagtcagagcgagccagcggcggacaatccttgtaaatgctcctgggtttcttgaaagctgcacgccatgcataatcggagctcattgaaccacaaacgtatctacaaggcactctgacatggcttcgagaggacctagctgtagcatcactcggtacatctcataggcgtcgtaacgaagacccgcagataccgcagcgttcgagcttgtctaggacagtccgtacacgtgacatgtcttgaggtagccccagaacagagtctccgtatgcttactgaggacttgcgagtctggcgcagtgggtcacacgtgtacagactgagcttcctgtaaggcaggattcccagaagtcgccacgggtggcgagcactggaatgcatcaggaaccctggatgctctctaacctgtggccttcaggcagcatctcgtacccaagactcgctgaggagctgcgtgtaggggc

SEQ ID NO: 527177 - DNA, 326 bp, Homo sapiens
taaggggcttagcagaggtaaaacatttcacagctccctcgaaacactgccccctaggctatcacatagccaagaagggacgcctctatcctgacctttgctgagtgcatctggcatgaatgagctcaaaaggcacttctgacttaaacggactgaggttaccagggaccagacagtgagggcggtgacaggattgaggctagaccggcctggccccaaagcccactgccccagtgactcccaaccttctttctgcctttaagcctttgccaggcagcacccacccatcagagacgcttgtcatgattatgcatttcgtttgccta

SEQ ID NO: 527178 - DNA, 743 bp, Homo sapiens
  misc_feature (704)..(704): n is a, c, g, or t
tggtcatctatgttttgcacgtgcagctacgtgaaaataaaatttctttgggaaggtgaaaaaaaaaaaaaaaaaaaaaaaaaaaaaaaaaaaaaaaaaaaaaaaaaaaaaaaaaaaaaaaaaaaaaataacgaccgcctaaacccaaaaaactaataaacacaaacaaactaatacatgcgaacagggttaaaaactaattaggcaaatttttccgcccccgggcccccttaaattttttagccgggccatttttttcctcggccccggaaaaccccccctttgcccaacttccccttttgggggggcattcccctttccccggcccccgttttaccccagggggccggggaaaaccccctggccaccccaaataattcctttggggcaaaccccctttttccccgggggtgttttataaaaaagcccccccccttttcccttttccaaaaattttcccacccttagggccaaaagaaaattaaccccttaatttttttaaaaaaccacccggaaatttttgagaaaaagcccctttttttaccacaacgccccaaataggaaaaaccccttttaacaaaaaaaaaaaaacccgcatttggggggggggttggcccccccgtggacaaaaaccccctttataaaagggggggcccccccccccaaagggcacaaaacccgtttctcgggggggggggcccccnacaatacctcccccaagggagggaataaacccctccggg

SEQ ID NO: 527179 - DNA, 282 bp, Homo sapiens
cacggagagagagagaagagagaaaagagaaagagagaaaaaaaaagggagaaaacaaaaagaggagacaagagaaaaagaggagaacagggagcgcgagcagaaggacagacacggcggacgaggcaacgagagaagggaacgcgcgcggaggagagagagcgggccgcgggaggggggcggcgcaaaaagacgaagagagagagagaaggaagagaaagaagaacgagcgacataacgaagagacaagcagcaaagagaggagagaagaaagaagagata

SEQ ID NO: 527180 - DNA, 788 bp, Homo sapiens
ggctcaagtgattcacctgcctcggtctcccaaagtgctggaattataggtgtgagccaccacatccagcccattttaaccacgtttaaatgtacaattcattgccattaagtatatttacaatgttgtgcaaccatcacgactatctatttctagaaaattttcatcatcccaaacaaaaagcctatacctattaaacaataactcctcattcccctgtcctcacagtcaggccctggtaaccacctttctactgtctgtctctgaatttgcctattttaggtacctaatgtagtggaattatacaatatttgcccttttgtgtctggcttatttcacttagcataatgttttcaagttcatccatgctatagcatgtatcagaattgcattcctttttaaggcttaatattccattgtgtgtacataccacatttcatttattcattcatcggtcagtggacatttgggttattttcgtcttttggcaaatgtgaataatgctgcagtgaacatcagtgtacagtatttgtttgtgtccctgtttttaattctttggggaatatatctaggtgtagaattgctggaccatatggtaattctatgttttacctttttggaggaacttggcaaactgttttacagcatgtgcatcaattttatattcacctaagcaacgtacaagggttccagtttctccagcatcttcgccaacacttgtaatttcccttttttaaataatagtcaatctgggctgggaacgatggggttgcggcctgttaattcca

SEQ ID NO: 527181 - DNA, 125 bp, Homo sapiens
ccaaattattcttaagcactgataaaattacggtctatcagaggtcaaaattcaagccataatagtaggcagttctttaataagaaaggctactatggtcactcattaaactaagttcataagga

SEQ ID NO: 527182 - DNA, 131 bp, Homo sapiens
ccccctccccgggtggttaggactacaggtgcgtgccactacacctggataatttttgtatttcaagcatagaggggtttttaccatattggccaggttggtctcaaacccctaacctcgagatccgcatg

SEQ ID NO: 527183 - DNA, 123 bp, Homo sapiens
tgtttctttgctcgtgtgttcttgtgctggtctgtctgggtttggggcttcttcagttgtggtacagggagcaaagaacacacgccagacaagaacacacgagcaagaacacatgcaccaaga

SEQ ID NO: 527184 - DNA, 287 bp, Homo sapiens
  misc_feature (151)..(151): n is a, c, g, or t
  misc_feature (196)..(196): n is a, c, g, or t
  misc_feature (255)..(255): n is a, c, g, or t
  misc_feature (287)..(287): n is a, c, g, or t
ggatgtgagggcgatctggctgcgacatctgtcaccccattgatcgccagggttgattcggctgatctggctggctaggcgggtgtccccttcctccctcaccgctccatgtgcgtccctcccgaagctgcgcgctcggtcgaagaggacnaccatccccgatagaggaggaccggtcttcggtcaagggtatacnagtagctgcgctcccctgctagaacctccaaacaagctctcaaggtccatttgtagganaacgtagggtagtcaagcttccgactcctctn

SEQ ID NO: 527185 - DNA, 952 bp, Homo sapiens
tatcaactcagagatggttattagggccgggaggtaggggatgcgccggcacagcaaaaatggggggccattacgggtgtcgagggtcgggccaatggtcagcgttctggcgagcggtctccgcgtcggggtccgaacccttttgtgccaggccatctctgtaactgaaagctctcgagacgatgggacggtcctgaggccagccataagttcgtttcgacgacatggagcgacaggcgaataaggtggtggtcacacttcaggagcccggatcacatcagcatgagttgtgtggacaagccgcacggtagaatttgttccagcatggcagggggagagcctgcttgagggggtgaggccctggcaaataagaagcccggggggtgggcagccccagggttgctcataacccgccacatctgtgattggcaaggcgttttgaacgggagacacatggcagaagcctgaagggcaatgggtggaatggacatggtccttcacctttgggcgttccttctggagattgcttgatgaagggcacaaccatcttcaccttgagaccttcaaagctgtgcctttgtggacttgatgtggtccttgcccaggaaggttcgccccagggagggtggaaaccttcaacgtgctgggtttaccggaagacctcttcatcaggacttctggactggttggtcggaaaagggccagttgatctcatttccaggagccgaagcagtcagcatgacaagaagcgaacgtaaatggttggcccagagcagagcagctcatccagtgagtgcggacctgccaagagggcggagatggccaccctggaggggaaaaagtcacgtgtggaagcgcatgagccgagaaaaaccagggggctaaaggcgggcggaccggaattggaatggacccacacacgcagaaccccgggagaggtgccgccccctcc

SEQ ID NO: 527186 - DNA, 134 bp, Homo sapiens
agggccgcagttctcaggggactctttgataaggacaccaatcccatcatgagctaatcacttcccaatggtcccaactcctaataccatcacattggtgattaggtttcaacataataaatttagggttgatg

SEQ ID NO: 527187 - DNA, 1327 bp, Homo sapiens
ggagtcctgttggtcgctgcagcgtggcctctgcgtgggcggcgggaatccgcggacatcgggatctgggtctagtgctcccgcagtccgctgctcctgtggcgggatgcccattgatcatgggtctcgctggtgtggtgctgccagatgctgtaggccacacatgactagttccttcttgtcagcttttcccagcaaatgtgcggatgactgccggtgcagctgtggtggggcccgtgtgggcccttggttggccctgggattggggaacctgctgtgtgtgcttcctgcgtgcaggtttctggcagttggccatcctggtggcctgggggtctgcggcctgttggactgtgggccggaggccagaggccgcggagactcggcggcggcaacggccgacggactacacggagtgggactgcccgatcaccaagtgtgggaccgcattggatcaacggacactgaacgactcaacgtccctgtgagtgacgactctactactactatactccctggcccattaccggaactcatgacgactcacttgactattcttatcctggggggccatctctccaacggagtgacggcattatgaacgacttattgccaggtagtgcagaacccagaccccggagggctgggacaagccgacaccaagggtatcaagggcataatgataggcaatcaggggcactacgacttggccacgatcagagacatagaggtgatacaaggtggctaccaagggacgagtgggccaccgaccattccggggggagaccatccattcctaggcacaatgacgtctccgatccgggcgccccgtagcgcaagaaaggtacaggaggaggcaaacaaggcatccggcaagggccccaacactggtccccttggcaacggtcgacagggccgctgccgggctcagatgacatgaacggcacaatacgtggacccaaggcacatggcatagacccggaactgggcaaagaaagagacaagaaagagggaactgggcactggctaaccgacaggcggggggtgcaggcacccccggggacacatcgccaagggcaccatggacgccagatgagaacaccgaggacggaccccggaccaggcggggacgggcaccaagtgcaccacaaggcaacggccacagtgagaacacagacgtgcggacgacgcgccagggacgacgcgaacaacacgacgggggacaaaaacacaggccggtggtggcgtgtgccctggacaggacccaacgaagggaggaaggcttctccagcagcaggcgcccgcagagagacagaagtgtaagagacgc

SEQ ID NO: 527188 - DNA, 113 bp, Homo sapiens
gctcgtccgtatctgtttgcgcacggtgggcgatcagctgggcttcctttgtggcagtccactgttgcatgcttccaggcccaacactgtcttcctctcctcctctccctaac

SEQ ID NO: 527189 - DNA, 332 bp, Homo sapiens
  misc_feature (98)..(99): n is a, c, g, or t
tagctggaggctcaggagtagagtgggggttgggagtgtgtagaccagaactctgggacgtagtcatagtactaatattgaggcagtggagatgctgnncccagtgaggtatcagtagagcagaacaatgaactagagctggttttcctttgggtttaggtgtaagtgaactattatcattggagtggagaactggagagaaagggttgtcactgtccagcactacacagctgcagggacacagaatggtacacattcccatgaaagacacatagtgtagacacggtggctgtacaccccatgcacacacacgccccggtcggggtggagcg

SEQ ID NO: 527190 - DNA, 999 bp, Homo sapiens
gaggcaggtggatcacttgaggctaggagttcaagaccagcctggccaacatggtgaaaccccatttctactaaaaaaaaaaaaaaaaaaaaatttggggggcttgggggtccccccttgtaaatcccttagctatcgttgagaggctgaggccaggaggctcacttcgaccccgggagggctataggctggcagtgagccaaagatagccccactgctctcccagccctgtgttgatcagagcaagactccatctcgaaaaaaataaagataaatataaaatagacttcacagaacttaggaactacctcccagaacacaaaacattcaagattggtcggtttcaccaccctttaatttggggccactgcactaatctggagttttcccccttagttgtttgcacgcgtttaccctacgaattatttttacaggcttacaccttacgacattatttttacgggggctcttcgtctcagcagacctaaaattttcccacgcccttcttcattgtgattgttacgagaggggtaatttgccttcccctttcaaaggccttgggcgggccacagcactttttcattacctcagctcgggcactttttgcggttaattgcggagcgactttgacacaaccctaaaaaacataccaacaaaatacaaaaaaagaacactttttttcgggcgccaccctggcccccatagaaaaagagttttcgttcaaaccacacttcggttgttggcggcgcgcgagccgccagtcatgtataagtctagccaaacgtggtgtaccaacgggtggttcgcacagagaggaagatccctccggcggcagcagacaaaggctgcggtgagcttttcaccgccaatataaaaaaaacgcccggggggggaacccagagcggtttcgtagaccacacccaagggagaggctgggaggaggcaaacagggggaccttaacaaacgggggccacgagaggagccatattaaattgcct

SEQ ID NO: 527191 - DNA, 995 bp, Homo sapiens
taaattagaaacctttatttacaatgacatccaaaagggtcagcaaagcagtcacaagtctcaccattcccccattaagttctatttcagtgtgtggtttcaattcttgtgcaagataaagaataatttctatttttttaagcaacataagtgtaaacttgattgaaactgaattcattctcaagaagtataagtcaattccgtggagaattttaacattatgtgtgcctcctcatattttatatctttctcgaaacctccactatttttagaaaggaagagagaaaacacccgtggctcggtttattaaccaggtggtgccttggacgtttgaacaaccaattaaattcaattccttaagggtttggctcctaggaacctaattgtggtgaaccacaaactcaacaggcttcgtggcaaattaaaaagggaaccgtgggcaggcattacatgtgttaacgtgggcaatccattcgtggtttactttcaggcgtggacccacctcgtgggatcaaagaacttctaggacatcaagccaattatcttctgtaatacccttacccctaatttagatacccccaattcacctcagaattttaacatacgggtaactaaagtagcccgtgttctggcatatttacacctttcaatccagatgccggttagaaaagggggatcctaattgtgaccttttacactggtacactcgcgggtatattttcaaaggggagaaacatgtgtctccgttatatccattcgagactttataaccctctctcttccagctaaatattcttgggatccccgcaaacaaacaccagcgggtctcggaaaattcccccatttttaaagagatataacataaacttttggtccccccaaaatccacgtgtaaaaagggggcgcaagtctagcaagttaaaagagataaaacaccagaatacatctaggaaataatctcaaggatataaatttttccgactaaaaaaaataca

SEQ ID NO: 527192 - DNA, 621 bp, Homo sapiens
  misc_feature (172)..(172): n is a, c, g, or t
  misc_feature (205)..(206): n is a, c, g, or t
  misc_feature (208)..(208): n is a, c, g, or t
  misc_feature (257)..(257): n is a, c, g, or t
  misc_feature (370)..(370): n is a, c, g, or t
ctgccagagggggagaggagcccccccgccccctccccctctttaaaataaaaacaggttgtgcctttctaaaaccaaaaaacaagtcgccaacaaattagggttaatcctaaaggtttggccgtccttttcaccaaaccatttaagaaatgcctcttttgggccagttttntttttaaaccccttccgaaaaaacagggacatnnancaaaccagacggcgagctcatttttaaaaaggtgtcttaaaaacctgcntaatagctgagctaattctcataggcacaactgccttgacttgaggctcactcttgacaagcagttcccacaaatgaaactaacaatgcaacccagaccccttgtacaggtgnaagtttccagctttctcacagtacaagtttaaggtaggacgcagcattttatagtgttaacgtccttcctccccacattcttgtgaggcggaacaagaacaattacttgaccttggaggaagacgacgccttgtggtcagggagagaacagcagttcatgctggctgcctcgtctttccaggcccgctgctgcccaggcttctactgaccttgttaggtctgattctagaaatgaaggcaggtactcaaaa

SEQ ID NO: 527193 - DNA, 862 bp, Homo sapiens
  misc_feature (862)..(862): n is a, c, g, or t
tggctccagcggtggtttatttgacatacaggtaggctctatagcaacaggccgtggaggttgctgcagatagtgtgggggaaaatgtggaagggtggacggggtggaggtgttgtgcgtgcagagacagctgtgagtgtgagagggtgtgggtgcacaggttgcacaactgtgagaagaggccataagagagcttaagagaacgcaatgtaaggggccagggcgccagatgctcggtcttccaatgggcaacaaacaggcccagtgggccctaaagggcccctaaactctcttggcctgggctggtttttcttggacgcccagagcacagggttaggggatgtcctctctggggctatcccatttgtttccataaaggagacactgggacaagatgtcacacaccaggagaaaggaaggcttgtacacccttccttgccattctgggctcccaggggggcctcacagtcacagcattccctccctttctatcccttagattgggtgtggggcgccacattgatgtgggacagccgaggcctcgtgggctgtgtcccaccatagaagcagcgctgacaaaacagcagccagtgttccaggtgagcgcgtgagactctctctttcccgtgtgttgtcccaagccataccaggtgccagcgttcacagcccagaaggtgagcttcctacaagcgttgctggcctaagtggactgaggctgggggcaacagggcggtggcaacacgggcgctagagacagaacgggcccctaggagtccaaacaccggggccaagagaaacacacccaatggaagaaggaaaagcagcacccaggccgcccaccgggccagacacaagtgaccan

SEQ ID NO: 527194 - DNA, 824 bp, Homo sapiens
  misc_feature (12)..(12): n is a, c, g, or t
  misc_feature (112)..(113): n is a, c, g, or t
  misc_feature (115)..(115): n is a, c, g, or t
  misc_feature (135)..(135): n is a, c, g, or t
  misc_feature (138)..(138): n is a, c, g, or t
  misc_feature (144)..(144): n is a, c, g, or t
  misc_feature (159)..(159): n is a, c, g, or t
  misc_feature (172)..(172): n is a, c, g, or t
  misc_feature (179)..(179): n is a, c, g, or t
  misc_feature (192)..(192): n is a, c, g, or t
  misc_feature (195)..(195): n is a, c, g, or t
  misc_feature (210)..(210): n is a, c, g, or t
  misc_feature (212)..(212): n is a, c, g, or t
  misc_feature (224)..(227): n is a, c, g, or t
  misc_feature (238)..(238): n is a, c, g, or t
  misc_feature (241)..(241): n is a, c, g, or t
  misc_feature (252)..(252): n is a, c, g, or t
  misc_feature (282)..(282): n is a, c, g, or t
  misc_feature (289)..(289): n is a, c, g, or t
  misc_feature (291)..(291): n is a, c, g, or t
  misc_feature (310)..(310): n is a, c, g, or t
  misc_feature (318)..(318): n is a, c, g, or t
  misc_feature (320)..(320): n is a, c, g, or t
  misc_feature (322)..(322): n is a, c, g, or t
  misc_feature (329)..(329): n is a, c, g, or t
  misc_feature (338)..(338): n is a, c, g, or t
  misc_feature (340)..(341): n is a, c, g, or t
  misc_feature (387)..(387): n is a, c, g, or t
  misc_feature (392)..(392): n is a, c, g, or t
  misc_feature (396)..(396): n is a, c, g, or t
  misc_feature (765)..(765): n is a, c, g, or t
aggatccagggntgggggaggctgggcggggttgggggcctggaggctggggcctggttacttggtgacgtgcagagctctctctggggggctgcagctcatcttggggggnncnggactcagatgcccccgtangtncaaaancaacatctatttctnactcttcccggtnctttttnttgtattcctgcngcnctttctccgccacgntntccataaatttnnnnttcttcctggnganttctacagggngcgtcacagtgatgggatcagagtcaaagngcttcangnccacctcagtgacaccggngggggcgngngngtgagangtgtgggangnnaccgtggtgacccgcagatagtactggtcttcgccttgcgtgaggnttgcnaggngggacacccagttaaactgctcgttcagctgctccagcaaggaggaggtgttgagcatcttccactggtaggactttagcagctcgttgtatttcctggtcaacctctcagcgacctggagggattcgtcgagctcccgcgcgcagcttagcctgggaggggttgttggtggaacagtccacagacaagatctcccggcacttgtcacactggtccttcatccgcagcagcccgtggagttgtggcggatctcccggcacacagtccggtcatcgtcgccttctcgtatgaattctgttggcgggtgctggaaggccgggctgtggaagtggatgtccatggcctgctgagcctcgtgtatcatctcanggaagggctggaacatggcgtggaagttcaggggctcgtacggagagaagggcatcaag

SEQ ID NO: 527195 - DNA, 134 bp, Homo sapiens
atcgtggcatggagtacctggagagcaagtgctagcatacaccgggacctggctgctcggaactgcctggctgacagagaagaatgtcctgacgatcagtgactttgggatgtaccgagcaggaagccgatggg

SEQ ID NO: 527196 - DNA, 240 bp, Homo sapiens
tttgtgctgaacgaaaagcctacactgtcctttcgtcacgagacaacgttggccccaccaattctcactggtttgagctaaagctaccagaagcaatatgtgtggtgtcagcctgatatggtgctggctgaaattctgtacttcatatcctggagaaagcagcctaggtctagcacctcgaggtatagctctgtagccacagaagaagagcaatctgcccatgtagggggtaccgagctc

SEQ ID NO: 527197 - DNA, 1288 bp, Homo sapiens
  misc_feature (275)..(275): n is a, c, g, or t
cagcgcatgcatgtagggatgacagccaaaagtacctgtcagacaacgtccacctggtgtgcgaggagacagccaattacctggtcatgtggtgcattgacctagaggtggaggagaaatgtgcactcatggagcaggtggcccacctgacaatcgtcatgcaatttatcctggagctggccaagagcctaagggtggacccccgggcctgcttccggcagtccttcactaagattaagacagccgatcgccagtacatggagggcttcaacgangagctggaagccttcaaggagcgtgtgcggggccgtgccaggctgcgcatcgagaaggccatgacacggagctacgacggacggaggagcgcaagtagagcgtgcctcgagccccggtcgggcctggatccccgtacgaggttctacgatgtccctcacctgagtgaactccatgcaagtgcttcgagtgtgagaggacggtgcaagaattgctgtcagagtacgtccgaaatcaaggccaagaattggacgcccaacctgacgccaataggtaccgactatgtcagacgcatgctagttgagcttcttgtgtccatcttgtgtggtccgcctagactctaacggcgcagtcgagtgccaacggacgggacgaggacggcacggtcctagggtgaccacatgtactggaacgcttgttcaccaaggatcgtggcgattgaagaacgggatgtcaggtgtgatgaccgtgacccgagcgtagcaccggacacactggcttccagagccccgtatggtgccccattattcagaaaaacacgatagatgccagtctcggaccggctccgtgagcttccgtctaacttgacgctagctccgagcacagcactgaggggaccccgaccaggcctcccatggcctctccacatgtcatccactcatccgagcagcccattccaagtctcatgcttatgagtcaaaggggacttcacgtgaccgagagtgcaaagcgcaaggtgggccgatgccagaggaaactgaaggagctggaggtggacgagggcggacaggcagagctgatcgcttgaggacgaggacagcaagctggcaaggaaggagcggagctgccagcgaagctgcaggacatggccgaagggggacgaggataccaggagcgggacacgccaggacagaggacggacgaacatggaagccaggcgagaaagaggagctccgagaataggagagaaaagagcaagcgcagcacacgcaagacacacagcagacgagaagga

SEQ ID NO: 527198 - DNA, 405 bp, Homo sapiens
cccagctcctggagtccagcctccagcccccggggttcacccaccagcccccggagtcagccaccagcccctggggttcacccagccagccccaggggtccatccgtcccgccattcatgcgggggttcagccactcagggcccccgggtggtgcacccaagcgagccccaagccgttcacgcctcgaggcccacagggcgtgcacctcatacagcccgcagggggcatgcatcccttcaggtgccccctgggcggtgcgagcgccgtcaagccctccccgggggggtcccaatccgggtcggggctcccctggagaagttccaaccccatcaaggccttccgggggaggtttcaacccccttcaaatttcctggggggtgcaagcccggcgaaagttccccatg

SEQ ID NO: 527199 - DNA, 773 bp, Homo sapiens
agcggtgaggtcgctcgggtcgggtgtcgcctgtgaaccggatgaggcggcgacgtgatgccgagccgggagcgggcgtcttgccgagccgggcgggcgggggagcaacggctacagacgccgggggccaggtcgtgagggtcggcggcgggcgaggagcgcagggcgctcgggccgggggccgcggcgccaatgggcaaccggggatggaagagctgatcccgctgtcaacaactgcaggagccttcagctccatcggacagagctggcacctggaccatggcgcagatcgctgtagtgggcggcagagcgcggcaagagctcggtgctggagaacttcggtggggccgggacttccttcccccgcggtttcaggaatcgtgagccgggggcctctcattctgcagctcatcttctcaaaaagagaacatgccgagggttttgcactgaagtcaagaagttacagactttgaattaagtcccggctggcgattgaagccggatgaccgacagggtcacggggaccaacaaaggcattacgcgaagtgcccattcaagcttcgagttactcgccccgacgtgttgacgttgacgcctcatgaactcccggtattagcaaggtgcctgtgggcgacaggctccagacatcgagttaccagatcaggacatatcctgcaggtcatcaggcggaaaggaagcctcattgtggtggcaggccccgccaacttgacctggcaacttcgacgcctccagttgggccaggaagtcgatcc

SEQ ID NO: 527200 - DNA, 395 bp, Homo sapiens
ttcaaatgggcacagaaattggagagattgggtatgtgagggacatgctgatcccaactatattcatattggatgttggcagaggggcagataacatcatgagtgacttactttaacaacgtaatacttagctgtaatcccactgagacgtgtacgaaaagagaaaattaatatgacatactacacagcacaggttcaacccagattattattgcatttctgagggtcatgggaaaaccataccattttgaaccattacctacgaatttactagcacatctgtgctaatctgtcgcaatgtgcttcagtgtccttagctagactgtaagctagtttgctgtaatcttggtctccttcatctcttacacacactaacatacatacacacacacact

SEQ ID NO: 527201 - DNA, 1015 bp, Homo sapiens
gctgcaaaattaagccccctattaaagttaattaagcactcattcatcgagctccccaccccatccagcatctccgcatgatgaaacttcgggtcactcctaggcgactgcctgatcctccaaatcaccacaggactattcctagccatgcactactcaccagatcgcctcaaccggcttatcatctagtcgcccacatcactcgagacgtatattatggctgaatcatccgctaacttcatgccaatggcgcctcaatattctttatctgcctcttcctacacatcgggcgaggcctatatgtacggatcatttctctactcagaaacctgaaacatcgggtgttatcctcctgcattgctaactatagcacacagtccttgctatgaggtctatgatcctcccgatgaggccactagtatcattctgagaggccacgagtgaattacacatacgttaactatccgccatcccatacattgggacagacctagttgcagagtgaatctgaggaggctacctccatgtagacagtcgccaccctcacatcgattcttttacctgttcacgttcatcttgacccttcattgatagcagccctagcagcatccgacctcctattctgtggccgaaacgggatcgaaaccaacgccctatgaaatagctccccaggtgcgataaaatgaacttttcagccttatttacggcaattcaataggaggccctcggccttaattagtctttgcttttctccctttacagaatttataatattcttcggcgagcgcctaggcgaaccggaaaaatatagccttatcaaccctttaaaaaccctccccaggttaaggaccgaggaaatttttcctaggggctcaaaaattccgcggcctcagcaaaagggggcctgcgccaaaaatatctctcctcaagaccccccgtattttcccagttattgccaccactattgcgcaccggcacgcaggggaacacccctcgaaggtacacacactcaccg

SEQ ID NO: 527202 - DNA, 175 bp, Homo sapiens
tcacattggcagatggaatgaacaaagacagctttatgctagaggcagatggtcagttaagttagatttctttcactgtctcagttataattttgcgaaggcagtttctttttttcttttcttttctttttttttttttttttggaaatggagtcttgcctctggtggtcccccg

SEQ ID NO: 527203 - DNA, 539 bp, Homo sapiens
  misc_feature (160)..(160): n is a, c, g, or t
ggcagcagtccatgaaccgagctgagaacaacttctgcgctactgaccctcacctatcgtgtctgcccacagtgacagaccagaggccagttccatgccctccacaggtgactctgaggccactctcgtctcccccgacaggcaactcctagtctgcccncgtccctgcaacgggtgactctcatgatgcccctgtgcccctcacaagtgactctgaggctgcccccgtgtcccccttaggtgactctgaggctcccccgtacacctacgggtgactctgaggcccgtgcccaccttgggtgacactgaggctgccccatccccgctacgggtgactctgaggctgcccccgtgcccacctcaggtgactctgaggccgcccctgtgtcccccacagatgactccgaggaagctcagatgctgcagtcattagtttctagtgtcccatcagccttggtctcaagaggccgagggggtgcaaccccaggggctcccctcccatcttgagctcttcctgaataaaacctcattcccctgaa

SEQ ID NO: 527204 - DNA, 173 bp, Homo sapiens
tcatcgagctcggtaccgaatctcgacagttggcaggcaggctctcaagcaataactctacacacacatacacacacacacacagaaacgctgcttgtttagtttataaaatattttatggaaatggtctgattcaaatcggtctaaatcatgttcctgaacgtaatattcca

SEQ ID NO: 527205 - DNA, 155 bp, Homo sapiens
  misc_feature (111)..(111): n is a, c, g, or t
ttttggtggtgtatagaacgtttcttttcttgtcttctttcttttgtctcttgtttgatgtgctcctatgacttctacctctattctctgggaatgagatctttctccggncttggggcttttgggttcggtcgccgactcctagacttagaatg

SEQ ID NO: 527206 - DNA, 135 bp, Homo sapiens
caagaggcgcgctgagggctgcggcagggacagggcggacgtctctgtgaacctgtggtctgaattacaccttcacctgcgctccggggaaacattcggttccgggtctgatcgcgcgcctcgccgaccccgcgg

SEQ ID NO: 527207 - DNA, 110 bp, Homo sapiens
gcagtatcccacggcacgtgcgtgtgatgagagccgtgtatcttgctagacttgctgtgccagtttcctgatggttcctgtttccacactgactgcataccttcccaccc

SEQ ID NO: 527208 - DNA, 217 bp, Homo sapiens
tcctaattggttcttcgatgacgctctgcttactgcgaacatcgtttactgtattgtagtacttctgtgcgctccattagcatagataatcgaccataggttcatgactttatttctgagctttctatcctatttcactgtttttgtgctaataccatactgtcttgatgactgtagctttgtagcgtacatagaacgtgatcgaagaaccaattag

SEQ ID NO: 527209 - DNA, 1086 bp, Homo sapiens
actcaagcaatcatcaacgactagagaatatcgtagatagtatctgctgcgacatcctgcgatatcgctcctctagctaatgcctagaaggatataaagtagcatagtgcagcaagattcatttatagctacgctcgatagcccgtacaagcaacgcgctagcgtactcgcgtcgtgtaatggcttcaagtaagtaggtagtcgcctattagcaacataacttaagtctattagaccaggcatctgcgaagacgccatgcgagttgagggcacatagtccccgttacttggagctacattcgatatgcctgcctcaaccatcgacttattggtcactgaataaactcagcgcataacgctaacgtcggcgtaacagccatatcatgcgcgaatggcctataaagcctacagtcaggtacctcatgggcatagtctactaactgtaggctagaccagcatgaaccatgtggtaccttgtgcctaattaaaaacctcacagtaacgtagtgcataattcagaaacaagcaaaggcgctagcccaaacaggctcttaaaaattaaatttcacgcctatctatactcgcctccgtgaacataatctctattatgtgaaaactcgagagagtgcgaagtcaaagcggagatcacttgaatattttagccatgggtttactcacgctaaacacattttctttctcgttcacagtaacctcccaccttaaaatcgatacccactcgcactttacactttaggaataagctaagaagcttaaaccacatagaaaacttacgtcatcatatcctgctcatactagccaagaggttccaaagtttggtggcaagagcggctctcaataggtggcgacacctaaacaacctcctaaaagttcgctaaaggattagataacccaccgagccagttaaagtatctaagcggagaaaatcactaacaactggatcactcctttaagcccagatacagtaccatataaaatttatcactttacaaaggttccggaaccccgcgcggtataagcaacaaaaagtcagatacccggttatacgagggtcatattatatacacg

SEQ ID NO: 527210 - DNA, 652 bp, Homo sapiens
  misc_feature (10)..(10): n is a, c, g, or t
agcagtcctntgcagaacccaatcaagccgagattttgttctcggcctcatccagtataaggcagccgttactttgcttagaaggcaacattggaaggttagagtccatcagggcatcacaattttaagatgtgactgcacctgaatacatttgattttctgtaggaagcatagagtccatacccgtatttacagcctgcacaagagactaattactattgaagcagttgattaaacctggtagctttccccaacatgatgaacattcagttctatagccacagctgctttttagaaaatgtgaaaatgtatctcatccctatccataatagcttctctaaagctatctcacagtccctttcaaataactattcaagaatgtaaatgctatattcacgtcttagcaataatttaacacgttttataatatgaacactgtagtttaaaacaaacaatctaccggaagtaacagtagacaaggtaatgccaattccagtgccaagctgtattcgccaagttttcttagaatggcttttcccgattaacgaagtcttatacacagaatgcaccatgcagaaacccatttttgtctaaactggcactatagactgctgctgtaaggcgacgagaatgtaagacattattaaattgc

SEQ ID NO: 527211 - DNA, 256 bp, Homo sapiens
atgtgcttgtccctgtgctcccacggttcccaggggccaggctgggagccacagcaccccactatgccgccaggccctacccaccttcagctgcctatgggacgcagggaaaatctgtggtcggtcgccgtgtggccagagtgggtcgtcgtccaacactcgtgctcgctcagacacttggcaggatgtctgggctcacagctggagcgcgtgcaagccgggcacggtcacctagaaccacagccctcgagcacca

SEQ ID NO: 527212 - DNA, 171 bp, Homo sapiens
  misc_feature (22)..(22): n is a, c, g, or t
  misc_feature (27)..(27): n is a, c, g, or t
  misc_feature (97)..(97): n is a, c, g, or t
taaatcgaccccctatgttggntcaancccatcatggctctcacctgcattaacctaaccatctcgtaacccatctcctctctttgttcctttcctntgcaccctccacatgccacctgccatcagggatctttcaaaatgactaatcttactattcttctcctctataaa

SEQ ID NO: 527213 - DNA, 373 bp, Homo sapiens
catactagaactggctctttgaagcaataacatatatgttttaaaaaaatcaaagttaaaatccctcccttggctaagcgctgtggctcccgcctataatcccagcacttcgggaggccaaggtgggtagatcacatgaggtcaggagttaaagaccagcctggtcaacatcgtaaaaccccatgtctactaaaaaaaaagttagctgggcatggtggcacgccctcgtaatcccagctgctcgggaagctgaggcacgagaattgcttgaacctgggaggcagaggctacagtgagctgagatcatgccactgcactccagcctgtgtgacacagtaagactgtgtctcaaaaaaccaaaacaaaaaaaaaa

SEQ ID NO: 527214 - DNA, 174 bp, Homo sapiens
agcacatggctacttcatcctgcaacagttggagatagagtcaagagaccaagcactagtatggcccccaccagagaactggctcaacagatccaaaaggtaattctggcactggagactatatgggagccacttgtcatgccagcattggtggaacaaatgttcgttccattt

SEQ ID NO: 527215 - DNA, 890 bp, Homo sapiens
gtgccccagaaacaagtagggacacttaatttctcactcgcttgtttccccattcctcaactcttgcctaaatatatgtctgttcaccaagcatgtatcatatacttactatatgtatgccagacactgatggccattatccaggcactgcagaatacagcagaagacatgcagcacacagtctagatcttcaaggaatcagagtccagtggacaaataaatacaatacagtgcaaagggcacaaccaaacaaaaagtcatgccataggaagcagaaacggccataacaggaagagagttcttcataacctgggatgaagtgcagcatctgggttggcacagtcctcctgtagctatgtccatcttccacaggataaacaggacatatgcgcgtaagtcaaggtggcacacctcagttatgcagatgatctcacaaccagaaaattattctcttcacaatgattcgatttcagcttggcactggcccgcatcatatctactctttgtcagccacaaggcattgtttcagagttttcactatgccagcattcacctcggagcaaacctcgtcaccggcggtccacgtacctcccaggtgcctctctttctaccttacaatctctaagtaagtcgaggcgctcgctggtcctaccactcatagggctcctacttccagtattctgtgtaatcctcccattcatacccctcccatcctatatccttatggcacaactgtgtatacggcaaagagctgccgccgttcactgtgcctacacgaactacctacacaactggaatgtgagtgccacacggaaaaacttcgaacgacatccactcgataacgaacctctgagctctacatggcttgtaaccaagcgagaacaactcca

SEQ ID NO: 527216 - DNA, 310 bp, Homo sapiens
  misc_feature (86)..(86): n is a, c, g, or t
  misc_feature (100)..(100): n is a, c, g, or t
  misc_feature (132)..(132): n is a, c, g, or t
tgtttaccccccccccaacattgcttttcacaaggcttgtctgggacaatgaagtgtgccttttaacaccaagccgagcccctttncctaggccccaccngggttgcacccaacccctgggctacattactngaatggcaggatgccctgtgtttcattccagttggttttgctgccccccagggctttccatgatgagacaacccactcctgccctgccgtactttttccttttagcccttatttattgtcggtctgcccatgggattgggagccgcccacttttgtcctcaataaagtttttaaagta

SEQ ID NO: 527217 - DNA, 318 bp, Homo sapiens
gaccagggctgggaatggggctctccctgggaaccacagcaatgtggttctgcaattggcttggtctagcactactctccatgaaaaggatcaaacatggcttgagcaactgcctagaataggcaatctccatgggctgggttgctgcactttgaacgcagtgacttgcagcagtgttcttcagctcttgatagctcttccgggtatggcaggaggtcctggagacaaactttgttcgctggaccctgtcgccgccggcccggcgtcccgcagctcgatacttcgtaatcctagctcgtagcgtttttcctgctttga

SEQ ID NO: 527218 - DNA, 275 bp, Homo sapiens
cctccccatcacccctatggaacacccttttttattttatttatttcttttttttggagaacggattctaactctgtcacccaggctggagtgcagtggcgtgatcttggctcactgcaacctctgcctcctgggttcaagcaattctgcctcatgcctgtagtcccagcagtttgggagacctaggtgggaggattgcttgaggccagcagtttgagacgagcctggtagcctggtcaacatagtgagaccgtggctctatttaaaaaaaaaaa

SEQ ID NO: 527219 - DNA, 190 bp, Homo sapiens
tgttgcctctcggtctatttttgaataacctaggaaatatctaggcagtgtaggagatggagaaatagtagagtttgatgtggttgaaggagagaagggtgcagaagctagcaatgtgactggacgttttttttttgtttttttgttgttttttgtttttgtttgtgttttttggtttttttgtttgttt

SEQ ID NO: 527220 - DNA, 428 bp, Homo sapiens
  misc_feature (38)..(38): n is a, c, g, or t
gagctcggccgcccaagaaatattaaaaaacaaagcgnctcggttaaaggaaaacgcccaaattacgggctttttttttccgcccgcaaacaaaggggtctggggtttttcccccaaaacaaaaaaaggccaaccaaaaaaaggggggaccccagtagttttgtgggtttgggtccaaccctctttccctttgcctggggggctggaaccagtccccccccgctggggttttctcctttaggggtcccagggcccaaccccaaaggcattccctttgccctgagtttgaaagggggcccttttggggttccttccccccagggaacctctttccccctgggccccccccgggggggaggggggtaccccctcccagggtttttttttcctgtgggggccccccccaaaaattaaaaaaagctttgtta

SEQ ID NO: 527221 - DNA, 228 bp, Homo sapiens
gaactctacacaacatatttggtcaccaagaccctacttctaacctcccggttcttatgaattcgaacagcatacccccgattccgctaggaccaactcatacacctcctatgaaaaaacttcctaccgctcgcccgagcatttatttatctctccgtccctccccacactcatcgcccttagcacgctactcctacctatctccccttttatactaataatcttata

SEQ ID NO: 527222 - DNA, 102 bp, Homo sapiens
  misc_feature (26)..(26): n is a, c, g, or t
aatcatacagcagacactgcgaggcncaggtgtatagctctatataccatgaaacaaaggcttaggggcaacaaggcttccagctggatgtgtgtgtagcat

SEQ ID NO: 527223 - DNA, 595 bp, Homo sapiens
  misc_feature (495)..(495): n is a, c, g, or t
gccgttgcagttctctttgggtgatcgctccttccctcttcaacggatccctccccgcctccatcctcgttctgtgggagagaccagccttctggtgctgcagtcaggaatggagcttgatagcgctctggaagccccatcgcaggaagactcataattatgtccgaggagttgtctcactccgcctttggacaggccttctcgcaagattttacactgtcttgcccgcaccggaggctacgacagaggcaagcgtaaccagatgcgagttctataaagacctcgagtgatctaatgagaagccacacggatttgagtaggttatttgacggggagctggtgcacaggctccgcgggaatgcccggagacacttggggcatggtagcaacaagccctggagcaagtatgcagccccgctccaaggacggaggaatggtgcgaggtgatgtggcactctcgaagcgtgcgagaatagcagcccacagttgggttanctgtttcgttaaacgtgttacgggaacgttgaagactgctaaggaattgccctggtcgagcctggcttggcatgacgtggcctgcgatcgacttgggcag

SEQ ID NO: 527224 - DNA, 159 bp, Homo sapiens
ggtcccttcccaggctaactaaatagtgaacctcgtatccatgcctaaaacattatgttgagggggctttctcctcaaatgcatagacaataacacaaggacacaagaactacaaagaacaaaagaaatcccaaaagaaactaataaagcttcagtaat

SEQ ID NO: 527225 - DNA, 284 bp, Homo sapiens
cgctatgtctgactcgctggatcacttctttgagccttagcatctcctgtcaggtaggaatgaacttgccagcttcaggctcgttcagtatgaccatctgtgcggtcagggtacactcatgtctcctccccaactccagcagcctttaagaagttgtcctttggcgccccctggaggcagagcattgagctggaccctgtggtagactcccacaggcaggacggagctggcctcaggagtgggacacccagacttggcaggtttttcaagaggcctgggtgggg

SEQ ID NO: 527226 - DNA, 311 bp, Homo sapiens
tccattccaatcgattccattccacccgattccattccattggagaccgttctattctagttcattccattcgggtcgtatcgattctattcctttccactcgattccattccattcgattccattccattcgattccattaaattttattcctttccattcaattgcattccattcgagtccattctattggagaccattgcattcgagtccattccattccagaccactcgtatccattcgatgcgaatccattccatttgaatccgttccataggactccattcctttccagtcgaatctgtgtcgac

SEQ ID NO: 527227 - DNA, 141 bp, Homo sapiens
ggaaacctctgcgccatgagagccagtgaggagagcgatgcaggctgagccaaaagagaagatgaggcagagtcagtaacgctagctgtgcacgtgagcacagagcagaacatgatgcagacgctggatctgtacagtgtg

SEQ ID NO: 527228 - DNA, 356 bp, Homo sapiens
  misc_feature (66)..(66): n is a, c, g, or t
  misc_feature (84)..(84): n is a, c, g, or t
  misc_feature (156)..(156): n is a, c, g, or t
accatattatcagagaccagagacagtagagacagagacccagagacagagggagacagagacccngagacagagacccagagncagaggagacagagaccctagacagagggagacagagacccagagacagagggagacagagacccagagacngagggagacacagagacccagagagagggagacagggacccagtatacaggagagacagagacccagagacagagggagacagagacccagagacagagggagacagagaccctgagacagagggagacagagaacccccctgtctctctctctccgtctctctctccctctctttctccgtctctccctctgtctctgg

SEQ ID NO: 527229 - DNA, 207 bp, Homo sapiens
acaaagccatctggaccagaattccgacgatattactattgaggagtacggagaattctataagagcttgaccactgactcgcgagatcactctgcagtgagcatttttcagttgaggacagttggattcagagcccttcttattgtcccacgcgtctccttttgatctgtttgaacagaagaaagacatttcaatgtatttcgagg

SEQ ID NO: 527230 - DNA, 570 bp, Homo sapiens
gtactcaaagatatctgactattctaagcaagaaagtagtagaattgtacacattgccatgagatggcactttctgaggatactcactaaaactgagtttcttcattagaaaatctcactttttatcatcatctcagtgcctggtattggtgctcttaggtctgtgaacagcattgcgttatgccagtaaatgaatacttaaatcaataattgcattctcagcagtcctcttagtccttgtttgtttgtttgtttttcacagttgaattgcaatgtagctgtttggcagaggcattaacatttttgccctaaccctggcctggtgcctaggctcaggggagtaaaattagagccaggagccaggaggctgaggagaccacttaaaaggcatgctagcatttgataagtaaggggttactttgtgaggaaaagaaacttttatatgctttaggcaagcctctttatgaggaagaaaaggtcagctactgaagcggggtcccaactactgctgggtttgtagaggagagagacacccccataatccagatgtttcagttaacaatcagacac

SEQ ID NO: 527231 - DNA, 437 bp, Homo sapiens
  misc_feature (170)..(170): n is a, c, g, or t
tcatgacagagcttacagtagtgatatataggactctactaatgacgaagcagcaaaatactgcaaaagacttgcgttttactctagagatagttctacaagtcgagtgtcacttaaagctaaggtagatagacaggtgagacattgtaacttgtagctatatacttatngcctgttcaggcttttatctgctggtgacacatttcgcttgttgtgctttgttctagtctatgataataaactataatatctctaaatcctaagcttccttattcctggctgggaaaacaaagctgcttctgtttcctgtgttcatcactttaactttgtaatctagtacttgtgtactgtgtaagaaatgggtgtacacccatatcagacattgtagtcataggcctatcaggcactgaacgacgtctttaaagtttactgctgta

SEQ ID NO: 527232 - DNA, 271 bp, Homo sapiens
gtagctgcactccaggcatgattgagatagggtgggtgcgatattaattaagcagtagatcactatcgtttggactatctcgaggattagcgtggtctaattcagtctccttcgattttggtaccctgtgtgtgattgtcttctcccacattcccccctacctccccacaccttgtttttagtgtattctaagcattttgcataaactattaatttcccaccactggtttttttgttcgttttgttttttaaggaatttggccttatcgag

SEQ ID NO: 527233 - DNA, 1024 bp, Homo sapiens
tggtgcttgggactgccccaaagggcacaacaggttaattggtggcagcagtggggaaaatacatgcgtgttgtgatcttgtgccacacgtctcaccagctcgtcctttcttcttacttgggcaatatgtgaggttcagaagagatcgccctagtgtgcagcatctggatagatgctccatctttgccatgtgcacctcaggcaatgtgtgtctaaaagtggtccctgagaaggtgcatgccctcacagacgcagcctggtgcaacaagcacgccaagattgtgcctgtgtgtctcatcatcgtgcgcagtgtgggtgagaccacatctcccaacatgcctttgtcgtgctcctacaacagtgctcccgtgatgcgcgcatgccaccatattttgcgtgttggtggcgattgctcctctcactcgtggtgagcagcccactttgtgtttgagatatagattggtgcgtgtatacaagcacagtgggactcgtgcaaatagtgggtgtcacacatcagctctaggttagaataggcaagggtgtttgatatattagaactactaccagaaaagagatgcaaaatacgctattgaccaagacaatcggcgcggcacacaattgttactaataagactcgactttttcaatagtggcccatgttttgatttgagcatcgaagcctcagagggacaatacaactaccaagggagaacagatcactaaggagagcagcgaggcgagccactacccaaatacataattgaggggaggaaccacccaatgaggaaagcttcatacgcgccgggaagaaacaagcccgttacttgggcggcgcgacgcacaaataaccaccaagcccccacctgtagaccacctgttgtgaagaaggcagacaaaagcagcaaacagagggagaagccaaacaacaatataccaaccctctacaacttgggcacatagaggtaaactacccagtgacaagtggcaaacacttggtccacatacgacattcatagcaacaaaa

SEQ ID NO: 527234 - DNA, 169 bp, Homo sapiens
ctgtatcccagtactttggggacaccaacgcggcggatcacctgacggtcaggagtttgagccactgtggctggactcattttcgtgttgttgtttctattaatctagagatggggtttcactctggtgggtcaggctggtcttgaactcctgagctcatgtgatccac

SEQ ID NO: 527235 - DNA, 324 bp, Homo sapiens
tctagaggatccctgcacacgccgagcatccatactcaaagtcgcaatggacgaagttgttgacacgccgaaaatccataccgccgcaagtcagggtggacgaagttgttgcgcaacaacttcgtccattccgatctgatttcaagaagtgtctggttattcggcgtgtgcagcaacaacttcgtccattctgatttggtgtgtgggggataaggcaggtagagtgctgagggggaggtatggagactcggcgtgtgcatgcacacgccgaatgtccatactgcacacgccgagtgcccacacgagaaatcagagtggacgaag

SEQ ID NO: 527236 - DNA, 910 bp, Homo sapiens
agcctaattattagcatcatccctctactattttttaaccaaatcaacaacaacctatttagctgttccccaaccttttcctccgaccgccctaagaaccccctcctaatactaacgtaccgtgagctcctaccccgtcacaatcatggcaagccagagcgcacacttatccaggtgaaccacatatcacgaaaaaaactctacctctctatacgtaatctccctacaagtctccttagttataacattcacaggcacagaagtaatcatattttatatcctcttcgaaagcacacttatccccaccttggctatcatcacccgagtgaggcaaccagccagaacgcctgaaggcaggcacatacttcctattctacaccctagtaggctcccttcccctactcatggcactaatttacgctcacaacaccctaggctcactaaacattctactactcagtctcagtgcccaaagaagtatcaaactcctgagccaacaacttaatatgactagcttacacaagtagcttttagagtaaagatacctcttgacggactccagttatgactccctaaaggccatgtttgaagccgcccatcgctgggtcaatagtacttgcgagtaatcttgaaactagggcggtatggtatataagctcaaaatcattttaaaccctgagaaaagagatagctaaccctttctgttatatcctatgaggtattattacaggttcattgctagaaaaagactaaatgggatggtagttaaaagaatgctgtagtaaagatttttaacctggaggttaaggggagtttatggcgggatccaaattgggaaaaagagggggggaaactcggggagaccaattgtgtaagggggccaagggaggggtgtattttataagattag

SEQ ID NO: 527237 - DNA, 189 bp, Homo sapiens
cccccccccctttttttcccccccccttttcctttggccttttaatttccaggcgggggccccctgggggccccaaaattttaaaaaggtttttgggtttcccaaaagccccccccggggtttttttttgttttttccccccattgttttccttttttcccccccaaataaatttttttgggggcttta

SEQ ID NO: 527238 - DNA, 268 bp, Homo sapiens
ggttctgaggagcaggcgtctggcccacccaggctcgggcagctctgtatagctgcattctcccgtctgcctagcagccacttgtccgcatggtcctgtcttgccccagcggctggtcaccggacggggcatggtagagccatggtagccctgtgagcgttcgggagtggggccacctgggttcttgcgggccttggggcttctcctgctttcctgtgggttctacctgtgcctgcagtaagggctggatgttccgacgagcgcgctt

SEQ ID NO: 527239 - DNA, 91 bp, Homo sapiens
  misc_feature (7)..(7): n is a, c, g, or t
  misc_feature (41)..(41): n is a, c, g, or t
tttggancccattggatggccgcctgcatttcggactctanaggatccccccaatgcatcttcttatacttgtgtaattagggaacacatc

SEQ ID NO: 527240 - DNA, 165 bp, Homo sapiens
tacgaccccttccccaagtgagcgtctaacgttatctaactactgtcattccctcctatacgagcactcttagttatctaatgctatcttccccccattccgagcactcttagttatctaatactatcttccccccattctgagcagtcttagataactaagagt

SEQ ID NO: 527241 - DNA, 292 bp, Homo sapiens
agtttcgacggacactctcttttttactcctggctggtctcgatctcctgggtctcacgtcagttctcctccctcaggcttgtctgcctgggttacgggctgatctatacgcaggcctgtgctatctatttctaactgctattcttggcagtctgcctcttgagacctctgaataatattttcttatgaaaaattttcaacataccccaaaacagagaacctaattaaatgaacccacagtcggccaacaataatttaacatgaacattttccaatcttgaattatttacgc

SEQ ID NO: 527242 - DNA, 240 bp, Homo sapiens
ggggggggggggggggggggggggttttttttccttttttcccctccccccccccccccccccttttttttttttggtctgggggggggggggggggggccccccccgggttttttttttgggggcccggcccctcccccctaattgtttctctggctggttcgccggggcggtgcgcgtggggatctcgtttaacaaatgaaacaagtgcttccccaacaaacaatctaaagaccaaca

SEQ ID NO: 527243 - DNA, 150 bp, Homo sapiens
tgccaaagcgtagtaccaatcacgatgtgtctgtcgtgtctgaatgtatagagtcgagggagggaaggaaggaactacatatagagtcggagatgatgcagctacacacacaattccccaggcccaggttgcatgctgtgtgtcagacca

SEQ ID NO: 527244 - DNA, 235 bp, Homo sapiens
  misc_feature (22)..(22): n is a, c, g, or t
  misc_feature (76)..(76): n is a, c, g, or t
  misc_feature (82)..(82): n is a, c, g, or t
cagaagattgcttgagaccagngagtttgagaccacccccctggcaatatagcaagaccccgtctctgcaaaaaanattaanaactttagcaggcatagtggcctgtgcctgtagtcccagctactcagtaggctgtggtgggaggattgcttgagcctaggaggtcgaggctgcagtgagctgtgatcttgccactgtactccagcctgggtgagagaggggaccctgtctctt

SEQ ID NO: 527245 - DNA, 139 bp, Homo sapiens
gtaatgaggtgcagtgcactccagcctgggcaataagagtgaaactctgtctcaaaaagaaagaaagaaagaaagaaatgctctgcagtcagctgtgagtaaatgccaggcacggtggctcacacctgtaatcccagcg

SEQ ID NO: 527246 - DNA, 778 bp, Homo sapiens
gacggttgccattggtcgctccctgagaggatgccgctcgcttggtgttgtgcgtggctgacttgtatcagcggctagagcatgcttgctgaaaatgttgggcgtggtgctggctgacagaggggccgacccggtgtacagtcggtggacgattgcacgctagtcctcgatgcggcatacgtgacccggacgcggtcgtgcggctgattcttgacccgtgacgaagggcattcgcgttggacgctctgagagcctccgttggaacggcgcctgagtcgccacgacgtggtcatcctggactcgcttaactacatcaaaggtttccgttacgagctctactgcctggcacgggcggcgcgcaacccgcgtctgcctggtctactgcgtacggcccggcggcccgatctgcgggacctcaggtggcgggcgcgaacgagaaccctggccggaacgtcagttgtgagttgagcggcccacagcgctgaggaggacgggagacgcccaggcggcgggcagacagcgtcctcagggaactgcatacttgtcggactctgtagtaaatggcaaagtgcccagggcgtacgtatccaaggaactggagtcgagaagaataccggggctgacggagtctccagctcttgtgactccggattcagagaaatcttgcaaagcatgggttcggtgcttttactctcccgaaaatctggagggccttaatgcttggctttgaggctccgattctcggaatccgtgggaacggctttattcctttggtggc

SEQ ID NO: 527247 - DNA, 568 bp, Homo sapiens
tgacgctgcccgagcccgcgcccgcttgtcgccacggcacttgaggcagccggagatactctgagttactcggacgtcccgatcgcctgagggtgatatgaacgcgctgagcctccctaaccgtccggacctgtgatcgcttctggcagaccgaaccggtgctccatgactcccccgggcgatgacgcagcagctcccagccgcccagacagcatggcgcccaggccagagcactcccattcaggcttaccccgtggacgggactgcccacccttttcttcctcctgtcccccgtgatagggcctccatcaagccgcgccatggagccgtcctgacgcgggcctgggagcctctagaggccctggctggtggaccgcagtatcaacggagcagctctggtagaagctggcctggagggataagctaggactcctctggtcaatcccctcatagccccttgggtgcagactgcccttgcaagtaggaggctcgcgagacagtaggaggcccttggacgaggacggagcaaacactgggtggctgaatacaccagcagttcccttcctga

SEQ ID NO: 527248 - DNA, 196 bp, Homo sapiens
tagtttatctaacactacaggggtccttaagatatgtagccttagctgggtacagtgactcacacctgtaatcccagaactattgggcaggccaaggcgggtggatcactgtgcggtcagacagttctgagaccacgcctgggccaagcatggttgaaaccccgatctcgtactaaagaatacaaaacattatcca

SEQ ID NO: 527249 - DNA, 1282 bp, Homo sapiens
caaggatagaccacatgttaggtcacacaaatctgaaagtattctaagagaaaaaaacagaaaagaaaaagggacaggctttggaggtggattatcggcgacatctcggggcccacaacagtattaaaatattagaaattcgagtaccaagggaattttggggaactttatacaacaccactgtgggcaattcaaatataattatactccttggaaagaaagcgggtggagtctacaggtgaaacaaagaatgtaacaaaacagggcaagtgtggacaacaaaatttttggggcaacccaaagtgggattgtacgggaacacacaaaaatttagcacaagaaaccttagtggggaattaacaaataaaaaggcggtggtccctaaaggagagcggacaatttataatgagacataatagagtatacccaataacgtgtggacacacaaccacgagcgaaaaaagacacccctatagacacaggtgggtatttctccacaagggaactgtgaggaagaacgagccagagaaaatctaagccgacaaagcccccaaaaggtctcagctacgacagagcaaaaaacggggcccaacataggggaaacgggaatctcgggggacacgcattcacggggttagaaccgcgggaaaacttacacacgacagcagacaaggtattcacggagatagagaacaaaaaggggtgggatcattggggaacaaaggttttaaactcaaacattgtgggccaaaactcgtcttgtaggcccggaggatctgagggggacaaataaatgagttaggaacaccaaattaagagggaaaatgtcgggatttgtggaaaagagggaacacattgggtcaatgtggccacgtggggcaccacatgtccagggggacaccaatagaagggggacaacatcgtgggaggccacacaaattgtgcccggaaacaacgtgggacacaattccgaaaaaacacgggtgatatacacagccccttcaacacgttccgcgcacacttaaccaacgagaggcgaaaccccagcgagaacaaaagcccacaaacacggagcgcgggcacgcaactcaacagcagagggggagcacccaaaggttgacaccgacaaaagaagtctcccagcagacgatagaaacggcccggagacacaaggggttcaaagagccgggaatagattcaccaaaccgggttgaagcactagcaaggaaaaaacgggcaaacgggtgcgccccgacagagtacacaaagaagagaggagcga

SEQ ID NO: 527250 - DNA, 119 bp, Homo sapiens
tgaagccatcagcgtgcgcgcgccttccaggtcgaagcgttgaatatgaatatcgcgtgtctggctactcatcaggtgcacccacggcggttaggcatttgcgcgctctggcggcgcgt

SEQ ID NO: 527251 - DNA, 381 bp, Homo sapiens
tgaccatacacccactgcaggcgctatacttctctggcctcccactctcctcaggcacctcatgatctgcccgccttggactcccaaaatgctgggataacaggcatgagccactgcgcctggctggcaatttcttaaaatgagacaacaaataaagttgacacattgactgacttttcctttcacaaaagatttctctgtatgtagcatgtgatgcagtttgattgcttattatccacaggctttcttttcaaaactggagtcagtcctcccaaaccctgactgcttctgctctatcaacttcgtttatgtaatattttaaatcccttgttgtcatctcaacaatgctcacaatgtcattaccaggattagattctatct

SEQ ID NO: 527252 - DNA, 278 bp, Homo sapiens
gtcaagggagggacctgtaatccccatgtatcaagggagggaggggattggcccatggagtcagtttcccccatgctgttctcgtgatagtgagttttcatgagatctgatggttttataagggtttgggagcccctccttcatttttttttttcgttcccctttttgaaaaagggcctcgcttccccttcactttttgccatgattgtaagtttcctgaggccccccccccagccatgtgaaactgtgagtcaattaaacctctttttttttttata

SEQ ID NO: 527253 - DNA, 104 bp, Homo sapiens
tgacggcagccgttgtcgtgaggccgacgggccgaatgtaggtgggttgagcgcgcgggtgaagcgggcaaccgcagggctacggcggccggcagggggcagtg

SEQ ID NO: 527254 - DNA, 766 bp, Homo sapiens
  misc_feature (264)..(264): n is a, c, g, or t
  misc_feature (305)..(305): n is a, c, g, or t
  misc_feature (571)..(571): n is a, c, g, or t
  misc_feature (574)..(574): n is a, c, g, or t
  misc_feature (586)..(586): n is a, c, g, or t
  misc_feature (594)..(594): n is a, c, g, or t
  misc_feature (606)..(606): n is a, c, g, or t
  misc_feature (694)..(694): n is a, c, g, or t
  misc_feature (723)..(724): n is a, c, g, or t
agcggctgcctgggcgggtgtcctgtgacttgacagtggctccccaagccccaaagccagcccccttcttctgtgacttagtctgttgtagtggtgagctgacacgtccaggtgtgaccgttgctgaaaacttgtgccccctctgtggtatgcccctgccctgttctataaatagctataaattctctctctcacacacacacacacacacacacacacacacacactatatatacctatatatatacgtggccaactgcctcncctctagcactgggaatcagtcccgtgctgtgcttgtggantcttgtagcccagcaagaggaagctgtctcctgacatcgcccctccaaagtgcaccacctccagtgagcttccgggacatgcgcggctgtggacagccagcccccgccatccctcccgcccttctggccaagcatggcgggtgctgtgcaggcagctgtgtggcctgacagtctctaccagtcctgctgtcccttggctgagaaacccatttctggatgacagagaatgtgtcctctgctggctgtgttctctatggagctcaggnganggaaaaggccangccatttntagggtgctgtngggagcagtgaaaaggtcacacccttttcaagggacacttttcctggaaagtccctggagcttagctggctcttaccctgtgaagccngctctggcactaggggacagggccctganntcagctggagggaacctgcggggcacccggcactctgggagg

SEQ ID NO: 527255 - DNA, 115 bp, Homo sapiens
ggaagactgagacaggagaattgcttgaatcctggtgaggctggaggttgcagtgtagctctgagtatctatgccactgtcatcccagccgggtgcgagcggagcacaaaaaaat

SEQ ID NO: 527256 - DNA, 487 bp, Homo sapiens
ggtcgatcactgtactgtgattacaggcatgagccactgtgcctggcatgtgtcctgtgtatttgatacaaataaatttgttgtagccaaagcaaaaaaaaaaaaaaaaaaattccctcagttccctctttttttctccttgaaaattaaaaaccctattacctaaaacataaaatttttaaagattattagggccctcaggttactatattgattccaggcatcctatttaactctatgtcaggcagctcccctctgtagtgtccccgaaatatggcgcaccattaaccaaatgggcttaaagatgtaataaacattgggagaataatcgggtgtctccagttttaaccagtacataatatttggaatttcacattacgtgatccgggaataatgcctattaaaacacctatttaggaggtcctgtataaagtgctaatggtacaaggcacgtcttaagtatatggtaatacttctagtgggtcct

SEQ ID NO: 527257 - DNA, 702 bp, Homo sapiens
  misc_feature (702)..(702): n is a, c, g, or t
acaaacacttttcatttcagatcgacattagacttatctgacttcactggcctcaataatgtcattgaacaatgaatttcctatttccgcatggaaagctattgatccatatggctgcaaaacattactatataccggtactaaagggtgccttaatacaatcaaatctgctatacaaagtatctattgcacaatggccgggctgtggaaacttttccagaaagtttccaatatcacgtctacataagttgaaaaatctctccttagtgcttatcttctaacttaaaattcacctggaactttaaattggaaaggattcttttacatcagtggattataggcataatactgcttgcatctgaattgtctgcaagtgaatcatagtttaatagaggaactcatgatttgtactattgaatgattaaactaagtatgaagtgataccattcagcatggcatcaggtcattgcagctctagctctgtgtaacacatgcactcactgaaattccagtttctaggattagtgtacgagcctaacgtgcttctactgttgtaatgggttaatcctgcattacttaacaatctatgtcaatggcactgggtttaattgctgctaaagaaataatgccctgcgtttagtaacatatacagctcaactattcttgaatatattttgaccaatgtttgtcttccctttgtcn

SEQ ID NO: 527258 - DNA, 284 bp, Homo sapiens
gagaagatcattggtacagcgtgggtatcgaggcggacgacgaccaggctcaaaacaaggttatcagtgagcatgaatggaaaaaacagttgaagacgtcattgacccacgggtattaggcaagcttgccagtgtacctgatggtggggctgtagccgtgctctgctgcacccaggctctgcagcgcctgctgctggttctgcgcaatgctgcaagcagaggatgaagaaagattgagaagaaggaggagtcgaagagttaaacgcatgacatgggattgcctt

SEQ ID NO: 527259 - DNA, 309 bp, Homo sapiens
  misc_feature (147)..(147): n is a, c, g, or t
tgccccttgggcctttttgggggccccaaaaaaacaagttgggcaaaaaaaaaggggggggccgggtcgggaatttccgggaatttttctccccccggggccgggtttaagggggaagggccccccccgggttttttggtttagggnggcccccctcccttctttggggttttgacccttttttccaggggggcccccccctatggggggcccccgggttttttttcccccccccccccccctccccctggggtttttttttggtaatgtggggggggaatgaaaaaaaaaagggattttttgccccca

SEQ ID NO: 527260 - DNA, 605 bp, Homo sapiens
gagttgatggaataggggtggggtggcataatgggttgtggggggtgagggaaaagaaagccacaggggacagaagtggtgggtagtctttggttttctttttggtaccaaagtcaactggacgtgttttatatttttaagaggtcgtaggcaattagagatcgaagcctcctatctccacatctctgaagaagttgaggggtgggggagagaatgacttctgccttcatctgcagtaacggggggacctatactgacctcttccccagccatttagaaacaagttctagggtgggttggaaaatctccaagagccctgacctcatcttccacctcagcaaccatgacctgaaacctcagcgtgaatttgggggatttttcagtggaacccttgcccccaaatgtcgaccagcccccaaatgtcgaagaattttcttcttgccaattttgttgtttacaaaaaaaattcagggaaaattaaaaacctggaactccataaggtactgtcttccataatgtctgccaattctgaggaggatggtagtagagagccgggcagggacctaagttcctctgaaagggggctttttctctcaccgcgatgg

SEQ ID NO: 527261 - DNA, 288 bp, Homo sapiens
  misc_feature (160)..(160): n is a, c, g, or t
tgtatctggaagctctatgagtagtaaaagatagagataggaacttctgataatgttgagctaatatgaagtcaggagtctgtgcaggtgcggtggtcaggctgtaatccagcatttgggaggccaaggcgggcggatcacaggtcaggagatttgagancatcctggctaacacggtgaacacccatctctgaaaacaaaaaattagcctggcgtggtcgcagatatcctgtagtcccagctactcagaaggctgaggcaggagaatggcgtaagacccgggaggcg

SEQ ID NO: 527262 - DNA, 310 bp, Homo sapiens
gtgcagaagatccactctagttgagacaagaattggcaatatgcatagctccggaaagagtgctgactttgtatctaagacctgccagggaataccaagagttgtttctacagacttttttttttttttggtttggaaaaaaatcctgtggcacccaggaaggattggaaaaaaattcctttcctctacagcaatttattgtgaggaagcccctccattcctcgggctattaaggtgttcaaaatcagttccctaggaaaatatcccattgtatgtattttcctgggaactcttattcttgtctcactct

SEQ ID NO: 527263 - DNA, 370 bp, Homo sapiens
aactccctccaagtggtttatttaataataataaaaaagaaatgcccacacataaacctgaactcccccccaccccaccctcctttactcccagtaactagctccaaaaggaaaaaacttcccttgtcccacctggggactaaattcccacctcccctgccttaccgcttgggaaccaaaataaaaaatttgcggcggctcaccccccaccccacaattgaaccttacacaatccccttaaacaaaaaagccaggactgggggttcacaggaatgaaaggagccctattttctgaaaagggatgaaaagagaggtgaacccccccacctcaaataagggcttaacccccacacctgctttttcctttacc

SEQ ID NO: 527264 - DNA, 412 bp, Homo sapiens
cctgggtacactacatgctcatatgtaggattggaccgcgcaggctcggacagtcagatgggccggagctcctcctgctctgcagggtcacagaggaaggtaagtaatgcagataccctagtccaggccgagcttgcactagcgtcttgtctgctgctgctgaaccaagatttagctgtgtgccctacttgcagtctcatggaaccagcaggaggaaacatgggggatactagactgtggcggtgagaggatgagaagtttatccagagccatgagcctaagagcaccaggctcctaatggagctgggcctcatcagtggcatctgcatcatcgtgggcaccatcattggctctgggatcaacatttccatcaagaatgcgctcaggaccatgggctgcagggccctgcctc

SEQ ID NO: 527265 - DNA, 445 bp, Homo sapiens
gattccactgatatgacgtacctggagtcagcagagccacagagacagatggtagaatggtgagtgccaggggctggggtccattgtttaatggctacagtttctactgggggtgatgagatagtggaaaatagtgatgacggtgcacagcgttgtgaaggcaggaatgtacctaatgccaccaaatttcacacgcggaagtggttaagtggtcaattttatattatgtataattcagcacacagaccagcacggccccaagtgcggatgcagtaggtcacggccagccgcccgccgatagcctttcagtctgagggacagcacagacgtgatgtgtggccgggcatggcccccagtctgtgagccatagagggtgggactgggtgtcccagcaggaatcggggtgtggaggagctgcctagatggtctggagagggcagatgga

SEQ ID NO: 527266 - DNA, 130 bp, Homo sapiens
ggtcttagcgactatacatcaagtccatccaatacaatccactaagcaagtgcacaaattctagtatactttttagagcagattaagatcgtctatccgtacttttgacagcctaatacctagttgcctt

SEQ ID NO: 527267 - DNA, 97 bp, Homo sapiens
  misc_feature (15)..(15): n is a, c, g, or t
  misc_feature (28)..(28): n is a, c, g, or t
  misc_feature (33)..(33): n is a, c, g, or t
  misc_feature (38)..(38): n is a, c, g, or t
  misc_feature (43)..(43): n is a, c, g, or t
  misc_feature (96)..(96): n is a, c, g, or t
gataatccagagggnatgatgctggctnttgtntattntctcnctgctttagttggaaaaaggccctcaggttttaattattttcttcccaaaatna

SEQ ID NO: 527268 - DNA, 982 bp, Homo sapiens
agccagagagaacggtgtgaactgcactaacccatatcgactgcatacctattgtactcattcagtgccattgccatgctgatgctgtttgatcgtcagttgtctcctgtactcatctagatcatgcctatgggactacgatggggcatcataaggcccaggatgcctgctgcgcgcgtttcatcgatgctcactttccgcgtgtcgcatgcgacgaacgatgtctggcaccgccggacgtcttgattcatcgtagacccaaagggttcataaccggcatcagactgcgtgggccaccgagtgtaagatcaacctataactagtggtgactgcagactcaatagataggagacgatgcgacacttttcatccctgtgaacgtgcgtggctggtggttcaaacagaacagccagtgggcagccagtgatggagccgttgctggctttaactgcaggcaggccccaccctgtgcacggtttgcgcctgcaattcgctttgcgcgcacccggggccgccgctcattgcgctggctttccccttgtgtaaggcacgcactgcacaaggaaaccgtgcgaaccacttggctggcatgtgtggtccacccacagcgaggcccggagtgtttgacctttcagcccatgccgccgctgcccgcaggccctttgggggggcacccaccgggctcgttcttcgcgcatggatacctccacgcgatgtagcacctaccgcacaccaggaccttggtgtccacgcagatatttcgcgtaaacagtgctaggggcacccccaacgggtactgaccaacagaatgctacacgcgagtcactgtagccccgccacgtgcaccacacaccgtctcgccacccttctttcacattcgactcttcgactcacgacaagcaactcctctttcccgaggggccggacacatctgcagcccgcccgaacacaccgaggcggtctttgcaccaccacctttccc

SEQ ID NO: 527269 - DNA, 147 bp, Homo sapiens
aactgaaaacgcagaactctagctcacaggtacatgatggagcgctgcaacacctgatacatcaatgtcctcttcatcaacatcataatacctacaaaaagtagtcataccgagaaccggtgccggcagctggatagtgcacactag

SEQ ID NO: 527270 - DNA, 1644 bp, Homo sapiens
  misc_feature (476)..(476): n is a, c, g, or t
gtgtaggctgagcgatagttagctacgtcacgaagtgtttgccctggaccagctctgtggatctgggactccgaggagaaacgaggcatgagcgtgatcctacgctgcttgtcccttgaggcggtggtgagggcttggcgcgggtctccatgatataccgatactgcgcaggcatgataatagacaccatggcccccaagtgacagtagtcgccaagcatgaactataccatgatgtcactgtgctttcagtagaggaagtaagcttctctacgccctgacgtaccacgttgtgagtggcagaacgggtacggacaatggcactcctccttcttcgcatagtgccacacttacgcgtcacattagaccgttcttgctcgaacacgaatctcggaaccccctgagtaaattgcgttggggaagaggtcgctggggaccgacgcggtaaagtccccgaggactgtttgtagtctcttnaggtggagggcacctcgccggggcatgagacaccaggacgtggcatctcgatggatgacacgacatcgtagaaagtgcgtgcgctggccctaaggccacgaggaaaatctaacgataggtgtgcacgcctcaagtcaggcaacaggaacggcataagggaaaagactcaaatcaccttcgccaggttgcacgccgttcatggcgctgtgcttcaccttgttgattgagcagaaggaagagggagcggttaagagaaatcggttcaatttacaaccaaggaaaaaggcctttggggaaccgttccgaggaaaccaccacagagaaaccttgagacgccaagggtcacaaggccttggtgattcccccgactccttggttacccgttcgcgtgactatccttatatacaggccccccggcccccttgcaggtgggggaaggccgttggttctccaatgtttacgagcccggtgtgcacttgaaccgaggcgatccatccggactgcccaaaaggcccagaaagtgcaagtgtgcccccggtgtgggacccccgcggagatcccttcccttttccccccgggggagtggccccccttgtgggcctcccgggccctttggggccccttaagttgccctatttggggcaggccttgaaggcacgtggatgcgcctcggtgtgtgtgccacggtggctttgggggttggggccaccccccttggggccccgggaccttcccagcggttgcgaatgcacaccggttggcacccagggctttccacggtccccttggggaattcccaggggccccaaccggagggggcctcaggaggcaacgggggacacatttcctatgggggttggtatgacacccccccgggttgaggaccttttgaaaactttttgccacatattgtgcaacttgaaggcactctatttctacaagaaaaagctaggcctaacccatggatatgaacaacccttcaaatttgctccccttggccccattcttttccgagtgggtggagttctttaccaaaaagagagtgttaccatataattctccacgctacaaaggggcctagaaggacgatatgatgtatagtatgcaccaccatcacaccgcgtggtgtatctgcgcacacacacattcaaatctggttttcaagacc

SEQ ID NO: 527271 - DNA, 1061 bp, Homo sapiens
ggctgcgagtgcgatcacggccggtcaatcgccgagttagagggcccgtgaggggcgcggccaattcgccgccgcgggccctgctccgtgtgctggttttctccgtgtggcgcctcgtgcgtggaacctgggagatattggtggcagcaccttgggggatgccctggctgggtgcggttcgctctttgcctgaccgggcttattgctctctctctacgcgctgcacgtgaagtgccgtgcgcgctgccctgggaccggtgattaccgcgcgctctgcgacgtgggctaagccgacatcagcctgttcgtcgcgtcttctcctccatggtggtggccaggggatttctgggctggtggatgcatgtgctgggacacgtgacagaatcctcaatcattccgataggcctatacggttgccatctatctagcaacagcttactagggttacttgtgacgcgttggcttgcggaccactgctgggcgcctctgatccgtgaagtgcttgcgtgaggctcaccatggatggtctcttcggctggattccttgtcatagcccttggccctggaatcccttgtaccattcgtgcatctaatgactattccttggaattgactgtttaatccactcgatcatattgcttacttcgaaaccgttgatgccgtagaatgattggctcacgctttccccgggaagggtccagagaaaagacccccaaagtaggaccaacagtagcctaaccaagaacgtagccaccttagaggtcaaccccttcaaaacgccccgaaatgacccacagagccgtagataggcgtacacaatctcttggcaatatcaaggatctcttttgggaccaatctcgttgaacaaccacttgtgaccaaattaaagggagagagagcaccttaatccattaggagagtccccctctagcgacaaagagaggcgctattagtaactagatagacagggcatttactctagagaagttaactcagcccattaaactgcactttggcccatataaccccaagacacagcattgcacgtataatgggagccc

SEQ ID NO: 527272 - DNA, 155 bp, Homo sapiens
tgtgacatcagcagatctgctcgctgagaagtcttgctgggacatcgaagattgaggactactttccagaatttggtcgctacactactcctgaagatgctactcccgagacgcggaaggacccacgcgtgaaccgggccaagtacttcattcga

SEQ ID NO: 527273 - DNA, 272 bp, Homo sapiens
gcggctgaactgtcaggtcatgggtggtgtacatcagtgaggcagcagtcgcagcaggttcagttgtggcaatccaaatcattcaggatctcagtcatcagcagcatcaggtcgccttcagtgttgtgtatggttcatccatttgttttgcaggttcagttagcattcagtcattgttgggtggtgattcagtcggttgtagcatgcagcatatttggaggtggggcatcactagagggggcccatcagacatgcatcagttcagacggcgg

SEQ ID NO: 527274 - DNA, 879 bp, Homo sapiens
  misc_feature (243)..(243): n is a, c, g, or t
  misc_feature (879)..(879): n is a, c, g, or t
gggcccagtcctatgcggagagactgcgtctgggttggccgtcattcacggggaagctcagtgcacgaactggacatggacgatggtcgtcactccccgccatatggtcaaaaatgctactgtgcacccaggcctgagttgccattgatgatggccaaagagaagccaccgataactgtagttggagatgtggaggccgcatcgcaatcatcgtgcatgacatattgacgatgtggagagttngtgctgccgcggagatcctgaaagagagaggcgcctataagatctatgtagtggcacccaggaatcctgtctggcagaggtccctcgcctgattgaggagtcctccgtaaccgaggtggtggtgacgaataactgttccctcatgaggttcagaagctgcattgtcccaagataaagactgtggatatcagttgggtcttctgaagccattcggagaatccacaatggagagtccaggcctaccttttccgaaacatcatgtggatgactagctttcacgaggtctcgacccctggtacctcctgagcggaagcatgccaaaatgcagcgccatgagtggtacaggtggttccttgcaggggaggactcgaagagctggagtaatttctcttttgcccgaattatgcgacgaggctcacacagtccggagaggcagagtatgggtattttaaactgcgtaatgttgtgtataaccggtcctaaagttacgggtaaagatggagttttgaaagggggagggcaagtacttatgatatgtgccagagggagggccgagagggagggggaaaaaggcccacagttagggttgctctccttctttcctctttctcgttcttatcctgttataactacgcn

SEQ ID NO: 527275 - DNA, 513 bp, Homo sapiens
aatcccccccgcccgctggagagtgtatataataaataacacagagaacttttcttttttagttaaccctctctccacattattccctctcgaataaaaccccacactccaccccctctcttttgtgcactcctcccccataagagaacaccccccggggcccttcttctcacccctctctccggctgctctctattcctctagcgcccgcggggcggagaataacacacatttttcaccccgcgcgaaacacacctcatattgccccatctcatgggccctcttatatgggggacacacacatcatatataaaacaacacttgtgttcccacacaaaacaccgcgcgctggtccgcgctccccggatatatcccgcgcggatatatatttttgccccccgcgctcccgcgcggggagagagataagcggggggagcaaaaagagagagagagaggggggcgccactcttttgtgcgggtggtttttttataaaaaatggggaaaccccccca

SEQ ID NO: 527276 - DNA, 736 bp, Homo sapiens
  misc_feature (736)..(736): n is a, c, g, or t
agcggtgccccgcctgctgcggtggcaccagccaggaggctggagtggaatgtggcctgtggggcgggtatgggactagctggctgtgtgctgccctgagactgctcagcgtggctatatactcgtctggtgtgtggcctggctggtcatgtcttgctgtgcatgctgtgcaggcaagactggttgcatgttgaatggacgatgtgtggctgtcgttggctgtgtggtcctgcatgctttcaggcaggagcctgcttgcagccagtggccccagatcaatggttgggaagagtgccagtccacatgacatgtgtgatgtgttgttttgacagtgtggatgcgcatgtggcaagcagagtgtgaacccctgtgacagaggcttgtttcagaggtgcagacgaatgtgtgtgtagccttgtctcttggcaggtttccttgtgtgtgccattccacacaccatgggatcggttccagatgaccagcagcacttgaccaggggctatttgtctgtggaggcaatgttgcttgatgtgcatctgaaatgtggccaatgtgtgagtgtccacgtgctgggattgtgcacttgttctagagggtgattacagtgagtgcccctttatgagatgagcatgtggctgacggttgtgtgtggccggcagaccccagcaatttggccgtgaaaggtggcacacgtggtttctggggcatcaccgtgggccttgagattccccaaccn

SEQ ID NO: 527277 - DNA, 599 bp, Homo sapiens
  misc_feature (599)..(599): n is a, c, g, or t
atttccttactgcctcttgccttcacgtgggactgggagtctattaatccatgttcttatgtagaccgtgcctgcggatgccttctgggaggcggatgtgtctgccctacagtcttgggagccttatgcttgggactcatgtttgtggctgatcaagtactgatgactcctgtaggactacagtgccttatggctggtataatgctgcatcctgtgctgcctcgtgcactgtgccctggaactcttgatcatctggcatgctagcaacgtgaccgaacactgaactcctgggccacaggcatgaagtccaccttccagggcgatattgtgtgggcttcacgtcctccgagacactgtatcaagccagacctatccgctccccttacttgcagtgacctacggttgcagtgctacaggtgatgagtggatgaatgatcagactgtgaactacgcaagatgaactggtaggatgatcaacatatgtgcgactctgacttgatgaatactagcacttgcagactcatcagaggctatcgcattgacaatgccaatagagtgctgccgaggactgcagaatatactgacgtcatgagcttcan

SEQ ID NO: 527278 - DNA, 258 bp, Homo sapiens
ggtgtgtatgtgtagtgtgtatagtgtgtgtagtcatgtgatgtgtgtgatatgtaataccatgatgtccatgtgtgtggtgtgtggtgtatacgtgtgcatggtgtgtatgtggtgtacgtaagtagtaacatgtgtatagtatatgtgtgggagatgtatgtggcatatagtgtgtagtgtatgactgatttgtaccgtgtgtatgtagtgtgtacatgctgtatgtgtatcaccgaatgttgtatgtacctggtg

SEQ ID NO: 527279 - DNA, 340 bp, Homo sapiens
cccgtgcagggtactggtaatggacatccgggaatatggagaagtaattcagctacagagttgaccaacggcaagaacatatgccagtgcctcgtagagatgggacgggctaaggacgatcagctgaaggttcaggggtttaaagtgctggtggctcactgaagcttaagtgaggatttcctggcaatggagtagaatttcccttctctccctggtcacaggtttaaaaacctcacagctggtttaatggtaaccattgggggtccgctggtaactgggactagtggtacctgccttcatgagttactcttcagcagagtcaccggcaggggttccgagc

SEQ ID NO: 527280 - DNA, 232 bp, Homo sapiens
tgactagcgttccctgtattggtggagctctcggggtatcgcgtacccgtcggggcttccggctaggccgagaacgtgtcgtgggcagccagttcgctttacgccgatgactctgctagtgcaatggatttcggcgtcggtttggtctcgggtgtagcctgagactaggggaaatcagtgcctgaagcctcctatgctggcaactacagatcctatagcataggcacataat

SEQ ID NO: 527281 - DNA, 142 bp, Homo sapiens
ggaggacaaaacagacaaattccttgattctagtaaaaggagagaaatgcaagcaatgacgtgtgtgtccagggaggtgctgccagaaagccggttaaaggcccaggagtgagggagaagctctcggaggcagcacggtcag

SEQ ID NO: 527282 - DNA, 217 bp, Homo sapiens
tgaatacacagcgattgtaaatgcatatagcaccgtctagggcagggtggaaatggtagatgggaaataaaagctgggggcctttataatttggaaggttttttaacttttggatgtttgaactaatccgaaagttatatgtgtctagagtgttaaatatattttaaaacgctggtttataaactcattaacaaagattatttatggtaaacagcac

SEQ ID NO: 527283 - DNA, 269 bp, Homo sapiens
ctctgaggatcccctctgctcctcttcgaggatgaggacgatgaggatgacgaagatgatgaggattacgatgacgatgaggaagattactccgaaagaaagaagctatggagactacaccaaggcaaggaaagaaagcttgcaaagtttgttcctgtgaaagcccagaacgttgcttagggataagataagaagaggatgatgaggacgaagattacgacgacgacgaagatgatgaagatgatgatgaagattattaaggaggagga

SEQ ID NO: 527284 - DNA, 998 bp, Homo sapiens
  misc_feature (204)..(204): n is a, c, g, or t
  misc_feature (458)..(458): n is a, c, g, or t
gatatatggtccgcatgctcctgttacttgactcaccgttgttcgatctcggccgaggcaataagtcgtttcacgaatgcccgagcgcaagagtcatggcttgtaaggcgataccggaaatacaccctgtgccagccggaatgtggctattcactcgcaatacgtacatcacactaactaagccgactgtacatactacccttnggacacaagtgctgcttgctgctgacagttgaataatgagcgtcgcatcaatcacagcagacatcttccaaactggaataggcacccatctatctgatatgtcctaatctagagcatctttgcatacatcacttacaaggaagaaacactaccttgatggtagaaggtcctcatagcacgatgaggatctgtaatcccatcatgcagtaattccaccacatgcgatgtcattcgatttgcacagtcctctctgnagcataggttcacatcccacgatttgacgtgctccatctaatctattcgaagccgagggacgtctagagtggttgggacagtcaactctaattgctacgagtcgcattaaagtcaaacttagttgacaagtacaaatttggatggaccgagtcgtgaaagagaaggcttactcaaaataaaacaagaaccaaaccatccacacgattcttatacctataacacttcaatcttgcccttcaattattgcaagccctaagcagcactccaacctctctaatttcttgcaacgaaacgggatcaaaaccaagccccctagtgaatcacctcccattccgataaaatcaccttccacccttactacacaatcaaagaccgccctcggcttactttctcttccttctctccttaatgacattaaccactattctcaccaagaacctcctaggcgacccagaaaattatacccctaccaacccgttaaaacccttccaacgataaagcccaatatatttcctattccctacaaattctcccaatcc

SEQ ID NO: 527285 - DNA, 347 bp, Homo sapiens
cgggaaggctgccagtgcatgttcaggacaggtccagtgccagtgcaagaccaggctaggacagggtagcacagtgtccaagacagtgtctatgatgggaccaaagcagtgacagggcctagagtccaggtaacagtagggcaggtacagggcaaggcagggcagtaaagggccagatccatggcaggggcagggcaaagacaggcccattgccaatgcaccagccctccctacaaagctcctacggcctggccaccgctgcagcccatccatcgctgtaagcctgacccccaaccctggctgcagccgcctgccctcctagcacagccgctctcctaccgctctgg

SEQ ID NO: 527286 - DNA, 100 bp, Homo sapiens
ctctggatgcaaagtgtcacaagacgcagaactagaaattttagggtgataaagaaggaatgaaagtaggccacagtgtctcacacctgtaatcccagca

SEQ ID NO: 527287 - DNA, 1340 bp, Homo sapiens
  misc_feature (1)..(1): n is a, c, g, or t
  misc_feature (718)..(718): n is a, c, g, or t
  misc_feature (752)..(752): n is a, c, g, or t
  misc_feature (853)..(853): n is a, c, g, or t
nattattttgctatttcgcttgttgtgtttcttttctttataatcgtctgttgtcgttctcttatgctttgctactgggcagcctaccgttcagtgtgttacccttagtttttcgtcatggcgggttgtacatgcacggggctttttctccttcctggtggttggttagtatatgtcccctctgtcttgtgcgcgccgcgtctcccttgtccccgctccgggctcccctgcgggttttttcctccgcgctcctcttagtgggtgccctctttcttcccctctggggccctagggggggccataaagttccccctctggagatacggttctctcgggggtactcccctctctggggagataaggaagtaattttaaaaatggaatctaaccgggttcgcaacaagaatcattctggggtcctccgtgtctcaattttgggggattttccccattaaacgagtgttctttgggaattaccaggaatttctcccctgatcaatccacggagttccggagccctttacgtttcacgcaatttacccttcccgatttgattgagggaatgaaattattgggtgggcacacctggggagtctccacccgagagagaaagggttttatatgagccgtcgtctgtggccctctggttcacatggtcacatttggagtcacttctttgtaacacctccgccactccccttaattgacctcgaatggntgtaacacggcttccccaggtggctcccctaatnccacgttcccacaggagccctctcttgagttaccacgccaccacggagaacttgagttcgcttggggagaacaccccacgcgccccttgggagacacttgngagaagacacccgtggtgtttccctgggccccccgagatccacgtggttttggggccactaccaagtggtgtttcttcgcacaagggtgttgtgacacctggaaacattttgttaaaaacccaccccaccctttggggaacgaccatattcttgaatattatcccatctcccccacccatttctttccttggaaaacccatcccagttcaccagcgtattatttgccccagtggagcctgtccatttaatttgaagccacctctggattccagatggacaccattaaattgtcttcctcgattcttccctcgggtgtagagagatttttaaacatatccaatggccatttcaagatttttttggaaaccagcataggcctgtataagtgcgtggtccatagccccagtgacatagccagcatctaataaagagtttcccttgtagaaagttttcaccaaaccttgaataaatccaatctttaaattg

SEQ ID NO: 527288 - DNA, 327 bp, Homo sapiens
ctggagctgatgagctagtatcctctacttgatgaattacgccaagagtctgcctgagtgggcattatcgccgtcaacacctttgctaaggactgtgaggtaccccaaccctcctcatcctgatgccctggcagtgcggaccatgggctgcatccgcgttgacaagatcacagagttcctgtgcgagccactccggaagtgcctgaatgacgaggggccatatctgcgcaagacagcagctgtgtgcgtggccaatctccacgacttcaacgcccagcttgtggaggaccaggacttcctggacacccttaattgacctcatctccg

SEQ ID NO: 527289 - DNA, 206 bp, Homo sapiens
gctgatccgcttagcttaaacaggcattaacgctatctttaaatctgcaagtggcaggttaagcttgtctggtcaacattccagtgtggcaaacaataattaaaaccaatcttattctcttaaattctttggcgcaaccaaaaactcattagtcactcagctatttggggcaccagcacaaacatcacgctttccatctcatacat

SEQ ID NO: 527290 - DNA, 928 bp, Homo sapiens
gggcgcgtcggatcctcctcatgatgatgactgcgccctatcttccctacgctgtcctgtaccaagtgctgaacatcagcttcggaatcactgaggacattcgcacgttccacaatgcatgagttccatgcttgcagtctctgtcgatccatccaacttcgactcttacttattgggagcacaatggcggtatccatggagtcggaaagtgactagcactagtagcgacatagatgcaaggcagtggatgatatcacgctgttaccatagcatgatagaaagtcgcatagtcacgccacctatcgatgaacccatgcatggctgcagcacatggggactgcatgattatgtcaacagcgttgctgcctctgaattcccatgtgaatcgacccaaaatgcactcgacctattgttgcgctcgaaaggccaactagaaaaggagacttctcgtgacccttatggtcgcccgtagagcctccaacagtttacagagaaaaccattgcatacgaggctgttgcttggggctccaagcctagcttgctctcgcgatgtaacccgggagatctggtgggcccccattagaacatatctctctgggatgataactggtgcagggtacttcccaatactcccacctaggaagggctgccttagctctgccgtttaacctaatcccggcagcgtgcctaagacgcacggttacagggtcgggtggctgccgctagcggacacaccctttgacccaaacttcggggggacctttctccctcctagatctccactgggttccgactttagatccagagggctttgatagacctcctcaaggcccagatcagttacaatgcctccttgacatcccctgtgacattggttcctcaacaagaccaaatggtcccaggccccccgcaccaggcacacatggcg

SEQ ID NO: 527291 - DNA, 395 bp, Homo sapiens
ttggatgattagtgacttatcaagacacaggacttgcaaatggcaagtgggaggattgtttgagcccaggaatctgagaccagcctgagcaacatgatgagaccccatctctacaaaaaattaaaacattagctgggtgtggtggcgcatacctgtggttccagctacttgggaggctcaggcaggaggattgcttgagcccagtaggtcgaggctgcagtgagctgtgattgtgccactgcactccagcctgggccacagaacgagacttcatctcagaaaaaaaaaaaaaggttcacccagggcagacaatttgtccgggaagggcagagttaaatttccctgtgactgcagggttggggcgcttttgtcctctgtccggaaagaaggcggcc

SEQ ID NO: 527292 - DNA, 242 bp, Homo sapiens
agtggcggctgcgtgacagcctgcgtacggctctcatcaactccactggggaagaagtgggcatgctgcagctggtgcgctcagtgactgtggttgaggacgactagcattaggatggagattacctgctccatcaccaccacgttatgtcgtagccgccgctgaggccgagcctgcactgtggccacccagccaggtcttggggtgtcagcctctcccacagccatccccgttggttggag

SEQ ID NO: 527293 - DNA, 1074 bp, Homo sapiens
cctgtacaagtcaatgttggggggcaggcacaagctgtgacaggctccatccagccccatcagtgctcaggccagatctgtaacacagcagtagtaatagacccaggaagaccagctcttctactcgcttttctttacgacaacggtataccacttctagcagctgtccgccttcgggatctctgtgccaaacctagactacttgcagactgaacctgacggaacacaaactctggacctgctttgcaattctccataattcagtgtcctgaacttatgatggacagacatctggaccagttcattaatgtgtgccatatatgtgatggcaaaggtcaccacaagaagcatcacgtccttccagcaacattcatgcgtaagcatcaggactcagccgcaggaccggagcccaggtgtatagcacagtgtaaagataaaaggggcacaacgcaaccgagaagcaaatactaggcagaagggcatcagcagaagccgatcaggaatgctcccaacagcaagtaaaaaaaagatcagaaccgagcacgagagtccaggtcccagtcatgagggtccaagcacgcacacttgccaagataccaaaagacccagcaaggggatacatacacaacagcataactcggcacacaggtgccaaaagacgaccatgggaaagaagaggagagaggggcgaacacaaacagaccacacaagaaagagtctaggagtaaaccagcatcacgaacataggccaagaaagtacgcacaaggcacacacgcgcggcaccaccaaagcaaaccacatccaccggaaccaccaggacccacagacaaaaacgagacacaaaacaaacggacaaaatagcaccaaatacacctggacacaaggcaccaccagagaacaaaggatgtgaaacacaaccagaaaacaacccaacaggaagcagcacccctcaaggaaaccacagccacgagcaaccaaccacaccaaacagacaacaccccccacaaagaagcaacacaacacaacccacacacaaccgacacgaacacacaaaaacacagaacaacgccagc

SEQ ID NO: 527294 - DNA, 606 bp, Homo sapiens
  misc_feature (365)..(365): n is a, c, g, or t
  misc_feature (448)..(448): n is a, c, g, or t
  misc_feature (478)..(478): n is a, c, g, or t
tgaaataacatagaccaggagggcgtgggtttaaaagtcacagatggggcaccctcgggccatccagcccaggttttctttagcccctatgatgttcattttgtgttatatcccattaggtgcccatatttaaaaatgggagatttcacataaaattaaaaggtctgcattttcttttttcttttctttttttgttttttgggagaacacgagtctcactcgggtcaccgaggctagaaggtgcaggtggccacgaactctcgggctcgacgtggaacctcgggcctcccgaggttcaaggtaattcgtccgtggcctcagccttcccaagttagcgtgggactacgaggcacggtgccaccacngccacagcataatttgtgggttattttataggcaagagcagtggggttttcaccaacattgtggccaggagtgattctcgaantctcaaccttcgtggatccacccaccttgngtctcccaaaggggcggggattacgggcggtgagccaccgggccaagccaaggtcggcatttttctttagaactcagaagacccaatagtcctagcgccccatcctcgcatgtggagcaagctaaata

SEQ ID NO: 527295 - DNA, 1161 bp, Homo sapiens
tgtgtctcatcaaagatatggtattccgtctcttctaatggtgtcgctttgagcgcgcttttttattttggtctttcgcgtggacacccgtcttgttgtgagtggtagaacccttttcgccaacttgcgtcggatgttgactgtggatctatagactgggttgggggcctctttttgtttcatgcgcctcttgccctgtgaaacattaccactttccagtctgctgtaacccagttgttatactaggtgttctgttgctttagataatctctctgttttgtgtttttaattggtgttgttcttgtgtgaatgtgtcatctttgatttggtgtagcgtacctctgatgtgggattacagttgtccaactcctcattctcggttggttcggtgtttcctcacagggggtcgtttcctccactgtagtgcatatctcactcttatcaaaggtccctatttcacttgtcctttttctgttgattacttttagtgtatagtcattcttaaggttttcgtcatcgccaagtattgtctctatcgagttacactgggggctatgttgtacgcaattctctgagtaagtctccttcccgtgtgtgataccattttctccttcgttataaatatgctcatttttgacaatcacttccggcctttttttgttataacatccttggggtaatggagagcgctggtttttattgacggtcctagttagttagacttggaagtgtctatactcttaaggtacttgctaaataactaccctcagatgctttagagggagcatgttttgctatacattactatattagttaatctctgttatgtgaactgtacctaaattcttacactgcctgtatagctttagtatgacgctgatacactgaaatgaaagatttgatactgtatattgtgttgcgtatgaaaatgagttgtgaaagttgttcgagtacgatattagcgtttagtcacttgtgttgaactaagaaactatgttgtaaagaaatttactagtatatatatgcctttttcctagcctgtttcgttcctgataatgtagtattgttcactgtgttggtgcaatagaacatgggaaaatgcaaagttctgtgtttaaatttcttcaaaaactgatataataaagtgcctggatctatagc

SEQ ID NO: 527296 - DNA, 173 bp, Homo sapiens
acttcgtccttacacctaagcaggtgtctcctctatcttagggcccatcaatctgatcacaacaattatttgatatcagaccccctgtgcataacccaataccgaacgcccctcttcgtctgatccgtcctaatcacagcagtcctacttctcctatctctcccagtgcttca

SEQ ID NO: 527297 - DNA, 400 bp, Homo sapiens
cggtcgaaggtcacgcggaaggtcttgtgatgccggagccgaagatgtcgtcggtgtcgaatggcgtggtcgtgccctgcgagagccgttgtttctcctcgtgctcgaagacgagcgccggcaccttgcccgtcgtctcgtgaatgcgcccgttggcgaattcgtcgcgccaggtgagcgcctgtcggttgagatcgaacagatcacgaaaccgccggccgggccagaaacgctcgcgcacgaagccgattccgcgctcgacgttgggctttccggtggggcgcgccgggcgacacgcggtgatcgcgaagccgcgtaccgaggcgtactggacgaagcgtggatggaacaccggggttgcccggtgctcgaggacgacggtcttcatgttgtcgagcac

SEQ ID NO: 527298 - DNA, 1231 bp, Homo sapiens
  misc_feature (380)..(380): n is a, c, g, or t
aacatatgactaagtcaaatcttaatcgtcaaaacaatataattaagcattatcgctaacatctaaagtgtacgataccctggattcatcttatacatatcatatcctgttaatcattgtaaaattgtccacaaaataacactcctcgatatttccataccgtacactcaaatttacaccaaatcctaccacgaagcatatcatagtataagccgtaggctaataggtgcagatccctcttaatagacgctgggcgacaggtgaatgtagtaaggcgtgtgcagcgtctataggacttaaaggaatgccctttagcagagcttctataccgaccaaggttcacgaccgtagaatctcattaatcccgcgaatagcagagnttgaattgagtccgaaatactctagttcgagatctacttcattacaagggcaaaattaggcccatgggccgaattggtccctatacccgggttaaaccattttgaccttgccaatagacgcgagccacttaacatccaattgctcgaacccattacactttgtgtacacgcccgccccagcgcacattaattaccataaatatgtgcaaaactccacatttaacgctccatttacaccgcatagttatgagcttttacctctaagtcagtgtccaccccatatatattccgtaaatgttttcgcttatacaataggaagaccttagttccccgttcatgggaaaaaagttaccgcctttggacttcccgaccctttatttaccatgtcccccaaaaaggaccccttataaccgcagtttaatattcttaacacaaccattgttccttaaggggtttataaaaggcccgcttctataatagcaccatggtgccaacggtataccacaaatattaataacaatcccaaaaggagaattactttaacgacagtttaaacaatgaaaagcgcacaacattccttgtgaagcacaggaacaaagccgcacaacgtattattatcgcagggggcgcaacctgcgcaccatggagttgtcgctgtgttcctccgcgcaggtttagagttgacaagacctttgttgtcatgggaaagatggacacaggcggcaacgagttcgaccgagatggagtggggagtgactcgtagaggaactggcacaagacatacaagagtgtttgaataacaacatgggggccacacccgacggtggagtcgtcattgggatgctcacaaa

SEQ ID NO: 527299 - DNA, 424 bp, Homo sapiens
caccggcaggtgtactcaagctgctgggcacaagggatcctctgactcagcctcccaaacagctgggattacaggcacatgctacagcaccagttgaggggttctacttttatttgtttatttatttttatttaaactgattttatttatttatttattttgagacaagctcttgctgtgtttcccaggctggtgtgaagtaaggcaatctgggttcactgcagcttggacctcctgggctcaaggggtctgcccacctcagcttcctgagtagcagggatggcaggcacatgccaccacacctggctaatgtttggtgttttttttttggtagagacaggatttggtcatgtggctcaggctagtctttaactcctgagctcagacgatccaccggcgggggcctcccgaagtgcggggatta

SEQ ID NO: 527300 - DNA, 680 bp, Homo sapiens
ctagaggtctttccttatgtatctttagaaatgaaattctctattggaaataggaaaagaaataaactgatattgaaacctaatgagttaacagaacatttgaagggagttttaaaaaggtatcaggaagaaactgatttttttcctatggtataatactgaatcattaagatagtaactttaatcatttgtgcctatagtgcccttattttaggagttcctagttactacaatggacttgaacttggaaaggtaaaacaatacaaaatagcttttaactaaagttgggaatatgagtgcttaaaaaatatacatggatttaccagtagctttagaaggtaaatatacatgactactgaaataaactacaattattttctaaaaagtgagaccaactttggagataaaacaaataaaagaatgaacagaaggcgactctggaaataacggtagtaaagttatataggacatgttgagatgataaccatgaagaggagaatcgaatcattatctgcaagtttcatgtggatggctctaaaagaacaaaccctgcatcctaaaccccttcaattttattattttgaattataatcaagtccaaggagacttggcctattattaacaactttgtatgaagtatttttttcaaccgaattcatatcatcttgaataagaacaag

SEQ ID NO: 527301 - DNA, 849 bp, Homo sapiens
gatatgggatgtatgtattaaatgattggtagtagaagtatgatatgactatatgaatgtatagtacaaagtgaggtgagttcatgagtgtaggaatgattgagtgcaggaccgtatcggtgtgtgtttgaattagtgaatgttggtcatgactaagtaatgattgagatgatcaattgggattagtacttgtgagatgaatgcattgaggttgacgtctttgagagtgcgatggaatgcacgtgtaggtgaacgtaggtttgaatgagtgactgggtgagaccgttaatggtggactttgtgtttgcagtaggattgagtggaaagtggtgagcagacattaaattagtcttggcggtagatgtgcaatgatcttgagcttgatttgcatcagtttggtaattggccctgtgcattagtagtaaggtccgactggaaatcatatttccggttgattccaaatcccaaggcatatattcgagggttgagcaggattttatatcctatctagcatgggggcgggggtcgagacgtaggggtttagtacgactgatatatgtggcaccatgattcgtagatgtcctctgagttgatttgactcagtaaatagtgtgtggtatttgaacattgtgcaatggcgatacagttggtgttgtcttatactattggttatgtgtggtgtttgccatgatatctggggcaagtaggcaagaggaacttgggtgaatgcaatgatacccaactcgagagctgagaggtattgtacttaactggaaaaagctttcgtcttaagatattgcgggtaccatggtaaaaattacctcggtgttaggaattaaagtccactgg

SEQ ID NO: 527302 - DNA, 255 bp, Homo sapiens
gtgcgcatgcagtaggggacgggagcctactcaggtgtcagcactcaggcaagtctgtgcctgcgttcaggcgttctggctggttgcctccatcgggtgatgatagccacggtggggctcagtgtggtttcgaagaagctatcacctatgattagttctgtggctgtgaatgttctcattccggcagctttgtagggcagcacagtcatcgcgaggtccagtttttttccgtgatagtggttcactgcacaacgg

SEQ ID NO: 527303 - DNA, 1012 bp, Homo sapiens
ctcgatattaaaatagaattactctcaactcaccagcaattacaatttctatatctagcatattcaacactattagctcatatacaattataagcaacacaattttcaaaggcatctggttctcaatctctctggcatcatgaacatgcaatttgcccctttctgcccttttcttcaagtactattcttgtaactatattgccactaactatatccaaaacacattctgagcatcactgtgagtaacagccttccagttcgtacccttatgattcacagcatggccctactagttccattaacgcaggtggcataacttcaacgctcacaaactgcctcttaactccgactatcacatccacagcttctaaacttcgcattcaacaggacaaatgagacatctacaactacggtccctgtcgtttcacactataatcggtcaacaaacacatattccctagtaggcatcctatcatcagcacgcatcaaataccaaagtcagcaaccttgggtacgcccaactaacttacggctcatcaattattccgaaacgggctgctgtaaccatgtcaactgataactctctcctccaatgcgaccaggccatgctactcatctaataacagaaacattgctaacattagtccaaacttcaactccagtatccaccatatgcagatatcacgccacacgaatcgataaccatctggctccaatttcacccggaacttttcatcactgtgcgcccgtacgtaacatcattcgcacttcataacataccccgtgtggattacacccctccatgattccgtaaaaattaaaaaggccagtagcaggaaagcgccgtatacacgtaagcaaccttccgcgaaccatgctataaaggacaacacgtcctaagccaccagttaacgtgactcgccccacgctcacacaaccccacaatgcctagacaaaatacccattctctgaacacacatcgacaccagcacagtcacctaaagcagcgcac

SEQ ID NO: 527304 - DNA, 128 bp, Homo sapiens
ggcgatctacgatccttcccgtacgccaatgctgagcgacaaagtaaaggtgaaaagaacacttcccaatcattcagctacaaccagactagaagctccccaaggactggctattctaaccaacacag

SEQ ID NO: 527305 - DNA, 1751 bp, Homo sapiens
  misc_feature (836)..(836): n is a, c, g, or t
  misc_feature (924)..(924): n is a, c, g, or t
tttactgtcgcttcgtgggatgagtatagatagtcctcgtatctatttctttatctgttcttcttgtatagcgtacttgatctgctatcctgctctgttgttgttccttcctcccttttttggagtagttggtctcgcccgtccccctcctcctctgatttcggttcgtccggatattcctccgtgttgggtttctcacaccaacatcatctcttgcgcgccccaaagaggggtgggtgccgccgccgccccccccgaaggagatgttttctgtcgccaccttcccctccctcgtggggtttctttcttcgaaggagtggggggccgccctcccgcccgccacctactctttcgaattacgcttctgcgctcccccccctcggggatggttgtctgttctcgacccccccttctgggtggggggccgcccttttttttgttttgtttcatactcgcccccctcgttcttgctttcttagtgacgcccgcgtgtgttgtgttgagccacacccaccggtgggggcccacaaccacgacggggggttgctcgttgttttaggtcatttagactcacgtcgttgtttgtgggaaggcccccccgtccccgctgacatgtgtttgatgattgctgtgggcggcgcctcttctttttggaaggaagaaggcagcacctcgttgttgtgtgcgccggcccacgcagcaagatgtaccaccctgctggtcgttggttctcatccccccgcaccacgaggtgcttccttcctacctacttggagtcagaggcacgcagaaagaggcggcggaggacacacacacaagctagccctgtctgtatngaggagaatactacgtcgttggaagaagtggatgaatagccctcctcgtcccacagagggattcctccctactaccagaagaggaggnttgtcgcccgcgccgaggaaaattcttctttcctcctctcttcacgcggagatatttctcccagcagagatacacctcacgcagccctctgtcttgatattgaagcatctcgcgcgagagagcagccggcggcgcgcgtgtagatatgcccacacatcgggagagagtgtggccgcaccacatacacacattgtgtgagaaaaaaacaatagtgtgagaactcacacctctacacatattctctgtgagacactcttgcgacacacacacactctggtcgcacacctgacgacacacacaatagtgagacgctcccaacactgtgtgtgtgtgtgagacatctctctctgtgagagacgacacacactctttctctctctgagatagtgagacgacacacgggtgatatatacgcgcactctctcacaagataattgtgtgggtgacgacacacaccggggacgccacacaccttgtcgtccacacagaattggagagagcgcgccccgagaatcttgtgccttgtgcggagaataattttctttgagacacacagcacacaccccctcgggagagacacacagctgagatatatatagtagaatagtctatatagccactccgcggggtataatatttctcccacatatagcccgcgtcggggtggagactcttccctcggtgcacccacacgcgcacgtggcacagacactggttgggtggtttctctcttacctcttttcgtataaattgtaccccaacactccaccttaagttttttgaatttgtacccttcccttccaaataaaggaaatttgggaccccca

SEQ ID NO: 527306 - DNA, 270 bp, Homo sapiens
cccccgggggggggggggggggggggcccccagggtcccttttttttttttcccccccccttttaaggggggggttttcggggggcccccccaattttggggccccccccccccccttttttttagggggggcccccccccgggggggccgggggggggggccggggttttttttttctttttggcgggggggggggggtttttttttgttgttttttcccccccccctttcgggccccccccccattaacccttttttttgggggggga

SEQ ID NO: 527307 - DNA, 1090 bp, Homo sapiens
gcttggtttcaggtgcatcggatgctcatgttcaccacaactgtcctcacctgcattgcttttgttatgccgtttatacacaggagctagtgatatggatgacttataccatacctcggggtagtgatgacttgtgacttcgaggctctctgcgcacggacatcgtttaccagtgagacccgaacgaaggccagactgtgtacactggagatcagtctgcaggctatgccaacaaggcatgctacacactaatatgccgggcgacgcgaatgcttccagcgaggtgggtcatcaacaggactgaaatctgtccctgattcatagtgtagcaccctattgccattgacccaggactacgacagccatcgacatgattcgacgactgattgttgcactgctcgatacatgcctatgatcgcgattctctcgcgaacacgcatgaacagattggattgatgtgccggtaaatctaaagatccatctcatatccaagaacctgcagtgtacaaacacgatgaggacttcgcacataccaaatagggacacggagataggcacacaaaatagttgaggggacacatgattaatagataatcattcataatcacaatactgcaatcaggggccatcctattcacaaaagtaaaacaccatgggcgtccaacacggacaagtgaccacagcatatcaaaaacaaaagaggaccggtaagccatgtcctggactgcctaggcataagaactctggtgaaacctacccagacctcctcgcggcaatctatactgctagcaatcgtccatatcggtcccagcacacctacaccactggtgtatgaccgaaatgacaacattcaaccaatcatatacccccatatgagattactgtaacattcagaagtgattgctcttagacacagccctcacattgctgccaatcgcaaagacgtcataaacattacagcgccgaccaacatgccctgcaccaactccaaatcacctacacataccagatctcaattcaccatatccgttaacttagatcacatccacacctcaacccatatctcgtcacaacacacaacgtctcacag

SEQ ID NO: 527308 - DNA, 880 bp, Homo sapiens
ccccctcgagcgcgagcgagcgagcgacgtgacgggcgaaggagagcccacctgttgcacttttactatcttcccgcgatggttccctcgtaatcattcgcttaacactttgtccgcaaacttttggtgtctaaaaccttttgtcttaaaagggttttctaaaatctctcgctgcttacggtcctggcgtaattacacctggcttctaaaacttaacccgccttgggggataacttacgcccactgtgaatagggcgcccacccgtgggtgaatgcttccaccaacaaacatggctgtgattagaactttccccccccctggaacttcttttaacaggcccgttggtagtttttacaaagcggcccccgcccactttcttttcccgaccctttttgcaattgcgccacctccccataagctccagaaactttgcgcccacagcccacgtgtcgtgtgtccaagctacccgcaaatcccatattgtcagtccccatgggacgcttgtaaaatctcaccttcatagccttatttagttttgctaatgaaaatcttctttttcagaggccccccccccttatcatttctttcccacatacacactcttaccgcgtttttctagattacttagttctttcaaagagattctcaagataaagagagttaatgtcataaacctacctggcccttttggcctatcagatgaacacacatttggagaaagtaggacaactccagaatggattttacgaaccctgtagaagaaagtctactctggtggatatttcgtgcaatttttaccccccaatactgtttttcggggacccttattaattttttccgttttccttttggaaaaatacacaaaaacccaaaaagaca

SEQ ID NO: 527309 - DNA, 478 bp, Homo sapiens
ggggagccccatggggtaaggggatccccttccgggaaaaactgttttttttaaaacaggggtgggccccaattaaaagggggtttctgccaacccccccaaaggttgggatttagcccatcccctaaaaggcccttattattcaagaaaacccatttttttcccctgggggcgggggactttttttgagggatggggtttttcaaccaagggggggccttttcccgggaagggggaaaatttggggcccccttttcagggtttggaaaaaaatgggttttttccagggggaaaggggcaaagggttttatttttggtttaaaaaatcaaaaacggtcccaaaaaaaaaaggaaaaattttttggtttaaaaaaaaaaaaggggaaccccatgggaaattttttttttttatttattttccggaaggtgggccgaagataaaatggtaaaaaccaagattaaaaaggcctggttctga

SEQ ID NO: 527310 - DNA, 1133 bp, Homo sapiens
cggagagtgtgaccacacatgacaccgtcctcgactcctcttcttcctcctctgtgcttacccccagggatagtcaggcccggaggaactctctaggtggtagcaaggtggtagagagcggagaatagacgcctgttgcatgctaggtgccatccaagggggaaccctactacgtatggccctcgaggtcatggcagtctagagcctgggtctcagtggagtcacccagactataaaatcgctcttcgttataaacatcagtccatgtgtgggcttgtcccagggtccttaggagtacattcccgacagttggatgtgctcaccatggaccgattcctggtcctttttcgattcctgtccacactgtttctcccttctcaactggaattgtgcgtggcgctttcgtaccgtattggtcctacgcctcgggggggccctccaccagcgtcgtacgtaacgtggcctcgtgccaagctcttcgtgcattgcgtagccacgatccacatcgtcgcgcatgggcgccaggctgcggtggacgcattgtatccccgtgttgggtaactcgtctctttggcggaccataaggttgggtccctaggggtcttggtcgtgggcgtcgagagggagacctatgagtaccttcaaggcacgagggcccccctaggctactccccctatacacggttaatagggctttcaattgggacgccccccccaagaggcgttgtgtcattgctagtcgcgaagcgccaacacaagataccggccctcgttgccaagtagttcttcgagcgaagggtggggcacgtaatgcgccgtcctcggttgggtacgtgcgcccaatacggtaggggagggatcgaggttccctctgagaaaaccctagataagctcttctatcccagaacgcaggggcaaacactttcatactctatggtgcttcgcgcccttggggttccctcaacaagttaactcgggtgacattgatccgtctgggttggaagtgggattataaccgacgccacattgaagaattacctgggatcgttagcccacgagggggatcgcccgccgccttccatgacaccttggggaaaaaccccacattagggttggtcacactccacacataa

SEQ ID NO: 527311 - DNA, 151 bp, Homo sapiens
  misc_feature (58)..(59): n is a, c, g, or t
  misc_feature (104)..(105): n is a, c, g, or t
  misc_feature (146)..(147): n is a, c, g, or t
aatggaaggaccgtcctttaggaggatgactttaggaactatgaatgcgagactaagnnatcgatgatgcatactctagtcagaagtagtcatagccagaattnnggaatccagaaaggaacaaataaaatttagactctgacttnnggat

SEQ ID NO: 527312 - DNA, 481 bp, Homo sapiens
  misc_feature (157)..(157): n is a, c, g, or t
  misc_feature (367)..(367): n is a, c, g, or t
  misc_feature (418)..(418): n is a, c, g, or t
  misc_feature (480)..(480): n is a, c, g, or t
aaataaatattgtaaatttttaatagtgactttaggaagcaacataataaatttgcttcataacattgcaatatgagagcacatactcatttgggttaagaaatttaggaaaagtaaagtttcctagcataaattcttctttttaaaaaaataatanttttatttgcctttgacagagttttttatggtgctgtcctgtcttaaacctattatgctgagctcaatttgaaccttattttttttttgaatacagaaacatcattatgaatacaaattgttggactttgctactatacatgagccctcagaaattgcagaggtgtatacagtattttaccactaaatagcccaggattgggccattttngtatctttctgtgtacccgcatttgctgccgctttggaatttgttgtgggngaatcctttggccgcatttttacatttcactcgttgaagtgtgagcctcagggtgtttccant

SEQ ID NO: 527313 - DNA, 145 bp, Homo sapiens
accgcaagaggcccttggcttatggaaaagcagcccgcactatggggtggagagggtcaaacgtgtggcagtggcttactggggttaagaagcaacagtcccaggggctcagaggctggggcggcctggtatggccagtagtggg

SEQ ID NO: 527314 - DNA, 112 bp, Homo sapiens
  misc_feature (1)..(1): n is a, c, g, or t
nacaccgaactagttcgaggttgccggttgcactgtccggtggttggactcttgcctctcggcctgcggccagctctccccggcacgcgccccaaaggctgctcagaccgcc

SEQ ID NO: 527315 - DNA, 416 bp, Homo sapiens
gacagtgcctaagacagaaattcgggaaaaactagcccaaatggaccagacccccccggatgtcatctttgtatttggattcagaactccttttggtggtggccaaaccactggctttggcatgatttatgattccctgggttatgccaagaaaaatgaaccccaacatagccttgccagacatggcctgtattaaaaaaaaaagacctccagaaagccacgaaagggacgccagaaccgaattaaaaaagtccggggggctgccaaggcccatgttggggctggccaaaaaaagtgagctggagattgggtccccccccaaggagtaaaggggctgccattatgttagctgtggcccctgtgggttttttgccagaacctttataaactaccaccttcctgtggaaaaaaaaaaa

SEQ ID NO: 527316 - DNA, 276 bp, Homo sapiens
ctttcaggctcgtgctatgctagcgccgtcctcgtcatcccttcagtcgccatcatgattatcgtaccgggactcatcaggcacgatgagatgttcgtccgacatctactagatccgggagatcgcggacgggtcgtgactggaagtggccgggcggatggtcagtaggacagaaggtcacattgatgactcgctcattggtggaaatgcctccgctgaaggccccgagggcgaaggtaccgaaagcacagtaatcactggtgtcgatattgtcat

SEQ ID NO: 527317 - DNA, 166 bp, Homo sapiens
agaggattacttaagcactgcaatgtcctgctaagtaggtgagcggtgggccccatggctggcccccgtcgtcgacaaggtcatacgggcataaactcgacccggacctagataggtgacggtgtctagggtgactataccttccccgaccagtaggccgtgaggt

SEQ ID NO: 527318 - DNA, 402 bp, Homo sapiens
gcttttgaagctctctttttagacaaagcagcttcttcagtaatatcctcttcttctaagtatacactcagtcttacagggaattcagaacttactatgaaactatcccctgccaatttgatatcacattcgttatcttcaagatgtgtggcatcctcatcctctgctgttgactcctcaataggagaaatggatccatcatcatccaaaaatttgtatctacgactgtgaaaatctttatttttttagtcttcacctactttcatttggttcaatgatactttacaggggcgatcatacttaagttttttattagagtcaaaaaaatccacttggggcagtttgctcaaacgttaaaatttttctccaaggtccggtgttttaatactttgatttctaaaa

SEQ ID NO: 527319 - DNA, 170 bp, Homo sapiens
  misc_feature (122)..(122): n is a, c, g, or t
accgggcagagagcgagactccacctcaaaaaaaaaaagggggtaatcaacacgcagggctcacgtcatggttgcacacgaaggccccagcaagtggtagttcctggggggtggagctccgngcgacccccgcggttcctgggacaggctccggctttcctcctggactg

SEQ ID NO: 527320 - DNA, 315 bp, Homo sapiens
gaagctctattcattttttaaaaaataaactctttttttggaataattttagactttcagaaaagttgcagaatacagagaatttccatacaccattcccccaacctcttctaatgttaatatcctacacaacaatggtacatttgtccatactaagaaattcacattggtatgttttaattacctaaaccacaaactttatttggatatcaccagtttttccactagtgtcctttttctgttccagagttcaatccagaataccacattgcatttagtattaactcattttttctgctgtatggattacactac

SEQ ID NO: 527321 - DNA, 267 bp, Homo sapiens
accgtcttagaagaggcaattttagcgcagaagaagggctctgtataactgccccagatgggaacgaaatgccttgggggtctgatttcagcgaggccaattttagtgcagaagaagggctctgtaataactgccccagatgggaatgaaatgccttgggggtcctgatttcagcgaggccaattttagcgcagaagaagggctctgtaataactgccccagatttgagtgaaatgccttgggggtcctgtcttgggaccaagactg

SEQ ID NO: 527322 - DNA, 256 bp, Homo sapiens
ggatcccccaccagttgcacctgtcggtcatgccaattcacagtccttcagcagcaaagccaggcggagtaccatcagccccagtcaggcgctcaaacagcacggtatatataccacggcgggtagtgttgtaagtggcctgacgcagcaggccagccgacagcccagtgtaaatgcccctcaggccttctgccttcaggcactactgcctgacggcgatggttcatctgcctgtttgtactctcgagctcttggc

SEQ ID NO: 527323 - DNA, 314 bp, Homo sapiens
taaaaaaaaaaagggaattttgacaaaagggggattcccttaggtggttgggggattggattgaatgaagtctgcggcttaaggaatacttgaggattcctgccaacccatcgaagcttgggagagggaggatggaacaactccctcgggagcctccaagaggaaccaaccccactgatgctttgatttgggatttccggcctgaactgtaggaaaataaatttctgttcttttaagccatttttaccagtttgtggtaacttgttacagcagctgcaggaaattaataaattccaaatgttgaaaatttaaaa

SEQ ID NO: 527324 - DNA, 448 bp, Homo sapiens
agaacccaaacatagggacattacttgaacagttacctcgtggaagatcgagctcgctgggttgtatatggaatacttgactgaaggctcctagacagatatggtgacagaaacttgcatggatgaagagccaaattgcagctgtgtgccgtgcgtgtctgcaggctctggagtacttgcattcgaaccaggtcattcacagagacatcaagagtgacaatattctgtaggaaatggatggctctgtcaagctaactgactttggattctgtgcacagataaccccagagcagagcaaacggagcaccatagataggaaccccatactggatggcaccagaggttgtgacacgaaaggcctatgggcccaaggttgacatctgatccctgagcatcatggccatcgaaatgattgaaggggagcctccatacctcaatgaaaaccctc

SEQ ID NO: 527325 - DNA, 841 bp, Homo sapiens
  misc_feature (343)..(343): n is a, c, g, or t
tcaaccaaacaagttttttacttggagcgcctactatgtgccaggcccggttctaaccccccccagaaaaaaaaaacaaaaaccaaaatagaggcagcaaacaacaattctcatgagggaagaggaaagggggacagattagaagttacaaacgggactaaggagaactgaaaacgccagtgaggatgagtgggggcctcgtgccttttaggccctcctctctttcagggccctcctctcacccagaaactcctctcctctccctcttatcatgcgaggtaggctctcctgtgtgactcacgtggcgtgacatcctctccagacagacacgaagagtctcgtntccaagtgtgtgtgccctcctcgagcaccctctgcggtgtgaacactctcccaatccctgcgtctcacatgtgcctctactcgacctgtgtgtgttcacacaagtgtggtgagagggaagagagaccctatctcgctggggagagcaacaaatgtggcgcgaaagagatgaaaactgtggctcatccaagaagaatgtggcgcgcctatgtgcaaaaggagtcacccactgtgggaatgtgcgctgaggtggaagcctaatatttgtggccacaaaaatttaagcataagtggtgttgagactcatgcggcacaaattacatctatagaaaggcggccccaactacaatggggatgtggagacgtatttggtcacacacacagaacaggagggatttgtgaacataatggagaacattatgtagtgtgtgagggagaactcccccattacacccaaacaaaaaattgtcaactccataaattgaagtacacataaggg

SEQ ID NO: 527326 - DNA, 460 bp, Homo sapiens
  misc_feature (1)..(1): n is a, c, g, or t
ntgcaggatattttaaacttttttagggaaacacagagtcatctgtcagaatactaatacgtggtttgaccctaactaaataaaaggaattcttggccgggcacggtggctcacgcctgtaatcccagcactttgggaggccggggcgagtggatcacctgaggtcaggagttcgagaccagcctggccaacatgatgaaaccccgtatctaccaaaaatacaaaaatgggctggacatggtggcgggcacctgtaatcccaactactagggaggctgaggtaggagaatcacttgaacccgggaggcggaggttgcagtgagccaagatcgtgccactgcactccagccggggcaacaagagcaaaactccgtctcaaaaaaaaaaggaaaaaaatttgaaaagaaatcctggagtattgctttggcccggggtcacagtcccaggagagggtaccgag

SEQ ID NO: 527327 - DNA, 996 bp, Homo sapiens
gaagcgcccactcgggccgggactttcggaactcaacttgagggaatatctctatcatcggccagtgggctgtgcaccggcccttgaaaacccggccccacggcaattcgcgatagggccaggacttcaggatgtgagacctcaacacgccaccggggatgggcatgcccgagccgggcctatcagtcacggtggccaccaccatgaccaggcgccaacaaaggagctcacattcctgctacttctcacggcgccgcacccgcctgcggcagcaccgtggagagggggccgcggatactggagtggaagagcccccctccatgcgcctgaaggcccgacccgagcagccctaggcttttccgtgcttactgcagcgccttctccttcgtaccctccggagctgcaacttcggttcctgcggaatgggctggccgatggcaccggccagggtgacttcggccccaacagtgacggatccttccacgcctctgtcgtcactaacagtacaaaagtggcgatagagcaccactactgctcgcattgtgcagacacgtggggctggcgcagccctctcaagggtggagctggaatctccagccaagtcctccgtgcttcgtgatgggaatcgtcatcggtgtcttgctactcactgcagcggctgtaggaggagctctgttgtggagaaggatgaggagtgggctgccagccccttggatctcccttcgtggagacgacaccggggtcctcctgcccacgccaggggaggcccaggatgctgatttgaaggaatgtaaatgtgattccagccaccgaccactgagccatcacgccattcacgacggtgcctaaaagacgaatgtagttcaggcccctttcagtgactgggagacgtacttggaacacctggcatttgctgagcctagagaaggggattatgggctgtagttgtccttccctctggagccccgtcgtagtgatacgccgcagtttccccac

SEQ ID NO: 527328 - DNA, 136 bp, Homo sapiens
gctcgatcagtctggcccccacatctgcgacgggcactttgacacagtggccatgcttcgcggggcgatgttcgtgttcaagggccgctggttctggcgagtccggcacatccgcgtcctggacaactatcccctg

SEQ ID NO: 527329 - DNA, 595 bp, Homo sapiens
cactatcgccaggtggaagtggaggtatggcacttgaagagtgcttgtagtcttgcctgtagaagtttgtctgttcggcctcccccgcatcagtctgcgcgatgtcagaactgacacagggaatgagcttgccaaaagccttcagtaacaaagatgtttgccgcaataccaaccaccaacccaagcaccatgcgaatgagcattgtcatatcatacggaccgttcagcttgtcgccggcggatagaacatgcgaaatccccagcaacccgttgagctctgatgggtacccaaacacgcagattataaaaatgccccagaatgcgaggaggccgagccattttcttgcttttgacatgaacggaggaaaagtcactttgtttctccaatgaggacgaattgctttcgacgacccggatgattgctgatcgaaccgtcgatcggattgaagctctacctgccaccggtaattgtgagcgctccctgggtaacgccagcccgaacctacgatcaacgtgacgccttcgcttgtgtcctcgtacacacgacacgacagttccgctacgtcaccacctggttgagagatcgcagttcctt

SEQ ID NO: 527330 - DNA, 994 bp, Homo sapiens
tgcccctcatttacataaatattatagctatgccagtttaccatctcactttctaggaatactagttatatcgctcatcatcctcatactcctccctactattggcctagaagtgaactaatagctactcgcctggttcatctatacgtccatctctcattaatcccttcaatcatgccgactcgcctcttagccgaatattggtgccttaattgcctatactgactcattttaccgatctagctacccaaactgcgtgcgccatatgcctcttactcagtctctaatctccaaacactataatggcctaagactaactgtagctatcaacgctaaaacctacttccaacttgctaacataccttaagttcgctcccaatcaacttactcagttactactcatcgtgatcattgaccttttcctaaagacaacatcattaatctggaactcaggcacagaccagccacacagccactaattattgagcagtcactcctcgccatacttaatctttatcttaacgctagaatcgacacgaactaacacttatcttagcactgttcccccaaaagacatttcgtcccctccagtacaccctcgcgtagtcacgacccccctctcactaactaagctaacacatcagctagcagctcgctttaggccactacaacaagtccattgcgccaaaggcccccctatgccgcacattctattcacctagtcgcataggcatctcatcaaccgaacaaacacagaacttcctcaaatctttctctctgacattaaccttacaacattctgccccactaacatcacaacattctacccttatgaaattgtaacttgcaaaccattgttccaggcattggcactaccaaggaacacctaacatcgtgcccacatgcatttcatcctacttaagtaacctcgtacatctcccgggaaaacacacacgctatcgtctgattgccccccccaagcccttgtgcttag

SEQ ID NO: 527331 - DNA, 83 bp, Homo sapiens
  misc_feature (81)..(81): n is a, c, g, or t
aagctgtggtttggggaaagctgtcttttttttcttcctttatactacagctttggtgggggagaagggggtgggtgctgntt

SEQ ID NO: 527332 - DNA, 407 bp, Homo sapiens
  misc_feature (15)..(15): n is a, c, g, or t
  misc_feature (77)..(77): n is a, c, g, or t
  misc_feature (87)..(87): n is a, c, g, or t
  misc_feature (150)..(150): n is a, c, g, or t
  misc_feature (158)..(158): n is a, c, g, or t
  misc_feature (182)..(182): n is a, c, g, or t
  misc_feature (202)..(202): n is a, c, g, or t
  misc_feature (288)..(288): n is a, c, g, or t
  misc_feature (290)..(290): n is a, c, g, or t
  misc_feature (304)..(304): n is a, c, g, or t
  misc_feature (316)..(316): n is a, c, g, or t
  misc_feature (320)..(320): n is a, c, g, or t
  misc_feature (327)..(327): n is a, c, g, or t
  misc_feature (329)..(329): n is a, c, g, or t
  misc_feature (338)..(338): n is a, c, g, or t
  misc_feature (397)..(397): n is a, c, g, or t
ttaagagtctttccntgatttttattaaactatgcgagcctcacctgtgctgctctagaggttcctcatatgcaaancacgaaatanggggcattcccctggctggtccccatgttgttaagtgttctccccccccccaccctacccccngcttcttnatgaagcaggcctccatcctcctntcttgggaggttgtgaatcnttcgcagcgagatgtctgtcttctagcaccacccctcgtatttcctctacataacaggtcttcacgctggcattctaggaaccccntntcctactgagctgngaatctatgctnagcntataagncnatgactganagggaaaaaaatttttttaattacagctcatttcgtttggtgcatttcaaggtgcaatncttttctctc

SEQ ID NO: 527333 - DNA, 272 bp, Homo sapiens
gcgaacagtcgcggatagctgattataaatgcgccagtagaaattactggggatgccccgatataaccgagagtacagagcagtcatggcccagtaggcaatgcagatgacgcggcggacaacggtgaccagtggctagaacatggtagacatcatctgtcccacagccctgacagggagacaaagctgttaaccggcaccggcccatctgtccatcttctcaaggggctgaccccggccgagcgcagtggctcacgcctgtaatcccagca

SEQ ID NO: 527334 - DNA, 256 bp, Homo sapiens
ttaaagtgagtagcccctgtagtataggtggcgcaaaccagtagagcgagtctcgggcggcatgttgactctgtcgtagtagatgtagcgcagagtggactcgaaggcctgcttgtgggaccatctccccgatgagatgttcacctgcccatcttcgggcatgaaggacccggaactatggcttcaaatgtacgctggagcggactggcatggaatagcctatgttgggcttggcctgtggaatgccctttttaat

SEQ ID NO: 527335 - DNA, 820 bp, Homo sapiens
ggtggtgtgtgtttctccaccatgaagggtagatttccatctactttggggtatccctgagctgaggacataccgcagaaggggggagaaaatctagcgagaacacatgtgctatgggaagtgtgcaagatgcttcggacattctctggtggggttggccatcctgtgcatccgcggctaatatttggcttgactttcccaatggtgaagaaaagtatgcctccgaaaacatctcgaggcgttcgagtggttctcatactggctatccgtaggaggtggcctgttgatgctgctgccagcattttgtcttcatggggctgggagacagtgatgactgctgtgatgatgtgtggcatgacaaactgtggcaaactgatgtgccagatgctttctttcatgtatcggctgcgtctcattggaattgcaggatctcggctagtgtgtcatggtgggagcccttggttagcaagaagggaccactatgtcttgatcccctcgggcagtggaactagacctttgcatgaagagagggtccaggtacgcttctggataaccttgcacgattggtactgaagttggttgggaccgaaagcacatttgggggtagtggaatggtatctctggtaatctattggtacttggtcctgtggtgggaatttgaatccatcttgcgtggtattcaagtaataaatggcagtgttggaaggcatatgtgggtgaggagggccacacaccaggaatatgatggtaaagaaaacgcggggggggaggcaaattttcttttcctggacttaattttactgtttcttggacattttag

SEQ ID NO: 527336 - DNA, 124 bp, Homo sapiens
cacttatacattcatttgactattctgacacctgtaataatttcacagagaactgccagatcctgtgaactgctgggggccatcaagcttcattgatccaaactcgcagcaaggaagggaggag

SEQ ID NO: 527337 - DNA, 100 bp, Homo sapiens
aggtgattatctgaaccatccaggccaaataagcgccggtatgcccctgtattggataatcacctaagcagtgaagccagctgaagaaaagagtgcttgg

SEQ ID NO: 527338 - DNA, 432 bp, Homo sapiens
aggcaataagaattagaataatagcgggtaggattgttcaaattgtttctacttcttgggcatccattgtgctagtgtgtgtcagttttgttgttagtataagtgaaatgatatataacactaaagagctgattaagaatacaattattaaggtgtgatcgtgaaagtgtaggagttcttctatgatgggtgaagtggcgtcttggaagcctagttggaaagggtaagccatagaggcatatagggctttcacctataatataacttcgacaaagttatgtaatattttactaatacctcgattatcgagaaagacatagtggttatgacgttggcttgaaaccagtgggagagggttcgattccttcctttcttatgcttattttaggttgatatatgtgggtcataaagggtgcgtgcgtaatccgggtt

SEQ ID NO: 527339 - DNA, 143 bp, Homo sapiens
cgggcttctgggctcacaagcatcctagcgtgattatgctttcctagtagaacagagactgatttgtgagatgaagatggggacaccagattgatttcatcaccttcaaaacaagactacaagatggaagtttagaagtaatg

SEQ ID NO: 527340 - DNA, 627 bp, Homo sapiens
cagcaaaggtcagaaaacatatgctccatcattcatctgggtggaaatgtggccactgcaggagatgccacctgagttaatgaagccggaccttttcacatacccctgtgaaatgtcactgatttctcaatcaacgagactcaattcctattcatgactgactctgaaattcatttcttcgcagagaatactgtgggggtgcttcatgagggatttactggtatgaaatgaataccacaaaattaatttataataatagctaagataaatattttacaaggacatgaggaaaaataaaaatgactaatgctcttacaaagggaagtaattatatcaataatgtatatatattagtagacattttgataagaaattaagagaaatctacttcagtaacattcattcatttttctaacatgcatttattgagtacccactactatgtgcatagcattgcaatatagtcctggaagtagacagtgcagaacctttcaatctgtagatggtgtttaatgacaaaagactatacaaagtccatctgcagttcctagtttaaagtagagctttacctgtcatgtgcatcagcaagaatcataggcacttttaaataaaggtttaaagttttgg

SEQ ID NO: 527341 - DNA, 1040 bp, Homo sapiens
agcgactggaggtggagggtgggaagagaagggagtcagctctgacagcttacaaactgggaagttctgtgcatctccagggattccagagttgaagatctggttgttggaagctgggcgcccagtgctttttttttttttttttttaagcccaaatgccgtcaggaacccacgtgaacaagggtgaactcgggtgggtggtctcggtgtggccaaggctgagtttgaacgcctcaggccaaaccccaagtttgaaggggagcattgggtggctttatataatctccaagtgatgcaatgatgatcccagcttacaggagttctcagcagggtgcttttatatatacctgatgaagagctaaggcctcactttgtggaaatagaataatattattattaatttaaagtgcattataagtggtggtgtttaaataagtgatacgtttatattcttctccccgcgggtgtgacgtggtggcattactttattaaaaacagaagtttaaagaaattttcaagaacaatctcaatagtgttccccattaagagcgcagctatttttacactttatttcccaacattttaacagaggggctgttaagagccagtgggccagaattgagcgtctttatatttctctcaaagagtgcgcgtgttcctttaacactcaaaaattaagcggcgctttacctatttaaaagaaacaaaaaaaaaaagaacacaaaaacaacaaaaaaaaaaaaaacaaaacacaaaacacagaacatcaccagagacgagaaagacacaaaaaagacaacaacaacttctcacggaacaggggagagctgagaaccgcgacgcaaaagaggacgggccagagacaccacacgaaagggggggggggggcaggggaagaaacaaagtatgtggggccccccaaataagagggggggggaaaacaccacacaggaagaggggggggaagaaaaagcgggacgaaaagagagtgtacccccgcgtgaagaaaaagtgtttgcgcgcggacagaatctccccaa

SEQ ID NO: 527342 - DNA, 908 bp, Homo sapiens
gatctttctcgcgcccacattggcggtctcctccatcttccccgtagttgcctccttctctggctgcctgggtggacgcacatgggccggaagcggctcatcactgattcctacccggttgtgaagaggagggaggggccgttgggcacagaagggggagctggcacccgagctaggggaggagccccagccccgcgacaaggaggaagcggatctggagctgctgaggcagtttgacctgggctggcagtacgggccctgcaccgggatcacgcggttgctagccgctggtgtcggtgccaagcagatgtggcttgaggtagacctccccctagaggtgtggcacggtgctgaagactctacccggagacctcacgcattccgaggtggtcagtcttctggcatctctatcccctatgaggcacgcacgtaaagacctcctggccttagctctctgtgtctcacgcaaccaagaaccatcagtgacgagaagctgagagcccattgctcctgcttcagctcagcccgggctgcggaggaacccttggcaggcagaggctgcacggtgtctacgaggccgttcaactctgtccgatctaaccagtggctccagtagtccccggaggagctgcgcgtgctgagagcgtgagtgtctggctggattggaccagtggtcactgcgggactacggccctggtgcatcgcttttcctattgcctgctgcctgtcttccctggaccctatgattctgggcacggttcgggcccgctccgctgtgggcggcgttgtccctcgcgggggcaggatgcgcgttccccctgcgggccgggcatcttggcaccccggctgggcgtgcgcccacacgcccagggggtcccctctctggttctttcctgccgactttggcg

SEQ ID NO: 527343 - DNA, 2135 bp, Homo sapiens
  misc_feature (973)..(973): n is a, c, g, or t
  misc_feature (1876)..(1876): n is a, c, g, or t
  misc_feature (1908)..(1908): n is a, c, g, or t
ttagggcccgccggccgtgttttttttcccggcccttagaataccttttagggaaaagtgccccaggagcgttccctgcaccttcaatgtcgaatgaccttcctgtttcggaaagtgtgcagtttttctaagtcacgccatgctagggaataaacacgttggaataggccacctaccagacccacattaggcggcacctactagaaaaatagattaaatcgttatcctggcaatgagtcctaatacacttgatcattgctgtgaattttaaaaggtgtagcaggccgggcgcggtgagtcaccgcgccaggcccgatcataaacacttttaaagtgaagaggctttccgcttcctcaacataaggagtaaatctttaatgctgcttctaggaaaaaaagtacaagaaaagcaagacttcctccttgccttctctttaaaaagcaacagccgatgaacacgtgttggagcgctctcgccttgacagaattagagatcttcagaatcacttggcgtggtggtcgaagcgtctagccctagctcattagggtgccacagtttctcggcccacaagtcagcttttaaccacttttctccgcaaaagaccggaccggtcttcatgcgtcaactaaagcaagcgtctggtcccgtgtgtgaaacgtgtaagttcatggcatcagggaatacccatcgcgcataccgtaatagaagagggcgaggttcctcacctaacccataatgctcagctcgcctttccggaagcaaggactatcaccccgacaataccttcatccgggcggaagcgtctcaccctgagtctgatttggcagtgacgaagcgaggtattgtgggactttgtccgtctcccagtacgcatgtgcctcagccggcctctcccggctcctggggccacgtccgggcggtggcgccgtcgagagatgcacgtcagcgaaactggccaatcccctgcagcgnaagcgcagtggctcgggcgcaccggaagcgcagggggatggggcggcggtgacgcgattctgtccgcgttggaggggccgggccgctgctggagtcgccgcggccgccgcgtgacgtggcacagccagagcctaaaggctagagccggagctgccgcgccagtcgcctagcagtttgcctgggagcttgaaaggagaaagcacggggtcgccccaaaccccttctgcttctgcccatcacaagtgccactaccgccatgggcctcactatctcctccctcttctcccgactatttggcaagaagcagatgcgcattttgatggttggattggatgctgctggcaagacaaccattctgtataaactgaagttaggggagatagtcaccaccattcctaccattggttttaatgtggaaacagtagaatataagaacatttgtttcacagtatgggatgttggtggtcaagatagaattaggcctctctggaagcattacttccagaatacccagggtcttattttgtggtagatagcaacgatcgtgaaagaattcaggaagtagcagatgagctgcagaaaatgcttctggtagatgaattgagagatgcagtgctgctactttttgcaaacaaacaggatttgccaaatgctatggccatcagtgaaatgacagataaactagggcttcagtctcttcgtaacagaacatggtatgttcaagccacttgtgcaacacaaggaactggtctgtatgaaggacttgactggctgtcaaattgagctttcaaaacgttacatgacacttggatatctaaccaaggacatgtttgataaaatgggctaggcttgttacaacaaattagttggatctgggttattaaacagtatctgggactggtntgggcagaatattaaacttattttgttgccantattgtttaccgagtataatgttgctatttagcaatgtgcttggttttacagaaattctccttggagagtttctctttaatttacttccatagcgtaatgctggcatagttttgtgaactttaataaatgtttgagtgtttttgggccacacaaatagtttaagtcactgaatctaggacataaaacggacagggataacatgacacggtattttccccaaattatg

SEQ ID NO: 527344 - DNA, 348 bp, Homo sapiens
gatctttctcgcgcccacattggcggtctcctccatcttccccgtagttgcctccttctctggctgcctgggtggacgcacatgggccggaagcggctcatcactgattcctacccggttgtgaagaggagggaggggccctctggggcctaggggtgacctctggcatgggcggtgctgtaagagctggggaagacctggatgacctactggataatttgaatgatgcccaatatatgcggactgagctggtccagcaggctcacacagctgtcgatcgtgctgactgttatcttgacaaattatacgatatggcttataaagactcgacatggaaccatgcaaaca

SEQ ID NO: 527345 - DNA, 936 bp, Homo sapiens
tccatattggggggaaacgggggtagaaacgaggctgggacacagaataggtacccaataaatctttaggggaatgaacagccgaagcgagagttctaaatgggcagatggcccatttcattctgtccccccacctcaaaaacctttacatcctcacggggttggggaggccagagaacagggtggttggccttgggggtgataaggaaaggctaatttcatacaaacggaagcaaatcgggctctcaacttggacccccaaagtgccctcaaaagggatcacgtgagccagggaaggctgagaaaggagggagcatcgtgcccattcctccgtggccagaagagaattgaatgtgctcagagcagcttcagtgggcagggcgggaaggctgcagttcagggacgggtaagacagactaggaggacttgatggaggcacgtggggaaggactaggggccgtgggaagaaagcagtaaagatacccccggaaacccacacaccccgaaaagggggggagggacaacaaccacaaagagaccacgcgaccagaaacaaaggccgacggcaatcaagaacaccaaaagacggaagcctagttcctaacacacaaggcaccaaggaaggcaaacagtgggggacactcaagcacccgccgagcggaagttcacagaatcgtgaagaacaacgccaaggtcctcactcctgccacgcgcgggataagaaagaggtgacaaggaggagacggcgccgccccagggcgggaaacacgcgccaccccagagcggaaaagcaatgcggggcgggaacaagggacgagccgaggaaaacattcaccccacaggtgccccaaagacgggaagacacagctagaaggccccgactaacaaccgaaacaccgaacacggacacagacaaccgaacgcgcgaagaaagac

SEQ ID NO: 527346 - DNA, 2192 bp, Homo sapiens
  misc_feature (973)..(973): n is a, c, g, or t
  misc_feature (1933)..(1933): n is a, c, g, or t
  misc_feature (1965)..(1965): n is a, c, g, or t
ttagggcccgccggccgtgttttttttcccggcccttagaataccttttagggaaaagtgccccaggagcgttccctgcaccttcaatgtcgaatgaccttcctgtttcggaaagtgtgcagtttttctaagtcacgccatgctagggaataaacacgttggaataggccacctaccagacccacattaggcggcacctactagaaaaatagattaaatcgttatcctggcaatgagtcctaatacacttgatcattgctgtgaattttaaaaggtgtagcaggccgggcgcggtgagtcaccgcgccaggcccgatcataaacacttttaaagtgaagaggctttccgcttcctcaacataaggagtaaatctttaatgctgcttctaggaaaaaaagtacaagaaaagcaagacttcctccttgccttctctttaaaaagcaacagccgatgaacacgtgttggagcgctctcgccttgacagaattagagatcttcagaatcacttggcgtggtggtcgaagcgtctagccctagctcattagggtgccacagtttctcggcccacaagtcagcttttaaccacttttctccgcaaaagaccggaccggtcttcatgcgtcaactaaagcaagcgtctggtcccgtgtgtgaaacgtgtaagttcatggcatcagggaatacccatcgcgcataccgtaatagaagagggcgaggttcctcacctaacccataatgctcagctcgcctttccggaagcaaggactatcaccccgacaataccttcatccgggcggaagcgtctcaccctgagtctgatttggcagtgacgaagcgaggtattgtgggactttgtccgtctcccagtacgcatgtgcctcagccggcctctcccggctcctggggccacgtccgggcggtggcgccgtcgagagatgcacgtcagcgaaactggccaatcccctgcagcgnaagcgcagtggctcgggcgcaccggaagcgcagggggatggggcggcggtgacgcgattctgtccgcgttggaggggccgggccgctgctggagtcgccgcggccgccgcgtgacgtggcacagccagagcctaaaggctagagccggagctgccgcgccagtcgcctagcactgagacgtttctgcctccctctttcttcctccgctctttctcttccctctcgtttagtttgcctgggagcttgaaaggagaaagcacggggtcgccccaaaccccttctgcttctgcccatcacaagtgccactaccgccatgggcctcactatctcctccctcttctcccgactatttggcaagaagcagatgcgcattttgatggttggattggatgctgctggcaagacaaccattctgtataaactgaagttaggggagatagtcaccaccattcctaccattggttttaatgtggaaacagtagaatataagaacatttgtttcacagtatgggatgttggtggtcaagatagaattaggcctctctggaagcattacttccagaatacccagggtcttattttgtggtagatagcaacgatcgtgaaagaattcaggaagtagcagatgagctgcagaaaatgcttctggtagatgaattgagagatgcagtgctgctactttttgcaaacaaacaggatttgccaaatgctatggccatcagtgaaatgacagataaactagggcttcagtctcttcgtaacagaacatggtatgttcaagccacttgtgcaacacaaggaactggtctgtatgaaggacttgactggctgtcaaattgagctttcaaaacgttacatgacacttggatatctaaccaaggacatgtttgataaaatgggctaggcttgttacaacaaattagttggatctgggttattaaacagtatctgggactggtntgggcagaatattaaacttattttgttgccantattgtttaccgagtataatgttgctatttagcaatgtgcttggttttacagaaattctccttggagagtttctctttaatttacttccatagcgtaatgctggcatagttttgtgaactttaataaatgtttgagtgtttttgggccacacaaatagtttaagtcactgaatctaggacataaaacggacagggataacatgacacggtattttccccaaattatg

SEQ ID NO: 527347 - DNA, 980 bp, Homo sapiens
  misc_feature (7)..(7): n is a, c, g, or t
  misc_feature (254)..(255): n is a, c, g, or t
  misc_feature (288)..(289): n is a, c, g, or t
  misc_feature (299)..(299): n is a, c, g, or t
  misc_feature (311)..(311): n is a, c, g, or t
  misc_feature (322)..(322): n is a, c, g, or t
  misc_feature (326)..(327): n is a, c, g, or t
  misc_feature (338)..(338): n is a, c, g, or t
  misc_feature (390)..(390): n is a, c, g, or t
  misc_feature (412)..(412): n is a, c, g, or t
  misc_feature (471)..(471): n is a, c, g, or t
  misc_feature (473)..(473): n is a, c, g, or t
  misc_feature (537)..(537): n is a, c, g, or t
  misc_feature (546)..(546): n is a, c, g, or t
  misc_feature (576)..(576): n is a, c, g, or t
  misc_feature (595)..(596): n is a, c, g, or t
agcggcntgacaaggttcagactgagtccctgtaaccaaggactgtgttttcatctgtctacctacctcatctgtaaaatgtcagtaacaacataagattgttgaaggattttttttttttttttttgggagacagagtcttgctgtgtcgcccaggctggagtgcaggggcacaatctcccggctcactgcaagctccgcctccgggttcacaccattctcctgcctcagcctcctgagtagctgggactacnnggcacccgccattacgcccggctaatttttggnnattttaaggntttcaccggcgnttagccaggantggnngtcgatctccntgacctcgtgatccgcccaattcggcctcccaaagtgctgggattacaggcntgagccaccacgccgggccaanggatttaatgaattaagggatgtacaggtgcgtggggcgtgtaatcctagggccgtgcntngagactcacatttggccatcaaaagccttttaaaagggggaggttgcggtgagctgacttgggngccactggnactccggcctgagtgacagagtgagactcngtctcacaaaaaaaataanngccctttaaataaggaataatagtgatggaaaagtgtcatttctgggaccattgaaaattggagaattaggttataattgagaattattattagctacccttaggtaagctccattggtgcggaaagttgtgaccagtgatgaagttcccatttctggaaatcgtggaacattttcggtcagggactccagggtacagttagccgtaaaggcttcccgtggtggtggaaagggccttggaagttaagtcgctcaccaggggttcagaagaccgggattggagataggggaaatatttgaggggagaaatgcccgccagaacttggttagaagaaatgggccctgaaagagtgcgcccggaaaatgcggcaagaggcctataccg

SEQ ID NO: 527348 - DNA, 1021 bp, Homo sapiens
gtgatttcagaatgtctgggcgacccaggattccccctccccttcccaaataaagatgagggtactaaaaaaaaaaaaaaaaaaaaaaaaaaaaaaaaaaaaaaaaaaaaaaaaaaaaaaaaaaaaaaaaaaaaaaaaaaaaaaaaaaaaaaaaaaaaaaaaaaaaacaaaaaacaaaaaaagaaaagaaaaacaaacgaaggaggtggcgcgcgcccgccccgcccacagaagagagacaccaaaacacacctgggtgtgggcggccgccccaccaagcccatttagaagcggaagcgaagagagacgagagatccatcacagaagcagctgtgcgctgcgaaaatagggagaggtagtcacacactccaaacaaaataagactgacgcgcgcgcgcgagcacaacagtgagttagataacacaaccagcagggatggtcgccagcacgcacgatagagggcgagcttatacataaaacaagacagacagacccgaacagacgagcgcccaaatataaaaaaacacccccccccccgcgccggggggcgtaaacaaccagaaacacaaaagaaacaacagacgaagaaaagcaacacgagcagacaaacccagacagatgaacagaaatagatagagatcaaaagaaaaaagaacaaagaaacagaacagagacagacaacaccaacagacagaaatgaaccgagagcaaagaagtcaggagcacacggagagagagaacacacacacgagaagaagacaacgaccgcaatcagagcagtcaacagcagagatacgaagaacagtacagaatgagcgccgacgataaaagactacggcaggtgaacgacataatgacacgacaaaagaacatagtaacaaacgcaacaaaagacaagcgaaaaatacaaaacaagaagaaaaaaatcaacatatagacaacaaactagagaaccgcatcattaagaagataagcgggaagcacgtggtgaccaagaaccgagggaccgaaaatgtataaa

SEQ ID NO: 527349 - DNA, 2167 bp, Homo sapiens
  misc_feature (973)..(973): n is a, c, g, or t
  misc_feature (1908)..(1908): n is a, c, g, or t
  misc_feature (1940)..(1940): n is a, c, g, or t
ttagggcccgccggccgtgttttttttcccggcccttagaataccttttagggaaaagtgccccaggagcgttccctgcaccttcaatgtcgaatgaccttcctgtttcggaaagtgtgcagtttttctaagtcacgccatgctagggaataaacacgttggaataggccacctaccagacccacattaggcggcacctactagaaaaatagattaaatcgttatcctggcaatgagtcctaatacacttgatcattgctgtgaattttaaaaggtgtagcaggccgggcgcggtgagtcaccgcgccaggcccgatcataaacacttttaaagtgaagaggctttccgcttcctcaacataaggagtaaatctttaatgctgcttctaggaaaaaaagtacaagaaaagcaagacttcctccttgccttctctttaaaaagcaacagccgatgaacacgtgttggagcgctctcgccttgacagaattagagatcttcagaatcacttggcgtggtggtcgaagcgtctagccctagctcattagggtgccacagtttctcggcccacaagtcagcttttaaccacttttctccgcaaaagaccggaccggtcttcatgcgtcaactaaagcaagcgtctggtcccgtgtgtgaaacgtgtaagttcatggcatcagggaatacccatcgcgcataccgtaatagaagagggcgaggttcctcacctaacccataatgctcagctcgcctttccggaagcaaggactatcaccccgacaataccttcatccgggcggaagcgtctcaccctgagtctgatttggcagtgacgaagcgaggtattgtgggactttgtccgtctcccagtacgcatgtgcctcagccggcctctcccggctcctggggccacgtccgggcggtggcgccgtcgagagatgcacgtcagcgaaactggccaatcccctgcagcgnaagcgcagtggctcgggcgcaccggaagcgcagggggatggggcggcggtgacgcgattctgtccgcgttggaggggccgggccgctgctggagtcgccgcggccgccgcgtgacgtggcacagccagagcctaaaggctagagccactgagacgtttctgcctccctctttcttcctccgctctttctcttccctctcgtttagtttgcctgggagcttgaaaggagaaagcacggggtcgccccaaaccccttctgcttctgcccatcacaagtgccactaccgccatgggcctcactatctcctccctcttctcccgactatttggcaagaagcagatgcgcattttgatggttggattggatgctgctggcaagacaaccattctgtataaactgaagttaggggagatagtcaccaccattcctaccattggttttaatgtggaaacagtagaatataagaacatttgtttcacagtatgggatgttggtggtcaagatagaattaggcctctctggaagcattacttccagaatacccagggtcttattttgtggtagatagcaacgatcgtgaaagaattcaggaagtagcagatgagctgcagaaaatgcttctggtagatgaattgagagatgcagtgctgctactttttgcaaacaaacaggatttgccaaatgctatggccatcagtgaaatgacagataaactagggcttcagtctcttcgtaacagaacatggtatgttcaagccacttgtgcaacacaaggaactggtctgtatgaaggacttgactggctgtcaaattgagctttcaaaacgttacatgacacttggatatctaaccaaggacatgtttgataaaatgggctaggcttgttacaacaaattagttggatctgggttattaaacagtatctgggactggtntgggcagaatattaaacttattttgttgccantattgtttaccgagtataatgttgctatttagcaatgtgcttggttttacagaaattctccttggagagtttctctttaatttacttccatagcgtaatgctggcatagttttgtgaactttaataaatgtttgagtgtttttgggccacacaaatagtttaagtcactgaatctaggacataaaacggacagggataacatgacacggtattttccccaaattatg

SEQ ID NO: 527350 - DNA, 96 bp, Homo sapiens
  misc_feature (23)..(23): n is a, c, g, or t
  misc_feature (40)..(40): n is a, c, g, or t
gatcaattcgacagacagatggngtgtatgcccctcccangtttgacttcacacacactcataactttccaaatgaagccccacagtatagcgcat

SEQ ID NO: 527351 - DNA, 2274 bp, Homo sapiens
  misc_feature (973)..(973): n is a, c, g, or t
  misc_feature (2015)..(2015): n is a, c, g, or t
  misc_feature (2047)..(2047): n is a, c, g, or t
ttagggcccgccggccgtgttttttttcccggcccttagaataccttttagggaaaagtgccccaggagcgttccctgcaccttcaatgtcgaatgaccttcctgtttcggaaagtgtgcagtttttctaagtcacgccatgctagggaataaacacgttggaataggccacctaccagacccacattaggcggcacctactagaaaaatagattaaatcgttatcctggcaatgagtcctaatacacttgatcattgctgtgaattttaaaaggtgtagcaggccgggcgcggtgagtcaccgcgccaggcccgatcataaacacttttaaagtgaagaggctttccgcttcctcaacataaggagtaaatctttaatgctgcttctaggaaaaaaagtacaagaaaagcaagacttcctccttgccttctctttaaaaagcaacagccgatgaacacgtgttggagcgctctcgccttgacagaattagagatcttcagaatcacttggcgtggtggtcgaagcgtctagccctagctcattagggtgccacagtttctcggcccacaagtcagcttttaaccacttttctccgcaaaagaccggaccggtcttcatgcgtcaactaaagcaagcgtctggtcccgtgtgtgaaacgtgtaagttcatggcatcagggaatacccatcgcgcataccgtaatagaagagggcgaggttcctcacctaacccataatgctcagctcgcctttccggaagcaaggactatcaccccgacaataccttcatccgggcggaagcgtctcaccctgagtctgatttggcagtgacgaagcgaggtattgtgggactttgtccgtctcccagtacgcatgtgcctcagccggcctctcccggctcctggggccacgtccgggcggtggcgccgtcgagagatgcacgtcagcgaaactggccaatcccctgcagcgnaagcgcagtggctcgggcgcaccggaagcgcagggggatggggcggcggtgacgcgattctgtccgcgttggaggggccgggccgctgctggagtcgccgcggccgccgcgtgacgtggcacagccagagcctaaaggctagagccggagctgccgcgccagtcgcctagcaggtcctctaccggcttattcctgtgccggatcttcatcggcacaggggccactgagacgtttctgcctccctctttcttcctccgctctttctcttccctctcgtttagtttgcctgggagcttgaaaggagaaagcacggggtcgccccaaaccccttctgcttctgcccatcacaagtgccactaccgccatgggcctcactatctcctccctcttctcccgactatttggcaagaagcagatgcgcattttgatggttggattggatgctgctggcaagacaaccattctgtataaactgaagttaggggagatagtcaccaccattcctaccattggttttgcggtcatttttgtttttctttgtaggttttaatgtggaaacagtagaatataagaacatttgtttcacagtatgggatgttggtggtcaagatagaattaggcctctctggaagcattacttccagaatacccagggtcttattttgtggtagatagcaacgatcgtgaaagaattcaggaagtagcagatgagctgcagaaaatgcttctggtagatgaattgagagatgcagtgctgctactttttgcaaacaaacaggatttgccaaatgctatggccatcagtgaaatgacagataaactagggcttcagtctcttcgtaacagaacatggtatgttcaagccacttgtgcaacacaaggaactggtctgtatgaaggacttgactggctgtcaaattgagctttcaaaacgttacatgacacttggatatctaaccaaggacatgtttgataaaatgggctaggcttgttacaacaaattagttggatctgggttattaaacagtatctgggactggtntgggcagaatattaaacttattttgttgccantattgtttaccgagtataatgttgctatttagcaatgtgcttggttttacagaaattctccttggagagtttctctttaatttacttccatagcgtaatgctggcatagttttgtgaactttaataaatgtttgagtgtttttgggccacacaaatagtttaagtcactgaatctaggacataaaacggacagggataacatgacacggtattttccccaaattatg

SEQ ID NO: 527352 - DNA, 1153 bp, Homo sapiens
  misc_feature (894)..(894): n is a, c, g, or t
  misc_feature (926)..(926): n is a, c, g, or t
cgaaagtaattacagtgcggtcaccggtttggtatttcagtgagagggacgggggtttcattctagattattggtcctgtggcagtcatttcacacacaggggccactgagacgtttctgcctccctctttcttcctccgctctttctcttccctctcgtttagtttgcctgggagcttgaaaggagaaagcacggggtcgccccaaaccccttctgcttctgcccatcacaagtgccactaccgccatgggcctcactatctcctccctcttctcccgactatttggcaagaagcagatgcgcattttgatggttggattggatgctgctggcaagacaaccattctgtataaactgaagttaggggagatagtcaccaccattcctaccattggttttaatgtggaaacagtagaatataagaacatttgtttcacagtatgggatgttggtggtcaagatagaattaggcctctctggaagcattacttccagaatacccagggtcttattttgtggtagatagcaacgatcgtgaaagaattcaggaagtagcagatgagctgcagaaaatgcttctggtagatgaattgagagatgcagtgctgctactttttgcaaacaaacaggatttgccaaatgctatggccatcagtgaaatgacagataaactagggcttcagtctcttcgtaacagaacatggtatgttcaagccacttgtgcaacacaaggaactggtctgtatgaaggacttgactggctgtcaaattgagctttcaaaacgttacatgacacttggatatctaaccaaggacatgtttgataaaatgggctaggcttgttacaacaaattagttggatctgggttattaaacagtatctgggactggtntgggcagaatattaaacttattttgttgccantattgtttaccgagtataatgttgctatttagcaatgtgcttggttttacagaaattctccttggagagtttctctttaatttacttccatagcgtaatgctggcatagttttgtgaactttaataaatgtttgagtgtttttgggccacacaaatagtttaagtcactgaatctaggacataaaacggacagggataacatgacacggtattttccccaaattatg

SEQ ID NO: 527353 - DNA, 1831 bp, Homo sapiens
  misc_feature (1572)..(1572): n is a, c, g, or t
  misc_feature (1604)..(1604): n is a, c, g, or t
ttagggcccgccggccgtgttttttttcccggcccttagaataccttttagggaaaagtgccccaggagcgttccctgcaccttcaatgtcgaatgaccttcctgtttcggaaagtgtgcagtttttctaagtcacgccatgctagggaataaacacgttggaataggccacctaccagacccacattaggcggcacctactagaaaaatagattaaatcgttatcctggcaatgagtcctaatacacttgatcattgctgtgaattttaaaaggtgtagcaggccgggcgcggtgagtcaccgcgccaggcccgatcataaacacttttaaagtgaagaggctttccgcttcctcaacataaggagtaaatctttaatgctgcttctaggaaaaaaagtacaagaaaagcaagacttcctccttgccttctctttaaaaagcaacagccgatgaacacgtgttggagcgctctcgccttgacagaattagagatcttcagaatcacttggcgtggtggtcgaagcgtctagccctagctcattagggtgccacagtttctcggcccacaagtcagcttttaaccacttttctccgcaaaagaccggaccggtcttcatgcgtcaactaaagcaagcgtctggtcccgtgtgtgaaacgtgtaagttcatggcatcagggaatacccatcgcgcataccgtaatagaagagggcgaggttcctcacctaacccataatgctcagctcgcctttccggaagcaaggactatcaccccgacaataccttcatccgggcggaagcgtctcaccctgagtctgatttggcagtgacgaagcgagagtttgcctgggagcttgaaaggagaaagcacggggtcgccccaaaccccttctgcttctgcccatcacaagtgccactaccgccatgggcctcactatctcctccctcttctcccgactatttggcaagaagcagatgcgcattttgatggttggattggatgctgctggcaagacaaccattctgtataaactgaagttaggggagatagtcaccaccattcctaccattggttttaatgtggaaacagtagaatataagaacatttgtttcacagtatgggatgttggtggtcaagatagaattaggcctctctggaagcattacttccagaatacccagggtcttattttgtggtagatagcaacgatcgtgaaagaattcaggaagtagcagatgagctgcagaaaatgcttctggtagatgaattgagagatgcagtgctgctactttttgcaaacaaacaggatttgccaaatgctatggccatcagtgaaatgacagataaactagggcttcagtctcttcgtaacagaacatggtatgttcaagccacttgtgcaacacaaggaactggtctgtatgaaggacttgactggctgtcaaattgagctttcaaaacgttacatgacacttggatatctaaccaaggacatgtttgataaaatgggctaggcttgttacaacaaattagttggatctgggttattaaacagtatctgggactggtntgggcagaatattaaacttattttgttgccantattgtttaccgagtataatgttgctatttagcaatgtgcttggttttacagaaattctccttggagagtttctctttaatttacttccatagcgtaatgctggcatagttttgtgaactttaataaatgtttgagtgtttttgggccacacaaatagtttaagtcactgaatctaggacataaaacggacagggataacatgacacggtattttccccaaattatg

SEQ ID NO: 527354 - DNA, 180 bp, Homo sapiens
ggcgattatataaatcatgtgagaatgcctcaaagttaccatttgtttgccatattttacaagctattccctaaacaagatatgtctctgtgtactgtatttcctattagactatgaataaaaactatttgggcttacgataaaaatcactgagttaggcgtggtggctcatgtcataca

SEQ ID NO: 527355 - DNA, 2296 bp, Homo sapiens
  misc_feature (973)..(973): n is a, c, g, or t
  misc_feature (2037)..(2037): n is a, c, g, or t
  misc_feature (2069)..(2069): n is a, c, g, or t
ttagggcccgccggccgtgttttttttcccggcccttagaataccttttagggaaaagtgccccaggagcgttccctgcaccttcaatgtcgaatgaccttcctgtttcggaaagtgtgcagtttttctaagtcacgccatgctagggaataaacacgttggaataggccacctaccagacccacattaggcggcacctactagaaaaatagattaaatcgttatcctggcaatgagtcctaatacacttgatcattgctgtgaattttaaaaggtgtagcaggccgggcgcggtgagtcaccgcgccaggcccgatcataaacacttttaaagtgaagaggctttccgcttcctcaacataaggagtaaatctttaatgctgcttctaggaaaaaaagtacaagaaaagcaagacttcctccttgccttctctttaaaaagcaacagccgatgaacacgtgttggagcgctctcgccttgacagaattagagatcttcagaatcacttggcgtggtggtcgaagcgtctagccctagctcattagggtgccacagtttctcggcccacaagtcagcttttaaccacttttctccgcaaaagaccggaccggtcttcatgcgtcaactaaagcaagcgtctggtcccgtgtgtgaaacgtgtaagttcatggcatcagggaatacccatcgcgcataccgtaatagaagagggcgaggttcctcacctaacccataatgctcagctcgcctttccggaagcaaggactatcaccccgacaataccttcatccgggcggaagcgtctcaccctgagtctgatttggcagtgacgaagcgaggtattgtgggactttgtccgtctcccagtacgcatgtgcctcagccggcctctcccggctcctggggccacgtccgggcggtggcgccgtcgagagatgcacgtcagcgaaactggccaatcccctgcagcgnaagcgcagtggctcgggcgcaccggaagcgcagggggatggggcggcggtgacgcgattctgtccgcgttggaggggccgggccgctgctggagtcgccgcggccgccgcgtgacgtggcacagccagagcctaaaggctagagccggagctgccgcgccagtcgcctagcaggtcctctaccggcttattcctgtgccggatcttcatcggcacaggggccactgagacgtttctgcctccctctttcttcctccgctctttctcttccctctcgtttagtttgcctgggagcttgaaaggagaaagcacggggtcgccccaaaccccttctgcttctgcccatcacaagtgccactaccgccatgggcctcactatctcctccctcttctcccgactatttggcaagaagcagatgcgcattttgatggttggattggatgctgctggcaagacaaccattctgtataaactgaagttaggggagatagtcaccaccattcctaccattggttttattttcttaatgacgctgcacagcggtcatttttgtttttctttgtaggttttaatgtggaaacagtagaatataagaacatttgtttcacagtatgggatgttggtggtcaagatagaattaggcctctctggaagcattacttccagaatacccagggtcttattttgtggtagatagcaacgatcgtgaaagaattcaggaagtagcagatgagctgcagaaaatgcttctggtagatgaattgagagatgcagtgctgctactttttgcaaacaaacaggatttgccaaatgctatggccatcagtgaaatgacagataaactagggcttcagtctcttcgtaacagaacatggtatgttcaagccacttgtgcaacacaaggaactggtctgtatgaaggacttgactggctgtcaaattgagctttcaaaacgttacatgacacttggatatctaaccaaggacatgtttgataaaatgggctaggcttgttacaacaaattagttggatctgggttattaaacagtatctgggactggtntgggcagaatattaaacttattttgttgccantattgtttaccgagtataatgttgctatttagcaatgtgcttggttttacagaaattctccttggagagtttctctttaatttacttccatagcgtaatgctggcatagttttgtgaactttaataaatgtttgagtgtttttgggccacacaaatagtttaagtcactgaatctaggacataaaacggacagggataacatgacacggtattttccccaaattatg

SEQ ID NO: 527356 - DNA, 1211 bp, Homo sapiens
tggatctttcttacaactgggatttatgtctccagtgatcttcggtgcaaattagctatatctccagggaatgtggacagccaccctataattcgtgggctctcctgtggcaccaaaggcctccagtatattggggctccagggtctttgaaccttcagggccgtggaagctttcaggggtggcggccccttcggaggagacgttggctgtggaatgtgcgcctttctctccacattctgtgttagagtgggcttctcaggaaaggggctataacgtggtagagtgtgggtggggtgagaagaggggcccccaatagcgccaagaatttattccatcaatattctctcttctctgtggttctgtgggagagacacaaaaacacgccaacaatagtttttccccaacagagactctcctctcacacagagagagcggggtataagaggcgtgtgtgtcgcgtgtggagacgcagaggggctcctgtgtcttcacaaagagaggcttttgagagagacagaaaacaatttttacacacacacacacacacacacgaaagatgttgggcggctcctagtgggccacaacttttgagagagggcgccctgtgagaaacacccacacttttctccacagaggagaaaggggatcattgggaaacgagcgacagaagggggggggctccaatgatgcgcttttagtccctccacccaaggttttccttttgagcgaataattgtggcgcgtaggacactacccgtagagagaggaggcattattccttagacacaaagccgggacaaatggggcgtgcggagtctacaaaagaagggcgcgcgcaattgaaaggaggcctcctatcttttcttcacacaatatcttacaaggaagaagcactacaggggggcaacaaggcggaggtttttttatcgccccccagaagtttaccactattatccccacgagagccgatgaaatgttacacccaacagcttttgaacaagaacgccccttttacccgtgggggagttggagaagagacgcctttacccccccagaaggttgccgctgtggttgacaaaccagagggtcttcacaaggttctccagggggcggacagacttgtgcgtctccaccacaacaaacgggggggcaggggggtcaccacacgacattggggggagaaggcccttttttagttaaaccctctata

SEQ ID NO: 527357 - DNA, 1038 bp, Homo sapiens
  misc_feature (779)..(779): n is a, c, g, or t
  misc_feature (811)..(811): n is a, c, g, or t
tggaacgatacagagaagattagcatggccccgcgcaggatgacacgcaaattcgtgaagcgtccatatttttaagcacggggtcgccccaaaccccttctgcttctgcccatcacaagtgccactaccgccatgggcctcactatctcctccctcttctcccgactatttggcaagaagcagatgcgcattttgatggttggattggatgctgctggcaagacaaccattctgtataaactgaagttaggggagatagtcaccaccattcctaccattggttttaatgtggaaacagtagaatataagaacatttgtttcacagtatgggatgttggtggtcaagatagaattaggcctctctggaagcattacttccagaatacccagggtcttattttgtggtagatagcaacgatcgtgaaagaattcaggaagtagcagatgagctgcagaaaatgcttctggtagatgaattgagagatgcagtgctgctactttttgcaaacaaacaggatttgccaaatgctatggccatcagtgaaatgacagataaactagggcttcagtctcttcgtaacagaacatggtatgttcaagccacttgtgcaacacaaggaactggtctgtatgaaggacttgactggctgtcaaattgagctttcaaaacgttacatgacacttggatatctaaccaaggacatgtttgataaaatgggctaggcttgttacaacaaattagttggatctgggttattaaacagtatctgggactggtntgggcagaatattaaacttattttgttgccantattgtttaccgagtataatgttgctatttagcaatgtgcttggttttacagaaattctccttggagagtttctctttaatttacttccatagcgtaatgctggcatagttttgtgaactttaataaatgtttgagtgtttttgggccacacaaatagtttaagtcactgaatctaggacataaaacggacagggataacatgacacggtattttccccaaattatg

SEQ ID NO: 527358 - DNA, 163 bp, Homo sapiens
tcggtactcctgactcagtacccacccgctcggcctcccaaagtgctgggattacaggagtgagccaccgtgcccagcctgagactactttttagatggagcccactcaaggggatgaggaggtttaagccaccgtgcccaggtgcccccccagagagagcgt

SEQ ID NO: 527359 - DNA, 943 bp, Homo sapiens
  misc_feature (684)..(684): n is a, c, g, or t
  misc_feature (716)..(716): n is a, c, g, or t
ggagagccggagttgccgagcaagtcgcctagcaggtcctctaccggcttattcctgtgccggatcttcatcggcacaggggccactgagacgtttctgcctccctctttcttcctccgctctttctcttccctctcgtttagtttgcctgggagcttgaaaggagaaagcacggggtcgccccaaaccccttctgcttctgcccatcacaagtgccactaccgccatgggcctcactatctcctccctcttctcccgactatttggcaagaagcagatgcgcattttgatggagggtcttattttgtggtagatagcaacgatcgtgaaagaattcaggaagtagcagatgagctgcagaaaatgcttctggtagatgaattgagagatgcagtgctgctactttttgcaaacaaacaggatttgccaaatgctatggccatcagtgaaatgacagataaactagggcttcagtctcttcgtaacagaacatggtatgttcaagccacttgtgcaacacaaggaactggtctgtatgaaggacttgactggctgtcaaattgagctttcaaaacgttacatgacacttggatatctaaccaaggacatgtttgataaaatgggctaggcttgttacaacaaattagttggatctgggttattaaacagtatctgggactggtntgggcagaatattaaacttattttgttgccantattgtttaccgagtataatgttgctatttagcaatgtgcttggttttacagaaattctccttggagagtttctctttaatttacttccatagcgtaatgctggcatagttttgtgaactttaataaatgtttgagtgtttttgggccacacaaatagtttaagtcactgaatctaggacataaaacggacagggataacatgacacggtattttccccaaattatg

SEQ ID NO: 527360 - DNA, 293 bp, Homo sapiens
cggacacacgctgactcttccggcttcaatgtcctccctatcaccactaaacattaatgcttatttttgccagataaaatataaaagggggccgggcatggtggctcaggcctgtaatcccagcactgtgggaggccgaggcaagtggatcattttgagatcaggagtttgagaccagcctgggcaacatggcaaaaccccatctctaccaaaaattacaaaaattagcaggacatggtggcgcacacctgtagtcccagctactcaggaggccgaggctggagaattgctta

SEQ ID NO: 527361 - DNA, 220 bp, Homo sapiens
ctacgaaaccatcgaagacaacggccgcgcaagaggataagcgaagggccgacagcaccaacacaaggcgcagagagagcaaatacgaggaaagaggcgcaagagacgagtaaccaagagatgcagaaaacgattcaacaacagcagggaggaactccgacaagacagaagaggcaagcggccagggctagcggcaacgagagaaactctgtctctctct

SEQ ID NO: 527362 - DNA, 387 bp, Homo sapiens
cgcggtggctcacgtctgtaatcccagcactttgggaggctgagggaggcagatcatgaggtcaggagatggagaccatcctggctaacatggtgaaaccctgtctctactaaaaatacaaaaaaaaaaaaaaaattagccaggcacagtggcgggcgcctgtagtcccagctactcgggaggctgaggcaggagaatggcgtgacctgggaggcagaactgcactccagcctgggcgacaagcaagacttcgtctcaaaaaaaaaagtaaattataaaatttttctgtaaatatgcctttcaagttacataatttacattccttttaataatactgtatgaataaaatttgatagaggcactgagttttaacattatctattaaaa

SEQ ID NO: 527363 - DNA, 309 bp, Homo sapiens
ttccagctactctggaggctgatgtgggaggatcacttgagcctgggaagtggaggttacagtgaggcgagattgcgccactgcactccagcctgggtgatagagtgagaccttgtctcagaaaaaaaaaaaaaaactatattgagtggtgctgtggagaaacaggtacattgttgatgtttctgtgagttcatttagtctttctgtacagtcttgcaggaagcaatagcagccctaatgtatgtaaaaccttggactccatggtcctattaaatatgccctaataaaatgaatattttgcttctttaa

SEQ ID NO: 527364 - DNA, 104 bp, Homo sapiens
  misc_feature (69)..(69): n is a, c, g, or t
taaaaattctttttttttcccaattttaagacaacccaaatctaagattctgactttttctaacttctnaaagacatgccaatgctggcaaaaagaagtgcttt

SEQ ID NO: 527365 - DNA, 157 bp, Homo sapiens
  misc_feature (90)..(90): n is a, c, g, or t
  misc_feature (107)..(107): n is a, c, g, or t
  misc_feature (123)..(123): n is a, c, g, or t
gtatcactaaagctcgctttctttgctgtccaatttctattaaaggttcctttgttccctaagtcccaactaattaaactggggggatanttatggaaggggccttngagcatctgggattcntgccctaattaaaaaaacatttatttttcaattg

SEQ ID NO: 527366 - DNA, 86 bp, Homo sapiens
  misc_feature (62)..(62): n is a, c, g, or t
  misc_feature (72)..(72): n is a, c, g, or t
gtgtgctggggccgggcccctgcgtgtggggtggtggtggcggtggctgtgcccggctctgnctgttgctgngtctggggctggct

SEQ ID NO: 527367 - DNA, 909 bp, Homo sapiens
  misc_feature (20)..(20): n is a, c, g, or t
  misc_feature (495)..(495): n is a, c, g, or t
gagagagagcactagtctcngagtctatttattttttttttggtaaaaatggggcttggtcatgtgacccagccgggtcgggaactccggggctcacgcaattctcccaccttggcctcccaaatgggtggggggattacagggcggtgacgtcaccatgcccagcctaggatgagttatagtaaaggattgggtaatgctgggggaagatggagaaaagccaggttaggggcacagcaggttggaggaacggggtctagtggggtgtggcgatgggatacgccatggcgcaggcaagaaaggagacgcctctgagacaggagaaagacagtctgggaaacaacccagaggagacggaaccgcggatccacgagccacggggacgaccactgtgtgcgaacactggcgcctctcagaagcgcccacgagacggagcctccaagagaagagaacacaaggggcagagaaaaccagaagacgccgggcgctcccaancggcgatagagacggtgagaaagcgcaccggatagacaacgacaaattgacgccaacagacgacgagtctcaagacgcgagagacgagagagcaccattcgcaaggcccccagaaggaaaggaccacccgcatccaacactgcggaggacacactacttccctacccccgagaatcagaggccctatgacctttttttttcacagagaataactgctacgagaacaacattgcttgtgtggatcttgccgaaaacggtcaccgcgtgtctataccacgaaaggcgttcttactgacaaagggcgggtctacaaggtataataactccatatggggatgaacccaccaaacaaacgagttttttcttacccccaaagagacatactttctatcaaacaaaactctatttcagcaa

SEQ ID NO: 527368 - DNA, 407 bp, Homo sapiens
catagtatcatccgcaacccatggatgacttttaagtcttcttatttaagaaacacatttcatcacatttcataagactgtagctgccatacatagtgattcctctgatggatctgggcaaaatcaatggaaaactttctggacagtattcaccattctaaatgcgattcagaatattcatgattcatgggaggagataaaaatatcagcattaacagaagtttggaagaagttgattccaaccctcatggatgattttgaagggttcaagacttcagtggaagaaataactatttcatgataaaagtttaacaatgaggagtcgcatcttatggatgagcaaagaaagtggttccttgagatggaacctaattctagtgaagatgatgtaaaaaaggatttagaat

SEQ ID NO: 527369 - DNA, 1489 bp, Homo sapiens
  misc_feature (771)..(771): n is a, c, g, or t
tgttgttgtcgtttttctgtttgtcgtttgtgtcttttcggtttgctttgctgtgtgcttgtttgtttcgtgttggatcgcggctgtgtgggtggggagaggcgcgcagcggcagagagggacgggaacgaggaggcgacagggcaagcaggcagacgacaaacacagagtcgtgtagtaagcacaaatcataataacttccgtcctgtcactgttgcccttacttgctcttgattgtgcagcgaggtcaccagctgcaagctacctttgtctgtgtgatgatcactcttccactaggctagagcacctcttgtcctcactacaaagagataatgatgtctctcccctccctggaataacattaacactgtggtgcgcaggcccttacttatttatttcgcgaagagcgcaaagtttggtctccccagcagcgcgctctgtttattaacactcggcctctgcttgtcccctcccgctgaatttattgaagaaccccgctggccacacgttgtgggaaggttggtttgtaaaacaaccgctgcgcaatggtcgccccttctttcccctaggccccccgtccgctggtgtgaagaatggcctcattattaactccccggtggggggaacgacaacgcaataatttggtccgcaccgctcttcgtcggcgggtaaccccctccggtgtgttcccacccgcggtcttcccgcccggtcgtgtttgtcgctcgcgctcccccgtggggcgtctcctcttccccacgggtgtgatgngtccattaaatgtttggtcgggagacgcgcttggttataccgccccgcgcgcttttatgccgcgcggaagaagtgtgttgcgaaccgttgaagagagactttgtctgcgagaaggacattcttctttgtgtgccctcgtccccgcgcagccctttggggtctccccccgcgccccccacttggccggtctgtgggtgaccccacgcctctgttcctgttggcaagaagcgaccctcccacgttcacatctcggtcacgacacgagggtgtaactcatttcacgcagggaccacgcgtgcccacacattacatgggggtgccacctccgcgggcacacgtctccactcgcgctctctccgcaagagggcccctcccggtccgcccccctttgttccgctcaccacgaattggacacccacatctctcttcttgtcctctctgtattcttttctagatacttttatagacacacgcacaagataacacaaagagaaccacagtctttctgcatttggagacaagcatcttcccattcaccaagaactaattggggtgggagagaatacaagaaataatcggtgagtacacagaggtggtatttctcaagcatttcttccgccgccgcttcaaggtggcgcgcgctctatgaagaacaaggatacaagatatacaaacaagatttgtcacacgcctctgctcccgcccaacaaatagcaaa

SEQ ID NO: 527370 - DNA, 641 bp, Homo sapiens
actgacacaggcagcacccttttgcagaagtagatgtgcgtagctgagaaagttgtctggctaagattcctggtatactattgcagcaaccaggatgtgtttctaacacagggaaagagtgagctgtaaaaacctctctaggattcaagaaagcgtgagaagtcatatggaacaatacgggtgaggagcacgggactattctctcatgttgaatgtggagaacctttatagatacaagtcggaggagagcaatctacaccaaggatgttggaggacagcatgtacatggtaaggacatacacagaaatagaacagtggcccagactcagaagatgcccctgggaccctctggtgccaaattaccatacgatttatcctttacatctccaagattaattgtgacactctatggatggggatatgataaatgacagaaacgtacctctcagacagatgattggatgtgaatcacattagccaatgaagataagaggctgtagaaaaacgatgtgataatgacatatcctgaaattgcgagtccacaattacaaaagtggatatgtcagtaacgcattgagctttactcacaatataataacaagacataataatagagtacggctcaaattagtaattacaga

SEQ ID NO: 527371 - DNA, 297 bp, Homo sapiens
  misc_feature (7)..(7): n is a, c, g, or t
  misc_feature (95)..(95): n is a, c, g, or t
  misc_feature (161)..(161): n is a, c, g, or t
  misc_feature (244)..(244): n is a, c, g, or t
ggttttnattcattctcttctattaacctctctaaaggaaattgggcacctgtaatcccagcactttgggaggctgaggtgggtgggtcactttnaggtcaggagttcaagaccaacctggccagcatggtgaaaacccatctctactaaaaatacaaaanttagccaggctggtggtgttcgcctgtaatcccagctactcaggaggctgaggcaggagaattgtttgaacctgggaggcggnggttgcagtgagctgagatcgtgccactgcattccagcccagggtgacagagt

SEQ ID NO: 527372 - DNA, 922 bp, Homo sapiens
ttgaggtttgtttccgtatctatgacatggataagatggctatatttccaatggggaactcttccaggtacttgaagatgatggtggggaacaatctgcaaagatacacagtctacaggcccacattgttagacaaaaccataataaactgcagcataacgcgactggacatggaaaccaactatccttctgaagaacttctgtgcctgctctgtgcgtggcctagatactccacagcaagcatggtggctagatgtgtgacgtcttatcacgagagtaccacccagcacttttgctttctctctccactcctctgcaaggatctgctccaagcacgctccagcccctgcctcctcctgctgctctttaccatgcgcccctccctctcctcctcctgctggaagcccaccacctttctctcccacaccacctgcacgccgcgtacgatccacgccgcccccgtagccgctgtccgctctgacacctgccacactccatgcctcacattacacctcagcctgctacgccaccctcttctccacgcctcctgccacggctccgcccccccctgaccctgcgccacttctcccctgccccggctgcgccgaaccgcgcccaccgcggctccgcgcctatctctccgacctgccagttgtccgttcatgctttgtacgtacagcgaaggaacagcttatcctagtagtatacgagtagtgctaaggttagtttagtccttctcgcgactcctctgtcaccgccttccccaacactacctgccagcctcccgcctcgccccctcacccccccgtacccgctatcaccttcacagaaccgccgccacggcttctcccccgcgtgccgacatggcaccgcgacgcgtccctacactcacaccccacgccctgcatatcgcacacggccc

SEQ ID NO: 527373 - DNA, 224 bp, Homo sapiens
tctgaggatcccgtgctcacttcatcgcgttgtctaaagactgattagatgggggcgggcacctgtaatcccacctactcaggaggctgaggcttgaacccagtgagctgagattatgccactgcaatgcagcttgggcaacagagcaaaactgtgtctcaaaaaaaacacaaaaattgaaaaaaaaaaagtggccgggcgtggtggcttatacttgtaatccc

SEQ ID NO: 527374 - DNA, 1034 bp, Homo sapiens
  misc_feature (799)..(799): n is a, c, g, or t
ctgagtggggacgtccggcttcgcatctgcagagttgtatcgtagtgtccactcgcactcactaagagatatgacctatgcgcttgatggcttgacaaaatcggcatcgcaatgatttgcatgcatgaagatgttccccatgtgcccacaacccgctagataagcggaggctattgcgcaatgattggccacaatatatctcaccatggcgcatcgtttggtcaggaagtacttggtggatggccacctgtgaataattcattactacttgtacgtctaattataacctatggatctctaatctggacgttaagaggattccatatgtaatgtccagtcatttggcatcaatcccacagaaagtacattcttatgatatagaaatgatcttcgtcggcatttgagaagaagggctgaaatgggcatgcacattcacatcacgtcttattctcgagaagagcacggtacctaacgttgtagtacgtacttgggtcacctgccttgattttattatcgaagagatcatgtctcatgacttttctatgtgtaccatccttttatatagatctaatacactcagatattcatcatcattgatatgctttggcccatgaatatttcgtgcgtcagtcctgctttccaccctaatgtctgctctgtgggtttaatgagatatgttcgagactttggaatttcaaatacgtaacttccaaattcagtaaattggtacttaactgttgtaaccccttttcataagatctcattttgactttccggtagtcacttgttcacctttttncaccaacgattggtgggtgcctcttaaacctaactgggagattgggttacatacttgagacttcagttaccggggggtggaaatttttcacatactggggagatgggcccggttgaacacagcggatcaccgggttagagaccgggcacgggcttaaagaaggggagaaaagggcacggtattgggaacacaaataaacggcggaaagagaatacaggaggggtaaaaacacacg

SEQ ID NO: 527375 - DNA, 115 bp, Homo sapiens
ctcctctcataatagtagcatcctttctgaggtgtcattgcaccagtgcacctaagtgagtgctccagatatccccagagcagttaaagacatcccaagcatggtacatgctaat

SEQ ID NO: 527376 - DNA, 796 bp, Homo sapiens
  misc_feature (51)..(51): n is a, c, g, or t
  misc_feature (62)..(62): n is a, c, g, or t
  misc_feature (74)..(77): n is a, c, g, or t
  misc_feature (80)..(82): n is a, c, g, or t
  misc_feature (97)..(97): n is a, c, g, or t
  misc_feature (99)..(99): n is a, c, g, or t
  misc_feature (126)..(127): n is a, c, g, or t
  misc_feature (129)..(129): n is a, c, g, or t
  misc_feature (232)..(232): n is a, c, g, or t
  misc_feature (273)..(273): n is a, c, g, or t
  misc_feature (285)..(285): n is a, c, g, or t
  misc_feature (296)..(296): n is a, c, g, or t
  misc_feature (333)..(333): n is a, c, g, or t
  misc_feature (348)..(348): n is a, c, g, or t
  misc_feature (350)..(350): n is a, c, g, or t
  misc_feature (362)..(362): n is a, c, g, or t
  misc_feature (366)..(366): n is a, c, g, or t
  misc_feature (371)..(371): n is a, c, g, or t
  misc_feature (391)..(391): n is a, c, g, or t
  misc_feature (396)..(396): n is a, c, g, or t
  misc_feature (405)..(405): n is a, c, g, or t
  misc_feature (410)..(410): n is a, c, g, or t
  misc_feature (557)..(557): n is a, c, g, or t
  misc_feature (716)..(716): n is a, c, g, or t
  misc_feature (726)..(726): n is a, c, g, or t
  misc_feature (744)..(744): n is a, c, g, or t
tggaagacttgctggcccagaaaatcccacttgtttcaccgaacactcatnttttcagtgantttacatttcannnnaannnacggggtcacccacncncacccgggctggcggacagtgatgtgnncncaggccactgcagcctcaaactcctgtgctcaagtgagccacccacgtcagcctcccaaggaactgggacgcacaggcatgcatcaccacgccgcgagctgantttttaaaaatgtttttgtagagagggggtctccctgtgtngcccagcctggncccaaactccnggtctcaagtgatgctcccacctcagtctcccaaagngccgagattacaggngngagcactgtgcntggncattntaattttttaaatgcctgtnttggnctcagaggntgagnaaccagcctcagagttattgagccattatctgggcaggaacgggggtcgagtttgcatatgcgatatacacatcctcagacagagcactgaaagcatctgaggtggctgtagcctattttatccagcagcttctgcctgcattcttnccatccaactcattggcctttcaggactttccatcaaatatctgatcatggggatctcagcccagactgactatgccctggaggtagggtgagtgagtacaagtacagttatttaaaaacatttaagccaggcgtggtggttcatgcctgttaacccancactttgggnaggccaaggcaggtgggntcactgaggcccaggcattcgagaccagcctggccaacatggtgaaacgtgt

SEQ ID NO: 527377 - DNA, 207 bp, Homo sapiens
ctagagggccacctcggtgtatgccttctcggtgcgcccgcgtggccgccggggtgcctgttagttggcgctccctgcgtggcgaacgtacgtacttatcgagagtgtggcgtctcgtattcggcatcatggtcctggacttctccctagtatgaacgagctgcagcggcgcctcggaccccggggcctggtggtgctcggcttccc

SEQ ID NO: 527378 - DNA, 999 bp, Homo sapiens
  misc_feature (269)..(269): n is a, c, g, or t
agtgttcggtgcccgcagacattgttttcagcagggtcccgcctggcccggcccacgccgaggttgtgggggtgtccccggtgttttgaaaagtggtataataccggccatagtctgttggacgccgcttggcgtgaaacttctcggtgaaggtgtgcccacccagacacggcgtattgcgccccctcggaccgccggcgttgttaacccctgaggcggacgagttttcaactgtgggcggtattcctctggttggcgcccgcccgcgnaaaagttagttgtcctctcaaaattaaagaggtatttttccagagttgttgtattaccaaagggcccgatctctatactgatacaagcgtgcccctcgccggccccctccccccctttttggaccgtgggccgccttccttttatgaaaaaggtttttcgctacttatgaaaaggagccccctcaactgatggaaaatgaatggttgtgtgtgggcgccacgttttccaccacaagctggtgtaaagaaattatatccgttctgcgcacgcggtacccccttttttcttctctgggagaaaccaaaaggggtcgctttctctcgccgggcgccgcacatgtgacagacaacgacgccggagaggcttgtgaaaacccgcaacacggggtggtttgtctcgcccgtgttgaaaatattgtgtattgctgcccctgcccccgaggatgagtgaaccttccgaatccgaaggccgtagtactcgagctgagaggaacaccccaactctctcgggtgtttctcgagaagtatgttgagctctggagattgtggcattctctggggtgtttaaaagaaaaggtgaccaccaacttcacgtagacgtcctggccaacgctttttccccccgggaattatggggtcccagacaaaaccttaatgaggggttttaaaccacccactggaaaatgaccaccccccttaaaaaaaattggggtttttccaaaaaaaaaaa

SEQ ID NO: 527379 - DNA, 257 bp, Homo sapiens
tagcctcgagggtgatgacacctgcacagacctgtacccccctgagttattcacctgaacggaccttggacgcacggagggtgtggattccaatgatgagggcaggagagagacgaccgtgtaccgagggatgtcctagaagcgcgggaagaagccgttgggctcgttgaaaatgaagttcaagattcttctccgcaaacccaagagcttcagctcctgtaaacagcgcaggttaataaaagcactattccgtgaca

SEQ ID NO: 527380 - DNA, 184 bp, Homo sapiens
  misc_feature (7)..(7): n is a, c, g, or t
  misc_feature (85)..(85): n is a, c, g, or t
  misc_feature (134)..(134): n is a, c, g, or t
  misc_feature (154)..(154): n is a, c, g, or t
aaatttnacaacatgagcacttgccactaaggggtgtagaatatatctaattggttacctaagacacttgaaagaactagtaggntctctctttaattcccatgttagggtagaagctcccctaaaatcagganacatgtgtaatgacttcctntggggggtgcatggcaacatattcaagcta

SEQ ID NO: 527381 - DNA, 257 bp, Homo sapiens
tagcatctttattgtttcactggtgcaagaaataaatcataattgtgatgcttttcctgctacattttacaatgaaggtgatacatataggttgatatataatcacaagtttcctttatatactatttaaaacccaattcatattgataaatatgtccataggacaacatgggttcttattggatggctgagtccaaatatgtcaaaatatagcttctggttttgaccatggtgctattgaaagttctaaaactagg

SEQ ID NO: 527382 - DNA, 109 bp, Homo sapiens
cgatacgactttttttgccatttctggttaattcctgcttctcaagtaacagctcggaagtatctccctgctaagatcccagtaatgtttgcccttctgtcgtcttctc

SEQ ID NO: 527383 - DNA, 1510 bp, Homo sapiens
cgtcgggattgtttattgcctgtgtgaccctgctgttgtcaatagccgcgactcccctgtgtttttacgcggggggtcatttttctcgatgagcttttatcccattgcttgtgtgggcccaaggcacactttctcaaagacgcgtgtctcccctgccgtcttccgctgttttgtgaccacgtccctgggtgtatgctcccaggccgcccccccttttgtgtgtgtttttgatatcgttctcagaagtactcctgtttctggtccgaaatttgccgggacttgagatcctctaatgtttgttggggaccaaaccctctgcatggtttttccccactgttactcctgtgctggcccccccccttcagtcctgtgttgcaaccttataagtccccggatctctgcgggtgtacccctcctttgtgttagggggcgcttgttttttgaggagagtgtttggggactcccgagattttgtccgcccaggtgttgtgggccccgtgtcccttgcggggtggccacccttctctcctgtgttattctcggcggggtaaccacatccatcggtgcctttgataaaataattggtatttctggtgtgtccaccgctattttcccccctcatgcgtgctctttggggcccgccctgtttctttctgtgtgtgaaaatggtaggtgagtctctttagacacacttaggacatacgcgcgttttctacaaactctccgagagaatatcatcacaccacatgttttcagaggatatatatatgtggccctgtgataaacaacgggaggcgcgatatatatcatatatcgtggtcaccacacgggattatctacacactgttttgttcccaacatagtagagagttttctcagggagaaatgtagataacttaatgctttccaagagttattttcttaaaatattagtacccatatatatttcgaaaatcatgggaaaagcgatattttttcccccagagataattattacaatacaaaaaatgcgcgcattactatccccccataacgcaaaatagtttttctcatactctcacctctcttttattgttacacagaaatataattttagaacattatgtgatgtgccccacaggagagccccctacagatatccgctccgcaggcaccttgagaagaagagatattggcctcatgtgtagaaaaacccacacggcagcccgacagagagttttatgtatccacgtctctccatatctttgtgagaacccacacaccggaggggcacccacacacaagggggtgcgacgtttctccaaacccccaccctcactgaggagaagacaactgcgtgcttattttacatctacgcccccttcacttttttccccgcgccccacagcagagggggcccacattctgtggtaggggccatgggtcccccattggccccccctggagagaatagtacagagcatgccacacccatatttttttttaaattaaatttggtgtttcccaaaca

SEQ ID NO: 527384 - DNA, 519 bp, Homo sapiens
  misc_feature (19)..(19): n is a, c, g, or t
  misc_feature (41)..(41): n is a, c, g, or t
  misc_feature (79)..(79): n is a, c, g, or t
  misc_feature (86)..(86): n is a, c, g, or t
  misc_feature (107)..(107): n is a, c, g, or t
  misc_feature (147)..(147): n is a, c, g, or t
  misc_feature (201)..(201): n is a, c, g, or t
aaaaactttaatgcctgcncccaaaaaaaaggttccaaaangttgttttcctaaaaaccctgggttccttgaagggaanggaaaangtctttgtcaacctttcctancccctcatgtagagtgcaagtgtttaaaaaagcccacccntggcagtgggtacatggtgaatcattaatgaacaaaggagggataactgtaacncccaggagttgaagggcttggtatatggaggcttacctgtcccaacccctgctcccctggctctgttcccccatcgcaggggctcctgtttcaatctcccatctttgtcccagtgctgcagaaccacattggagtcagattgaatggacaggaggcatctccagtcacacatctaggcttctaacctagaattgtattgagactgtatacaccttgtttagtttttgtttcacctcttttaataccaaatactagaagaacttataagcagtctagtatgtgaaatcataagtcttattcaacaacatggaaaaaaaa

SEQ ID NO: 527385 - DNA, 355 bp, Homo sapiens
catgtacatcctgccgaggagccggggatggtcagaaacgtcagtgcagccgctttgccctcatgcccattgcacgccacggggccctcacctacgtggtggggcgctctttccacgtgtccctcctggtccatttgcccacccagtgaggcaggctcatccccttatttcctgacatttgtgtggttggtgcttttagagaactctccttgtggactctgttctgcaccattgtcacagcccagagaggggggaatgttagtcccaaagaggagaggggacttccctaggaccatccagggggtgggaagcagagtgggtctcgaaccttctccgattcgggaaatcgccttct

SEQ ID NO: 527386 - DNA, 227 bp, Homo sapiens
  misc_feature (17)..(17): n is a, c, g, or t
  misc_feature (185)..(185): n is a, c, g, or t
agcacttggtcaggatngcagacagcagagatcacattgtgatgtgacactcgaataagttgattgtgtttatctttaaccacagatcattccttctgtagctcaggagagcaccctcccacccatttgtcgcagtatcctagaatctttgtgctctcgctgcagttccctttggttccatgtgntccttgttccctcccatggctagctggattgcactccgcttg

SEQ ID NO: 527387 - DNA, 424 bp, Homo sapiens
  misc_feature (93)..(93): n is a, c, g, or t
  misc_feature (188)..(188): n is a, c, g, or t
acaacccgaagtgctttgaatcacagaggaactttgcatcttggccttctgaagggggcccgcaatgttgccagtgttggtctgcagattggntacccaattgttgcatcagcaccccattttatcatcaacgggtacaaacgagtcctggccttgtctgtggagacggattaccccttcccccttgntgaaaaggtcaaggcctttttgggtgatccatttgcctttgtgggtggtgcccctgtgggtgctgcccccccagctgctcctgttgttgttgcagccccagctaaggttgaagccaaggaaaagtcggaggagtcggacgaggaaatgggatttggtttttttgactaatccccaaaaagcaccccacttagccagttttatttgcaaaacaaggaaataaaggcttactttttta

SEQ ID NO: 527388 - DNA, 315 bp, Homo sapiens
  misc_feature (49)..(49): n is a, c, g, or t
  misc_feature (55)..(55): n is a, c, g, or t
  misc_feature (67)..(67): n is a, c, g, or t
  misc_feature (90)..(90): n is a, c, g, or t
  misc_feature (97)..(97): n is a, c, g, or t
  misc_feature (275)..(276): n is a, c, g, or t
gagacagaacccagcaggacatgctcagcacagctcccaccgcaagttngagatngacgcaacgaangaaactcggggagcgactcatcngaaatgncctgcgcctacgaaaatccagcgcctcagagaccagactccaagagcaagagcaggtcacagggttccacaccctcgctggagttcggcttccttccctctccaactccgagggtacgacttagaggtgaagaccaactgaccccctcttggtgaagccatctccagccacacgccannaagaaacacagcatggtctgttccccaaagcccaggacc

SEQ ID NO: 527389 - DNA, 1316 bp, Homo sapiens
ccgtggaccctccccctcgacttctcgttctactgccccaggagcccggcgggtcacgggacatccacgtccgtgccggatgcgggcgccggcatgatggcatgatgtggaggaccagggacggactcactgggaccctatatctcctatccatgcatgctagtgcatgctagcatggatgacgctggagcaccggatcaatgcactgccatcctcaccggacagaccatcgttcgaatcatacatgcgacgtcattcagacatttgagaccggatgacccatcatttgacacgggaccccgtgacaggatgctcacagccaccgtggcaccgcatatatcatgcacatacgacaccacacgatggacggcacgcccacgcacggcgcaccagaagaacccacgcataggacacggccaatatccggcacggccagacatcaagacatgtgcagcgagacgaagagctgatgtagcagtctggcacatttagcagttttaccgttcatggcacggtggcattcccgtagtctttcaattgcaacggcatgacaccacaagatgagcatcagggcacgcactggcatcgcgtgccacttggtgtagcatcccgtcgtcagcactctggcaccactttggggcacacccaccataaccaggcaacacgctgggcacttcccgttggccgcggcccacacaccccgaccaggcactcccgacggcacattggcaacagacccgctaggacatgccaccacacacgaaatgcccacagtgaacaccgcgtaaaccgggggccaccggccactgatagaccacgacacgatggccgcatacaacacgcgcaagtacagaccggtccacaccaaacagcgtaaacgactcaggcacatggattcgcccacagggggcacgcaagggacacacacacacaccggggaccataccacgtcggcagggccgccatacaccagccacccgaccttggctcaatcgatcgcgcgcacactccgcccgagccaacaccacgggaagttcacaagccacaacaaggatggagtggcgaaacagggccaacacagcgaccacataggcgccaccgcaccaaaggagcagccccgcaagccacacacacctggaacgcaccacacacaccggccaacaagacgccaatggtaccactcgaccgcagcacctgtacaacccacaccaccggaaagcacttgcgaaacaccaccccagagcccgaacgacagcgggacgccacggaggcaaccacccacccggcccacatgagaccacacagccccgcggcca

SEQ ID NO: 527390 - DNA, 203 bp, Homo sapiens
ggggggggttcccccccctttccccccccccgggggggaaaggggggggggggaatttttttccaaaaccgggtttgggggggaaacctttttttgggggtttttggtttggttttggggggttggtttttggttttgggggggccaaaccccccgggggtgaaaaaaaggtttgccctttatttaacccgggttttccccca

SEQ ID NO: 527391 - DNA, 347 bp, Homo sapiens
  misc_feature (88)..(88): n is a, c, g, or t
  misc_feature (107)..(107): n is a, c, g, or t
  misc_feature (121)..(121): n is a, c, g, or t
  misc_feature (186)..(186): n is a, c, g, or t
  misc_feature (188)..(188): n is a, c, g, or t
  misc_feature (262)..(262): n is a, c, g, or t
  misc_feature (322)..(322): n is a, c, g, or t
ggagttctggggacgcagtgccccaactgggaaaagggcgggatcgggccctggttcctccttgtccccccttttttgggggcttgcnactttttgttttttattgngtggctttttgagnatttgaaccccagtcctgtgtccccttcctttttccttttatgtcccctctttgcgggggggcgntnaggttaagggggaattgggttttggtagggcttcccccttttccccatcccggtttccaaaaacccagtttttnaaaaacagggtgtgggcatttccatgcccctataaagggggcctggggtttttttggggntggggaggaataacccatgtatata

SEQ ID NO: 527392 - DNA, 186 bp, Homo sapiens
tctagcaggatccccgagcccagaacgatgaagttattccttggacagtgatatgacatttcagcttgtgtcacatacagcggcttgattcagcatgccactacagttgtaaaccaggatttcaggacatcatcggatggtatctatctctctgaaaaaggaatctgttcagctacgctgattaac

SEQ ID NO: 527393 - DNA, 1049 bp, Homo sapiens
ggatccatagcatgtgaacgattctctgtgcagtcagactcccgtagtagcttgatattaaacggtctgggactcacgacgactcacagtaatactatttccctgatgactgatacacagagcgagaactgcaaggaacatgtctcaaacatagcatgtgtccagctcctgtgaactctgaagaaaaagcttgaagaccccaagaaggatggcaagctttctcatataaataatcaagttgggagatgaatgtatccctggtgatctggaatttgccctcttgagtcgagacaaggtatgagcacaagggcactatctcatagcaaggtaaatggcatcgtcgtgtcccctgtgtcgcgaccttcttccattcttgatcgaacagagcagctagtgatgtgccaacttggatctcggataagatgagtgttaattacagacgtatttatggttggtgtcggattggcaggagaagaggcgatttgatctcagaatagaatttggggcctgctcctggaattttgaagcatcgaagacttgaatacgacattgtcgtagagaacgcaaatgaactatgggggaaacccctttatgaccgaaaagagaaacaactaggtcaataggtgttgtgcttgagttgtcgcccttagaaccatcagatagagaggaagaccccattgaaatcggtacggagtagagtgacgatcccacctagggtacatgagggcatctataccctggagtagtaagccgtcttccaggtgcctcaacaagatggacattccgtcaccatggcgagagatacccacgatcaggtcaggttcaactcctacgtcaatatgaagcccacgagaatggtgttacagtattttaccctcttgcacagagtgtggaattgccacatgggaaacatttaaaaggaccaacattatatcatgatgcgctggacggacaacttaattcgttcttcacccagaatcctatgcatatcgtagaaaaataatatcaatcattagaaaaaaaaaagaataagaaaatagaacaaataa

SEQ ID NO: 527394 - DNA, 177 bp, Homo sapiens
gttagttttaccctactgatgatgtgttgttgccaaagtcaaaactatagaagagttgcctcctgtctctcgaatcttccagagatatcacttaattgttaacagcttttgtgttaatccccctcaggccctaggtctcttaatctcaccaacgcttgagagagtgatatcctcagg

SEQ ID NO: 527395 - DNA, 129 bp, Homo sapiens
  misc_feature (49)..(49): n is a, c, g, or t
  misc_feature (67)..(67): n is a, c, g, or t
  misc_feature (99)..(99): n is a, c, g, or t
  misc_feature (118)..(118): n is a, c, g, or t
gatcaaatgtgggcccgtttttggccgccgccgccctgccccgtccctncggccaccacctaattanttgccgtgcttcctgctgctgtaactgctttnttacctttccaataaagantttcttggttt

SEQ ID NO: 527396 - DNA, 479 bp, Homo sapiens
tacatcaaccaaaggaaaggactaagggtcaagaggagagagaagaaatgctgtcagacacatagaaagtcatgagcacaacggcactattaagtccttccctatctgtacactacttcaaatataactggcttacaacacctacaaaacgcaccagcataggcagaatggattcaaaataaacaggcatcgcgagcccgggcatgcggtggttcactgccttgtactcctggcactttgcagcagtctgaggcaggtggcatcacctgcaagtcagcagtacagagcacatgcttggacaacatgcacagacccccgtctctcataaaaatacaaaacattcagctgggcatggtggagggccccctgtaatcccagttactcgggaggctgaggcaggcacatcacttgatcccagagaggcggaggttgcagtgagctgagatcgtgccactgcgctctacgctggtcgaccagcg

SEQ ID NO: 527397 - DNA, 152 bp, Homo sapiens
cagatcgactgacaacatattcgttataaaatcttgtgccaaaagttttttttgggtttgaagaaaataaaattgatagaacttttggaattccagaagactttgactacatagactaaaatattccatggaggggagggagacatccctgt

SEQ ID NO: 527398 - DNA, 312 bp, Homo sapiens
  misc_feature (231)..(231): n is a, c, g, or t
tgcgtacagctactattgtggggtcaagtaggttcctgcggcacagcataggagcagcatcagcccgagtagactggtctgtctgtcatactcaggtctccggagaggggaggatattatttctaaagttgcacttattgtgaggatctcaggattgttgggggctactgaaaagaggaatgtgttgaatgtcgcgtttgctgtccactcgtcctagaagtatagtgtttntgtcactgtcgtgtttctgtgggcagagctggttctggagggtgtgtcagtgcacccgaggctcagagcatccatccaccc

SEQ ID NO: 527399 - DNA, 194 bp, Homo sapiens
cactccttacgtctcagttcacatcccaactctatatttacaataacgaattcaggatgaggaagtaaaaacaggtcatctattcacaaaagtgaaatacttcattaaccccagctcaaactatacaaactgcttacagcatttgctgacaattgtctccaattctggctcatcaacattcatttaggttttcc

SEQ ID NO: 527400 - DNA, 642 bp, Homo sapiens
  misc_feature (57)..(58): n is a, c, g, or t
  misc_feature (199)..(199): n is a, c, g, or t
  misc_feature (201)..(201): n is a, c, g, or t
  misc_feature (546)..(546): n is a, c, g, or t
ggaaatattataaggaccattaagaagtgaagcaaaggtaaagccactgaacttagnngggagatggaggtttctctggaaataatcagttaatataaaaaatccaattctttcctcctgttttcctccctccctccctttattcctccttctcctgcttcctccatcttccctccctctctcttttcttctttccttntntctttcctttcttctctactttcttggttctttccttttttcctccaataaacaagttgaaacaattatctgattcttatttctagacaaaaaaaatcaaaagtgattattttccaggattaacaaaactgtgcattaagaggaaattctttagatcagatgattttaaattttagaaccgtgatcacacaagtcatattagagtatttttttttgcaaaatttctctcttaagccccaaattcttaccgtttacgtgacagtatccttgaaactttataaattggccttttacattcaagtctgtctgtactgaacctaattgtcatatcatggagatatgttncttgcatctaattctcatttggattatgcttcctcacagggaccctgaccactgaacaataaagcaattatcgccatgatgatatgcaatattgag

SEQ ID NO: 527401 - DNA, 483 bp, Homo sapiens
acccgccaagctcataccacgtgttctcactgtataagtgggagttaaatgatagagaacacatgtacacttatgagcagaacagacactggcgcctattgacagggtggcagggtggcgggggagcagcacacaaaataactatcgggtactagcctgggtgatgaaatactttatacaacaaaccacagatgacacaagttaacccaaagaacaaaccggcacatgtgcccttaaacctaaaagtacgtctacttgagagagagtctcgcactgacacccaggctggagtgcaatggtgcaatcttggctcgctgcaaactccacctcctgggtacaagcgactcttctgcctcagcctcccgagtagctgggattacaggagcacaacaccacacccggctaatttatagtcgttctagtagagacaggggttacactatgtaagccagactggtcttgaaattctgacctcgtgatctg

SEQ ID NO: 527402 - DNA, 288 bp, Homo sapiens
  misc_feature (220)..(220): n is a, c, g, or t
  misc_feature (226)..(226): n is a, c, g, or t
  misc_feature (265)..(265): n is a, c, g, or t
ttctccccacctcagcctcctgagtagctgggactacaagtgtgcacccaccatgccctggctaattttttgaatttttgtagtgatgggatctcgctctgttgcccagggtggtctcgaactccctggcctcaagcgatcctcccacctcgacctcccaaagtgctgggattacaggtgtgagccacctcgcctgggcccccttctccatatgcctccnaaaacntgtccctggagagtagcctgctcccacactgtcactggntgtcatggggccaataaaatctc

SEQ ID NO: 527403 - DNA, 698 bp, Homo sapiens
tccagttagttctgatttcaggtcatccaaaaaaccccgtgccaaacagagtcttaaaagctgcaaaaattccctggcgctgagctaattacttcgggattgttcaacagaagctcaggattgcctcctcctctcattcgtgtgtccccaagccttttcaatagccttctccgaagaagttttcgtgcatctcagcccgctctcattcaaatctccagggaaaagtctcagtctcacgagtgtgcctctctgtgagaacacctgtgtgtgcccgagtgggcgacacttactctcgaggtctcgaggggagaagagtggtgacacagacagaggacaaccgagacagtgtgtgtggggacacccaaaagtgtgcccgcgaaacacccgcgggaagaagacgggaggaagaaagcccgggacgaagcggttcacgcggggtacacagcggccgaaagatattgcagaaacgccacacaacaaagcaaacaggcaagaggagggtatcgaaggggggaaaaaaacccattgtgggaacacccccccgagatattagcaggctcttgttcatctttatagaacctaactattctgcggcctgaagacaggaccaagtttcttctcaagtctgcccaaagttcgcagaaatcttggaaaaagcgcctggacagatctggaaaacgctgaacgtggtgaacagg

SEQ ID NO: 527404 - DNA, 712 bp, Homo sapiens
  misc_feature (390)..(390): n is a, c, g, or t
  misc_feature (416)..(416): n is a, c, g, or t
  misc_feature (557)..(557): n is a, c, g, or t
  misc_feature (613)..(613): n is a, c, g, or t
  misc_feature (676)..(676): n is a, c, g, or t
  misc_feature (696)..(696): n is a, c, g, or t
  misc_feature (706)..(706): n is a, c, g, or t
gggggctccttctagtgagcaagggccctgagcttctacagcccttcgtatttattaggtagaaagagcagggagggagaggtagcagttggtcagttgcttgatttatcacaggtatacataattgctttctttgtacaacaggcttcagatgttcctatagataatcacaaggaacactgtgcttggggtgtgactgccctcagcaacccttctggcagcagacacagttgttagttttccaacatcctgctttcatgagaacagttttctatttgctcatatagcctccagtggtatactgagttggtcacgaccctcattctttcggcctgtaacaggctcatgcctgtaatgccagcacttttggaggccggggcaggaggatancttgagctcaggagttggagaccagnctgggcaacacggtgaaaccccatctctgcaaaaattagcctggtgtggtggggtgcgcctgtggtctcagctgcttgtggggctgaggcgggagaatggcttgagctccgggggtcgaggctgcagtgagccataatggngctgctgcattccagcctgggtgacaaagtgagactattctcaaaaaaaaaaaacngctggttgataaaaatgaagacaaaccacatttgcagggatataaaatcttaaccccatttantgggggtataaggctctggnggcaaaattncatctg

SEQ ID NO: 527405 - DNA, 184 bp, Homo sapiens
gctattttatacaggaaaactgcctctggaagttctcactataatgatgagcgattttatgtgtagttaacacaccttccagtaaaacctgtatattattattatttttgagacaggatctctctctgtcacccaggctggagagccgtggtacaatctcggctcactgcaacgtccgtctcca

SEQ ID NO: 527406 - DNA, 783 bp, Homo sapiens
tataaaatttattagttataaaaggggaaataggtaggagtagcggggtaagggcgataagtggtggggaggaagggggggggtttggttattgtccaactctggtctctttttattttaactgttggtaaaaaatatgggggatgtagtggtggatgttagaagaagaagtggagagaagaagggctatacgtattatgtggaggggaaaaaatttgggtatatagattggaaatggggggctatgtttatgggtcatggtgaaaaagaagcaggccggattgtcacaaggggtcgcctaggggtaaacctcgggggactcaaaagtggaaagggggctaatccctaagtttaattggccaattacccatataaggattaatctaatggactgaagttattgattggggaagtaatcggggttatgggttccattggtccggagagtcatattggtgtggaaagaggatacctattaaaaaggatatcatgggattagccggtaggctgagcgtagagcgaacatccctggaagggcaccctacccgggggacccgagggtcaatattccggggtgaaacaccgggacataacaacgcctacccggtcgcaatctcctagggcctaaccccggggaaaaaatcccggggcgagctaaagccccggggaaaaatggggcctgcacaaattgggcaataaaccaagaccgagcccaccaaacccggactacgcggcaaacgaaccacggaacccaaacccggcaccccccaaagccggaacaac

SEQ ID NO: 527407 - DNA, 377 bp, Homo sapiens
gtagtttttcactaagtatactctttaaaatcaacccagtaagagacagaacatttaaatgcagatagctatcaggtagacatacagtagaccgggcccctatacttgagtaagttagaaagtagcagaactatacatgcatataatacaagaggcatagtggcaatattgctcctgagttcccatagtgggaatcatgggaaatatgccttgctgtaagaaaaacctataattttgcattcccagatatctaatttagactatccactctaaacatttaattatcagcagctgtaacctctaaaaatgtgtagagtgatgtatggcttaaacagaaataaaaactagctttcaccagagcataaagaaaaacaaaa

SEQ ID NO: 527408 - DNA, 8017 bp, Homo sapiens
cagttttagttgtttttaatgagctttctgagcttggaaaacatgtcaaaattgtgtgtagttaaaagcctctgaggaaagagtctaaacattaaaccttcccgactgtggttcacagcaaaaatgtccagtgtttaggagcactagctcagactcaaactgccccttcttagcagtttgatcttaagcaaccttaatttgatctcaggcaaattacatttctctgggcctccatttactcatttttaagaagaggatatcaataacctaccacattgggttgttgtgaggattaaatacacattgaaatattaagaaaatgcctagcacacagtaagctctcagtaaatacttgctattattttatattgacctaaatatgccctttcatcaatcagttatattcttgggcaaggtattttaacaaatcactggccacttggaagtggaggcaacttgcagaaaattgtgagcataccatggagttcctggagttgtgcagcacagtgctggctggcctctgctaactttgtcttaataacctcaatgctaaatccatcctaagtaaatttaaatcacatccttagacacactgtccattctcaaaccgaatgaaaaaaaaattccacaagaaacaatgaaatacacattaacattttccctctatgtcccttgaatgtaagttctcttaaaattttctgtatactgattttatatcaagaacacttggatgataaataaacattaaggtaaaatgtaataggcacttcttttggggggaaaaactatgaaaggaacaactttttatattgaaattgcatcagaatccagggtagcaaagttataacttcttgaagttatcaaattaaccacagtccaaagaatggctgttagtatcctttggctgaacagattactgtgttaattagaacacagttattagtggttcttaaattcaaagtcatataaattttagtttatgcttgcacttaactcactcagttaattttcaaacataaggttcgactcctgttattagcgacttgacacgttctgctgaagctctcacttttcttctaattctgaaagtacttttatacattctgaaatggcatttcagcagatggaaaaatgaaggtggcaaatcaggaccaatttcttatttcaaggttaaattaatactaaaccagactattaatgaaaacatcttcatcaaaattaactagagagttggtagttctctgaaactttgtataaattttatttattactgtaaatactaaaatcacattgaaaacaccttaaagttaagtcccaacccgattattagagaaaatcacttgggcatccagtccccttgatcgaacctgggtaacaaaagaggcaaaagacatgatttgtgatgaaacttactattcaaatgctaaatgttttcaagctttaataaggtatatatcaattccaagtaccaagcataatataaaaattcaaattcatgggtttactcttaataagcatcaaaagcaaattttgcgcactgaatcctatcttactcttgattggcacaatgcattcagagatgagttataattaggaaaaaagagtgtccactgaatgcatcatgtgtaaaaatgcaattaacatttcaaaaccacattaaaagggaaaatacctaaaaagttaactcttaataaaattatttgaaacaatattatcctgcagataaaaatacatttcttgtatatacatgtagatttctacatgaaagaaaagattcagctccaaatagaaaagggctgacccttgataaagacatcttagattgccaaactgatgtgattaccactgtaagaactaaaaacagaaggataaaaagattaagttaaaggaaggataaaagtttagtcaactgctcctgaacagtggcagagttgggtgagaagtgggagatgaaggcagaaataagacaaagaagaaaggcaaagaaggcttcaactctgattgaaaatgagtggagaatcaaacaaagttgagaacagatatgatataggtacagtgagatacttgaaactagaatttgatagttgatagttatagaagctcaattaaatcatcttgaagtggaattagacaaagcatctacattttaatggagaaccagtattacagtgaccaggtaactcggcatggtattatcacttaaaaatttttcctaaataccatgaagtcggtagaagacctttgcatcagaccatgttctttgaagcttaaaaaagtccctgactgactaggaaagacagcacagtgctccaaaaagaaaccctgcagagatgtattaataccaaaaactccatttgaccctggacaggcccaggattcgggattcttcacaatgaggggaatggaccaggtttcttccaagcaaaacattctatcgttttgttgacaatgaattaaattgaaattgtttagaacaatcccaattttggtggggaaggaaaggaggataagttaagcaagataaagaaagctcacagaaacttcatgcagaggtacagcattaaagttctttgtttcctaattaatgttgtatgcagaagtattctgtaaactaaattttcctgacagaaaagttcccacatcctcaacagatgagaatgattgcattatttgggatccttgatcaatacgaaccacatactgtcccttctcaaagactaagttccttatttttcacccaaatcctatatattgaaagacaaccaaggtgctaaatgttaaccactagtcaagttaggaatgtctgaagaaaatatattaaccttgacataaagaagatgtttttggtcaaatttcagacatgtattattataaattaataactggctccatccaccaggttaaagatgaagggagggcctaagatgtctctagagtttatatacacacaagtgagtgtcactgttttgttttgtttttgacctagttttattaaatattgcttccttggggtgtgtttataacaactcccagaacatttcatgtaaggattcaaagcggtcatattaaaatacagcttcaatataaagtttatcacagttttacagtattcaaaaatgacagacctgccttaaaaaacaaaacaaaaaccaaaaaaggactattacacccaaaacataagaaaacaattaaataaacaagtttggcattttcataactttatagtataaaacagaatattaaatttattactggcaaacggacactgatttatttcctttgaaatgtgtcccatttaaacacactatacaagttcattatacaaaagatggatgatcattttgatgaaagaagtgcaccctgaaaatttttgccagtttagaatatttagctcttaaagtttaaaaaaaaagtccttttccttttttaaactgaaggctgaattcagattttttttgttgtctcatctgtcagccttcctggtttaaaaacaatagtgtctatggacgcccaccagggggcagtgtaagattagccattaaatcacgaacagctgcaaatattgtgcattcaccttgtcgtggtggattcatctctgcaaacctcttcagaatgttgctgaccatcatgggagcagcaacagaagagttctgctgtctgggaatgtctgcctgctgggttgtacctgaagccatgtcataaatgattggaactataatactaacaggttcttggggagggaccgatgttttctgagttagttgaagaaaaaatagcattttggatttcagcaccacagcaggcgtcccaggaggtgcaatcggcggcgcgctgggagggatcgtcaggcaaaactgaacattccattttagctgtgttgcttggtcagggaacagctccagcttcataatgtgcacacaatccctgaggatgtgtgtaggagctcctaatagcttggtgaaggctattaacgtattagctttaaatggtggtcctgcaactcttgtttcaaagaatttctccaaaacttgaagttcatcaggtttccactgtcctgcattttcaggtgtcacttttagctgaagcgtttggttggttttgggactaagagctactctgcatttcagtgcatcagtcttaaacatgatcactccgggttcattagaatttatcagctgcagcgtttcttgttgaataattctttgaagatgtcgtctcatgatgactgatccaaggaatctctcaagtggagaacaaaggtaactacctgccaggccgggcacaaggcctggagttggagagggcagcagtaaaatgttcaaggcactgtgagtgaggatggtaggtatggatgccgcccaagagcgctgaggtagtttacgaggtggaggcatgtttgttggcattgtttgagaacttgttccagctcgaggggaatgagaagcatctggaaccggagaatgtagtgaggggttggctggtgacattccaggcatgcgtgctgctggtgaggggccagacacttgaggagatcctggccagttccctgctcgtccacttggtgacaccatagtgtatggggaactagggtcaagagttccatgtggactagcaaaactggcccctggtcctattgagattccatgcgaggatgggggaggagttggaacaaatgacgctggtgatggggctctcaaagccccactgggggagctggcagcatgcagatttcctggagactgtgtgtgcatcattgagggagactgattgactgtgctatgataagatgtagggggtgaagtaagaggataagcacctgatgttcctggctgctttggaaatggctgttgctggggtggtggctggagctgcgatattaaagaatccatcatatctcctcctataggagaagggggattatcgtcctcatttacagaccttcttcgagcatcctgattgctgtcaacaaacatattcaggaacgtctttagtcctggtgcaggatagaaaccttcaactagtttgctgttatcaaaaagactataggcaccatcccgtattgccacaacacctcgactccggcagtatatatcaatgcaatacatgttcctgaaggccagtctgatgtgggtggacgactgtggcagaatggagaagcactggtaggcagtattggttctctgggtcaagcccaacatcggcacagtggggagtttgttgatggcatttaatggagcctgagtatcaaacagtacctgtaataactgaaccacatttggtgttttgttgaacatttcttgaagctgatggagaatggtattgtgacagttactgcaacctgagtttgggccaacagttcccaaagaaatgtggaatttttgatggatcgaattccattggatactaattgagcttcccttggtggttccataacacaagataagttttcggtaattataaacacgaacttctgagaaaatatttagatgagcaggtatgtctggtagagaacgtgcaaattccaacacacactcatataatcgtgcaatgctattccagtcattaagaaacatttcaaccacctttctaccaccaacaggctcagacaacagattttcatatgtcaggtaaacgtgccgggatggtccttgctccctagtagaagtgccattaagtggacaatttgcaaacactaactctgctacccaagtgcggttatttctaccttgtaatcggaaagtgcaatcaagaagagagcggtccagagccttttgggtttcctcagttatacccttacagggaggaatttttaataagcgaattgcatggctgaagccatcaccttccacttgcactccttgatgtggaatctccagattggacaactccaaccgaagtcctacaaatggcatatttgtatcacacatagcgacgaagtgggctaaaactttattgaaggcacacatttctcctgctcgttttgttttcttggattctactggacatggatcatcagacaacttgcgcttggcattggttctggtctgtttcccggtttttgtacgaaaaaccaagtcctgaatgttttccttgaactgctgcagcagcaatgccattgcagggctgtcttcacgatctgcagcattcacagacataaagtagtacttgtacgacagttgtgtgggtttattgggaacctccaacatctccacaacaatgtagtattgtggaaggcgggtaagtttaatgaacagtttattcttagaaaggtttccaataggatgagttgagtaattggaaagctgcaatgtttcactgcttatcgtaggcagatgttttatagactgcttgcaacgctgttgtccaagccaaaacttaagttgctgaatccagggtatgattcgtttcatatcatcattcacagacttctccatgtcatccagagtggcctggtcaagtccataaagcatcaattgaaacattccagaatgtaaatctacaaaaatgtgcagacactctgaattaccacagggctccaagatgggaacaacaagagctgggagtgcagtctctatggaagagttttcattggcattgaagcctctaagaatggccttcagttcttggagcttctgatgagctcttgcatggacactgtcaatcaggagtttttctattgataagtggtcgatcttcatggctctttctactaatttggaatcagaagctggcaaaggaggatcgtgaaaaatctgtaaaggcttggagacatcattctcatcaattttaattgtaactttgtgaacagatgctgttccagtttttctcccaagaacctgttgattccaaactgaaagggagaggcactttccagcatgatacctttccacctgcacaaggtctccccaccgttctcggattaacattagagtttgggaatgtaacacttctaactgaagtgataaacagaaagaatgtaggcagttgtacatatcctgaagaggtttctcatcagcaaagagcctagactgcaccagttgatggatgaagctgatttgcatgctatgaaccaaagctcgcccatctcctgtttccttatcctcaactagaatttctagcttgagaagacgccatggaacatcagggtcatctcccatcacagtcaaggtggcttcaaattctccttcaacacgaaacttcacccggccatttgcaactgtaagatttgctaactgaggaggaagatctgtggttacaagccgatgtctaagaatctgattcagctgatggagtgtggcttgtttttcaattttggtaattgggtctggaggaataattttatccctaatgcaggttggcagccgtgggtaagatccagtagttagtacatcaatggcatatgggatggcaaaactaggcaggcgtgcatggaccagagcatctctagctaacgaggccaggcgatcagcagtgtccacaaacaggatggcttgctgatctaaaaagcttgaaatcatcgcacatttttccactttgccagcattattagcccatttcactaaagctaataatcgaacgaagagttggcgtgtccggctagcaaactgcactatttctattttcctttccacatcagatttccttggcagtaggtccgtcaacaccataagctccgagtaggcccggtgcagcagaaattcaatgagggtgctcagccggtagcccgggctagccgcagctgcagcggccgccgccacggcggctcccgggggaggaggggctggggctgacgggggtccgccgctgcccccgccgccgcctccgggcgggaccagctggtggttctccagctgcactggggccatggcggcgcaggaccgggcttggcgcaacggcacacgatgcggtcctcgagcctcccgggcgctcggtcaccgcgccgaaacgggagcgggcagagtcgccaccgcctaccgccggcaaccctcggccgattaaaccagcctcgtactagcta

SEQ ID NO: 527409 - DNA, 246 bp, Homo sapiens
cctcacaactgcgcccggagagaagtcagctgcgctggctgctacagagttacagtggaaagtcacatgaggcttgtagcaccactgagccacaatgcaaaagtaaaaatcagctgccctggaagcctatggggactaatgattagtctcagaacagaccgagacacaaccgttctgccacaaccgggttcagggctcaaggttcgtcctctaggtcctcgctctttcctgtgtgcaaaagctgtg

SEQ ID NO: 527410 - DNA, 670 bp, Homo sapiens
  misc_feature (17)..(17): n is a, c, g, or t
tatcgattcgactcgtnccgacgagttgtccgagttataattaggaaaaaagagtgtccactgaatgcatcatgtgtaaaaatgcaattaacatttcaaaaccacattaaaagggaaaatacctaaaaagttaactcttaataaaattatttgaaacaatattatcctgcagataaaaatacatttcttgtatatacatgtagatttctacatgaaagaaaagattcagctccaaatagaaaagggctgacccttgataaagacatcttagattgccaaactgatgtgattaccactgtaagaactaaaaacagaaggataaaaagattaagttaaaggaaggataaaagtttagtcaactgctcctgaacagtggcagagttgggtgagaagtgggagatgaaggcagaaataagacaaagaagaaaggcaaagaaggcttcaactctgattgaaaatgagtggagaatcaaacaaagttgagaacagatatgatataggtacagtgagatacttgaaactagaatttgatagttgatagttatagaagctcaattaaatcatcttgaagtggaattagacaaagcatctacattttaatggagaaccagtattacagtgaccaggtaactcggacaactcgtcggggatcctctaggtcacccagcac

SEQ ID NO: 527411 - DNA, 791 bp, Homo sapiens
attctaaggaatagcacgaatataaactaacaattttccccctttagttccagtctcatatttaaagtctcctcacgtaatgatgtctccagctatctcctcttctttctgatcaggtgtccataaacaaatactaagtttctgcagaaatatacattatcattcagaaatatgattattcacatgtcactcaaatcagcagggataagttaaagctaaaatgtaaaactatgtctatcataacattcgaaaagttattttatacaaagtaaaataaaaagtttaactcaccgcacatttttccactttgccagcattattagcccatttcactaaagctaataatcgaacgaagagttggcgtgtccggctagcaaactgcactatttctattttcctttccacatcagatttccttggcagtaggtccgtcaacaccataagctccgagtaggcccggtgcagcagaaattcaatgagggtgctcagccggtagcccgggctagccgcagctgcagcggccgccgccacggcggctcccgggggaggaggggctggggctgacgggggtccgccgctgcccccgccgccgcctccgggcgggaccagctggtggttctccagctgcactggggccatggcggcgcaggaccgggcttggcgcaacggcacacgatgcggtcctcgagcctcccgggcgctcggtcaccgcgccgaaacgggagcgggcagagtcgccaccgcctaccgccggcaaccctcggccgattaaaccagcctcgtactagcta

SEQ ID NO: 527412 - DNA, 351 bp, Homo sapiens
  misc_feature (1)..(1): n is a, c, g, or t
  misc_feature (5)..(5): n is a, c, g, or t
ngtanctcccaggctcaagcgattctcctgtctcagcctcccaaatagctggggattacacacaccgggctcagccaatttttgtacctttactagagatggggttcaccatgcatttccaggctggtcttgaacttctgacctcagatgattcacccgccttgagctcccaaagtgctgggattacaggcatgagccactccacccagccgacatgcatattataaatgatagtcaatcaactcttggcgagaaataagtgtgcaccaggccctgttccaaatatatgtattaaattatttaatcttgatgtgtgccttatgagatacatattatcatacatatattaga

SEQ ID NO: 527413 - DNA, 1026 bp, Homo sapiens
  misc_feature (6)..(7): n is a, c, g, or t
  misc_feature (788)..(788): n is a, c, g, or t
  misc_feature (828)..(828): n is a, c, g, or t
  misc_feature (853)..(853): n is a, c, g, or t
  misc_feature (862)..(862): n is a, c, g, or t
  misc_feature (974)..(974): n is a, c, g, or t
  misc_feature (986)..(986): n is a, c, g, or t
  misc_feature (992)..(992): n is a, c, g, or t
  misc_feature (995)..(995): n is a, c, g, or t
  misc_feature (997)..(998): n is a, c, g, or t
tggatnnccgggctgcaggaattcggcacgaggctaaacctagccccaaacccactccaccttactaccagacaaccttagccaaaccatttacccaaataaagtataggcgatagaaattgaaacctggcgcaatagatatagtaccgcaagggaaagatgaaaaattataaccaagcataatatagcaaggactaacccctataccttctgcataatgaattaactagaaataactttgcaaggagagccaaagctaagacccccgaaaccagacgagctacctaagaacagctaaaagagcacacccgtctatgtagcaaaatagtgggaagatttataggtagaggcgacaaacctaccgagcctggtgatagctggttgtccaagatagaatcttagttcaactttaaatttgcccacagaaccctctaaatccccttgtaaatttaactgttagtccaaagaggaacagctctttggacactaggaaaaaaccttgtagagagagtaaaaaatttaacacccatagtaggcctaaaagcagccaccaattaagaaagcgttcaagctcaacacccactacctaaaaaatcccaaacatataactgaactcctcacacccaattggaccaatctatcaccctatagaagaactaatgttagtataagtaacatgaaaacattctcctccgcataagcctgctaaaacactgactgacaattacagcccatattacatcaaccacaggcattataccctactgcaaccacacagcatgctatanggaaggtaaaaaaaaaaaaactgagggggcccgaccaatnggctatatgagcgatacaatactgncgcgtttanacgtctgactggaaacctgcgtaccaactaatgctgagaaatcccctttgcagtgcgaataaaaaagccgaccatgcttcaacattgcaactatggaaggaattagcgtaanttgtaaatccgnaatttnaanannctttaacaagcaatggaaacttaattaa

SEQ ID NO: 527414 - DNA, 1733 bp, Homo sapiens
agctgcatgcttatcgagataccagggaagtgagagtgagataccacgatgttatggctcctgcgtatggtccctatcgtacattcagtgcgaagatctagtgcgctctattgagtccatgtaatattcccaccttgtatcatagaaatgagttgactttgcgtctagggctcaagtgggatattgggattcaggcctaatattcagagagtcgaccacgaaatagtgattgtcatggcgctagacacatcgagaggtcgttgcataacttactggtatgatccaaggccattagcctcgatcaggacgatcttgatatggattatacatcgtaaatcacatgcttgaacgagtgtctaaggaataacttggatacactaacatgtgccttgtgctgatgagtcgtttctgaatttctatcatcgtaattatgactagcagatatagctgcccagaatcctgtttgttacatgtgaatatagcgtattctacgtagatcatatcattcgaaacgcctagggaagaagaaccgcgtagcacattgtgtggatcaatggtgttacatcctacactcgaactagggtcgcgattctcaagcttgtatctctatttacttaatgtgttcgaactacacgtcatcttgaggggagtgtgaagccaatgacttcgcagcgttgggaagggcaaactttactctccatgagtagaattgttcactggggagctttttaaattaagggcagtggggggttaaaacaactttaactccaaccgtggggcccttatgagcgctaaaggtacggggaaacgttggacacacacgaattcacatttccaacccaacaaaacaaatggcaattttaacattccacgcattacggaacaggtttccttacagtctccaaaccgcaagcggggcacttattttcggctctggaaacggcttttaaccccttccctttgttttaaggcctcttaagcattacccatcttggcgatttttccttttttccaacaaatcccacagcgacacacggaccttttcggaacaacagggtaaatcccccaagaaagtagacgccctttttataccaaggtgggttgcaaacttcttttcaactaccggtacttttggcacacaccttgtcgtgcactgatcaaagtcgccggccggacttgtgctccacctctggcgcgtctaactcggcgacatgctttgacaatggcacacgcgtttcctgtgtgactatgttcaaaacaaccttgtacagaacggccatgcactgcgacaagtgcgggcacagaacgagacacactcccacacctgtgtgtgcgcacggcaggcatgatttcacgggacagaattgatttagcagttcatccagcgggctatttagtagacaaccctcgcgttcttgctgtctccaaggagtccccgggtggaccaaacattggccggcgcagcacgacggcgccgacgactcacgttgatgtgcaccatcatagtcacacacatcccatccacgcctcgatcacctgtctatcacaccgccgagcggtcagaaacaaaaacaggaggctggatcccaccctccgcgccgcctgccacgtctcgagcctgccagaatgcgtcactgaccgactcgcccagtagttccgttgatgcagacacgtcactaatctaacacatcatcaccacactcgcatcactgacgcttaggggggaggggagg

SEQ ID NO: 527415 - DNA, 744 bp, Homo sapiens
  misc_feature (548)..(548): n is a, c, g, or t
  misc_feature (554)..(554): n is a, c, g, or t
  misc_feature (556)..(556): n is a, c, g, or t
  misc_feature (628)..(628): n is a, c, g, or t
  misc_feature (686)..(686): n is a, c, g, or t
  misc_feature (694)..(694): n is a, c, g, or t
  misc_feature (701)..(701): n is a, c, g, or t
  misc_feature (710)..(710): n is a, c, g, or t
ctaaacctaggcacaaacccactccaccttactaccagacaaccttagccaaaccatttacccaaataaagtataggcgatagaaattgaaacctggcgcaatagatatagtaccgcaagggaaagatgaaaaattataaccaagcataatatagcaaggactaacccctatacctctgcatactaacccctataccttctgcataatgaattaactagaaataactttgcaaggagagccaaagctaagacccccgaaaccagacgagctacctaagaacagtctatgtagcaaaatagtgggaagatttataggtagaggcgacaaacctaccgagcctggtgatagctggttgtccaagatagaatcttagttcaactttaaatttgcccacagaaccctctaaatccccttgtaaatttaactgttagtccaaagaggaacagctctttggacactaggaaaaaaccttgtagagagagtaaaaaatttaacacccatagtaggcctaaaagcagccaccaattaagaaagcgttcaggtcaanacccantncctaaaaaatcccaaacatataactgaactcctcacacccaattggaccaatctatcaccctttttggaagncctaatgttaggaatagggaaccatggaaaccattccccctcccgggataagccctgnggtcaggnttaaaancccctggancctggccaatttaaacgggccccaatttttttcc

SEQ ID NO: 527416 - DNA, 858 bp, Homo sapiens
ctaaacctaggcacaaacccactccaccttactaccagacaaccttagccaaaccatttacccaaataaagtataggcgatagaaattgaaacctggcgcaatagatatagtaccgcaagggaaagatgaaaaattataaccaagcataatatagcaaggactaacccctataccttctgcataatgaattaactagaaataactttgcaaggagagccaaagctaagacccccgaaaccagacgagctacctaagaacagtctatgtagcaaaatagtgggaagatttataggtagaggcgacaaacctaccgagcctggtgatagctggttgtccaagatagaatcttagttcaactttaatttgcccacagaaccctctaaatccccttgtaaatttaactgttagtccaaagaggaacagctctttggacactaggaaaaaaccttgtagagagagtaaaaaatttaacacccatagtaggcctaaaagcagccaccaattaagaaagcgttcaagctcaatgccccagctagatactaccgtatggtccaccataattacccccatactccttactactgattcctcatcatccaaataaaaatattaaacacaaaattagcactacctccctcatcaaagcccatacaaagtataacaattataacaaaccctgagaaccaaagtgaactgaaaatcttgtcgcttcattcatttgcccgcacaatccttaggactaaccgcgaagtactgatcattctattttccccctctatggatccccagctccaaatatctcatcaatgaaccgattaatcagcaaccaagaattgacttatcaaactaacggaaac

SEQ ID NO: 527417 - DNA, 628 bp, Homo sapiens
  misc_feature (5)..(5): n is a, c, g, or t
  misc_feature (11)..(11): n is a, c, g, or t
tagcncgaacncactctacattactatcagacaaccttagacaaaccatatacccacataaagtatatgcgatagaaattgagacctggcgcaatagatatagtaccgcaagggaaagatgaaaaattataaccaagcataatatagcaaggactaacccctataccttctgcataatgaattaactagaaataactttgcaaggagagccaaagctaagacccccgaaaccagacgagctacctaagaacagtctatgtagcaaaatagtgggaagatttataggtagaggcgacaaacctaccgagcctggtgatagctggttgtccaagatagaatcttagttcaactttaatttgcccacagaaccctctaaatccccttgtaaatttaactgttagtccaaagaggaacagctctttggacactaggaaaaaaccttgtagagagagtaaaaaatttaacacccatagtaggcctttaaagcggcacccattagaaagcgtcaagcttaacaccactactaaaaatcccaaactttaactggattctaaaaccaaggaccaattattacctcttgagaactaagtgtggtaaggacctggaaaaattttctcgcatccgggtt

SEQ ID NO: 527418 - DNA, 769 bp, Homo sapiens
actttgtaggaagccagaagcgtctcctttgttgaacagtgccaaaatagcagctctgctttggtatcaggatgacgctggcttcataaaatgagttagggaggattccctctttttctattgattggaatagtttcagaaggaatggtaccagctcctccttgtacctctggtagaattcggctgtgaatccatcaggtcctggactttttttggttggtcttcgattagatattacttcttctgaacaatcttccttgatgacccagctactttacatctctggatggaatcctcctctttgctctaatgagtctgtggctgtgtgttgaaatagcagagccatgagatgagatccttggattactgtatggaagagagccacctagtaaagacactcaactcacattgaagtttgtatgagtgagaaaatctctgttgtggcaaagaacatataattttaagctaaatccaatcctgatttattactacaccaattaccagagagctttgcaggctcctggcatatatgccaaacacagggtaccccatggctccttgtcagtgttcacttgaggatgaactaaaatggccagtcgttgttataccatgttaaaactacaagtgcaattttgccacaaaaacaattgacattgttacctcttgcaagggaagcatcatcctgtccataacggcttgtggccaaaatcgtcgttaaagggggataaccgtgaagagccttcataggaaaggatttttaaccatctag

SEQ ID NO: 527419 - DNA, 571 bp, Homo sapiens
  misc_feature (571)..(571): n is a, c, g, or t
ctaaacctaggcacaaacccactccaccttactaccagacaaccttagccaaaccatttacccaaataaagtataggcgatagaaattgaaacctggcgcaatagatatagtaccgcaagggaaagatgaaaaattataaccaagcataatatagcaaggactaacccctatacctctgcattgaattaactagaaataactttgcaaggagagccaaagctaagacccccgaaaccagacgagctacctaagaacagcctatgtagcaaaatagtgggaagatttataggtagaggcgacaaacctaccgagcctggtgatagctggttgtccaagatagaatcttagttcaactttaaatttgcccacagaaccctctaaatccccttgtaaatttaactgttagtccaaagaggaacagctctttggacactaggaaaaaaccttgtagagagagtaaaaaatttaacacccatagtaggcctaaaagcagccaccaattaagaaagcgttcaagttaacacccactaccggaataaaataaaggataagctgcatcttgcggccgan

SEQ ID NO: 527420 - DNA, 350 bp, Homo sapiens
actagaggatccgtggatgttatcccaacacaatgccacgagtgccacagacaagcccaggcacagaccacagtctctgtgagctctgacataggggctggaatctcaggctcccagtgtttcagaagaggctgggtccaggcccagtgctccaccttgcagtcataaatctcatcagcagaagggaggaaggtgaggtaactgatcttgaagaaggaatgatcactcttggagaggaagctggtttcagaaacaccttctgtgactgcgtgcccattgctcagccatgtgatgttgaccacaggaggaaagatgttgtccacaagacagatgagggtgttgggcgataa

SEQ ID NO: 527421 - DNA, 886 bp, Homo sapiens
ctaaacctaggcacaaacccactccaccttactaccagacaaccttagccaaaccatttacccaaataaagtataggcgatagaaattgaaacctggcgcaatagatatagtaccgcaagggaaagatgaaaaattataaccaagcataatatagcaaggactaacccctataccttctgcataatgaattaactagaaataactttgcaaggagagccaaagctaagacccccgaaaccagacgagctacctaagaacagtctatgtagcaaaatagtgggaagatttataggtagaggcgacaaacctaccgagcctggtgatagctggttgtccaagatagaatcttagttcaactttaaatttgcccacagaaccctctaaatccccttgtaaatttaactgttagtccaaagaggaacagctctttggacactaggaaaaaaccttgtagagagagtaaaaaatttaacacccatagtaggcctaaaagcagccaccaattaagaaagcgttcaccaagccaacgaccactatctaacaaatcgcaaacatataactgaactcctcacaccaatagggacatctaacaccctatgaaaactaaggtggatagtacatgaaacattctctcgataaccagcgtcaataaaccctgatgcaatcacgccaaattacgcaccacagcataacctaaggaccaacaggtgccacgaggtacacaaaccaccaggggcggcccacgaagagagaaccgcggaacgcaggacacggccatcgtgacccccaggaaaacgacccagccagaaagaacattcgccccatagggactgccgcccgaagagccacgtcaccgaacagcacagcagaccacgagcacgggcg

SEQ ID NO: 527422 - DNA, 941 bp, Homo sapiens
  misc_feature (5)..(5): n is a, c, g, or t
  misc_feature (11)..(11): n is a, c, g, or t
  misc_feature (518)..(518): n is a, c, g, or t
  misc_feature (768)..(768): n is a, c, g, or t
  misc_feature (777)..(777): n is a, c, g, or t
  misc_feature (889)..(889): n is a, c, g, or t
  misc_feature (901)..(901): n is a, c, g, or t
  misc_feature (907)..(907): n is a, c, g, or t
  misc_feature (910)..(910): n is a, c, g, or t
  misc_feature (912)..(913): n is a, c, g, or t
tagcncgaacncactctacattactatcagacaaccttagacaaaccatatacccacataaagtatatgcgatagaaattgagacctggcgcaatagatatagtaccgcaagggaaagatgaaaaattataaccaagcataatatagcaaggactaacccctataccttctgcataatgaattaactagaaataactttgcaaggagagccaaagctaagacccccgaaaccagacgagctacctaagaacagtctatgtagcaaaatagtgggaagatttataggtagaggcgacaaacctaccgagcctggtgatagctggttgtccaagatagaatcttagttcaactttaatttgcccacagaaccctctaaatccccttgtaaatttaactgttagtccaaagaggaacagctctttggacactaggaaaaaaccttgtagagagagtaaaaaatttaacacccatagtaggcctaaaagcagccaccaattaagaaagcgttcaagctcaanacccactacctaaaaaatcccaaacatataactgaactcctcacacccaattggaccaatctatcaccctatagaagaactaatgttagtataagtaacatgaaaacattctcctccgcataagcctgcgtcagattaaaacactgaactgacaattaacagcccaatatctacaatcaaccaacaagtcattattaccctcactgtcaacccaacacaggcatgctcataaggaacgatacaatactgncgcgtttanacgtctgactggaaacctgcgtaccaactaatgctgagaaatcccctttgcagtgcgaataaaaaagccgaccatgcttcaacattgcaactatggaaggaattagcgtaanttgtaaatccgnaatttnaanannctttaacaagcaatggaaacttaattaa

SEQ ID NO: 527423 - DNA, 405 bp, Homo sapiens
  misc_feature (51)..(51): n is a, c, g, or t
  misc_feature (308)..(308): n is a, c, g, or t
acccactatagctactccagcctgggcaataagagctagactctgtctcanatacaaaaacaaaaaaaaaaggataaaaagtttttcccacccttcccaggttgcctctgcacgggggcaattccttcattgtccggcaggttgtccaaggttataacctcagccttaatttctcgttccaatgaagcctaaggatgacccaaaggttgaaagtttgagggcctcctcaggtgtgtttctgagccccttttctagccccaggggtgtgtgcttggggcttcgtggattcccacagcatgaacaggagncttcccaacagccctttagaaccttcattgtagcctctttccccacgcctcttccttcctaggacttatctgttcagctcttatggcccaggctgaa

SEQ ID NO: 527424 - DNA, 130 bp, Homo sapiens
tagaatcgagccggtaccgtaggtctcgatcgttatttcttcaagtataacaccatctacgggactaaaagatgtccaagagaatagtgtgcaactatgtaaattcctttttttttctttttttttggag

SEQ ID NO: 527425 - DNA, 190 bp, Homo sapiens
gactattaaggagcagaaggcaagcagaagtaagccgcgggcgtctttgattgtgtagtaagggtggacggtgattttatcggaacgggatctagacaaccccctaggtaatcacgcatcccattccgcataaaatccacctttccaaccatttacttacaccaatcgaagcaccggggattccttctta

SEQ ID NO: 527426 - DNA, 147 bp, Homo sapiens
tagattctttccattttttataattagaagcacagaggaaaaggggcaaaatgattaaagaaatttatgttttttaacagggggttggctttacccccaccgaaaaaggaacaacccgggtggaaaaacgcttttgaccctctcact

SEQ ID NO: 527427 - DNA, 1182 bp, Homo sapiens
aaaagcttctagtctccataacccccaaagtactgcttatttgtttgaagaatccagccatcgtagtgctttcaggtcactatcgtcaaacattccatgcatagggcaaggcattttaacacaccacggcattcttgccttctgtagtcatcacaggtgcaacagcaagcatccgtacacgaacccactcacagaggcatctatgatttggtagtccatgccgtcgttacaaagcaccaaggaagttgcaacgatgctatccagatgcattatgtctccggtaatgaccttcttccgttatatttggacactattcctcttacatttcatggtagccgtgtcaaagtatctttgacattatgatcaaaagcttcgcaaactactacgagacacaagccacaatatactggctggctgacctggagccttctgcaacgacttagccagtagtccagaacagcccttatgcgctctactgatatgtagataacacctatacaggcccatgttagccatttatccacgagaacagaagagacttattactcactttacagcgggcgaccatcacaaggcgtacagccatcccatcattggggccttatttctagacacaagaccaaacatatacagagatagagtagttacaaaaacgtggtcagccattatcaagttataaccccttcaaacgcggagaaagccccgtggccacttcattcaagcagctattctcagttacaaaagcatatacggaatgtgccaaagacgccgtatacgcccttggaaccggctatgatatcctatagcctggctggttaacagttaccacgctatacaagcgtccatggtcacctatatcgatataaattgaggaaattggaaacatcgcaccctatgctggcgaggcggtacacttgccacggcttgtggtccacatatccccacattgggtgccagaaaaggcaaccatatctatccaccattgccaaattttactgccgtacgcagcgagagaacacacagggcaacactgacaacaaggcattgcaaatatggcgaaccaagattatttaccccatcaaagcattataaccagtacgtcatgtacacactgacatctagaaaggtatcccaccacccagtattgttggtttacccccaaaaccaatttcgcgcatttaa

SEQ ID NO: 527428 - DNA, 550 bp, Homo sapiens
  misc_feature (34)..(34): n is a, c, g, or t
atttaccgaacagttagttttgcaggtcgaagangcccgctgtcgacgctcgcgataggaacagcgcgatcttgcgaactcttgaacactccgccagcgtaaggcgctgcgccgggccgggtagcggccagttgcgcggcgacaatgtcatccttgcctttgctgtccaggtcaagatcatatttggtatagacgtatttgagcttcggcgtaataaagccatagctccagttcattgggtactcgacagcgggagcttacgttcaagcgtgttccgtttgcacgggtcaggccgtttacgtaggtgtccaggcgtcgttcacctatagtgccatcaggattgaacggcccgccgtcttcgttaaccacattaccgtttcgaaggtctcggtcagatcttacggcttcagtctcgtaggagaagttgagcccccccggatggtacggcaactgaccattgaaggtgatctgcggcaaacggtcatacggagtgatctgcgaaatcgtcgccagttgatatgactgcaggtccggatcccatttgcggggg

SEQ ID NO: 527429 - DNA, 743 bp, Homo sapiens
  misc_feature (632)..(632): n is a, c, g, or t
agccgttccagcacggtgcttgtgtttgtgaaacagagaaaggggacccccgaggaccccagacaggcccttacgactctcatatcttacttgtttttctccatctggtggctctttgcgtctctggtttgcttctaccttttcatggccccagaatccatattgcaagttaagaggaactcttcctgggagatacatatttaaagtcctccgtaattcaagaacagataggaataaaagaataaatacacacagacatcctgaaatagcaccaaagaatagagggtgcgtgcgccgagctgctcagagagatccctcagcgggggcctccagcctctagagctcccccctgttctctcgaccagggggcgccccgcccacatcgcgaggtgaccccttctgtttcagagaaagcccacatggtcgcagggggacccgttgctatgtcaaaaaaccttctacagggcaagggcgcgaaaagaaagccccgagtactggcttcgcgtggccttgcttggcgcgtcacaagagagtaaccactgtattgttccatgggggcgcctggggggaccacccagaattgggggcactcttttgccacccaaaagcgttagaactccttgagagacccnttcccttgacataggggacacatacgtgttgacctaccattaatgtctatcacatacagcgcgttgtgtaaggaaagtgtcgtcgctattccccaaggacattcgtctggt

SEQ ID NO: 527430 - DNA, 435 bp, Homo sapiens
tatgacattctctataacacactagggctttacagatttgagagagtggtaattctctatgacatttgtacagaaagaagagccaggatattctttgttttcctaagcgtagctgtgagcaacattatctctcctactggcttctttgaggtatgagagtcatcattacatcctggtgctttgtcaagttatatgtcacaattccacctgtgggtagagaacaagcacaagagtcacatcaactgtgtgctgggccagggttatgtcacaatcttccctgagagcatgcaccaggcagaagagtcacatcacagggttctcaaccagagatgttacaatcctctcctgaaagcaggacacaggaaaaagagtaagatcacctgcatgctgggctcagatatatgtcacaagaatcactgtggggcggggatcctc

SEQ ID NO: 527431 - DNA, 449 bp, Homo sapiens
  misc_feature (5)..(5): n is a, c, g, or t
  misc_feature (77)..(77): n is a, c, g, or t
  misc_feature (90)..(90): n is a, c, g, or t
  misc_feature (125)..(125): n is a, c, g, or t
  misc_feature (138)..(138): n is a, c, g, or t
  misc_feature (144)..(144): n is a, c, g, or t
  misc_feature (156)..(156): n is a, c, g, or t
  misc_feature (166)..(166): n is a, c, g, or t
  misc_feature (168)..(168): n is a, c, g, or t
  misc_feature (202)..(202): n is a, c, g, or t
  misc_feature (213)..(213): n is a, c, g, or t
  misc_feature (239)..(242): n is a, c, g, or t
  misc_feature (249)..(250): n is a, c, g, or t
  misc_feature (256)..(256): n is a, c, g, or t
  misc_feature (260)..(261): n is a, c, g, or t
  misc_feature (271)..(271): n is a, c, g, or t
  misc_feature (274)..(274): n is a, c, g, or t
  misc_feature (291)..(291): n is a, c, g, or t
  misc_feature (306)..(306): n is a, c, g, or t
  misc_feature (319)..(319): n is a, c, g, or t
  misc_feature (354)..(354): n is a, c, g, or t
  misc_feature (409)..(409): n is a, c, g, or t
ctggnctgggccagcgctaacaggtgagcccaggagtcttttgaacccactctctcttgcctagaatagagacaggncaggctttatgtnccccattcctccctcccaactccagggacattganagggtcctttgtncccgcncgctggatattngggggctggntnggagggatctgatattttatgtttggtatctatnttttatacttngtgtggggggggtggcaggaagattnnnncccaganngctttntttnntcctaccccnccnaatatggggggggatgncgtccctctcccctnttgataagccccnttttttttttgttttttttttttttttgtgttttnggggggggacagggagagtggagtgctggttggaggggccccccagatcggggantcaccccccaaatttactctcttttgggtggattttggtt

SEQ ID NO: 527432 - DNA, 227 bp, Homo sapiens
gacacacagtactcctatatacttagagaggtgtcatattctgcatattaagcgtttgatctgtgaaattaatttatggataattcagttctactttttatttcctttgctgcccctaccgggccttctcaataacttacaataacatattgttttaagcagttacttatgatcatattcccgagacttttctgcaatttgacgatgacttccactcacaggaagac

SEQ ID NO: 527433 - DNA, 154 bp, Homo sapiens
caggcagtatcctaaatgtaattttagtgcatacatgcattatgtaaaacaacaacaacaccacacaacaaaaacacaaagaggctagagatatcaccgtttctacccccaaaataacgcttgctatccagactttggagggggatgggggaac

SEQ ID NO: 527434 - DNA, 1050 bp, Homo sapiens
agaaatagaaacctggcgcaatagatatagtaccgcaagggaaagatgaaaaattataacgcaagcataatatagcaaggactaacctccgtataccttctgcataactgaagttaactagaaagtaatctttgcagggagagccaaggctaagagccccgaataccagacgagctaccttaagaacagctaataaaagcacacccgtctatgtagcaaaatagtgggaagatttataggtagaggcgacaaacctaccgagcctgggtgatgagctcggttgtccaagatagaatcttagtgtacaactttagaatttgcccacagaactcctctgagagatcgcccttgtgaaatttaactgttagtccaaagaggaacagctcttaggacactaggaaataaaccttgtagagagagtaaaaaacttaacagccatagtaggcctaaaagcaggcaccaattaagaaagcgttcaagctcaacagccagtagctaagaagatcccaaacatagtaactgaactccgtcagatgccaatgggaccagtctatcacccgatagaagaactaatgtgagtataagtaacatgagagacattctcctccgcataagcctgggtcagattaaggaccactgaactggacaattaacaggccaagtatctacaatcaaacaaacaaagaaacacggcaccaccgacgttacggcccattaaggaacattgacggaacagcatccacggaacacacagacaaagaggcaccggacaacaaggaaccgggaacacggcgacaagagaagacgaagaaagaccgggcgcaacgaaaacacggacacataagacacaacgacagggacacagaccagcagcaaacacaaaccagcacaaccaagagaacaggaaagaaaacaaaccaggacaaaagactcaccgaccaaaccagagcaaccacagaaaaacaacaacacagagcacagacgaatcacaaacaacgcagcatagaaccacacacaccaaaaaacgcagcagagacataccacgaagac

SEQ ID NO: 527435 - DNA, 401 bp, Homo sapiens
gacgctgaagcaggataatcggctagaacccatgaggacagagcgttgcaatcgacgctgagattgccactgaactcaagcctgtatgacaagagcgcagggctgagactcatcacaaacaaatcaaacaataaatgcactatagattatttaaatgtaagcctgtctcctatcgtcgaagcctaatccctttcaggctgcttgcatgttccactgatctttatattccctgcgttccacaccttgtcatagagggagctcaagtatttgtctcctggtcttgttaaattagaatgctttgacccctgggggcctttcctgtgagcttatttgtgctttgcttgtccaaggaatgtggttgagagtttgtcctagtgtaaattagggctctctttctgacg

SEQ ID NO: 527436 - DNA, 713 bp, Homo sapiens
atgtaaaaatacatatatttctaactatttttctttatagtatctcaattttgtcccatttaagaagccctttagcatcaaagttttgtattagtatttttatatttattttaacttatttttaattttttttacaacttaatccttgaatgacatggggataatgtaggcttgcatcttttttttacaatcaactatatttaatgatttgttaagaaaaaaatatgatttctgagtgaatatatctcatcttaagactttattttcccaccaaaatgttgcactggaggccttgttagcatccctttctcacttggaatggcaaaatagtgtgtagagactcacactgcaaacttttttctaagaagcaacacaggaacttaacagcaaaacagaaagaaatcacaagtcctttgaaataagtgacagcctgcagcccacatggtgagccaggtggaaaactctaaatcctcagagtgtgagagggaaagaagactggcctttcaggatgtacttctctccactggagagcgtggcaatccaggccaggggaaaggcttaactgtacccatttctggaagatttatttagtgagcggtggggagtaaaatcaccaaggagtggtatgaaagtccatgcctttgtgtgtatctcccagaaccgtattaaggacagacgggaagccatttctcatcctaccttcttaagtgact

SEQ ID NO: 527437 - DNA, 205 bp, Homo sapiens
ctctagaggacgcgtaatcagagtcgacatgctcatatgggagcttggttgctggtggcaccatcagttccagcctaccatcgatatgcatgccatatccttctctaagagagaaatttcctttccttgaagctgagctgggcttgctgatctgcagttggtgcaagtgatgtcctctggatttatgatggctgtcgtaaggaag

SEQ ID NO: 527438 - DNA, 410 bp, Homo sapiens
agaggaaagagctgtgagcatgaatactgattgcctgccctttgataaacggcacgagacaggtatgccctttatcaccacttctattcaacatagtgttggaagttctggccaggtcaatcaggcaggagaaggaaataaagggtattcaattacgaaaagaggaaatcaaattgtccctgtttgcagatgacatgattgtacatctagaaaaccccattgtctcagcccaaaatctccttaagctgatagacaatttcagcaaagtctcaggatacaaaatcaatgtgcaaaaatcacaagcattcttatacaccaataacagacaaacagagagccaaatcatgagtgaactcccattcacaattgcttcagagagaataaaatacctaggaatacaactttacagg

SEQ ID NO: 527439 - DNA, 1155 bp, Homo sapiens
aggcggtattggtataatacgcctcacactcattctcaacccccgtgacaaaacacgatagcctaacccttccttgttactatcccttatgaggcataattcataaggaaaaaaaacaaaagcacagaaaagaagagagcaaagacacacattttggggggaggacatgggcaccatagacaacaagaattctccaaaaaacacaaacacggtgacgagcgcagcacggggagcacaacaaagaatggtacaggcgacacacaggagcacacaacaacagcgtgtgaaaacacaagagcagaacaccatacgggacccaagcgacaacacacagcgagcatgcggacatcacaacaacaccacacagaaaacaaaaaaccgagcgaagagggagaaaaaaccaacaggacgataccaaagacaaacaaacaatcaccacacgaccctagaggagaaaagagaagagacacaaacaagaggggagaacaacaaacgacaaccaaggagaaaggacacaaaaacaaagaacaaaaaaaacacaagaaaaaaaaagacaccgaccaccagtgggaacaacaaaacaacaaaacaaaacgaaaaaaaaaaaaaagagaaaaaagagagacaaggaaaaacgcacacacacagaaacgaagaagaacaagccaaaccacaacaaacagaagacaaacaaacaaaagaaacaaacagtacacaaaaaagaagaaaaaaaaaaagccaaagagaaaaaaaaaaaaaaagaaagaaacaagcagaaaaaaaaacgaaaggaaacaaagaaaaacaaaagaacaaaaaacaaccaaaaaagaaaaagaaacaagaagcagacagggagaaaaaagcaaaaaaaagaaagacgaagagaccggagagagacgaaacagagaaggcaggaacagaaagcagaaggcgaacgcaaagggcgagggggcaagaagggacgagacgggagagagggccgcgagcaaagagaaggacaagaaagagaaaggacaagcaagataggacagagaaagcaacgaagagagcacaaacagagcgaaaaccgaagagagggacgagcggcgggcaaaggaggggggagagaaaagagaagaaaggagaagaagagaaagcagccaacaggaacga

SEQ ID NO: 527440 - DNA, 169 bp, Homo sapiens
tccagtgacatcacagaagtgtcacaacaagattaactattagatcagtctcaaacattatagacagatattcccgaatcatttttagcttgtcttctcctcccttgtcctcctcttaccactgtttgctgaatgccacaaggtcctggctccagccacattctatgct

SEQ ID NO: 527441 - DNA, 133 bp, Homo sapiens
ccccgcgcggagcacgcgcgcggagcgggctgcgcgccgcgctcgcacacctcccacaccgcgcgtggtggcgcaccgcgcgcgcggagcactccctctctcacacacacagacaaatagacaagacaaacac

SEQ ID NO: 527442 - DNA, 966 bp, Homo sapiens
  misc_feature (7)..(7): n is a, c, g, or t
  misc_feature (64)..(64): n is a, c, g, or t
  misc_feature (69)..(69): n is a, c, g, or t
  misc_feature (95)..(95): n is a, c, g, or t
  misc_feature (98)..(98): n is a, c, g, or t
  misc_feature (151)..(151): n is a, c, g, or t
  misc_feature (158)..(159): n is a, c, g, or t
  misc_feature (163)..(163): n is a, c, g, or t
  misc_feature (168)..(168): n is a, c, g, or t
  misc_feature (195)..(195): n is a, c, g, or t
  misc_feature (199)..(199): n is a, c, g, or t
  misc_feature (204)..(204): n is a, c, g, or t
  misc_feature (213)..(213): n is a, c, g, or t
  misc_feature (218)..(218): n is a, c, g, or t
  misc_feature (238)..(238): n is a, c, g, or t
  misc_feature (244)..(244): n is a, c, g, or t
  misc_feature (250)..(250): n is a, c, g, or t
  misc_feature (261)..(261): n is a, c, g, or t
  misc_feature (287)..(287): n is a, c, g, or t
  misc_feature (312)..(312): n is a, c, g, or t
  misc_feature (314)..(314): n is a, c, g, or t
  misc_feature (334)..(334): n is a, c, g, or t
  misc_feature (347)..(347): n is a, c, g, or t
  misc_feature (359)..(359): n is a, c, g, or t
  misc_feature (369)..(369): n is a, c, g, or t
  misc_feature (389)..(389): n is a, c, g, or t
  misc_feature (414)..(414): n is a, c, g, or t
  misc_feature (424)..(424): n is a, c, g, or t
  misc_feature (462)..(462): n is a, c, g, or t
  misc_feature (474)..(474): n is a, c, g, or t
  misc_feature (504)..(504): n is a, c, g, or t
  misc_feature (506)..(506): n is a, c, g, or t
  misc_feature (519)..(519): n is a, c, g, or t
  misc_feature (569)..(569): n is a, c, g, or t
  misc_feature (579)..(579): n is a, c, g, or t
  misc_feature (885)..(886): n is a, c, g, or t
  misc_feature (962)..(962): n is a, c, g, or t
cccagcngcccttgtggcccgccccccttaccttgcccatggccagacccaggtgctgcctccnacgtngtcatcagtcagaggccctcctattntcnccgggccctgcgcctcctggcgtggcaagagccttcgcggttccgaagatccngccttcnntccngggcngccccctccttcccgttgaatattccntccngatcnctgtcagcnttccnggctcccagacggtcctccntgaccngccccnggtaattggcngccgatccggtctcagccgccgaccntcccgcctggcccgccgaacccgcncngagatgagttgggtagatcngaacctccctganacccccgacgcncctccctgcnatatggatgtcattcctgangatccccgattggcgagcccccccnctcctctgcnagatgacatggatggctctcaagacagccctatctttntgtctgcccctnagttccagttcctgccccccccgccttatncngaggtggatcccngcctcctcaacaacaatgtgcagtgagcctgtggcagacaagaagccgcnttacctcacntgtttctttttgtctctcttcctggacactcactttttcagagactcaacagtctctgcaatggagtgtgggtccaccttagcctctgacttcctaatgtaggaggtggtcagcaggcaatctcctgggccttaaaggatgcggactcatcctcagccagcgcccatgttgtgatacaggggtgtttgttggatgggtttaaaaataactagaaaaactcaggcccatccattttctcagatctccttgaaaattgaggccttttcgatagtttcgggtcaggtaaaaatggcctcctggcgtaannttttcaaggttttttggaggctttttgttaattgtgataggaactttgggaccttgaacttacgtttcatggtggngaga

SEQ ID NO: 527443 - DNA, 508 bp, Homo sapiens
  misc_feature (5)..(5): n is a, c, g, or t
  misc_feature (155)..(155): n is a, c, g, or t
ggctnacgggctgagtaaccttcttggaaagactgtcctttccaacctctatcccaatttattattaaattaacaggcaagcggcccgccttttccctgggtctcgggagagccttctactgccccccttacctacgtttccatcttcacccctnctgcgtgtcccacccatcctgtatccactaacttgagttctcatgttgctgctccatctccaagccgcctcatcttcccgagcccctgccacgcatcgaagggttttggggaaagctctgggtttagggatctccgtccctcagctcccctgacccttgcccacctcttcctcagagccccactgcaggtgccatggtcctataagggctgtggagaaagtggactagttccaattctttgtcccttcccccacccatcacagaaacactttcctttacccttctctgcctttataaaaactaatgatttgtgcaacttgtaactaggtgtttatggaataaaggagaatgga

SEQ ID NO: 527444 - DNA, 443 bp, Homo sapiens
tggaaatggagtctggcttggccacccaggcaaaaaagcaggggcgctgcaattccagctcacggcagcctccgcttcttaggtccaagcaatcctctcgcctcagtctccgaattagctggaactacgggtgtttgccatcatgccgggctgacctttggttttttaagatagagatggggtccaccatgtcgaccaggcgggttctgaactccgtgacctcaggtgatccgctgtgcctaggcctcccaaagtgctaggataacgggcgtgagcataccgaaccatagccgaggtttgtgattctcaccttcacacaaaaaaaaagaccaatttgcctccagggctttggtcccatttatcggcccaccagcatggtgtgaggggcttggggggcccactttctgtcaacattgaaagccatcaggtctcctcatggcaac

SEQ ID NO: 527445 - DNA, 353 bp, Homo sapiens
gcggctgaggtgatctgttgatgtcctgttatgctcgtattttcaggacatcatagaatcgaccattctacacagacaacaagcaatggttactacatcattgaattaatctcgccttccaaaaacttgactggttctattgtaagaaggtggacaacaagaaagtgcattaggatctttcaatgctcgtacaatacacctgtgggcatcttctcgagcctgggaagcattgtcctctgtgtaacttccgagcaattccaccatgacttttgaagcagcatcactcttcttacaatccacaagtgcctcataaagtagtcttaaaagggtgtgctttttttcagtggtgagat

SEQ ID NO: 527446 - DNA, 648 bp, Homo sapiens
  misc_feature (514)..(514): n is a, c, g, or t
  misc_feature (525)..(526): n is a, c, g, or t
  misc_feature (529)..(529): n is a, c, g, or t
agcggatgcaattgtagttatactcagtaatatagttacacttgattaaagccattataaaggaaatgtaatcccatactgattatcttcacatttctttggttaaagatcagtctgtttcattgagataacagttcaggagaaaagttattgactacatgtatctatagtattgtctaagcaacaggagtttagtttgcatgttttttatttttgagagtacatcaacgtaatgaaatgtatttaaaattgtacccatatatacataatgatatatatatatatttatgttttacagcagtgtttttccttggagatgattcaatcaaattgcagaagagacacttctaattaattattgggaagtacaagctaggattatgttttcctgaacgtttgtgactagcagtgatctcttacagacgtgggggtctggacacttggaccttaaattggaaatggttaaaaaattgttatccaaagaatgacaatggtttgtttgccaagtcttttngtttgtgtgtnngtnttttgagacggaatctgtcacccagacttgagtgcagtggcgtgatctcggctcactctaacgtccacctcctgggttcaagcaattctccagcctcaacctcctgagtagctgggata

SEQ ID NO: 527447 - DNA, 219 bp, Homo sapiens
attaggagactgctccacgattcatgacaggcagcatctgagaaaggaggcttatgatcccagagttcacattcctgcaaaccaagtaacatatatgtcaagattgcggttccggttgttcacgctagaatgcaggtcactgcgatctagacgggggcgctgccgaagccacgtaccaagtcacgccgtgtatgctgagcctcctgcctttcggcccgc

SEQ ID NO: 527448 - DNA, 192 bp, Homo sapiens
ggatcttatggacatcaggacaatgggccaggaagggttgtgcaaaggcaggaccctgtgcctgctttatgcttctgtcaaaatgctggacttctgagaagggaactaggaacaggtgacatatacaacatgcggtggtcacagctttagaccccccgtgcaaaaaataatgtcatagcttgtataccttga

SEQ ID NO: 527449 - DNA, 345 bp, Homo sapiens
  misc_feature (218)..(218): n is a, c, g, or t
gtccctgccccacagcggcgtcactcttttcatcgcctactgatgttgcgcagctccacggtggtgccaccgagatcgaactggcggctgtcgaaatccgcacgctgcagacgcgcctggagttgcgcgtcaccgcgcattgcaataccggcgacgctcagccgggcaccggtgccccgcagatcggcactgcccttgccgacccgcccggaggcatncagtgagacatccccactgagcaggccgatcccgccgagcaggcgcacgttgtcattgccgaggtaacggttgtaggcggtcaggtccggtacccgtgcatcggtgaagcggagctgggcccgcatg

SEQ ID NO: 527450 - DNA, 284 bp, Homo sapiens
ggtcgactgaattcctcgccaccccagcggcaaataatttccgactggcgcaggcaactctccaggtctcgggcaaatccgctcagtacggcatcgcggcataggtggccgtgggtatcgttgagttgcttgaagtgatccatatccagcagcagcgcggtcagtggcttgggttcgcgttgggcttcatgcagagcctggaccgccagcaggtcgaagccccggcggttgggcaggccggtgaggatgtcgagggttgccagggcctggatcttgcgtcgacg

SEQ ID NO: 527451 - DNA, 1252 bp, Homo sapiens
agagcggcggggcataggggtaaaactataatagaaaataatacctacatagctagaataagtaaataataactactataacctagtaaaagtaaaaataatagatacaataaccatagtatatatgtataagtaacagggatatataataataatatattagaataataaataggtgtattagttacttaattatttatagaactatattgtagagtgctatatttatttaggtttggtgttaattatgtttagtaggatatcttattatttctattatattaaccaaaggtaagcctagaactagcataaagatacacctatgaatagtaaaggtatatcataaagaaactaataactaaaattctatatttactatcataattgtgttactattaatttataatttatagttcgttatttattatttatatttttatttgggttaataatatttgtagtatgttatttgtgttttgttttttatagattaatatttttctatttctgtgttgtgtttatattttgttcttaggtaggtgtaggtgtggtgggtagtgtggtttaggttgcgggggtgtgagaggtggtggtagtggaggcgtgtgggataagcgcgaacccaaaaaagtgacgattcataaaatacagagtgaatgtcgaaaaataaataaaataacaagagagggaggatggtgggaggggtgtgtgtgttgtttgttgtagttggttatttttatgttgtttttttttgtttatattgaatcgataagcgatttgtaagactgattaggtcagtaataaatttatttagtaataatttatttgatattattatttatttttgttatatttatctttagtacaattcatttattttctacatattatattttataattgttttttcttgttgtttaatttttgttgttgttgtatgtattgtttgaattcctgttgttttgttattttgtttgttttcttgtgtttattgtatgtttggtatttcgtttgtgtattggttgtgttgtactttgttttttcttggtatgtttggtacagtatgttgagagggtatttttcgtatggttgacttctgtgtttttttgtgtagttggatgtcgctcgggtagaatggtttttttgatagtgtgggtgttttttgtgtggtttttgtttggttatatggttttttgggtgttttttttgtttgtttgtgtggttgtttgtgtttgtttgttttctgttgtgt

SEQ ID NO: 527452 - DNA, 251 bp, Homo sapiens
tagggtgggtccaaagacgatatccaaggtactctgcattcataagattctccttttcgtggagggtcactctctttagatgtgccatgaggtaccggagagtaccgcagtgagcaggtggcagtagtttcagtgcttcatgaagggttccaattgctcatccggatccataatttgggcagattctataaacttagggtaggcatcatatgtaatggaggtgggaatgggcaaatccctggaagtatgag

SEQ ID NO: 527453 - DNA, 307 bp, Homo sapiens
  misc_feature (67)..(67): n is a, c, g, or t
  misc_feature (121)..(121): n is a, c, g, or t
  misc_feature (139)..(139): n is a, c, g, or t
  misc_feature (201)..(201): n is a, c, g, or t
  misc_feature (292)..(292): n is a, c, g, or t
cacatattgccaggtgcagtggctcacacctgcaatctcagcactttgggaggctgtggtgggaggnttgcttgaggccaggaattcaagacccacctggacaacatagtgagaccctgtntcaaaaaaaaaaaaaaanttagctgagtatggtggcatgcacatgtagtgctagctacttgggaggctgaggtgggaggnttgcttgagcccacaagttcgaggctgcaatgagtcatgatgatgtcactgcactgcagctttggacaacaaagcaagaccaaatcaaaancaaaaaacccaatta

SEQ ID NO: 527454 - DNA, 545 bp, Homo sapiens
  misc_feature (341)..(341): n is a, c, g, or t
  misc_feature (487)..(487): n is a, c, g, or t
  misc_feature (528)..(528): n is a, c, g, or t
  misc_feature (541)..(541): n is a, c, g, or t
tgatgagaacccctccctttgcaaggtgtgagatctttgagagcagagggtgtgagcctgtagcccaggagacctgcaccggtgcatgtgagacacatagagcagtgagtgagtgagagagagagaaaggaaggaaagaaggaaggagaaaggaaggaaagaaggaagagataaagatctgaatgtttaaatgtccactcaaaagggagcaagttaataaacttgtggtgtgatcatacaagggaatattacacaacagtcaaaaatgagttaattagccctacatatatactcatgatgctatttatatcgtgatatagctccgtgatgccaagttttanaacatgcaaaactttgtgtatttatttatgcatgtgctcttgtctcccatggaagcagctgacctttgttgaggaccctctgttccagacgccgtgttatgaattaggccattcagttcctttgacaaccctgtgagcattgagcncaactgatggctcaattttccaaaatgagatggcttaggcncaggaagggttanggtg

SEQ ID NO: 527455 - DNA, 154 bp, Homo sapiens
gctagatggagcgggccatggacagccgctctgtcacccacaaaagatcatcttccacatggcggaggtactggagctgctcgcgagaagcactgcaggctccggcagcgataccgcatggtctgacacaaggccctgaactactgctccacgg

SEQ ID NO: 527456 - DNA, 335 bp, Homo sapiens
catccggggtcgtatgtcagactaccacttactaccttggtgaccagggagggctcagtcagctaacttctctttaccttctttccggaaaggagaataagggcctggagaggaagccacatcttaactaactttaaagcctcggtaatttacttctggacccttattctctccattcatactattttctccatcatatggttaaatccaggggagtttttcggaaagggaacttctcagttcctctaacacttacgggtatatatgaggggacactcaagccctacagaggtaaacggatggacccaggatgtggacggacccaggatgtggga

SEQ ID NO: 527457 - DNA, 415 bp, Homo sapiens
  misc_feature (22)..(22): n is a, c, g, or t
  misc_feature (337)..(337): n is a, c, g, or t
caaacctggccttttttagttngggagtgaccctaaaataaaccttgatgtccatataaatatatttatttgtcaagttaggaccaagttatgatttggtttccttgcatccctgatttttaagattaaaatgaaaaaaggtgcccgggccatggtggcctcatgtctgtaatcccagcactttgggaggctgaggcgggtgataacctgaggttggggacccagcctgacccaacgtggagaaatcctgtctctactaaaaatacaaaattggctgggcacggtggcgcatgctctcccggctactcgagaggctgaggaaggagaattgcttggncctgggaggcagaggttgcggtgagccgagattgcgccattgcactccagcctgggcaacaaaagcgaaatccgtctc

SEQ ID NO: 527458 - DNA, 240 bp, Homo sapiens
cttaaacattcttcatatgtgatgtcctaagtcactaaagttaaaactttcccacccagaaaggccacttagataaaatcttagagttatttcatactcttcttagtcctcttccaagctcactttgaagtctcactggggttgataaggaatttctcttgctttctcaataaatctctatttcactcatgtttaatttgtaggatagaattgcgggaaataaaagttcttgttcccttt

SEQ ID NO: 527459 - DNA, 221 bp, Homo sapiens
ggcctgttgagcctgctgagagaagaatattagaagttcattatgctcggctgggcgcgttggctcacgcctgtaactccagcacttcgggaggccgaggcgggtggatcacgaggtcaggagatggacaccattctggctaacatggtgaaaccctgtctctactaaaactacaaaaaaaattagacagacatggtggcacgtgcctgtaatcccagcta

SEQ ID NO: 527460 - DNA, 646 bp, Homo sapiens
gagaaatttccaggtcataggacttctctttaaagtaaaataattaggccaggcacggtggcttattcccgtaatctcagcactttgggaggccaaggcaggtggatcacttgaggtcaggagtttgagaccagcatggccaacatggtgaaaccccgtctctacaaaaatactaaaataaggccaagaagggtggctcatgcccataatcccagcattttgggaggccaaggcgggcagatcacttgaagtcaggagtttgagaccagcatggccaacatgatgaaaccccgtctctactaaaaatataaaaattagctgggcatggtggtgggcacctgtaatcccaactactctggaggctgaggcaggagaatcacttgaacctaggaggcagaggttgcagtgagccaagattgcgtcactgcattccagcctgggcaacaagagcaagactccatctaaaaataaaataaatacaaaaattagcaggatgtggtggtgtgttcctgtagtctcagctactcaggaggctgaggcagaagaatcacttgaacccaggaggtggagattgcagttaactgagatagggccactgcattccagcctggatgacagagtgagactccatcttaaaaaaaaaaaa

SEQ ID NO: 527461 - DNA, 239 bp, Homo sapiens
tcgactatgaacgtatttctcttcctcatgatttcctagtagcactttccttcctctagcccactttactgtaagaatgcaccaccacgccaggctaattttttttgcatttttagtagagacagggtttctccatgttggtcaggctggcctcaaactcccgacctcaggtaatctgcctgcctcggcctcccaaagtgctgagattacaggcataagccagtacaacctgccggtgg

SEQ ID NO: 527462 - DNA, 436 bp, Homo sapiens
  misc_feature (206)..(206): n is a, c, g, or t
ttcaggttgattccccccacctgacgttggtgtggggcccacgttggcatatactgtggccatggagagatcatccactttgagggcaagaactcaggaggctgtgggctcctgggaagtttctgggctcctggaaaggcatcgtatccaaacaggggcagcgcccgctgctgcgctcctgctggcgcgtgctgcgcagagtgagngaagcgacggacgcggaccaccatcctatcactccatgcgcagcaactgtgtgcactttgcactgtgtctgctcgtcccaggtcccagcctggacccccggcaaatagacgggagctccagcaggtgtaatggacgtggacgtgtccccggattaagcatgaccttggccctcctgggtggacgtggaggcttcagaaagattcattaaactactttccaaagcttaaaa

SEQ ID NO: 527463 - DNA, 854 bp, Homo sapiens
gggtgacctctttttcccgggtcccctctattggccgccttgtgtaccccgatccggggcccgcccccgctgctggggcaccaagaagagttctgcacccgttatggtttcttataagcgggcgcgctgctgttggtttatccgccggctctgcatgaggttggtcgctccacgcccgcgtgcttatcggcgatgcggtgctccccctctccgttgagaagtcgccctttatggagcgcgacttgtgtagccgcgcgtccgtatgttccgtgtctcgcctacgccgaagcttagtataaccgccccatctcaaatattctgttcgcacaccatccatcccagaaagccctctgtcgggcggatcaaccccctttctggggggccctcaggcccccccgctaatgcgtcttcccccgcgggcgacgtgcactttgctcgaactgtcttccgccgcgcggattgcaactgccgcccagttgttagtgtcggcctctcgtccgatacgcccacgtatggccgactgcgcctcatccaccgcattgccctgcactaaggtgcacccgctctcccaaggagatgtttctaggttctagtcgtccccctcacatcaggcgttttgagagtgtttgtacaaacgtcctgataccattgccctaccttccccctccatgtttacccccggcgaggtactacttgcttgtctgcgatgccccgccttctcccatgggcccaatatcacgtcctcactcaactccgccggcgctccaccacaatattctttcccccccccaaatactcccctgtaaaaactatttcaccaccacacacccacatgggggcgccccatcaatgac

SEQ ID NO: 527464 - DNA, 323 bp, Homo sapiens
tggcacagttcctgagtagctgggattacaggtgcgtgacacacgcccggctaatttttgtatttttacgtagagatgttgtttctccatgttggacaggtttgtctcaaaactcctgagctcaagtgatccacctgcctcggctcccgaagtactgggattatacgcatgagccaccgtgcccagacgtcattcttatattattatttcctaggtgtctctcctgaagactatcttctggtctcgaaatggacatgatggatccacggatgtacagcagagagcctggaggtccaaccgccgctagtcaggacgctggtcga

SEQ ID NO: 527465 - DNA, 454 bp, Homo sapiens
ttcgattggctgggcacttagtgagacctgcttctgaaaaatccaaaaactagctgggcatggtggctatatcgcacatgtatccctgctacattgggaggctgagacagcgaggatcacttgatgccaaggaggtcaaggctgcagagagctgtgatactgctactgaactccagcctgggtgacagagtatggaccctgtctcaataaataaatgaataaggtctgggcgtggtgcattatcgctgtaatcccagcactttgggagaccgaggagggtggaccaccttgaggtcaggaattcgagaacaggctggttaaccatgatgaaagcccatctctactaaagatacaaaaattaactaggtgtggtggcacaggcattgtgtacccagctattcaggagactgaggcaggagaatcacttgaacttggtaagttgcccgccaaatcg

SEQ ID NO: 527466 - DNA, 500 bp, Homo sapiens
  misc_feature (1)..(1): n is a, c, g, or t
  misc_feature (13)..(13): n is a, c, g, or t
  misc_feature (23)..(23): n is a, c, g, or t
  misc_feature (87)..(87): n is a, c, g, or t
  misc_feature (111)..(111): n is a, c, g, or t
  misc_feature (119)..(119): n is a, c, g, or t
  misc_feature (142)..(142): n is a, c, g, or t
  misc_feature (161)..(161): n is a, c, g, or t
ntttcctttagtnattcctttancagtggacctggtcccacctttaaatttaattggatattattattacgttttgccttccaagtnctccagatatcctccaaacctttnggcgttgncatttcatcggactacgggaatnattcctcaaattgaaattntccttgatgggtcctcttctggttcttaattctagtcatgaaaaggaaaagacaaaaagatagccaaatcttaaaactagtcatcggccgggtgttgcatgtcacgcctgtaatcccagcactttgggaggccgaggcgggtggatcacgaggtcaggagatcgagaccatcctggctaacacagtgaaaccccgtctctactaaaaatacaaaaaattagccgggcgtggtgcgggcgcctgtagtcccagctacttgagaggctgaggcaggagaatggcgtgaacccgggaggcggagcttgcagtgagccgagatcgcgccactgcactccagcc

SEQ ID NO: 527467 - DNA, 640 bp, Homo sapiens
tactactttatcaaaacatgtcccttaggtgtgtaggattcatttttaaaattcttcctagaaaataatatacaagggagaggcatatttattcccaatcacacttcgggaaaatgcttcccggtggtcgagaagggtcttctctcttcttttcacgggtggttttgggccttagcagtgtgttaagatgtgagatttcaggttagtgcgacgtgagcaaactctcttattacaaccatcgaaggggcacacatagggccgtgtctccggtagtggatctcgcacagtgtgtgcgcaaatggaagtccagtgaaaagcgtttcccacagccttcgaacgtgcactggaaagggcttctctccagtatgaaccagtgggtgtcgtttaagtttggaactctcaacaaaagtcttggccacattctgcacagacgtggactcggggaccgtgggtgtgcagatgttttctcagggccgagttatcccggaacttcttggtggcagcctttatgagggcaagctatggtgctgggagcatcatcttcttaaatttttctgggcttcattctagcaaattctggccagtggttggggatctgagaggtcaatgccaggtattcctccaggaggaagttcttccg

SEQ ID NO: 527468 - DNA, 413 bp, Homo sapiens
cgaaacttatttttaaaactttacaattaccatattactctcgttactgagcaaattttgatggcttgccaaaaaaaaaaaaatcatgagcagctaaactagcccaaagtgtaagaaaatgtaggcattgtgagaactgacacacattacagggaaccacaaaacagagacaggcttcaacaggtggttggtactaacaaatggctattcacaccttataaaatggatggctggtctacggtacggtgggctcatgcctggtattcctcagctacttggggaaggctccagtgtggggaggatcaacgctggcagtccaggagttccaagaaccaagctgggcacaacaacaagtggagaaccctggtctcaaaacaaaagaagaaaaaaacaaagaaaacaaagaaaagaag

SEQ ID NO: 527469 - DNA, 128 bp, Homo sapiens
tccagagggcggacaacaaatcacataaggaacaacgaagacagcaggatattcagcctggagaagactacaagaaggcttcagaataagatgatatctgaagagtcatccagaggcccacataaaca

SEQ ID NO: 527470 - DNA, 610 bp, Homo sapiens
tcttctttaaaatgttgctaaccctaaaacaagaaatgatgaggataattatgataactagagattgaagtggaataactgtaatgttctttgagaactttaaacttacttccgttttcattgttcgaatttttccagacactaacttccctagtggtagatatttcggacctagatcaattgggagtagagaaaaggagatggaaggaaggaaaggaaataacttttattgaatgtctgttctgcagcaggcactgagtacacggtttgtcatagtcatatatcgtacgctctgctgtcgccttctcactagccagctaatttcactcggcacaactcttacgtaactgcactcctctatttgaacggatgaggatagactcttcagagtggccaggttacatgtccagagcaagattcaaacccaggtcttctgatttcaaatcttatgctcttaacacaattcaaacttcatatccaggggttaattccctttcctcttatactcttatcgtcccagggtccggactgtcgtctccatggtatcacacacctgtcttgaatcaaagggaacgtaccaagtcaaaatccaaacccctcccatcgcacg

SEQ ID NO: 527471 - DNA, 201 bp, Homo sapiens
gtggctttggtcgagtggacctgcacctcatgtttaggagacaggccatgccttatcaagagcatgcagctcactgattgcatcctctagtttccgcacggtggcccaccatcaagtatgtccgacagagcctggtcagaaggcagacttcaagtatctcattctccatgctccgggcgctaccggagacttcgtacattt

SEQ ID NO: 527472 - DNA, 157 bp, Homo sapiens
attatgacagattaagatgactttagtgagctgaaaccaacagtgtgcagttactagataagatggagtgatgagggaaaatggaagagacaggaatgagtactggccttggggcatatggttgactgtgtgggtggggcacagagggccgaagcaa

SEQ ID NO: 527473 - DNA, 1003 bp, Homo sapiens
  misc_feature (279)..(279): n is a, c, g, or t
gttgggagctaggacattggagagagagagagagagagagagagagagagagagggagacagatgatgaagagaggagaagagagctgatatgatagtgatagtgatagtgatagtgatgtgatctcagggaatgtggtgttgaagggaagggtatgtatctatgctttgctatttgagagggcagagtgatgttgtatgctctggtctttgccacccttccagtctattgtctctggcaatgtttatacctctcttgtgacatctctcatacatcatnctctactcgtgtgcagaggggaagagaagtgtgggtatttacttcacagcatctgtggaacgactacttacagtgagataagtggctataagtgtgcttagccaggacatagtacctggtgagtgctcaatacgtggaaacacaattttatcactatctcattattcacggaagtagtaaaattaatttgtgtcgagtaaacttgtacccttggatgtatggaccgcgtgattgtccaaaaggcaggatctcagagagagagacccagaagtcagactccaaatttactcgatcattgtgcataagttattctttagttacgttcccacgattgtcacgtgtctgtctattgataacactctctgttatatagatgacctagtattttcacagcctcagagtatgtgtgtctgtggtcaggtgtccaagttagtgatccctcaggggtgtgcaaaaggtaatacttaataggcactcacttaccgtgctcagggttccagccttgctcagatcccctgttcccgcacttcttcacgtatcatgagggcccatattccagttttggccccctgggtgcccaatggaattatgtcccccacatttgtttccgtgtgcatccacaattcttatatgcgaggaacttgctgaaaaccgggcggaactataagtgggggtaaaacccgctggtgtgcccatagaattccccaaaggagtacacaccgtg

SEQ ID NO: 527474 - DNA, 384 bp, Homo sapiens
atggtaaacgagccaaactggataactgctggggccattctcagcatggagatgattccctcgtggctgaatcccaagacccgcggcgactccagcgtctcctggaagagttcccgctcctggccggaagacgatgacggcccgtcggtcactgaaccgctagtgggagcaaggctcgatgaggaggtcggctttgagctgctctccaccgccccccaccagctggtaaaagatgtggaagctgcactcgttcttgtcctggcggatggcccgcgacttatccagcaagtaggctctcaatagtgtcccccacaatgtacccggcaacataaaagttgatgcggatgaatttgccgaatcgggaggagttgtcattcttcactt

SEQ ID NO: 527475 - DNA, 116 bp, Homo sapiens
tatgttctcgaatcgttagcatgtagcatctaagaacatttgcaggttccaagaagatgataatgcatatttctaaagaggaccccaagatgcttaggggtcaaggcaccgggtca

SEQ ID NO: 527476 - DNA, 445 bp, Homo sapiens
aaatattttattaagaaactgtttcaaagataaatttgcactgctcctttttcttgccccacccctcctgatgggacaaaagggtgaagagctcaaagaaccccgactcccccctcccctcccacctcattgtgtaccatgaggggtccttgggaaatgtcttacctcttgtgttgaatggagacctgggttgagatgtgtctgctcttgtaggaagatcttttgtatcaggaacatgtacactaggccctgttcccgtccacaagctgagccatatgtacataagctagactgttttcttaggtgtgcacttttatagtctgtttttgaagattaacacatttgcaaggtgattgacaccatctttgcctaaatgcagtgagtgtacaggaagctcgttctcgagacagtacatacaatccggagggggtcacatagactaggg

SEQ ID NO: 527477 - DNA, 375 bp, Homo sapiens
ttattaccagagacttactctgtcacccagggtgcagtggcaaaatcacagttcatggcagcctcagcctccggggctcaagcaatctcggcctcagcctccccagtagcaaggactacaggcatgtgccactgaactgggctaatttttaaatttttctttggtagagagtggggtctcacaggcgggttaagagttccgggcctcaagcgatcctccgtgcctggggctcccaaacggcggggatggcagatgtgaaccagggcgcctagcctccttacctttttggttggttggttggagacggagtttggctctggtggcccaggcggaagtacaagggtgtgatctcggctcagtacaaccggccggtgg

SEQ ID NO: 527478 - DNA, 275 bp, Homo sapiens
cactgaccctgagtacatccatgatagcttgctacatagagattgttatacgttgtcatagtctattgcttaacttgatgcttgtagttggaagagttcattaccatcatatctacttgagtcatttggttttgctagctgactatcatgactgcctacgaacgagtcaattatgggaactccccagagttattttactaaggattaactagtgcatcataaccttgatgattacgcctcttacttatttactttattacagtatctaaaagctg

SEQ ID NO: 527479 - DNA, 453 bp, Homo sapiens
gagagagagagagagagagagagagagagagagagagagagagagagagagagagagagagagatagagagagcgcgtgacactctctgtgcgcgctatccttcctttgttctcctcgcctcttccctgcctctcgcctacgtctcttttcctcctcttctttcccccttctcagtgcactctctttgcctcctgcttccttcttcctgctccttgtcctctactttccactctcttttctgcgccctcctccacttgtctcttttgtctgtgtctcacgcccgtttcttgcctagcatctctctcctgtccggtatcctctcttgtctcgtcctcgtgctcatctgctctctctgcctgtccttcctcctttgcctctttgtcctcttcctgctcctctcccactcttgcggctttctgcacactctctgcttttccttccttgtctgtcct

SEQ ID NO: 527480 - DNA, 513 bp, Homo sapiens
cgttcgtcggttgactctgaggatccctactgcgttgctctactgttcctaagtttatttggcggcacacccggtatgagggccctgcaccctggaagcaaggtgttgggcctcgttggtggtgatccgtgtctatgtgctgaccgcgcatgacccggtggggcagcgcgtactttatcttcgtctcgtgtctgagatccctctcgggccggtggtatttgctggccgcgatctcctccaccttcatgatctgaatggagtgggctcgggcgcggtgccgggcacccatgtctcggtagcactgggtgacagcgcctgcggtggtcaggtcccggtattcccggtacatgttgtgggtgccgctccgggagtcatagcgcagccagatcccgaagttcttcacccgcaggggggacttctcaaacacctgcccacagtagacaatctcccctgaagacttcttcatcttctttaactgagatacaaagtaccagaagcgggacttggcgacga

SEQ ID NO: 527481 - DNA, 368 bp, Homo sapiens
ctcgactctatgtaggatccccgctgagatgacagtcggccactgtgcccgaccagctcccatggtcttgagtcttggcacccacaaatttttttttttgggagacagagtctagctctgctccccaggatggagtgcagtggcatgatcatagctcattgcagcctccaattcctgggctcaagcaatcctctttcctcagcctcctgaggagctgctactaggcacatgccaccatgctcaaccaatttttgaaatgtttgtagaaacagggtctcaccatgttgcccaggttgttctcgaactgttgggctcacatgatcctcctgtctccacctctcaaaaagtactgggatcacaggcttgag

SEQ ID NO: 527482 - DNA, 909 bp, Homo sapiens
ataaagtgcagcgggaccgggtttactgtatggagtcttccccgcgcatgttcttctcccgctgtgtggatccgcgccacgggggattgatcaagaggccttttgccacggtggcgcgtctgccccaagcgttcgggggttgacaaacacaaggttgtgtgctgccacccttcggggagtttattttggccgcttcgccttctgtatatcaggggtgtgtcccgcgcccagatttggcttccctccatgacacggtgttcgtccttgttacttcggcgaggatgtctgccccgccagggccaaagaaccgcgcgccccgccaaagggaaaactacaaagccgacaaatcctctgtcaacggaaaacaagcggcccatctggtcatgccgcaccgagtgcgctgcctgcccaaagcgcccaaggaaggaccacaacccgccaagcagggggagacacacacatcatgccccccgggagtaatgatcgccctgatgagcgagagactcgccaaggcgctctctcatgaagactgcaacagtcccaaagaaaggaatctccgcggccggcgcggcggaccaccccctggaataccacgcacccatttgcggcgccaccaaggcccggccattgtggttctccagacactggtgacctaaagaacgcaacactacggggggaaaacttggggagcaaccccactcgtgatagggaaaatgcaaccaaacattaagccccgcgtttgggcgggggcgccccagaaagcaccgaacatgtggtccgggggccgcgatggacgcgggagaagatacagctgcgaacctccgcagggcctcggaggtggccaaccgggtgcaggtgtgcccccccgcccccaccccctgggtaaagcgaatccccccccacatgtcg

SEQ ID NO: 527483 - DNA, 278 bp, Homo sapiens
  misc_feature (59)..(60): n is a, c, g, or t
tttttaaaaaaaatttcccccggggggtttcggggaaaaaaaaccccctttttgggggnnccccccccctttttttttttccggggggggcccttttggggggggggttttaaaaaaaaaccaggggtttttttttttttttcccttaagggggggcccccgttttttaggggggccccctttttgggggggggcccccccccttttttccccccccccggggggggttttttggggggggtttcccccagaaaaaaaaagggccctttttgggggga

SEQ ID NO: 527484 - DNA, 173 bp, Homo sapiens
gggtaaaacaaccccagctttggaagaaatcgtcgttcctataacccgggggtattgggtttatttttaaattaccaggatcccttccagtaaaagggaatatttttttcggcccaaaaggggcccctccttccccctttctgggttcaaccccctatcgaaaaattattgcc

SEQ ID NO: 527485 - DNA, 486 bp, Homo sapiens
attggccttatgttccctgcctctggaccctattttcctgactcactgggccatatgggctccccattttccaccaaccccttcccacaggctttttccccgacttggacttccctgtcccacagggcgacacagtagtgaagttgaggaaatgatgagtgcttggtaggaacccctcccggggttcacctgaggctggtgaccggccatgggccgtgcagtcacttgcctgtttctccagcagctcaagcctggggagtgggcatagcaagctcatggcaagtccacccaccactgggggctggccgggccaactggagggcaaaacacccccattggccccttaccccttgtgttctgtacaaccggggtttgtaatacaatgtccctaaaaaaaccgggggggccttggaaggggactggaaccattggccccatggcggggaaagaatttccaactcttttaccccccccccgatgacccgg

SEQ ID NO: 527486 - DNA, 106 bp, Homo sapiens
  misc_feature (85)..(85): n is a, c, g, or t
taccttctctaatcctgtgataactaaaatgtctgccttcaaaagcactagaagagataacgtgtatgaattgcttgcccgatangtgggtgccccaaccatattt

SEQ ID NO: 527487 - DNA, 7313 bp, Homo sapiens
ggcagcgcatacactacaatggctgctggaaagaggcgtaaggaaacaatttccaggcccgccgcgtccagcccgaaatatgagaaaaaaattattagaaattccgcgggcggtgtagaggcggcggacgggccggagggaggatgttaaagccccgcggttgcctcttggtgctgccttggccgtatttggcacccagaatgcttcattctgtgacggtctattaataaggttgccttgctagagtttggagcagggcctcagattggccaaaatgggaaggattggattccactctcttccacgaagagtcaatgggactggctaagatcaaagtctgaggctttttccatcagtaatcagtccctttttgctttcttttacgaccacatgaaacttgagaagccacctaaagctatatcatttagtggagttgggcagttcccaagtgtccaacaagaaggcctggtttaggctgcgatggccactgtcattcctggtgatttgtcagaagtaagagatacccagaaagtcccttcagggaaacgtaagcgtggtgaaaccaaaccaagaaaaaactttccttgccaactgtgtgacaaggcctttaacagtgttgagaaattaaaggttcactcctactctcacacaggagagaggccctacaagtgcatacaacaagactgcaccaaggcctttgtttctaagtacaaattacaaaggcacatggctactcattctcctgagaaaacccacaagtgtaattattgtgagaaaatgtttcaccggaaagatcatctgaagaatcacctccatacacacgaccctaacaaagagacgtttaagtgcgaagaatgtggcaagaactacaataccaagcttggatttaaacgtcacttggccttgcatgccgcaacaagtggtgacctcacctgtaaggtatgtttgcaaacttttgaaagcacgggagtgcttctggagcaccttaaatctcatgcaggcaagtcgtctggtggggttaaagaaaaaaagcaccagtgcgaacattgtgatcgccggttctacacccgaaaggatgtccggagacacatggtggtgcacactggaagaaaggacttcctctgtcagtattgtgcacagagatttgggcgaaaggatcacctgactcgacatatgaagaagagtcacaatcaagagcttctgaaggtcaaaacagaaccagtggatttccttgacccatttacctgcaatgtgtctgtgcctataaaagacgagctccttccggtgatgtccttaccttccagtgaactgttatcaaagccattcacaaacactttgcagttaaacctctacaacactccatttcagtccatgcagagctcgggatctgcccaccaaatgatcacaactttacctttgggaatgacatgcccaatagatatggacactgttcatccctctcaccacctttctttcaaatatccgttcagttctacctcatatgcaatttctattcctgaaaaagaacagccattaaagggggaaattgagagttacctgatggagttacaaggtggcgtgccctcttcatcccaagattctcaagcatcgtcatcatctaagctagggttggatcctcagattgggtccctagatgatggtgcaggagacctctccctatccaaaagctctatctccatcagtgaccccctaaacacaccagcattggatttttctcagttgtttaatttcatacctttaaatggtcctccctataatcctctatcagtggggagccttggaatgagctattcccaggaagaagcacattcttctgtttcccagctccccacacaaacacaggatcttcaggatcctgcaaacactatagggcttgggtctctgcactcactgtcagcagctttcaccagcagtttaagcacaagtaccaccctcccacgtttccatcaagcttttcagtaggattctgggacatggattcattacagaaatgtatgtgtagctgtgccctagatgaccatttttattttagtgcctactttaaaacagtataaaaatttctgcttttgtataatacaaattttcattaagccagtataaaatagaaactagcttttaaactgagctttggaaccatttgtgttcagttaagtttacctgggtattttgtcctgattcactgccaattgtcacattttaagactttttttttttccatataggaaagccattattagtagtaaacttttacaaatcccattttcaaattacttttagatcttaaaattttcatttttgtctaataacagtggctctaccttttgacatctggctcattaaaaaatttagcaatagaatgtaaattgtataaaaagtttgtgaataactcaagggtttaaattttcttactagcttctaaatggattaataatcaagtgcttcaaatgaattaagagtccagtttcggaagataataaatgtttgttagatacaccataatttcagatcagtatattctgaagactctctgttgtctggctaaaatatttgccatctttattatgagcctttaaggaaaacaaaccctaaacacaaagcatcagtatttatagcaaaaagagactctgttaggtgacatggcatttcgtgtcacttaatagttggccctaaattagtacacaggatattttgtcgtgtttcatccttcttaacatgctatcttttcatttaataatagtaatagtgtatggcattggggtcttcagagtcgatatataggtagatctctttagtcttttccacctttcacatccaaggggtgggtcaagtgcagccagcaatttattttcattgttggcccacggttagtccataatctagagccattgtggaactgcagccatgaggtgtgtttatcccacagtggattgactcagcctctgtgggtgacagacttctaagcaggaagatagacgtgaagcacatggttacatttgggaacttgtgtagggatcatggcccctgtagccagggttaaaaactggactttttagaagtaaagtaaaagcatagcgcttatatcatttcttgctgaatttgatatgtttttctttcccttaagaatcaaaagcagaaaacaaaaacaacagtcctactccgatgttatctttctgattcaatgtgaatccatctttccttgcaatattttggatggagaatttgaagttaaatgcattagaaaactacctgatgaactaccacaaagttttaagtgactagaaatatatacagtaaaatcccactttcatgcatctctgggaaatgataggagtattgcaaataagttgagtttgtagagggtaacaaagtaaagtaaaacaaacctatcttggttaacatgaaaataacaattgagaatatattatattcactgaataattataggcttttcctcacattagacaaccaacataatcttcttaaaggtctaattaatatatttttctaagggtcagttgggacattaacctaagaaacatatctattaagcacttgttaacaccttattttaggaccctttccgttggggatgggggcaagggtgggaggtttttagaagagtatatatctctttaaaaaaaaacagaaagaaaaatatttctgagcactcattagccctatatggaaacttctttcctttttgtagggccagttatcactgcagattgcaatgtttaccaagaatttctaaaaatgagtgcagattactgaatataatacattatttaaaatatttgggagtagtataatttgttgagaaatgtaaattgtaataatgtaaatggggggcttcaatatatatatataatacacacacacacacacatgcacacataccgcacttcatagaatcaaagttgctctctgaaggagctttggctcctgatattttatcatgctcctatatttttttaatccttggagcagtagtttttatacttatgtatttaaattttattatgaaaaattacatttattaaaaaagtgtgttccaaaggcattaaaattatatatgttaataaggaagtacatttttaaatttttcaaactgctcctagcttttgattaggagaatattttttctgaaagtaggcttttcgctctgcttcattactgcttcctttagtttctatgaaacagattgcttacctaaatctttagttgaatgattagtgttcaatattgctttaatcaccatataaaaggaaaaaaattggtgacagagcacaaatagaaaacctatttttaaatagaaatcacaaatagcaagtgtggaagcactactttattctgtttaaaatgtacttaagaagtcatcaaattagtgaactgagacattggccttagtaggctgtattcactgctaatttaaaaaagggagtaccaggatttattaagtaaagcattttggaaatggggaatagcgccatatatgtatgtatgtgtatgtgtgtgtgtggtgtgtgtatatatacacacacacatacatacttaaatcttgccctgcatgaaattcaaatacatggaggcacatcttcagggcaccagtgttaaaattttggagtcttaattttcatgtgtacacctctttgcctgttcccacccccagacttgaaataacacttcagagtaagagggaattcagctaatttgtttttaaaattgactgtagtggtcactaaaccctttttgagagaatttctattaaagatgaggcagactcgcttatttgaattgcacaatgttctaacaaggatgtaacacagaattggcttttttttccctagaaaaagattgtttgtttctatgtcaactagatatgattaaaaataagtattgccaatgctgttttcattctctagtggccagaatcattatccttgaaatttctggtagtgccttagcttggttaaaaaaaaaaaaaaaaaaaaaaaaaaagggattaacattaaataaaagtagtttagaatttgggcctcagacaagatattgaacctcattcagtttcacttccacatgtatgtacaagttaggtcaccaaacacggaagttgagtgtggaaggatcttggcactgtaagcaatgctatccattgatgtatacaagtacctttatagttatcgatcactgttaaaactttcattttaaaatcctattaccaagttcagttttttaaaacttcaattgtcctggctgattatgcatcactctgtgtgcaacttttttatttcatttagtgtttctttcaagctgtgtatttttgcctatttgttgcttgtgctttatttttcttagtcatttgtggaatatagtgatatattgtgttaatttggacagtagcggtttttaaaaaccatatactgactgaaacatgagccagagccgattgctttattaagctaataatgaatgttaaagagtacatattttcaggatcgttcatctagtgagcaatacacatattataggccaatatttttttaaaaaatagagcttggtcaacctctatactacacatattacaagatatagcactttcaaaatgaatctaaacctttacagaaactttcttataggttatgccttttattttaagacttattataattcaagtgccattagatgatatatatgtaggcctttgatatataatgctttgtgtacaaaaatggtagatggtattttaaacaggtacatttttacagtgttttcttatcaatttgctatattgcacagaatcagtgtgtgtcttttcataaggttttacaatggtttatttttttacaaggtttacgtgtctcaaagcacactgtcttcccagtacgtaagttaaaaaataccagttcacccaagttgcttctagcctactgagatccatgtgacattggaggagatcttttaaatgtttagtattcgtcattagcaatggctggctgttagttctggtaaatgtgtgcctaagttgaatttgtcttgtttttctcacactgtgtcagcagccatgtctacaacacagataagtctgttgtgatcacatagatctacataagttgtgcagttttgtgctaaaaacccatagggagctcctttgggatcatagaaaagaagatcatgcaaccagcattggtgaaggcacactcagattgcacttagggcctttctatgatgttgtcaaccctctgaggatggaaggcagtgtcttttgatgttatctagcctagaaatgacacagaactattgctaatgtataaaacacttcattatataagcttcagtggtacagatgaaccagaatgaatgtttatcttctcagaaacactccttcaatattatattggatcatgctgctaatgtaacttgggctacaactcttcatggtgctacaaacttctctgtctcattcagtcgtatttttttatccatagaaaaaggactacattaggtgtaaaagtgtacaatatatttttatactgtgacttaatttgtcattaacaaacttttacaccaccacaatgtattcatgtgcacttgcaaaaggagatctcggacatgcaaatgttaccagaacaaacccagcttttgtccacaaggtgactgtaactcagaatggaaagtgggctttataatagggtgtggagtgaagaacatgctgtatgttactaacagccctttgaatttaacaaaaactgggaatccattaggaaacggattgcatcatacctgaacataagctggactgctgaaattgtatttttagctaatgaaaaagtgtttggactagtactctaaaaatgttctaatgataaagttttgagtcaaaatagaaaagaaaaaaatctgcattccaggccgaattttgtatatttttattgcatttaaaattgctattctgtaatattgggaaatcaagtggcttatcatgtatatcgtgtacttaaaatgtattcacaaactactgttgtatttgtataaaatatagacaaagatcatattttttgtgtgtgtataagctctgtaaaatagcaatcacattatgaagctgcagtgatactacattttaaacattcacatccaaagaagcagactatttattgtccatataccagatttaaaatattaatttgctgctaattaaataatagtactgcagcttcttgtggcctacagtgttatgtttgctgtaagaataagatatgtgaattccacaaaatatatgaataaaatctcgtgcc

SEQ ID NO: 527488 - DNA, 2661 bp, Homo sapiens
acattcagctcggtacccacaccacctgagtccaggagtttgagacagcctgggcaacatagtaagactgcatctctacaaaattctaaaaggccaagcacagtggttcatgcctgtactatcagcaccttgggaggccaggagttcaaaaccagcctgagcaacaaagcaagaccttgtctgtacaaaagaaaaatgaaaaattagcttgatgtggtgacgctcatctgtagtcccagctactcaggaggctgaggcgggagatcgcttgagcccagcagtttgaggttatagtgaggtatgattgtgccactacattctagcctgggtgagagagtaagaccttgtctcttaaaaaaaaaaaaaagggattaacattaaataaaagtagtttagaatttgggcctcagacaagatattgaacctcattcagtttcacttccacatgtatgtacaagttaggtcaccaaacacggaagttgagtgtggaaggatcttggcactgtaagcaatgctatccattgatgtatacaagtacctttatagttatcgatcactgttaaaactttcattttaaaatcctattaccaagttcagttttttaaaacttcaattgtcctggctgattatgcatcactctgtgtgcaacttttttatttcatttagtgtttctttcaagctgtgtatttttgcctatttgttgcttgtgctttatttttcttagtcatttgtggaatatagtgatatattgtgttaatttggacagtagcggtttttaaaaaccatatactgactgaaacatgagccagagccgattgctttattaagctaataatgaatgttaaagagtacatattttcaggatcgttcatctagtgagcaatacacatattataggccaatatttttttaaaaaatagagcttggtcaacctctatactacacatattacaagatatagcactttcaaaatgaatctaaacctttacagaaactttcttataggttatgccttttattttaagacttattataattcaagtgccattagatgatatatatgtaggcctttgatatataatgctttgtgtacaaaaatggtagatggtattttaaacaggtacatttttacagtgttttcttatcaatttgctatattgcacagaatcagtgtgtgtcttttcataaggttttacaatggtttatttttttacaaggtttacgtgtctcaaagcacactgtcttcccagtacgtaagttaaaaaataccagttcacccaagttgcttctagcctactgagatccatgtgacattggaggagatcttttaaatgtttagtattcgtcattagcaatggctggctgttagttctggtaaatgtgtgcctaagttgaatttgtcttgtttttctcacactgtgtcagcagccatgtctacaacacagataagtctgttgtgatcacatagatctacataagttgtgcagttttgtgctaaaaacccatagggagctcctttgggatcatagaaaagaagatcatgcaaccagcattggtgaaggcacactcagattgcacttagggcctttctatgatgttgtcaaccctctgaggatggaaggcagtgtcttttgatgttatctagcctagaaatgacacagaactattgctaatgtataaaacacttcattatataagcttcagtggtacagatgaaccagaatgaatgtttatcttctcagaaacactccttcaatattatattggatcatgctgctaatgtaacttgggctacaactcttcatggtgctacaaacttctctgtctcattcagtcgtatttttttatccatagaaaaaggactacattaggtgtaaaagtgtacaatatatttttatactgtgacttaatttgtcattaacaaacttttacaccaccacaatgtattcatgtgcacttgcaaaaggagatctcggacatgcaaatgttaccagaacaaacccagcttttgtccacaaggtgactgtaactcagaatggaaagtgggctttataatagggtgtggagtgaagaacatgctgtatgttactaacagccctttgaatttaacaaaaactgggaatccattaggaaacggattgcatcatacctgaacataagctggactgctgaaattgtatttttagctaatgaaaaagtgtttggactagtactctaaaaatgttctaatgataaagttttgagtcaaaatagaaaagaaaaaaatctgcattccaggccgaattttgtatatttttattgcatttaaaattgctattctgtaatattgggaaatcaagtggcttatcatgtatatcgtgtacttaaaatgtattcacaaactactgttgtatttgtataaaatatagacaaagatcatattttttgtgtgtgtataagctctgtaaaatagcaatcacattatgaagctgcagtgatactacattttaaacattcacatccaaagaagcagactatttattgtccatataccagatttaaaatattaatttgctgctaattaaataatagtactgcagcttcttgtggcctacagtgttatgtttgctgtaagaataagatatgtgaattccacaaaatatatgaataaaatctcgtgcc

SEQ ID NO: 527489 - DNA, 264 bp, Homo sapiens
acaggatcccgatcgtccagcatcaactcatggtgcttgtgttttacttggtgggttttgtggctgtcattctaatgcgtgtgcatcttgaatgacctggactcggtacacattagatgagtgagaccacctctgcaggttctggctgatgactttgaccagtggtgacaatggcttggaaaattatccagtacagatgtcttcctgcttccccccgatacctgtggatctgctcatgtgcttgtgcattggctgtgtggtgcc

SEQ ID NO: 527490 - DNA, 7188 bp, Homo sapiens
ctgaggacgactttatgaccaagagctgaacaaggttgcctcttggtgctgccttggccgtatttggcacccagaatgcttcattctgtgacggtctattaataaggttgccttgctagagtttggagcagggcctcagattggccaaaatgggaaggattggattccactctcttccacgaagagtcaatgggactggctaagatcaaagtctgaggctttttccatcagtaatcagtccctttttgctttcttttacgaccacatgaaacttgagaagccacctaaagctatatcatttagtggagttgggcagttcccaagtgtccaacaagaaggcctggtttaggctgcgatggccactgtcattcctggtgatttgtcagaagtaagagatacccagaaagtcccttcagggaaacgtaagcgtggtgaaaccaaaccaagaaaaaactttccttgccaactgtgtgacaaggcctttaacagtgttgagaaattaaaggttcactcctactctcacacaggagagaggccctacaagtgcatacaacaagactgcaccaaggcctttgtttctaagtacaaattacaaaggcacatggctactcattctcctgagaaaacccacaagtgtaattattgtgagaaaatgtttcaccggaaagatcatctgaagaatcacctccatacacacgaccctaacaaagagacgtttaagtgcgaagaatgtggcaagaactacaataccaagcttggatttaaacgtcacttggccttgcatgccgcaacaagtggtgacctcacctgtaaggtatgtttgcaaacttttgaaagcacgggagtgcttctggagcaccttaaatctcatgcaggcaagtcgtctggtggggttaaagaaaaaaagcaccagtgcgaacattgtgatcgccggttctacacccgaaaggatgtccggagacacatggtggtgcacactggaagaaaggacttcctctgtcagtattgtgcacagagatttgggcgaaaggatcacctgactcgacatatgaagaagagtcacaatcaagagcttctgaaggtcaaaacagaaccagtggatttccttgacccatttacctgcaatgtgtctgtgcctataaaagacgagctccttccggtgatgtccttaccttccagtgaactgttatcaaagccattcacaaacactttgcagttaaacctctacaacactccatttcagtccatgcagagctcgggatctgcccaccaaatgatcacaactttacctttgggaatgacatgcccaatagatatggacactgttcatccctctcaccacctttctttcaaatatccgttcagttctacctcatatgcaatttctattcctgaaaaagaacagccattaaagggggaaattgagagttacctgatggagttacaaggtggcgtgccctcttcatcccaagattctcaagcatcgtcatcatctaagctagggttggatcctcagattgggtccctagatgatggtgcaggagacctctccctatccaaaagctctatctccatcagtgaccccctaaacacaccagcattggatttttctcagttgtttaatttcatacctttaaatggtcctccctataatcctctatcagtggggagccttggaatgagctattcccaggaagaagcacattcttctgtttcccagctccccacacaaacacaggatcttcaggatcctgcaaacactatagggcttgggtctctgcactcactgtcagcagctttcaccagcagtttaagcacaagtaccaccctcccacgtttccatcaagcttttcagtaggattctgggacatggattcattacagaaatgtatgtgtagctgtgccctagatgaccatttttattttagtgcctactttaaaacagtataaaaatttctgcttttgtataatacaaattttcattaagccagtataaaatagaaactagcttttaaactgagctttggaaccatttgtgttcagttaagtttacctgggtattttgtcctgattcactgccaattgtcacattttaagactttttttttttccatataggaaagccattattagtagtaaacttttacaaatcccattttcaaattacttttagatcttaaaattttcatttttgtctaataacagtggctctaccttttgacatctggctcattaaaaaatttagcaatagaatgtaaattgtataaaaagtttgtgaataactcaagggtttaaattttcttactagcttctaaatggattaataatcaagtgcttcaaatgaattaagagtccagtttcggaagataataaatgtttgttagatacaccataatttcagatcagtatattctgaagactctctgttgtctggctaaaatatttgccatctttattatgagcctttaaggaaaacaaaccctaaacacaaagcatcagtatttatagcaaaaagagactctgttaggtgacatggcatttcgtgtcacttaatagttggccctaaattagtacacaggatattttgtcgtgtttcatccttcttaacatgctatcttttcatttaataatagtaatagtgtatggcattggggtcttcagagtcgatatataggtagatctctttagtcttttccacctttcacatccaaggggtgggtcaagtgcagccagcaatttattttcattgttggcccacggttagtccataatctagagccattgtggaactgcagccatgaggtgtgtttatcccacagtggattgactcagcctctgtgggtgacagacttctaagcaggaagatagacgtgaagcacatggttacatttgggaacttgtgtagggatcatggcccctgtagccagggttaaaaactggactttttagaagtaaagtaaaagcatagcgcttatatcatttcttgctgaatttgatatgtttttctttcccttaagaatcaaaagcagaaaacaaaaacaacagtcctactccgatgttatctttctgattcaatgtgaatccatctttccttgcaatattttggatggagaatttgaagttaaatgcattagaaaactacctgatgaactaccacaaagttttaagtgactagaaatatatacagtaaaatcccactttcatgcatctctgggaaatgataggagtattgcaaataagttgagtttgtagagggtaacaaagtaaagtaaaacaaacctatcttggttaacatgaaaataacaattgagaatatattatattcactgaataattataggcttttcctcacattagacaaccaacataatcttcttaaaggtctaattaatatatttttctaagggtcagttgggacattaacctaagaaacatatctattaagcacttgttaacaccttattttaggaccctttccgttggggatgggggcaagggtgggaggtttttagaagagtatatatctctttaaaaaaaaacagaaagaaaaatatttctgagcactcattagccctatatggaaacttctttcctttttgtagggccagttatcactgcagattgcaatgtttaccaagaatttctaaaaatgagtgcagattactgaatataatacattatttaaaatatttgggagtagtataatttgttgagaaatgtaaattgtaataatgtaaatggggggcttcaatatatatatataatacacacacacacacacatgcacacataccgcacttcatagaatcaaagttgctctctgaaggagctttggctcctgatattttatcatgctcctatatttttttaatccttggagcagtagtttttatacttatgtatttaaattttattatgaaaaattacatttattaaaaaagtgtgttccaaaggcattaaaattatatatgttaataaggaagtacatttttaaatttttcaaactgctcctagcttttgattaggagaatattttttctgaaagtaggcttttcgctctgcttcattactgcttcctttagtttctatgaaacagattgcttacctaaatctttagttgaatgattagtgttcaatattgctttaatcaccatataaaaggaaaaaaattggtgacagagcacaaatagaaaacctatttttaaatagaaatcacaaatagcaagtgtggaagcactactttattctgtttaaaatgtacttaagaagtcatcaaattagtgaactgagacattggccttagtaggctgtattcactgctaatttaaaaaagggagtaccaggatttattaagtaaagcattttggaaatggggaatagcgccatatatgtatgtatgtgtatgtgtgtgtgtggtgtgtgtatatatacacacacacatacatacttaaatcttgccctgcatgaaattcaaatacatggaggcacatcttcagggcaccagtgttaaaattttggagtcttaattttcatgtgtacacctctttgcctgttcccacccccagacttgaaataacacttcagagtaagagggaattcagctaatttgtttttaaaattgactgtagtggtcactaaaccctttttgagagaatttctattaaagatgaggcagactcgcttatttgaattgcacaatgttctaacaaggatgtaacacagaattggcttttttttccctagaaaaagattgtttgtttctatgtcaactagatatgattaaaaataagtattgccaatgctgttttcattctctagtggccagaatcattatccttgaaatttctggtagtgccttagcttggttaaaaaaaaaaaaaaaaaaaaaaaaaaagggattaacattaaataaaagtagtttagaatttgggcctcagacaagatattgaacctcattcagtttcacttccacatgtatgtacaagttaggtcaccaaacacggaagttgagtgtggaaggatcttggcactgtaagcaatgctatccattgatgtatacaagtacctttatagttatcgatcactgttaaaactttcattttaaaatcctattaccaagttcagttttttaaaacttcaattgtcctggctgattatgcatcactctgtgtgcaacttttttatttcatttagtgtttctttcaagctgtgtatttttgcctatttgttgcttgtgctttatttttcttagtcatttgtggaatatagtgatatattgtgttaatttggacagtagcggtttttaaaaaccatatactgactgaaacatgagccagagccgattgctttattaagctaataatgaatgttaaagagtacatattttcaggatcgttcatctagtgagcaatacacatattataggccaatatttttttaaaaaatagagcttggtcaacctctatactacacatattacaagatatagcactttcaaaatgaatctaaacctttacagaaactttcttataggttatgccttttattttaagacttattataattcaagtgccattagatgatatatatgtaggcctttgatatataatgctttgtgtacaaaaatggtagatggtattttaaacaggtacatttttacagtgttttcttatcaatttgctatattgcacagaatcagtgtgtgtcttttcataaggttttacaatggtttatttttttacaaggtttacgtgtctcaaagcacactgtcttcccagtacgtaagttaaaaaataccagttcacccaagttgcttctagcctactgagatccatgtgacattggaggagatcttttaaatgtttagtattcgtcattagcaatggctggctgttagttctggtaaatgtgtgcctaagttgaatttgtcttgtttttctcacactgtgtcagcagccatgtctacaacacagataagtctgttgtgatcacatagatctacataagttgtgcagttttgtgctaaaaacccatagggagctcctttgggatcatagaaaagaagatcatgcaaccagcattggtgaaggcacactcagattgcacttagggcctttctatgatgttgtcaaccctctgaggatggaaggcagtgtcttttgatgttatctagcctagaaatgacacagaactattgctaatgtataaaacacttcattatataagcttcagtggtacagatgaaccagaatgaatgtttatcttctcagaaacactccttcaatattatattggatcatgctgctaatgtaacttgggctacaactcttcatggtgctacaaacttctctgtctcattcagtcgtatttttttatccatagaaaaaggactacattaggtgtaaaagtgtacaatatatttttatactgtgacttaatttgtcattaacaaacttttacaccaccacaatgtattcatgtgcacttgcaaaaggagatctcggacatgcaaatgttaccagaacaaacccagcttttgtccacaaggtgactgtaactcagaatggaaagtgggctttataatagggtgtggagtgaagaacatgctgtatgttactaacagccctttgaatttaacaaaaactgggaatccattaggaaacggattgcatcatacctgaacataagctggactgctgaaattgtatttttagctaatgaaaaagtgtttggactagtactctaaaaatgttctaatgataaagttttgagtcaaaatagaaaagaaaaaaatctgcattccaggccgaattttgtatatttttattgcatttaaaattgctattctgtaatattgggaaatcaagtggcttatcatgtatatcgtgtacttaaaatgtattcacaaactactgttgtatttgtataaaatatagacaaagatcatattttttgtgtgtgtataagctctgtaaaatagcaatcacattatgaagctgcagtgatactacattttaaacattcacatccaaagaagcagactatttattgtccatataccagatttaaaatattaatttgctgctaattaaataatagtactgcagcttcttgtggcctacagtgttatgtttgctgtaagaataagatatgtgaattccacaaaatatatgaataaaatctcgtgcc

SEQ ID NO: 527491 - DNA, 7086 bp, Homo sapiens
tggagacggcctgggtgctggcgaagcggaggccggaattggccaaaatgggaaggattggattccactctcttccacgaagagtcaatgggactggctaagatcaaagtctgaggctttttccatcagtaatcagtccctttttgctttcttttacgaccacatgaaacttgagaagccacctaaagctatatcatttagtggagttgggcagttcccaagtgtccaacaagaaggcctggtttaggctgcgatggccactgtcattcctggtgatttgtcagaagtaagagatacccagaaagtcccttcagggaaacgtaagcgtggtgaaaccaaaccaagaaaaaactttccttgccaactgtgtgacaaggcctttaacagtgttgagaaattaaaggttcactcctactctcacacaggagagaggccctacaagtgcatacaacaagactgcaccaaggcctttgtttctaagtacaaattacaaaggcacatggctactcattctcctgagaaaacccacaagtgtaattattgtgagaaaatgtttcaccggaaagatcatctgaagaatcacctccatacacacgaccctaacaaagagacgtttaagtgcgaagaatgtggcaagaactacaataccaagcttggatttaaacgtcacttggccttgcatgccgcaacaagtggtgacctcacctgtaaggtatgtttgcaaacttttgaaagcacgggagtgcttctggagcaccttaaatctcatgcaggcaagtcgtctggtggggttaaagaaaaaaagcaccagtgcgaacattgtgatcgccggttctacacccgaaaggatgtccggagacacatggtggtgcacactggaagaaaggacttcctctgtcagtattgtgcacagagatttgggcgaaaggatcacctgactcgacatatgaagaagagtcacaatcaagagcttctgaaggtcaaaacagaaccagtggatttccttgacccatttacctgcaatgtgtctgtgcctataaaagacgagctccttccggtgatgtccttaccttccagtgaactgttatcaaagccattcacaaacactttgcagttaaacctctacaacactccatttcagtccatgcagagctcgggatctgcccaccaaatgatcacaactttacctttgggaatgacatgcccaatagatatggacactgttcatccctctcaccacctttctttcaaatatccgttcagttctacctcatatgcaatttctattcctgaaaaagaacagccattaaagggggaaattgagagttacctgatggagttacaaggtggcgtgccctcttcatcccaagattctcaagcatcgtcatcatctaagctagggttggatcctcagattgggtccctagatgatggtgcaggagacctctccctatccaaaagctctatctccatcagtgaccccctaaacacaccagcattggatttttctcagttgtttaatttcatacctttaaatggtcctccctataatcctctatcagtggggagccttggaatgagctattcccaggaagaagcacattcttctgtttcccagctccccacacaaacacaggatcttcaggatcctgcaaacactatagggcttgggtctctgcactcactgtcagcagctttcaccagcagtttaagcacaagtaccaccctcccacgtttccatcaagcttttcagtaggattctgggacatggattcattacagaaatgtatgtgtagctgtgccctagatgaccatttttattttagtgcctactttaaaacagtataaaaatttctgcttttgtataatacaaattttcattaagccagtataaaatagaaactagcttttaaactgagctttggaaccatttgtgttcagttaagtttacctgggtattttgtcctgattcactgccaattgtcacattttaagactttttttttttccatataggaaagccattattagtagtaaacttttacaaatcccattttcaaattacttttagatcttaaaattttcatttttgtctaataacagtggctctaccttttgacatctggctcattaaaaaatttagcaatagaatgtaaattgtataaaaagtttgtgaataactcaagggtttaaattttcttactagcttctaaatggattaataatcaagtgcttcaaatgaattaagagtccagtttcggaagataataaatgtttgttagatacaccataatttcagatcagtatattctgaagactctctgttgtctggctaaaatatttgccatctttattatgagcctttaaggaaaacaaaccctaaacacaaagcatcagtatttatagcaaaaagagactctgttaggtgacatggcatttcgtgtcacttaatagttggccctaaattagtacacaggatattttgtcgtgtttcatccttcttaacatgctatcttttcatttaataatagtaatagtgtatggcattggggtcttcagagtcgatatataggtagatctctttagtcttttccacctttcacatccaaggggtgggtcaagtgcagccagcaatttattttcattgttggcccacggttagtccataatctagagccattgtggaactgcagccatgaggtgtgtttatcccacagtggattgactcagcctctgtgggtgacagacttctaagcaggaagatagacgtgaagcacatggttacatttgggaacttgtgtagggatcatggcccctgtagccagggttaaaaactggactttttagaagtaaagtaaaagcatagcgcttatatcatttcttgctgaatttgatatgtttttctttcccttaagaatcaaaagcagaaaacaaaaacaacagtcctactccgatgttatctttctgattcaatgtgaatccatctttccttgcaatattttggatggagaatttgaagttaaatgcattagaaaactacctgatgaactaccacaaagttttaagtgactagaaatatatacagtaaaatcccactttcatgcatctctgggaaatgataggagtattgcaaataagttgagtttgtagagggtaacaaagtaaagtaaaacaaacctatcttggttaacatgaaaataacaattgagaatatattatattcactgaataattataggcttttcctcacattagacaaccaacataatcttcttaaaggtctaattaatatatttttctaagggtcagttgggacattaacctaagaaacatatctattaagcacttgttaacaccttattttaggaccctttccgttggggatgggggcaagggtgggaggtttttagaagagtatatatctctttaaaaaaaaacagaaagaaaaatatttctgagcactcattagccctatatggaaacttctttcctttttgtagggccagttatcactgcagattgcaatgtttaccaagaatttctaaaaatgagtgcagattactgaatataatacattatttaaaatatttgggagtagtataatttgttgagaaatgtaaattgtaataatgtaaatggggggcttcaatatatatatataatacacacacacacacacatgcacacataccgcacttcatagaatcaaagttgctctctgaaggagctttggctcctgatattttatcatgctcctatatttttttaatccttggagcagtagtttttatacttatgtatttaaattttattatgaaaaattacatttattaaaaaagtgtgttccaaaggcattaaaattatatatgttaataaggaagtacatttttaaatttttcaaactgctcctagcttttgattaggagaatattttttctgaaagtaggcttttcgctctgcttcattactgcttcctttagtttctatgaaacagattgcttacctaaatctttagttgaatgattagtgttcaatattgctttaatcaccatataaaaggaaaaaaattggtgacagagcacaaatagaaaacctatttttaaatagaaatcacaaatagcaagtgtggaagcactactttattctgtttaaaatgtacttaagaagtcatcaaattagtgaactgagacattggccttagtaggctgtattcactgctaatttaaaaaagggagtaccaggatttattaagtaaagcattttggaaatggggaatagcgccatatatgtatgtatgtgtatgtgtgtgtgtggtgtgtgtatatatacacacacacatacatacttaaatcttgccctgcatgaaattcaaatacatggaggcacatcttcagggcaccagtgttaaaattttggagtcttaattttcatgtgtacacctctttgcctgttcccacccccagacttgaaataacacttcagagtaagagggaattcagctaatttgtttttaaaattgactgtagtggtcactaaaccctttttgagagaatttctattaaagatgaggcagactcgcttatttgaattgcacaatgttctaacaaggatgtaacacagaattggcttttttttccctagaaaaagattgtttgtttctatgtcaactagatatgattaaaaataagtattgccaatgctgttttcattctctagtggccagaatcattatccttgaaatttctggtagtgccttagcttggttaaaaaaaaaaaaaaaaaaaaaaaaaaagggattaacattaaataaaagtagtttagaatttgggcctcagacaagatattgaacctcattcagtttcacttccacatgtatgtacaagttaggtcaccaaacacggaagttgagtgtggaaggatcttggcactgtaagcaatgctatccattgatgtatacaagtacctttatagttatcgatcactgttaaaactttcattttaaaatcctattaccaagttcagttttttaaaacttcaattgtcctggctgattatgcatcactctgtgtgcaacttttttatttcatttagtgtttctttcaagctgtgtatttttgcctatttgttgcttgtgctttatttttcttagtcatttgtggaatatagtgatatattgtgttaatttggacagtagcggtttttaaaaaccatatactgactgaaacatgagccagagccgattgctttattaagctaataatgaatgttaaagagtacatattttcaggatcgttcatctagtgagcaatacacatattataggccaatatttttttaaaaaatagagcttggtcaacctctatactacacatattacaagatatagcactttcaaaatgaatctaaacctttacagaaactttcttataggttatgccttttattttaagacttattataattcaagtgccattagatgatatatatgtaggcctttgatatataatgctttgtgtacaaaaatggtagatggtattttaaacaggtacatttttacagtgttttcttatcaatttgctatattgcacagaatcagtgtgtgtcttttcataaggttttacaatggtttatttttttacaaggtttacgtgtctcaaagcacactgtcttcccagtacgtaagttaaaaaataccagttcacccaagttgcttctagcctactgagatccatgtgacattggaggagatcttttaaatgtttagtattcgtcattagcaatggctggctgttagttctggtaaatgtgtgcctaagttgaatttgtcttgtttttctcacactgtgtcagcagccatgtctacaacacagataagtctgttgtgatcacatagatctacataagttgtgcagttttgtgctaaaaacccatagggagctcctttgggatcatagaaaagaagatcatgcaaccagcattggtgaaggcacactcagattgcacttagggcctttctatgatgttgtcaaccctctgaggatggaaggcagtgtcttttgatgttatctagcctagaaatgacacagaactattgctaatgtataaaacacttcattatataagcttcagtggtacagatgaaccagaatgaatgtttatcttctcagaaacactccttcaatattatattggatcatgctgctaatgtaacttgggctacaactcttcatggtgctacaaacttctctgtctcattcagtcgtatttttttatccatagaaaaaggactacattaggtgtaaaagtgtacaatatatttttatactgtgacttaatttgtcattaacaaacttttacaccaccacaatgtattcatgtgcacttgcaaaaggagatctcggacatgcaaatgttaccagaacaaacccagcttttgtccacaaggtgactgtaactcagaatggaaagtgggctttataatagggtgtggagtgaagaacatgctgtatgttactaacagccctttgaatttaacaaaaactgggaatccattaggaaacggattgcatcatacctgaacataagctggactgctgaaattgtatttttagctaatgaaaaagtgtttggactagtactctaaaaatgttctaatgataaagttttgagtcaaaatagaaaagaaaaaaatctgcattccaggccgaattttgtatatttttattgcatttaaaattgctattctgtaatattgggaaatcaagtggcttatcatgtatatcgtgtacttaaaatgtattcacaaactactgttgtatttgtataaaatatagacaaagatcatattttttgtgtgtgtataagctctgtaaaatagcaatcacattatgaagctgcagtgatactacattttaaacattcacatccaaagaagcagactatttattgtccatataccagatttaaaatattaatttgctgctaattaaataatagtactgcagcttcttgtggcctacagtgttatgtttgctgtaagaataagatatgtgaattccacaaaatatatgaataaaatctcgtgcc

SEQ ID NO: 527492 - DNA, 930 bp, Homo sapiens
gggctccgactgtctgggccgtccgcccgtcggttgccatcatggcggacgcgtgacagtgcagtgtgcgtcctgggattcgcggtctcaccatcctggtactcagccgcttgcatgtacgtgaaagtgctcatccaggtgggatatgagcctctgaccttaaacaataggacgaatgattttggggcggaaagaatgtgtcagcttcctggtctcttgtagatgatgcatcattgaaattggcagattagtacgatggggaggcgcgggtgttgttgaggcaggtccttaactccaagaagtgggttctgggagtcctggagaactggggtcgatggtggagttgaataggattatgaggatattgatatgggtgaggagtaaggagctgggagtgttcagaatcgaagtctcatcttcctttgaccagcgtaatcaaggaagaggactcgagagatgaggtcgtgcgttctagttgtagcctcatcataagatcccggtttcatgtgatcacgactgagatctatggtacagtccattcggccgagaatccaatgtgctgtcggacttgtgattcctttgaccctcttatcgggatgcgggattctacggtttccggggtctgttcctggccttctagtgtgacgtcctttcttcgtggctgtgttgctcctggctagctcggcgaaactatgcctggcggtgcgtgtttaccttgatgccatgtggggtttctcagcgcgagggctattgcgctgtggccacccttgggtggtccccttcgcgtgtcccctggtgctggggggctcttcaccagttctgggggcggtgggtgcgcccggggagcgcgggatttggggcgcgaattggcacgtacgggggctcccaaaggactggtttttaaaaagcggcgcctgttgcgctcttcca

SEQ ID NO: 527493 - DNA, 7273 bp, Homo sapiens
ctatttatctaggtaatactttttatttatgcatttatttggtcacgtaaatgtgcttagacctaataaacatatgtagttggtgaaaattaatgcatgactcgtgagcagagtatggaatgtaagcatgtgccatgaaactgcaattcttttatcctgtattttccatcatttacataccggttccatttagaggatagtccattttcacttttttttcatagattggccaaaatgggaaggattggattccactctcttccacgaagagtcaatgggactggctaagatcaaagtctgaggctttttccatcagtaatcagtccctttttgctttcttttacgaccacatgaaacttgagaagccacctaaagctatatcatttagtggagttgggcagttcccaagtgtccaacaagaaggcctggtttaggctgcgatggccactgtcattcctggtgatttgtcagaagtaagagatacccagaaagtcccttcagggaaacgtaagcgtggtgaaaccaaaccaagaaaaaactttccttgccaactgtgtgacaaggcctttaacagtgttgagaaattaaaggttcactcctactctcacacaggagagaggccctacaagtgcatacaacaagactgcaccaaggcctttgtttctaagtacaaattacaaaggcacatggctactcattctcctgagaaaacccacaagtgtaattattgtgagaaaatgtttcaccggaaagatcatctgaagaatcacctccatacacacgaccctaacaaagagacgtttaagtgcgaagaatgtggcaagaactacaataccaagcttggatttaaacgtcacttggccttgcatgccgcaacaagtggtgacctcacctgtaaggtatgtttgcaaacttttgaaagcacgggagtgcttctggagcaccttaaatctcatgcaggcaagtcgtctggtggggttaaagaaaaaaagcaccagtgcgaacattgtgatcgccggttctacacccgaaaggatgtccggagacacatggtggtgcacactggaagaaaggacttcctctgtcagtattgtgcacagagatttgggcgaaaggatcacctgactcgacatatgaagaagagtcacaatcaagagcttctgaaggtcaaaacagaaccagtggatttccttgacccatttacctgcaatgtgtctgtgcctataaaagacgagctccttccggtgatgtccttaccttccagtgaactgttatcaaagccattcacaaacactttgcagttaaacctctacaacactccatttcagtccatgcagagctcgggatctgcccaccaaatgatcacaactttacctttgggaatgacatgcccaatagatatggacactgttcatccctctcaccacctttctttcaaatatccgttcagttctacctcatatgcaatttctattcctgaaaaagaacagccattaaagggggaaattgagagttacctgatggagttacaaggtggcgtgccctcttcatcccaagattctcaagcatcgtcatcatctaagctagggttggatcctcagattgggtccctagatgatggtgcaggagacctctccctatccaaaagctctatctccatcagtgaccccctaaacacaccagcattggatttttctcagttgtttaatttcatacctttaaatggtcctccctataatcctctatcagtggggagccttggaatgagctattcccaggaagaagcacattcttctgtttcccagctccccacacaaacacaggatcttcaggatcctgcaaacactatagggcttgggtctctgcactcactgtcagcagctttcaccagcagtttaagcacaagtaccaccctcccacgtttccatcaagcttttcagtaggattctgggacatggattcattacagaaatgtatgtgtagctgtgccctagatgaccatttttattttagtgcctactttaaaacagtataaaaatttctgcttttgtataatacaaattttcattaagccagtataaaatagaaactagcttttaaactgagctttggaaccatttgtgttcagttaagtttacctgggtattttgtcctgattcactgccaattgtcacattttaagactttttttttttccatataggaaagccattattagtagtaaacttttacaaatcccattttcaaattacttttagatcttaaaattttcatttttgtctaataacagtggctctaccttttgacatctggctcattaaaaaatttagcaatagaatgtaaattgtataaaaagtttgtgaataactcaagggtttaaattttcttactagcttctaaatggattaataatcaagtgcttcaaatgaattaagagtccagtttcggaagataataaatgtttgttagatacaccataatttcagatcagtatattctgaagactctctgttgtctggctaaaatatttgccatctttattatgagcctttaaggaaaacaaaccctaaacacaaagcatcagtatttatagcaaaaagagactctgttaggtgacatggcatttcgtgtcacttaatagttggccctaaattagtacacaggatattttgtcgtgtttcatccttcttaacatgctatcttttcatttaataatagtaatagtgtatggcattggggtcttcagagtcgatatataggtagatctctttagtcttttccacctttcacatccaaggggtgggtcaagtgcagccagcaatttattttcattgttggcccacggttagtccataatctagagccattgtggaactgcagccatgaggtgtgtttatcccacagtggattgactcagcctctgtgggtgacagacttctaagcaggaagatagacgtgaagcacatggttacatttgggaacttgtgtagggatcatggcccctgtagccagggttaaaaactggactttttagaagtaaagtaaaagcatagcgcttatatcatttcttgctgaatttgatatgtttttctttcccttaagaatcaaaagcagaaaacaaaaacaacagtcctactccgatgttatctttctgattcaatgtgaatccatctttccttgcaatattttggatggagaatttgaagttaaatgcattagaaaactacctgatgaactaccacaaagttttaagtgactagaaatatatacagtaaaatcccactttcatgcatctctgggaaatgataggagtattgcaaataagttgagtttgtagagggtaacaaagtaaagtaaaacaaacctatcttggttaacatgaaaataacaattgagaatatattatattcactgaataattataggcttttcctcacattagacaaccaacataatcttcttaaaggtctaattaatatatttttctaagggtcagttgggacattaacctaagaaacatatctattaagcacttgttaacaccttattttaggaccctttccgttggggatgggggcaagggtgggaggtttttagaagagtatatatctctttaaaaaaaaacagaaagaaaaatatttctgagcactcattagccctatatggaaacttctttcctttttgtagggccagttatcactgcagattgcaatgtttaccaagaatttctaaaaatgagtgcagattactgaatataatacattatttaaaatatttgggagtagtataatttgttgagaaatgtaaattgtaataatgtaaatggggggcttcaatatatatatataatacacacacacacacacatgcacacataccgcacttcatagaatcaaagttgctctctgaaggagctttggctcctgatattttatcatgctcctatatttttttaatccttggagcagtagtttttatacttatgtatttaaattttattatgaaaaattacatttattaaaaaagtgtgttccaaaggcattaaaattatatatgttaataaggaagtacatttttaaatttttcaaactgctcctagcttttgattaggagaatattttttctgaaagtaggcttttcgctctgcttcattactgcttcctttagtttctatgaaacagattgcttacctaaatctttagttgaatgattagtgttcaatattgctttaatcaccatataaaaggaaaaaaattggtgacagagcacaaatagaaaacctatttttaaatagaaatcacaaatagcaagtgtggaagcactactttattctgtttaaaatgtacttaagaagtcatcaaattagtgaactgagacattggccttagtaggctgtattcactgctaatttaaaaaagggagtaccaggatttattaagtaaagcattttggaaatggggaatagcgccatatatgtatgtatgtgtatgtgtgtgtgtggtgtgtgtatatatacacacacacatacatacttaaatcttgccctgcatgaaattcaaatacatggaggcacatcttcagggcaccagtgttaaaattttggagtcttaattttcatgtgtacacctctttgcctgttcccacccccagacttgaaataacacttcagagtaagagggaattcagctaatttgtttttaaaattgactgtagtggtcactaaaccctttttgagagaatttctattaaagatgaggcagactcgcttatttgaattgcacaatgttctaacaaggatgtaacacagaattggcttttttttccctagaaaaagattgtttgtttctatgtcaactagatatgattaaaaataagtattgccaatgctgttttcattctctagtggccagaatcattatccttgaaatttctggtagtgccttagcttggttaaaaaaaaaaaaaaaaaaaaaaaaaaagggattaacattaaataaaagtagtttagaatttgggcctcagacaagatattgaacctcattcagtttcacttccacatgtatgtacaagttaggtcaccaaacacggaagttgagtgtggaaggatcttggcactgtaagcaatgctatccattgatgtatacaagtacctttatagttatcgatcactgttaaaactttcattttaaaatcctattaccaagttcagttttttaaaacttcaattgtcctggctgattatgcatcactctgtgtgcaacttttttatttcatttagtgtttctttcaagctgtgtatttttgcctatttgttgcttgtgctttatttttcttagtcatttgtggaatatagtgatatattgtgttaatttggacagtagcggtttttaaaaaccatatactgactgaaacatgagccagagccgattgctttattaagctaataatgaatgttaaagagtacatattttcaggatcgttcatctagtgagcaatacacatattataggccaatatttttttaaaaaatagagcttggtcaacctctatactacacatattacaagatatagcactttcaaaatgaatctaaacctttacagaaactttcttataggttatgccttttattttaagacttattataattcaagtgccattagatgatatatatgtaggcctttgatatataatgctttgtgtacaaaaatggtagatggtattttaaacaggtacatttttacagtgttttcttatcaatttgctatattgcacagaatcagtgtgtgtcttttcataaggttttacaatggtttatttttttacaaggtttacgtgtctcaaagcacactgtcttcccagtacgtaagttaaaaaataccagttcacccaagttgcttctagcctactgagatccatgtgacattggaggagatcttttaaatgtttagtattcgtcattagcaatggctggctgttagttctggtaaatgtgtgcctaagttgaatttgtcttgtttttctcacactgtgtcagcagccatgtctacaacacagataagtctgttgtgatcacatagatctacataagttgtgcagttttgtgctaaaaacccatagggagctcctttgggatcatagaaaagaagatcatgcaaccagcattggtgaaggcacactcagattgcacttagggcctttctatgatgttgtcaaccctctgaggatggaaggcagtgtcttttgatgttatctagcctagaaatgacacagaactattgctaatgtataaaacacttcattatataagcttcagtggtacagatgaaccagaatgaatgtttatcttctcagaaacactccttcaatattatattggatcatgctgctaatgtaacttgggctacaactcttcatggtgctacaaacttctctgtctcattcagtcgtatttttttatccatagaaaaaggactacattaggtgtaaaagtgtacaatatatttttatactgtgacttaatttgtcattaacaaacttttacaccaccacaatgtattcatgtgcacttgcaaaaggagatctcggacatgcaaatgttaccagaacaaacccagcttttgtccacaaggtgactgtaactcagaatggaaagtgggctttataatagggtgtggagtgaagaacatgctgtatgttactaacagccctttgaatttaacaaaaactgggaatccattaggaaacggattgcatcatacctgaacataagctggactgctgaaattgtatttttagctaatgaaaaagtgtttggactagtactctaaaaatgttctaatgataaagttttgagtcaaaatagaaaagaaaaaaatctgcattccaggccgaattttgtatatttttattgcatttaaaattgctattctgtaatattgggaaatcaagtggcttatcatgtatatcgtgtacttaaaatgtattcacaaactactgttgtatttgtataaaatatagacaaagatcatattttttgtgtgtgtataagctctgtaaaatagcaatcacattatgaagctgcagtgatactacattttaaacattcacatccaaagaagcagactatttattgtccatataccagatttaaaatattaatttgctgctaattaaataatagtactgcagcttcttgtggcctacagtgttatgtttgctgtaagaataagatatgtgaattccacaaaatatatgaataaaatctcgtgcc

SEQ ID NO: 527494 - DNA, 615 bp, Homo sapiens
atggcgggccctgctgggctcacgggggactcagggttggaccccagtaggcctccgccaggtgtggtgggcaccctctctgtggaagttaggaagggctgttgagggaaggtggcatggcgggctgggtcttgagcggtggggaggagttgggcccatccacttgtagcggggcacagggctctggctgaccaccagcagggcaggcggagggaagggtccggcgccctcttttcccactggtgtcctcctgctgtgaagccaggcctgtaggagcctgcaagcctcggggggcacaggggacaggcctgacacacagagggctcctcgggcactcatcctatagtagggagacgggccctgggaggggagggagccaggaggcagccatgcgccctccctaagatggaaaacgcaggggcctggtgagggcggtgctgaccacagtgctctgcacaccaggctactgctggcgccccagctccggggaacatagagtccttggggacacaggggcccagggcctccagagctgggatacggtggaggggctgctggatcccaaacaccctttaggcctccttcatccctagtcagcattccagccaggacccc

SEQ ID NO: 527495 - DNA, 168 bp, Homo sapiens
cgtagagtattcatctacaaaccacaaagacagttggaatgcaccataccttattattctgcgcatgagactgtcatgtcgctaggcacagctctatgcttccttattcgagccgatctgggccagccaggcaaccttctgggtaacgaccacatctacaacgttatc

SEQ ID NO: 527496 - DNA, 358 bp, Homo sapiens
  misc_feature (71)..(71): n is a, c, g, or t
  misc_feature (90)..(90): n is a, c, g, or t
  misc_feature (150)..(151): n is a, c, g, or t
  misc_feature (169)..(169): n is a, c, g, or t
  misc_feature (174)..(174): n is a, c, g, or t
  misc_feature (177)..(177): n is a, c, g, or t
  misc_feature (182)..(182): n is a, c, g, or t
  misc_feature (185)..(185): n is a, c, g, or t
  misc_feature (247)..(247): n is a, c, g, or t
  misc_feature (250)..(250): n is a, c, g, or t
  misc_feature (253)..(253): n is a, c, g, or t
  misc_feature (256)..(256): n is a, c, g, or t
  misc_feature (258)..(258): n is a, c, g, or t
  misc_feature (266)..(267): n is a, c, g, or t
  misc_feature (272)..(272): n is a, c, g, or t
  misc_feature (354)..(354): n is a, c, g, or t
ggctgaggtgggattttccctccccacagtgcactgagcaatggagggtggtgagggagccatgctgctgnattctggttggcatttccncattatgtaaaatggggtgttgggtagggcagactctgcttgggtttggttgtaagatanncctggaggagaagcacantgtcncantgaantanttgagcaaaaactactgtaaataattcaatgggcagactctgcttgggtttggttgtaaganaanccnggngnagaagcanngttgncccattgaattatttgagcaaaaactactgtaaataacttttttgtcttttgtcaaataaaatttttttttgtttttttaancaga

SEQ ID NO: 527497 - DNA, 455 bp, Homo sapiens
aaggatgggagcagggtccagcattatttaaaaccttccgtttcagcttaagctaaggggagggggaatccctcctttccagcttgaaattggccatctagaaaaaactcggtccataatggctgaagaactagtttaatttaccaatccaaatgatggacttggagagaaggtgaaggggataccccaacttagaactcagctaagagatttgggtccaaggggccaccctattttgccgatggatggagaaaaagccgaaaaggccgaagaacttcgatttggtttcgaagatggtaaaaatatgggccaaactccaatagatggacttttaaggccaagtttccgtttacttgtgaaaattgaattcccctccaactgaaaggtagccttttatattttaacctttaatgtgggcttcccattaatttttttataaaattagaaagggggga

SEQ ID NO: 527498 - DNA, 356 bp, Homo sapiens
cctaactcagcctaagactgggagccaagcaccagctgggggcagagactgtgggaaattataggacagcaaaatgaagagagggccgggggcggtggctcatgcttgtaatcccagcactttggaaggccgaagcgggcggatcacctgaggtcagaagttcgagaccagcctggccaacatggagaaaccccgtctttactaaaaacacaaaaaattacctgggcgtggtggcgggtgcctgtaatcccagctacgtgggaggctgaggcgggagaattgcttgaacccgggaggcagaggttagatacagtgagccgagattgcaccactgcactccagcccgggtgagacag

SEQ ID NO: 527499 - DNA, 141 bp, Homo sapiens
cctttttagcacccataacggtacgtgatggcataccatctgtgtgcgtttctggcgatgcagcaattccaagaaggtgttgtatgagatggctgtgacagcaccagtctgttctgctattccatacccaatccccggtcg

SEQ ID NO: 527500 - DNA, 638 bp, Homo sapiens
agcggatcgttagttgctgccgctgccttcagcaagacgctgctctgaggcggggagggcgccgcgtcctgagcgcgcggtccagcgtcacggcggggcggtggggctcctccttggacccccggagctccccgcgccgggagcactggcccaggcccctagagccccgagagctccgagagctccgactcggcgtcccgcgcgcctccctgccgctcccgcccagggctggcgatgctgcgaccgacccgatcccgccgctggtccccggccgcccggggtgctgctggctcgggctgctgtgcggcggtcgtgggtctgggaccgtgcgatgttaacaaggcatcaagcctcttggggtggagcccacctaccacggcagtaggtcactggagaacgacaacaccgtgctcctcgaccccccagtgatcgcgctggataaaggatgcgcctcgtgcgatttgcagggtgagattcgtggattgaaaattcacgggcagaatgtcccctttgatgcagtggtagtggatagaatcactggtgagggagtcattcgcgtccaaagagaaactggactgtgagctgccgaacagactattcatccacaatccaggcctatgatggtgggaagggacctg

SEQ ID NO: 527501 - DNA, 353 bp, Homo sapiens
cttgcgacgcgcgagagctgtgctgtgccgcgcagttaggccagcagtcagtccgcggagtcagctagcctgccgctggagggcagccatgaagcattaccaggtgcgagattctggacgcacagactagggagaatctgtgttacgtctaggtcgacctaaacgttacacatgggtgttattctataacgcttcctagctgagttatcacaggagaacctgatcacgtgcatcagagagcttggagaaagctagagtgattcagccaggctacggtgttcagtatgattacttacatccccgtcagatcaccccttccttggagactcatttggttcaacgactcttctttg

SEQ ID NO: 527502 - DNA, 803 bp, Homo sapiens
ggagcattttgggaggctgacgtgcatgcggatctcctgatgtcaggagttcaagaccaggctggacaacgatggtgaaaggccatgtgctcttactagaatagatactagaaaattagctagtggatgtggttggtgaggcgcctgtaatctggataatactttgaggaagggtgaggcaggataattgatggaacccgggaggcaggtggtagcaagtgggacgataggagtcaacgcacatgggagctaacatgccatgggtacaatagagatgggagcgatagagctaccagtcttagtagagaaaataaacgaaaaaataacatgaaagtgataaaagctaatgtgctgtaggtattctgactagatgcacctaggtgtgaagataggtttttatagaggaatatattggtatggcgaggtggactgactggaagtcaaattgattggtgaatagatgtacaaggtaaagtgtggttaacagagtatgtggtaataaaatatacatggagaaccagtgggtggtctaagtaaaataagtggagagagagagtacatttggttacgttcaatttatcagtcggaaaagtggcgaagcgttggagagaacactagaacgtatggatgtaatccagggacttgaggtcaataacaatgtggacatcatagcttaagaggggattaaaataaatttggggtgcttatttatataaaggaacagatggttttcagtaacgcgatggggacctaagttgtgattataattcaaaatgatttgccctttggggagttatagagtg

SEQ ID NO: 527503 - DNA, 873 bp, Homo sapiens
  misc_feature (67)..(67): n is a, c, g, or t
  misc_feature (78)..(78): n is a, c, g, or t
  misc_feature (84)..(84): n is a, c, g, or t
  misc_feature (91)..(92): n is a, c, g, or t
  misc_feature (99)..(99): n is a, c, g, or t
  misc_feature (120)..(120): n is a, c, g, or t
  misc_feature (125)..(125): n is a, c, g, or t
  misc_feature (130)..(130): n is a, c, g, or t
  misc_feature (134)..(134): n is a, c, g, or t
  misc_feature (136)..(136): n is a, c, g, or t
  misc_feature (149)..(149): n is a, c, g, or t
  misc_feature (158)..(158): n is a, c, g, or t
  misc_feature (169)..(170): n is a, c, g, or t
  misc_feature (203)..(203): n is a, c, g, or t
  misc_feature (208)..(208): n is a, c, g, or t
  misc_feature (212)..(212): n is a, c, g, or t
  misc_feature (235)..(235): n is a, c, g, or t
  misc_feature (244)..(244): n is a, c, g, or t
  misc_feature (274)..(274): n is a, c, g, or t
  misc_feature (294)..(294): n is a, c, g, or t
  misc_feature (873)..(873): n is a, c, g, or t
atgattcgcaattgaaggtacaggtgaaagtaactgccacggatgttcatctgagtcttttcaaagnaatctgcaccntcatanaaaccannaatgccnctatcctgaggccttgatttngcatntttcnaaancnagggaattagtcnaactgtgcnccatgatgtgnnaatgatactggtttttagcattttataggccancagantctntggtcttaaatttaaaagtgagntgagccttntttaaaaagctcggttttcacaaaaacaangtagaagatattttctcacntcaacgtgatgtccagtgtgctcatcagcacctgtttctccctctaatcatagaggatattcttattatttagaaaggcttcaagggaaacaacttttgacacctaagtcgtgtcctaccttcgcttcagcttcgcatttcccatttctgtgaaattcccaactttagagaagcagatttgccatggccttctgacaaccttgtacatctctcacataaaccgcataggcagggcttaactacaggctggcccgagtctgcactgagtctgaccctgaagttcctttggaacaggagaggccatcttgtgatgggctggaacaaggtaatttctcatccacctccctagtttcagttgagcaatggaacttcccacctgagcccctagggttcagctacaggctataagactgccgtcctgtggtttagtgttggttccttagcagcagagtgatgccacctctgctgcccgtcatctgactcctctggatgggtgttatcctgtggcttaagagctaacaccatgctgatcttgctttgctatatgtgtaactaataaaccccgatgctggcctgaan

SEQ ID NO: 527504 - DNA, 779 bp, Homo sapiens
  misc_feature (779)..(779): n is a, c, g, or t
ccaaacccccgggctttttagatccagttgcgtccccctaataagggctccaagaactctgtgcttccaacctatttattagggcgacccagaactcctggggttcttagaacttatacgagacgacgctatgaccctttcttaaaaagagctcgggtggttcaccaacaaccaatggggacgggctttttctttccctccaccctgaggccccggggggctcatcagcacctgtttctccctctaatcatagaggatattcttattatttagaaaggcttcaagggaaacaacttttgacacctaagtcgtgtcctaccttcgcttcagcttcgcatttcccatttctgtgaaattcccaactttagagaagcagatttgccatggccttctgacaaccttgtacatctctcacataaaccgcataggcagggcttaactacaggctggcccgagtctgcactgagtctgaccctgaagttcctttggaacaggagaggccatcttgtgatgggctggaacaaggtaatttctcatccacctccctagtttcagttgagcaatggaacttcccacctgagcccctagggttcagctacaggctataagactgccgtcctgtggtttagtgttggttccttagcagcagagtgatgccacctctgctgcccgtcatctgactcctctggatgggtgttatcctgtggcttaagagctaacaccatgctgatcttgctttgctatatgtgtaactaataaaccccgatgctggcctgaan

SEQ ID NO: 527505 - DNA, 101 bp, Homo sapiens
ctcttttttcttgttccaatcgaggcaatagtacacgcaagacaactaagttctcaatagcacatataagacattcatcctcccccttctgtcgtcttctc

SEQ ID NO: 527506 - DNA, 147 bp, Homo sapiens
tgttttcacttgggccctgggaatgaactttgtattatttttttaaaaccttcccattacgggtaaaaattattgcaacttaaattttgcctgagcttgatcaaaggtcatttgtgtaaatgagtaattaaaaaatattttaatcca

SEQ ID NO: 527507 - DNA, 283 bp, Homo sapiens
  misc_feature (42)..(42): n is a, c, g, or t
tgtcctggagggagcatgcggtcccggtccctccccatggcntgcatcctttcccacacttttgagagctgcccccccaggagcagctcagatagaatcagctggagaccccagcatccctggccttgccagacaccaagtggcgcagataaactcagagtccgagttttggcccgtcaaaggtgctctcagaatcatcatttgcatttggcgggacctgtcccccctcaaaacccccaggttccttttttttccgtccaccaattaaagatctttgccccta

SEQ ID NO: 527508 - DNA, 538 bp, Homo sapiens
  misc_feature (220)..(220): n is a, c, g, or t
  misc_feature (275)..(277): n is a, c, g, or t
ccttcacgggcacccctccaacacccccgcaagggttttgggggtttttttctagaccaggggtttgacctcattaaaaagttttttcctctcttcccccggaggaggatcaggccttagggcggcccccaacattaggattttcgggaaacccccctcccccttgacccccccttgtttcccccgtgggcccccaaaaaaaaacaacagggttttatanggggccccccccccaggcccccttaaggagggctggggttcaccccccttggggnnncccccttaaggaaaaggggttccccctttcccccccaaaccaagggggcttttccccgggccccgggtttaccccccagtttttaagggcaaagtgggcccccttttggggggaactcacccggggcccccggggggggtttttggggtgggggttggattaaactcggaaccccttgtttttctttgtggccccagttttgtttttggtttttgggttggaaatttgtaaaattaaatccttttccctttttggggggga

SEQ ID NO: 527509 - DNA, 912 bp, Homo sapiens
agcggaggatccttctagctgaacaaagtcagccacataagcagactacaccagccggctacaattggaagtcagagtctcgcaaagacatgttgcttgattagtagtgctgtgcaagcatgtctggtagggtgccaccttagcttccctgttggccacctggattgtgtttactttaggcgtgagcactgtgactcgtgcgctgtggacatgaatccctcactggtacacaaaaagctaattgagaccgtatttactccaataagctaccaagaactaatgaggtaatactcactcaaatgctgaatcagaaagaacttatccagataatgctccagtcgtaatggcaaccgtgaactcattatacgttacattccatattatgagaggccctaccgtgcctggacttgcaggggctactacaaacactcgggcgcagatggatagtccctggaatcactattagggctagaacctacacacaacaactcgtaacaattcttggccaggccgacacgcgtgccatagaataccggcaccaccgtgtaccagcgcaacaggcgcagtgagcccaagacaccagggctcgaatgagggagtcactccgtaagaacgggcccatcagcgaatatcgaaagctgcaattcacattctcgacaacgcagagcgctagtatgttaaactaccgccacacacgacgcgaacataccatacggctcaaaacagcagaccaagatccagcaggaacacaaaaggaaataacgatagagaggacaaagtccaacgacattcaactggacacccaaaagaaagacaagataagaaaaggaaggaagcatcacagttgtaagacgagtatataggaccaatgcataacagatagcaatacgaggacctcatacggattagaga

SEQ ID NO: 527510 - DNA, 125 bp, Homo sapiens
ttgagtatcccgcggttgtgggttgtgtagtgtttgtggacaaggcctgccgtgtgaatctgaggatgagatgcttcacgctcacaactcagcattgagcacgtgagcacctctgtgctgctgga

SEQ ID NO: 527511 - DNA, 123 bp, Homo sapiens
atcataacagagggtaaaagtactttgcagataccaagcaggggctgctacttttgttgttgttgtttgtttgagacagagtcttgctctgtagcccaggcggagtgcagtggcggatctcgg

SEQ ID NO: 527512 - DNA, 201 bp, Homo sapiens
ggcaccagtttatggcaccagaaaaagtgctccccacattcgtcggactatggcctgtgtgtgtggactgagaagccattcaccgtaagggtgcagaaagctcgaccaagccgacattgcaaaacaacgtacgtacaatttttaacatgtacaggttcgatcgtttctatagaaatgggtttatctaaagaaaagtacttg

SEQ ID NO: 527513 - DNA, 742 bp, Homo sapiens
  misc_feature (11)..(11): n is a, c, g, or t
  misc_feature (19)..(20): n is a, c, g, or t
  misc_feature (53)..(53): n is a, c, g, or t
ggtcgatctancaggatcnnggtcgctcggacatgcatagcgcgtccagcgcncggatggctccatttcagccattcagcgctccacggcgttgccagcgcgcgcacggttgggctccagaactggtcatacagccgttcgttgatttccgagacggcgcgcacatgctcgaacagggcacgcgggtatgggaattgaatgtcttcgacgcgacgcggctcaaacgtgaccccgcgttgggagttgttctgtggcggcgcatcggagtgttccgacagcttcatctcgtacaagccgggcggcagcgcctcaatcgcatcgaggctttgcaggatcgcgcgatgctcgtgacgcgccacgcttgcggagacgaaaatgccgaggtgtccgacatgcgggttggtgagatacacgattcgctggccggcggcgaccagagcttccgtactttcgtacacgacgggaatccagccgagcgcctggtgcggtggcgtgatgttgtcgccgtacgaggcaaagatgacgatcggtttgcaaatgcgccgtaagtcgaccgtgcacttaccgtcgacatgcacttcgccggtttccaacttgttgccgacaaaaagatcctggatggttgcgaccagttcttcccggctgagaaagtaaaagcattccaccagcgctcgaattccaaaaccggtcacttcacatccgtcggacgaagacagtgtagagctgtccgagcgataggatc

SEQ ID NO: 527514 - DNA, 355 bp, Homo sapiens
gataaaagaatttgtgattaatatatccaggggctccccaaagaaacatgttttaacccctttaattaggtttttttaactgatagttttccctcctttataatcagtaggagagactgtttagatgttggggcagctttatgatttaagtttggaacatgttataactgaatttaggaccctagttttggtaagctattaggattttttaatagaacttactccccctgcctccccagccttatgttttttttaatgacttttgggtcctgggctccctttgcggtttgaaaaagggtttgcagtcagaactggggtctgatgataaaagcctttgggagcaataaaaagttgt

SEQ ID NO: 527515 - DNA, 2499 bp, Homo sapiens
  misc_feature (392)..(392): n is a, c, g, or t
  misc_feature (409)..(409): n is a, c, g, or t
  misc_feature (827)..(827): n is a, c, g, or t
  misc_feature (835)..(835): n is a, c, g, or t
  misc_feature (987)..(987): n is a, c, g, or t
  misc_feature (989)..(989): n is a, c, g, or t
  misc_feature (996)..(996): n is a, c, g, or t
  misc_feature (1004)..(1004): n is a, c, g, or t
  misc_feature (1085)..(1086): n is a, c, g, or t
  misc_feature (2469)..(2469): n is a, c, g, or t
  misc_feature (2472)..(2472): n is a, c, g, or t
  misc_feature (2476)..(2476): n is a, c, g, or t
  misc_feature (2479)..(2479): n is a, c, g, or t
  misc_feature (2483)..(2483): n is a, c, g, or t
  misc_feature (2485)..(2485): n is a, c, g, or t
  misc_feature (2488)..(2488): n is a, c, g, or t
agacagcggacccgtttgcacacagtcatgtgggacacgcaggccattgctgcacgtgcggaaagtcttcttgcagcgggggagttgcagtaggatggcttctcatcggacttgtccttgcagtgggggacgccgtcgcaggtcaagctgaagttgatgcactcgccattggcacactcaaactcatcttgtgctcggcaagaggaattcaccgctcggcaggtgaggtcatcctggaggattcggccccctcggcatgagcagttgacatggccctggtgagtgagcagacacaggtcctggcagccaccgttgttgattcggcatggagagagttcacagctgttggtgtcgttggccacggcgatgatgcccatgggctgctgggggangtccacgcgcagcagcntcatgttgctgcccacgtgcttgttggcccgctgcactgcccgccgcacccagtcagtccagaaaatgtgctccccatacacagccagcccgaaggggtggacaggctctgactttaggatcacatagcggtgggagccgtcatactcgcaccgctcgatcttgtccagggtggcgtcagagaagtagagcttctcggcacggtggtcgatggccaggccattgggggtacggatgtccttctcgataagggtcaggacattggctcccgagagcgccgcccgcatgatgctgggatgctgctcattccagttggtccagaacatgaggttctggcactcgtccaaaacgaaggcccgtgggtggtcatctccagacatagtgatgacggtctcacgctcgaaggcccctgggcgggnctggtccnctgtgtggcgcgtgatggtggatgtcgtgtagcttgtccaatagagagtgtcccagccacggtgataggccaggccttccacggagcccacgttttccacaatggtgatcctcctggagccatcgtcgtgatctgttggatgttcccaaagngnatgtcgntgaagaanatgcgattgggggtgcccggagaggtgcctgcccggtagtcaaaggccagggcgatgacgttcttcatgtgctcagggtcnncgaagggctgcacgggcgcattgaggttgcgctcatccgacaggtggatactcttgagaatggtgcgctctgagtagagcaggtagccggcatactcgcggcacgatgctccgtcttcagccagcatcccgtgggcacaggcgcaggcccgctgcccacggccccggtacaggcacagctgctggcacccgccattggccaccgcgcacacgttggtgcctttctgccggtcccggttgaagactttgatgtctttaagctggacgccgatgccggttcgcaggggcacggagtctgtggcattgtctttgctcccgcgcttgatagagccgttggcatgagtcctgtcactccagtagatgaaatcctcaaacacagacactgaaaacatgtccatgttgttgctggacagaaccacctcgcggttctcacctgtctccaggtcgatccgttcaatcttgtctgtccgtgcatcgcaccagtacagcttcccatcctggtagtccactgagatgccgttgggccagctgatgctgacgttgaccagcaccacacgctccgtgccatctagccgagaccgctcaatacgcggatactgaccccactcagtccagaacaagtaccctttctccgggtggacggtgatggcccggggcttgtctagaccctgggagatcaccacgtagcggaaggagccattgagccgggcgacctcgatgacatcaaagccctggtctgtccagtagatgttgcctgcgatccagtccactgcaatgccctccacacggccaatgccattggtcaccacgtcttcacgccacgtctggtcccgcttggcccggctgatcgtgctcaggcccatgtccacccagtagatggtgtcattttcagcgtggaagtcgatgccgacagccagcgaggtcccggacactgggaccagggcatctgacttgtcattgggatccaggggaattcccctgattccctcatgcacagagtacaggagaaaggaacctacgccctcgcaggcctgctggccactccggaggctatagccggctgtgcacatgcaggagcgggtcgtctctgacgtgggcaggcagagctgggagcagtcaccgttgttgacactgcaggggttggtgcccttatggtccagctggatgctctcgtcatagaccttcatgtgcatcaccagggtggtgctgttccgaaggaccacggagcccgagccgtcagccttgctgcatgtgcccatcttttccgacacctgatcagcccaccacagcttgtcccccatgatggccagggcggtggccttgcccagctggctccgcatggcatcgatgacctccagcccactccatccaggttgcagcggtngangganggntccngnagnatcacttaagc

SEQ ID NO: 527516 - DNA, 2306 bp, Homo sapiens
  misc_feature (634)..(634): n is a, c, g, or t
  misc_feature (642)..(642): n is a, c, g, or t
  misc_feature (794)..(794): n is a, c, g, or t
  misc_feature (796)..(796): n is a, c, g, or t
  misc_feature (803)..(803): n is a, c, g, or t
  misc_feature (811)..(811): n is a, c, g, or t
  misc_feature (892)..(893): n is a, c, g, or t
  misc_feature (2276)..(2276): n is a, c, g, or t
  misc_feature (2279)..(2279): n is a, c, g, or t
  misc_feature (2283)..(2283): n is a, c, g, or t
  misc_feature (2286)..(2286): n is a, c, g, or t
  misc_feature (2290)..(2290): n is a, c, g, or t
  misc_feature (2292)..(2292): n is a, c, g, or t
  misc_feature (2295)..(2295): n is a, c, g, or t
agacagcggacccgtttgcacacagtcatgtgggacacgcaggccattgctgcacgtgcggaaagtcttcttgcagcgggggagttgcagtaggatggcttctcatcggacttgtccttgcagtgggggacgccgtcgcaggtcaagctgaagttgatgcactcgccattggcacactcaaactcatcttgtgctcggcaagaggaattcaccgctcggcaggtgaggtcatcctggaggattcggccccctcggcatgagcagttgacatggccctggtgagtgagcagacacaggtcctggcagccaccgttgttgattcggcatggagagagttcacatagcggtgggagccgtcatactcgcaccgctcgatcttgtccagggtggcgtcagagaagtagagcttctcggcacggtggtcgatggccaggccattgggggtacggatgtccttctcgataagggtcaggacattggctcccgagagcgccgcccgcatgatgctgggatgctgctcattccagttggtccagaacatgaggttctggcactcgtccaaaacgaaggcccgtgggtggtcatctccagacatagtgatgacggtctcacgctcgaaggcccctgggcgggnctggtccnctgtgtggcgcgtgatggtggatgtcgtgtagcttgtccaatagagagtgtcccagccacggtgataggccaggccttccacggagcccacgttttccacaatggtgatcctcctggagccatcgtcgtgatctgttggatgttcccaaagngnatgtcgntgaagaanatgcgattgggggtgcccggagaggtgcctgcccggtagtcaaaggccagggcgatgacgttcttcatgtgctcagggtcnncgaagggctgcacgggcgcattgaggttgcgctcatccgacaggtggatactcttgagaatggtgcgctctgagtagagcaggtagccggcatactcgcggcacgatgctccgtcttcagccagcatcccgtgggcacaggcgcaggcccgctgcccacggccccggtacaggcacagctgctggcacccgccattggccaccgcgcacacgttggtgcctttctgccggtcccggttgaagactttgatgtctttaagctggacgccgatgccggttcgcaggggcacggagtctgtggcattgtctttgctcccgcgcttgatagagccgttggcatgagtcctgtcactccagtagatgaaatcctcaaacacagacactgaaaacatgtccatgttgttgctggacagaaccacctcgcggttctcacctgtctccaggtcgatccgttcaatcttgtctgtccgtgcatcgcaccagtacagcttcccatcctggtagtccactgagatgccgttgggccagctgatgctgacgttgaccagcaccacacgctccgtgccatctagccgagaccgctcaatacgcggatactgaccccactcagtccagaacaagtaccctttctccgggtggacggtgatggcccggggcttgtctagaccctgggagatcaccacgtagcggaaggagccattgagccgggcgacctcgatgacatcaaagccctggtctgtccagtagatgttgcctgcgatccagtccactgcaatgccctccacacggccaatgccattggtcaccacgtcttcacgccacgtctggtcccgcttggcccggctgatcgtgctcaggcccatgtccacccagtagatggtgtcattttcagcgtggaagtcgatgccgacagccagcgaggtcccggacactgggaccagggcatctgacttgtcattgggatccaggggaattcccctgattccctcatgcacagagtacaggagaaaggaacctacgccctcgcaggcctgctggccactccggaggctatagccggctgtgcacatgcaggagcgggtcgtctctgacgtgggcaggcagagctgggagcagtcaccgttgttgacactgcaggggttggtgcccttatggtccagctggatgctctcgtcatagaccttcatgtgcatcaccagggtggtgctgttccgaaggaccacggagcccgagccgtcagccttgctgcatgtgcccatcttttccgacacctgatcagcccaccacagcttgtcccccatgatggccagggcggtggccttgcccagctggctccgcatggcatcgatgacctccagcccactccatccaggttgcagcggtngangganggntccngnagnatcacttaagc

SEQ ID NO: 527517 - DNA, 874 bp, Homo sapiens
  misc_feature (104)..(104): n is a, c, g, or t
  misc_feature (131)..(131): n is a, c, g, or t
  misc_feature (138)..(138): n is a, c, g, or t
  misc_feature (144)..(144): n is a, c, g, or t
  misc_feature (158)..(158): n is a, c, g, or t
  misc_feature (160)..(160): n is a, c, g, or t
  misc_feature (179)..(179): n is a, c, g, or t
  misc_feature (204)..(204): n is a, c, g, or t
  misc_feature (243)..(243): n is a, c, g, or t
  misc_feature (368)..(368): n is a, c, g, or t
  misc_feature (380)..(382): n is a, c, g, or t
  misc_feature (402)..(402): n is a, c, g, or t
  misc_feature (436)..(436): n is a, c, g, or t
  misc_feature (458)..(458): n is a, c, g, or t
  misc_feature (485)..(485): n is a, c, g, or t
  misc_feature (495)..(495): n is a, c, g, or t
  misc_feature (497)..(497): n is a, c, g, or t
  misc_feature (504)..(504): n is a, c, g, or t
  misc_feature (516)..(516): n is a, c, g, or t
  misc_feature (524)..(524): n is a, c, g, or t
  misc_feature (533)..(533): n is a, c, g, or t
  misc_feature (541)..(541): n is a, c, g, or t
  misc_feature (564)..(564): n is a, c, g, or t
  misc_feature (580)..(580): n is a, c, g, or t
  misc_feature (606)..(606): n is a, c, g, or t
  misc_feature (612)..(612): n is a, c, g, or t
  misc_feature (616)..(616): n is a, c, g, or t
  misc_feature (623)..(623): n is a, c, g, or t
  misc_feature (628)..(628): n is a, c, g, or t
  misc_feature (638)..(638): n is a, c, g, or t
  misc_feature (645)..(645): n is a, c, g, or t
  misc_feature (647)..(648): n is a, c, g, or t
  misc_feature (681)..(681): n is a, c, g, or t
  misc_feature (687)..(687): n is a, c, g, or t
  misc_feature (691)..(691): n is a, c, g, or t
  misc_feature (711)..(711): n is a, c, g, or t
  misc_feature (716)..(716): n is a, c, g, or t
  misc_feature (718)..(718): n is a, c, g, or t
  misc_feature (733)..(733): n is a, c, g, or t
  misc_feature (787)..(787): n is a, c, g, or t
  misc_feature (800)..(800): n is a, c, g, or t
  misc_feature (802)..(802): n is a, c, g, or t
  misc_feature (806)..(806): n is a, c, g, or t
  misc_feature (872)..(872): n is a, c, g, or t
tggggtctcacctgttgcgtgactcccccacagtccggccgcgggagtccgaccctgaatgcccagggagtgttgagagaaatctggacgagtttcgggtcccnctcccttgggagcacgtggcctaccancctctcnattgcngggttgggtggtcncnacaccggggtcgccttgangccagtccggctgccgaggtctgcnggagtccacctccggccacctggcaattttgaaagactnccttactttccccatctcagtcccagggcaggggcccttggagtgacttggctggggtctgtggcccgatccccctcccgtccctcaggacccgggctttctactgtacaaacttctcgtgggcngcctcccctcgnnnctcgggcatcatggcctcanaggctcggggtggtctgggggcccctccgctccncgtctcccccctccctaccggnccccgccccctgcctcacacacacctncccgctcgancngcgcccntctatggactgncaaatagnaagacgatngccgaggngctgttcacccgctcactggctnagagcgagctccgtantgccccgtatgagtaccccgaggcgngccccnttgnccagctngaagngcggcggcanagctagngnnggcgctccacccagctgtcccgctggcgcacgncctccngctncgggccccgcccactttccngacgncngaccgtgcctcgganctcccgctctccccggccccgggtgcggggccaggtgaccgacgcctgcgggcncgtgctgatgctnancggnagtttccgcgagtcccctctctggggcggcaccgtatggggtgcgattcccacactgctggcagcnca

SEQ ID NO: 527518 - DNA, 223 bp, Homo sapiens
catgtctagaactattgtctagtcctaggtcctaattctcctctgttttcttctaaatgtgttattatagacatgttacgtttagagttatgatctattgaaagaaagggtagtagaaagaaggtctatggttattaacttgagattagggcatatgtatggagtcaactgtttcctagcatttatggaagaccatacttatccgcgaatgacctatattcag

SEQ ID NO: 527519 - DNA, 337 bp, Homo sapiens
cattcggggcataggagctagactcatgtcatagaaaagaaagaaagaaagaaatcctgaaaggaaacacagtgaaaagtgtccccttaccactcaccaggcacgcgtagcgcctacaggaaaccagtatctatttgcctggacatggtttatgcaaaatgtctgcaggatctgagtgatgttctgagggctcatgttggcgtatttatacctgctctcttctgtgcctgcttgaatgggagtcaccagagatcgtcttgtcagagctgccagctttgattgcgttgaccctatctcgtggattatgctagtgttagctcttatggcccgctggagt

SEQ ID NO: 527520 - DNA, 406 bp, Homo sapiens
  misc_feature (1)..(1): n is a, c, g, or t
  misc_feature (18)..(18): n is a, c, g, or t
  misc_feature (143)..(144): n is a, c, g, or t
ntcaaaaaaaaaaaaacncacaaccctgtcctgctcagcctggttgacgagtgagatcctgtctcaaagaaatatataaaattaaacttggttatagggcccgggtgcattggctcacacttaaatccccgcagggaggccanntggatggatcacgtgaggtcaggagttcgagaccgcccgaccaactggtgaaaccttgtctctactaaaaacacaaaattagccgggtgtgatggcacgtgcctgtaatcccagctacttgggaggctgaggcaggagaatcgcgtgaatccgggaggcggaggttgcagtgagccgagattgcgccattgcactccagcctggacaatgagagtgaaactccatctcaaaaacaaaaacctgggtatgtatctagaagtgg

SEQ ID NO: 527521 - DNA, 3924 bp, Homo sapiens
gaaccggtagtccgcggtggcgcggtccgcccctcacctggccagcggcgggcgctgaggggcccaatgggagccgcggcctggccgccccgccccgcgcctccggacgtctgtgccgggacaaggccgccgctggtgccgggtccttgaggagagcgcctcccgtccgaggccagccgcctctgtcagccgtccgcgcgggccgggtctgaagcgccgccgggacggcgaagagccgcggccgccgcggagaaggaggcagcgcaggaggccggagcggccgccgcgcccgagcacatggcgtccatcttactgaggagctgccgcggccgggcgcccgcccgcctcccgccgccgcctcggtacaccgtcccgcggggtagtccaggggatcctgctcatctcagctgtgccagcaccctggggttgaggaactgcctgaatgttccatttggctgctgcactcccatccaccctgtgtacacatcctccagaggcgatcacctcggctgttgggctctgaggcccgagtgccttcgcatagtgtcgagagcgccatggacctctacctctgtgggttttgtggctgtgggacctcagtgccttcctgtgcgtggctggcactcttcgcgccctgttcgcgatgactcggtagtagagaagtccctcaagtccttgaaggacaagaacaagaagctggaggaaggcggcccggtgtacagcccccccgcagaggtggtggtgaagaagtccctggggcagcgggtgctggacgagctgaagcactactaccatggcttccgcctgctatggatcgacaccaagatcgcggcacgcatgctctggcgcatcctcaacggccacagcctgacccgccgggagcgcaggcagtttctccggatctgcgctgacctcttccgcctggtgccgttccttgtgttcgtggtggtgccgttcatggagtttctgctgcctgttgctgtgaagctcttccccaacatgttgccatccacatttgagactcagtcactcaaggaggagaggctgaagaaggagcttcgggtcaagctggagctggccaagttcctccaggacaccatcgaggagatggccttgaagaacaaggcagccaagggcagcgccaccaaagacttctctgtgtttttccagaagatccgggaaacaggggagaggcccagcaatgaggaaatcatgcgtttttccaaattatttgaggatgagctgaccctggacaacctgacacggccgcagctggtggccctgtgcaagctgctggagctacagtccatcggcaccaacaacttcctgcgcttccagcttaccatgcggctgcgctccataaaggcagacgacaagctgattgctgaggaaggggtggacagcctgaatgtcaaggagctgcaggcagcgtgtcgggcacgaggcatgcgggccctgggcgtcacggaagaccgcctgaggggtcagctgaagcagtggctggacctgcacctgcatcaggagatccccacatcgctgctcatcctgtcccgggccatgtacctcccggacaccctctctccagccgaccagctcaagtccacactgcagaccctcccagagattgtggcaaaggaagcacaggtgaaagtggccgaggtggagggcgagcaggtggacaacaaggccaagctggaggccacgctgcaggaggaggcggccatccagcaggagcaccgtgagaaggagctgcagaagcgctcggaggtggcgaaggattttgagcccgaacgtgtggtagctgctccccaaaggccggggaccgagccacagccagaaatgcctgacacagtcctgcagtcagagaccttgaaggacactgccccggtgctggagggcttgaaggaggaagagatcacgaaggaggaaatcgacatcctcagcgatgcctgctctaagctgcaggagcagaagaagtcactcaccaaggagaaggaggagctggagctgctgaaggaggatgtgcaggactacagcgaggacttgcaggagatcaagaaggaactttcaaagactggtgaagaaaaatacgtggaagaatctaaagccagcaagagattgacaaaaagggtgcagcaaatgatcgggcagatcgatggcttgatctcgcagctggagatggaccagcaggctggcaagctggccccggccaacggcatgcccacgggggagaacgtcatcagtgtcgctgagctcatcaacgccatgaagcaagtcaagcacattcccgaaagcaagctcaccagcctggccgcagcactggatgaaaacaaggatggcaaggtcaacatcgacgacctcgtcaaggtgattgagctggtggacaaagaagatgttcacatctccaccagccaggtggctgagattgtagcaacactggaaaaagaggagaaggtggaggagaaggagaaggccaaagagaaggcagagaaggaggtcgcagaggtgaagagctagaaccactggcctgggcacctgtcctcctgctgtgccgtcaccctggcaagggccgtgagggcgattgctttgtggtgattctcagtggctcatctaatattttggctggaataaatcagagacttccataatcaagtaaattttaattttcatcattccatggagattcagtctgtctggaatcccggaacccctccacagaatcgtgtctggatccacactgtggtgtggctgccacggcctcctggctccagaggcagctgggccgggccaaggcaggaaggcgcccccatgtgtgtggcctcagtctcagcatctgactgtgctgccctgtccccagggaagagaatgaggaccacgtggactccgcccacacagagctggctgctgtgcccaccctcaggggcgtcaggagacacagcctggcctcctcagggctgaagatgcctccattcgcctgtggaccttgatttctagatttcagtgtcaatagacctgtcttcctgcacactttcagttggatgtgggtcattgtggagacagaggtgtctgccatctctgtggcctctggagagtgacgtctccctgctgggagtgctggttctcacgtgcggtttcccttgtgtatcggagctctttctcggctttctatttcccccagttctttaagcagtcaattggcacagagtttcccacgggggctgcagtggattcactgtgtcagggatgagcctggcttgggggttggtggggctctgaagcgcatttggggttctttgtagcttctaatgtgaggtttgagtccagtgcgcccacagcagcatgcccttctcaccccttgcagtgttgcaggctcaggcccctgggctccttcagcaagcaggctagtcaatgaggcatgaggatccggcacagggcatcccctggggcttcaagggcaatacccccgtgcttagggtttgccctgtgccctctgggtggggtggcctccccgcactcggcagcatggccaggctggccagggcgtgggcaggtggtgtcctgtggcacctccatcctcctgcccagccggctgtgtcacactcatctttttaaggtcaggttggttcctggcaaaaatgtacctccaggggcctccaagcataggatttggaagacaggaacggcacaggcgtccaggaaagcagctgcactcagacaatgccttctccattacttgaagcttctttctgttcagccattaaagaaacttgacaaaataggaacaggagatatttctcaattgtaaacctttgtgcagggacagttggcttccagaggctttcagctttcagttatttgagaagtttgttttagatccttaactaatatttatgaattctctcaccctagaagtgcgcctgggtg

SEQ ID NO: 527522 - DNA, 2698 bp, Homo sapiens
caaattcacgaggaatgctcccaaagcacagagaggttaaattactcagtctaaggtcacgcagcagtaagtaatggagctggaatttgagctctaacagtctgctccggagctcgggccttgctgctggcgtcaggccatgcacagagagctgatggaagcaggaggagctgatgtgaagttatgcgacacacatggccttttaggaatgttccatttggctgctgcactcccatccaccctgtgtacacatcctccagaggcgatcacctcggctgttgggctctgaggcccgagtgccttcgcatagtgtcgagagcgccatggacctctacctctgtgggttttgtggctgtgggacctcagtgccttcctgtgcgtggctggcactcttcgcgccctgttcgcgatgactcggtagtagagaagtccctcaagtccttgaaggacaagaacaagaagctggaggaaggcggcccggtgtacagcccccccgcagaggtggtggtgaagaagtccctggggcagcgggtgctggacgagctgaagcactactaccatggcttccgcctgctatggatcgacaccaagatcgcggcacgcatgctctggcgcatcctcaacggccacagcctgacccgccgggagcgcaggcagtttctccggatctgcgctgacctcttccgcctggtgccgttccttgtgttcgtggtggtgccgttcatggagtttctgctgcctgttgctgtgaagctcttccccaacatgttgccatccacatttgagactcagtcactcaaggaggagaggctgaagaaggagcttcgggtcaagctggagctggccaagttcctccaggacaccatcgaggagatggccttgaagaacaaggcagccaagggcagcgccaccaaagacttctctgtgtttttccagaaggtgctgtgatacgtctgagtccctgtgacctcaccagggagccttccctgattttctgtttccctttcgctgtgctcagcagagtggagctcccccaggtgctggctggcgcttgaaagtttacccaggaggctcagtcgggggccagtggagtgtcaggagtctgcccccacgagctcccagtgagttaagctgtggtggctgcgcctcgtcagccttcagaattatgggcgtctgtgtctcatcaccctgcagctgtccaggagcagtagaatctgacccatgaggagcctgagaccctgatggtgtgaggtgtgggtggcttggccgggctcctctgctgggcattgccctctggctggagtcagtcaagaagatcccaggtcccaggggctggtcagaggcctggactgtgggagcagtgggggctggagaggaggagcggcccttgaggtttcctgcggtcatgtggtgagtgaggtgaggatggggagacggcagctgccacggaccgagatccctgaggactagatggggttcacgaggccggtgttgttggcttgagggacttgtgccactttggagtgagaaggatgtgtctgaagtgcaggaagagcttaaaccagggcctagaaactccagccatgcgtgtgcgttgtctgtggggttttcccgctgcagcacagaggcgagtggtttccatggctgcaaagccagaaatacttgctgtctggcccttgacagaaaagactgccaggctgaggcctaaccacggagaagcctctcgggaggaggcgacacagccatggggctgctgagccccccagggagtgggtggtggttccagcaagatgttttagggggagccatgctttgggagcctcacccaggacatcgtgccttgcagagcaggaggggcccgtcccaacctttcctgggccgcccagctgccaagaaggatgtgcttgcagtcacctgcacgggggtgtgctgcatagggccgcccccaggagcacacctgaaattgtgtctcagagctggcatcctgcatgttacgatttgagttgggcaccaagtcagcctcgtcctccctcatctgtcacctctgctaggtaccctcctagcccagctcttggcagagactgagctggtggcttgtccctcaggtggtaggaactgcagaggatcacccaaagggccctgagtgatccacgctaagggactctagctctccctaaagagctagatggccacccctcccccaaggctcaggcagtcatccgtgggagatgtaggtgcacacaggtgcacctcttcctgccccagagcagcagggtcccggccacttctgtggcagagagaggatcacaggacctgcatgcagcagcctgtgggcccgggcgtctcccccagcagacagcagcctcagctttgctggttcaggcaggagaggtccacaggccagacgccacctttccccaggctagcccagcaccggagtcagaagtcagtggtttgaggccaagctgggcaggtgacttgaggtcgggtatttgagaccagcctggccaacatagtgaaatcccatctctactaaaatacaaaaattagctgggtgtggtggcgcagcctgtaatcccagctactcgggaggctaaggcaggagaatcccttgaacccaggaggtggaggttgcagtgaaccgagattacaccactgcattccagcctgggtaacagagcgagaccctgtctcaaac

SEQ ID NO: 527523 - DNA, 490 bp, Homo sapiens
gaaccggtagtccgcggtggcgcggtccgcccctcacctggccagcggcgggcgctgaggggcccaatgggagccgcggcctggccgccccgccccgcgcctccggacgtctgtgccgggacaaggccgccgctggtgccgggtccttgaggagagcgcctcccgtccgaggccagccgcctctgtcagccgtccgcgcgggccgggtctgaagcgccgccgggacggcgaagagccgcggccgccgcggagaaggaggcagcgcaggaggccggagcggccgccgcgcccgagcacatggcgtccatcttactgaggagctgccgcggccgggcgcccgcccgcctcccgccgccgcctcggtacaccgtcccgcggggtaagcggcgggcaccccagggcggggccggctcccggctggtgggtcgggagcgcggacgacccgcgggttcgggctgggtgtcacggcgatgcggggagcccggtggtc

SEQ ID NO: 527524 - DNA, 3025 bp, Homo sapiens
gaaccggtagtccgcggtggcgcggtccgcccctcacctggccagcggcgggcgctgaggggcccaatgggagccgcggcctggccgccccgccccgcgcctccggacgtctgtgccgggacaaggccgccgctggtgccgggtccttgaggagagcgcctcccgtccgaggccagccgcctctgtcagccgtccgcgcgggccgggtctgaagcgccgccgggacggcgaagagccgcggccgccgcggagaaggaggcagcgcaggaggccggagcggccgccgcgcccgagcacatggcgtccatcttactgaggagctgccgcggccgggcgcccgcccgcctcccgccgccgcctcggtacaccgtcccgcggggtagtccaggggatcctgctcatctcagctgtgccagcaccctggggttgaggaactgcctgaatgttccatttggctgctgcactcccatccaccctgtgtacacatcctccagaggcgatcacctcggctgttgggctctgaggcccgagtgccttcgcatagtgtcgagagcgccatggacctctacctctgtgggttttgtggctgtgggacctcagtgccttcctgtgcgtggctggcactcttcgcgccctgttcgcgatgactcggtagtagagaagtccctcaagtccttgaaggacaagaacaagaagctggaggaaggcggcccggtgtacagcccccccgcagaggtggtggtgaagaagtccctggggcagcgggtgctggacgagctgaagcactactaccatggcttccgcctgctatggatcgacaccaagatcgcggcacgcatgctctggcgcatcctcaacggccacagcctgacccgccgggagcgcaggcagtttctccggatctgcgctgacctcttccgcctggtgccgttccttgtgttcgtggtggtgccgttcatggagtttctgctgcctgttgctgtgaagctcttccccaacatgttgccatccacatttgagactcagtcactcaaggaggagaggctgaagaaggagcttcgggtcaagctggagctggccaagttcctccaggacaccatcgaggagatggccttgaagaacaaggcagccaagggcagcgccaccaaagacttctctgtgtttttccagaagatccgggaaacaggggagaggcccagcaatgaggaaatcatgcgtttttccaaattatttgaggatgagctgaccctggacaacctgacacggccgcagctggtggccctgtgcaagctgctggagctacagtccatcggcaccaacaacttcctgcgcttccagcttaccatgcggctgcgctccataaaggcagacgacaagctgattgctgaggaaggggtggacagcctgaatgtcaaggagctgcaggcagcgtgtcgggcacgaggcatgcgggccctgggcgtcacggaagaccgcctgaggggtcagctgaagcagtggctggacctgcacctgcatcaggagatccccacatcgctgctcatcctgtcccgggccatgtacctcccggacaccctctctccagccgaccagctcaagtccacactgcagaccctcccagagattgtggcaaaggaagcacaggtgaaagtggccgaggtggagggcgagcaggtggacaacaaggccaagctggaggccacgctgcaggaggaggcggccatccagcaggagcaccgtgagaaggagctgcagaagcgctcggaggtggcgaaggattttgagcccgaacgtgtggtagctgctccccaaaggccggggaccgagccacagccagaaatgcctgacacagtcctgcagtcagagaccttgaaggacactgccccggtgctggagggcttgaaggaggaagagatcacgaaggaggaaatcgacatcctcagcgatgcctgctctaagctgcaggagcagaagaagtcactcaccaaggagaaggaggagctggagctgctgaaggaggatgtgcaggactacagcgaggacttgcaggagatcaagaaggaactttcaaagactggtgaagaaaaatacgtggaagaatctaaagccagcaagagattgacaaaaagggtgcagcaaatgatcgggcagatcgatggcttgatctcgcagctggagatggaccagcaggctggcaagctggccccggccaacggcatgcccacgggggagaacgtcatcagtgtcgctgagctcatcaacgccatgaagcaagtcaagcacattcccgaaagcaagctcaccagcctggccgcagcactggatgaaaacaaggatggcaaggtcaacatcgacgacctcgtcaaggtgattgagctggtggacaaagaagatgttcacatctccaccagccaggtggctgagattgtagcaacactggaaaaagaggagaaggtggaggagaaggagaaggccaaagagaaggcagagaaggaggtcgcagaggtgaagagctagaaccactggcctgggcacctgtcctcctgctgtgccgtcaccctggcaagggccgtgagggcgattgctttgtggtgattctcagtggctcatctaatattttggctggaataaatcagagacttccataatcaagtaaattttaattttcatcattccatggagattcagtctgtctggaatcccggaacccctccacagaatcgtgtctggatccacactgtggtgtggctgccacggcctcctggctccagaggcagctgggccgggccaaggcaggaaggcgcccccatgtgtgtggcctcagtctcagcatctgactgtgctgccctgtccccagggaagagaatgaggaccacgtggactccgcccacacagagctggctgctgtgcccaccctcaggggcgtcaggagacacagcctggcctcctcagggctgaagatgcctccattcgcctgtggaccttgatttctagatttcagtgtcaatagacctgtcttcctgca

SEQ ID NO: 527525 - DNA, 2302 bp, Homo sapiens
ggacgcgtgggtcgacccacgtcgtgcgtcgtacccgacgcggtgcggacccaggcgtcctggacccacgctgtcggccacgctgcaggaggaggcggccatccagcaggagcaccgtgagaaggagctgcagaagcgctcggaggtggcgaaggattttgagcccgaacgtgtggtagctgctccccaaaggccggggaccgagccacagccagaaatgcctgacacagtcctgcagtcagagaccttgaaggacactgccccggtgctggagggcttgaaggaggaagagatcacgaaggaggaaatcgacatcctcagcgatgcctgctctaagctgcaggagcagaagaagtcactcaccaaggagaaggaggagctggagctgctgaaggaggatgtgcaggactacagcgaggacttgcaggagatcaagaaggaactttcaaagactggtgaagaaaaatacgtggaagaatctaaagccagcaagagattgacaaaaagggtgcagcaaatgatcgggcagatcgatggcttgatctcgcagctggagatggaccagcaggctggcaagctggccccggccaacggcatgcccacgggggagaacgtcatcagtgtcgctgagctcatcaacgccatgaagcaagtcaagcacattcccgaaagcaagctcaccagcctggccgcagcactggatgaaaacaaggatggcaaggtcaacatcgacgacctcgtcaaggtgattgagctggtggacaaagaagatgttcacatctccaccagccaggtggctgagattgtagcaacactggaaaaagaggagaaggtggaggagaaggagaaggccaaagagaaggcagagaaggaggtcgcagaggtgaagagctagaaccactggcctgggcacctgtcctcctgctgtgccgtcaccctggcaagggccgtgagggcgattgctttgtggtgattctcagtggctcatctaatattttggctggaataaatcagagacttccataatcaagtaaattttaattttcatcattccatggagattcagtctgtctggaatcccggaacccctccacagaatcgtgtctggatccacactgtggtgtggctgccacggcctcctggctccagaggcagctgggccgggccaaggcaggaaggcgcccccatgtgtgtggcctcagtctcagcatctgactgtgctgccctgtccccagggaagagaatgaggaccacgtggactccgcccacacagagctggctgctgtgcccaccctcaggggcgtcaggagacacagcctggcctcctcagggctgaagatgcctccattcgcctgtggaccttgatttctagatttcagtgtcaatagacctgtcttcctgcacactttcagttggatgtgggtcattgtggagacagaggtgtctgccatctctgtggcctctggagagtgacgtctccctgctgggagtgctggttctcacgtgcggtttcccttgtgtatcggagctctttctcggctttctatttcccccagttctttaagcagtcaattggcacagagtttcccacgggggctgcagtggattcactgtgtcagggatgagcctggcttgggggttggtggggctctgaagcgcatttggggttctttgtagcttctaatgtgaggtttgagtccagtgcgcccacagcagcatgcccttctcaccccttgcagtgttgcaggctcaggcccctgggctccttcagcaagcaggctagtcaatgaggcatgaggatccggcacagggcatcccctggggcttcaagggcaatacccccgtgcttagggtttgccctgtgccctctgggtggggtggcctccccgcactcggcagcatggccaggctggccagggcgtgggcaggtggtgtcctgtggcacctccatcctcctgcccagccggctgtgtcacactcatctttttaaggtcaggttggttcctggcaaaaatgtacctccaggggcctccaagcataggatttggaagacaggaacggcacaggcgtccaggaaagcagctgcactcagacaatgccttctccattacttgaagcttctttctgttcagccattaaagaaacttgacaaaataggaacaggagatatttctcaattgtaaacctttgtgcagggacagttggcttccagaggctttcagctttcagttatttgagaagtttgttttagatccttaactaatatttatgaattctctcaccctagaagtgcgcctgggtg

SEQ ID NO: 527526 - DNA, 102 bp, Homo sapiens
gctaggtatcctatagggggggcttgtatgattatgggcgtgattagtagtagttagaggtgaacatagtagtagggtatatattgtaattgaaatgctcgg

SEQ ID NO: 527527 - DNA, 841 bp, Homo sapiens
  misc_feature (373)..(373): n is a, c, g, or t
  misc_feature (549)..(549): n is a, c, g, or t
gtgtggtatctcagattgggctatgccatcagtaataaaagtaaacatgaggactgtctatcgataagaagtagagtcttccataggcagtgcctttgacttaggaaagtccttcatcgaacttggtgtagtcgaggttcgatccatttttggcataatatcacggagtcgtgactccacttggcttaataattcaaaacgggaggtattgtagtaacatattgtggcaagaaaggaggctctggaaaagttggactttgaaagtggtgtcgtgagttcggtatgcaaacggagattttatatactttggagaaaagcaccctttccaggaagttggtggtagataacatatacaggttggtccattggggtnttcttggggttttggaaggttacaacttacaatggtaaccttgggttttggcggtacacggtggaattagcggggaactggtaacaatttggctttgggggtaaatttaacctttaaagagcgattgtgaaaaagaagccccccaatataaagggcgtttgaggaacacacagagncgtccccaagagtttttctgggtgggggacacctaacattgtcggtttgtgggttgtggcccctaaaaaagggaataaatccgtgtgaaaggaaaaagggttttgggttttcccaaagggtaacatacgggtaagttgaactagcccagtttataaacctaaggctaaaaaggttacatttccgagagagcagagtctaattgggaccttttaaagagtttggggggcccgttgcgcacaagcgaattttctccctatattttggggggagagttggggtcgtttcacatac

SEQ ID NO: 527528 - DNA, 918 bp, Homo sapiens
gtgccgcttaggtctgggaggagtcgcgattgggcgagttgatcatgggtctgtcatagtgggctggtgcttgccggatcattggtgtggacgatcaatatgggattaagttttgcaagtggacaaagtagatttggtagcacgattgtaaatgtgtttaacctcgtcaggatattagtataatcccattccagggagagtgctcattgaggatgacgctggatgggaggagtggaactattgctttgaatgtattggtgatgtgaaggtcatgagagcaggatcttggagtgcatgtcacaatgggtgtgtggcgttctgacagtcaagtggttggaggtatgtgtttcaggtgagggaaaatggcctgtcgttcagtgtccagatggttgacgggtcgcacactggtgatggcacggtcttgtggagggatggtagcagtgtaagaaagtgtcccagaggtggtgtctgaaactatgtgtgcaacatatgatgaaagttgtgggaatttgtgtagctcacgatctgtgtttgggatggatattgatatatgtgtttgaattgatggattctggaaagagcattcgaactgtgtaagggatcaaatccataggaagaggaatagttgttcattcctgtcgcgatgtgatagtgtagcatgtttacgggctggagaatgcgactgcgatcgtataggctcgtagaggtcacagtactgcagaaattggtgtggggtgtcatacatgatcgttatatacggccggattatgagctgacttggatgatgtccaagtagtatcgattttagggattagaggacgatttattgggggctgttcgaaagggatggcaggtgggaaccatgaggaagggccggggttttactcatatgcagcgccggaaacataaacgaatggg

SEQ ID NO: 527529 - DNA, 102 bp, Homo sapiens
gaggacgccaccgcatctacacgagccaacatgaacgactggaagcatctcatatgagactcaactcctctaatatgacgaaacgacaaactcgcaggtata

SEQ ID NO: 527530 - DNA, 122 bp, Homo sapiens
ctatgagctaagagagttttggacagaatcaatggaactaaaaggcaaaccacagaatgggtgacaatatttgttaaatcgctatactcgagtataggtgattaactatccatggatatgca

SEQ ID NO: 527531 - DNA, 145 bp, Homo sapiens
caccaccttaagtatcaggcggttagaaatttctaaggctggacgaatatatatggtaccccaacgaaaaacccatgggaaaatttttaacccaatgctataatatcgcaaggggctaaccccctatagcctgtctgccgttaaa

SEQ ID NO: 527532 - DNA, 908 bp, Homo sapiens
ctaactcatgcccccatgtctaacaacatggctttctcagcaaaaaaaaaaaaaaaagaaaaaaaaaactgtttggcccggcctgaaagttttgacaacaattcctgagtgggagcgaccggggacccctccgtgtccaacgagacatgcgtggcgcatcaaaggtagtccaacaaagacaaccgcggggcgcagcccatgggagcgccttggcctactcacgccaaaccaacaaacaaacgcacggagacgacacccgggaccgcggtgcaaggcacaaacccagactaagcaatcgaaggacgaccatcacgggactccctcactaagggcgtctcagcagtaaaaccgagtgaataagaccaccgcccactcggggagtccacaggaggttacccaagggaaccgccttctgacatccggccctagattaccttctcacatgaacaaaaactagcccccatactcaatcatatacctaaatcctctccctcactaaaacgtcagccattctcctcactctctcaatcttatccatcatagcaggcagttgaaggaggctttaaaccaaacacccagcatacgcaaaaatcttagaaatacacctccaatacgcacataggatggaatatacgcagtctacacgaacaacctacatcaccatactatattaaatatgaatatgatcaaaaatactagcgaattcctactaatcaaattaaatccaaaacaaagaccatatatacatcgactgaacagatacatggaaacacctatacataccctcgtaccaagagatgccccaacgactgcacaggcatttaaaataaaacagccttaacacacaatagacaacctactatatacacctatacacaaaaccttaaaaacaacaaaccacactgcca

SEQ ID NO: 527533 - DNA, 423 bp, Homo sapiens
caaaatgatctttgggaaaataatgcccgccggtgctactggtaaaatggccaggaccttttcatatgtgttggccttcaccacgatggtgaacggtggatcacagggcgttgtctgctctgggcactatcacttcctctaaggggtctcattcgttgtaagaagagtcagggcagtccttgggcagaggctcactggctttgtcgtcagctgcacagtagtcccgcaagaaagccgtagctgtctggctgctctggaaagttcgctgctaccatcctgtcaaggttcgtacaaaccaagatccgatgtagtgcaccgcctcggcgccgcggctttcgccgcgcagacaccgcatccacagcatcgtactggcccgactggtacacgcgcgaaatgttcctggcctctggaccgcgtcggtcc

SEQ ID NO: 527534 - DNA, 584 bp, Homo sapiens
tccaaaatggtaagcagagttcaggagatagctgggctctgagagaagtctaaggggcaacgaaaagcctaaaagagcctccggggatccatccgtcatcccaaagagccttgtgaactgcgatttagaatcaggtgtgccatcttgagaaaccatcccacattccaaacaaaattagtttaatgttcccacataaaaaggtcccgagccaggtggaggatcattatatgagcatacaccatggaactaaaaaggtttgcatgccgctggaaagaattcatggggaaatttattacagatccatttcttatgtaagttgtgtcctcctgtgatgagctcagtggaaggagcaaggccaagaaaggttatttgggccaaatatcattatcgtttcccctttgagaaataagatattcttcatctagatattcttctagtcccaggaagaggaaggagggcaggaaaaaaaaaccctcaaactttctacaaggacagttctttgcctttaggaaaagtctatctatttctcaattcttcctgcaaactgggcaaactgaagaacgggggataaaacagaggtgaaa

SEQ ID NO: 527535 - DNA, 493 bp, Homo sapiens
  misc_feature (488)..(488): n is a, c, g, or t
tggagacggtctcatcccaagatatctcatattttatacaaaggtccaaaagccaaaaaaaaaaaatcaaaaattaaaaatccttctgatctcaagcatttaagaaacaggctactcagccggtatggctttcccgggacagaggtgtacagtcatcctccctttctcctggaacatacatctcatatgcacatcatttaacttaatctccaaggggtattaagaaacacagtggaccagggcctcctaaaaactcggggcccagtttctagaaggccacattctccggggatcccttcttgcatctagttatctctttccagtctgcaggggctcctcctccggaggataacgtcctagacttgggatctggcctctctcccttgacctctgaaggttagtgagcgctaggacttagtcctggtctcttcttaatttatattctctcccagggagctggtttatgcctaggcgttatataacaaggntttat

SEQ ID NO: 527536 - DNA, 163 bp, Homo sapiens
actggtgccatcatagctcactgggggctccagctcccgggctcaagagagtcctcccacctcaaacacccacaagcagcgtggtgactacaggatctgtgccaccacttacctagctatttttttttttcgtttttttgagcacagagtgtcacatgtcgcc

SEQ ID NO: 527537 - DNA, 265 bp, Homo sapiens
gttggtggcagcagtaccctgtacactgatgtacatcgacttccaagaaaaacagcctgtggatcgtgggtaggagtcccccaggcactcagagaacacttaaagaatcctgaaatagcacagaagatccagaagctgatggatgtgggatcatgattgcaaattcggtgatgacattgtcatccccccttcccttcatgcatcatgttccaggataaggcgcatggatgggatcacatcatgcatcagctgcacctcaaggatc

SEQ ID NO: 527538 - DNA, 869 bp, Homo sapiens
tcctcacccaaggagttctgctgtacaaacaggtgatggagggcctgggtcacctttggaaacagagtgaccagctcattgggagatcatccctgtctccagagtctttacataatccagcaggctgcatgaatgacctgaccccctgattagacttggaggtggacaatagtgacctgcgcagtatggtggactgtggtgccatcttatgcttcatctaggacctgtgcagtccttgggaatcagtagatgctcctgttacaggcgtggtttctggtctagaattgctgtgaggaaaatgaggaatccctccatcctagcacgctgccaggcggtgtgtgttctagaacccttcatgtcagtacaggaatttgctggtacctcctcttcgaccatcagttcagacgtccgatgcacctctgacattatgttatcgcagaagaagtgtccgccaaggtaagtgccaaccaggtactaagtcctctccaggttggtcctgggaggctggccctgttggctccttccccatcttcacagaatacacctctggctcaagtgtttgtccctttggagtctgtttaggcccagcagcctgccgtctctcattgtgtatgaccggactggagttcagaattctgctccacttctcccagacgggagcccctgtggcgcccagaggtacaggtgctgctcttgaccatgatgagcacggtccccagcctgtctgggatatcatgtttcaagtggctgtgccaaaggtcaatgagagtgaagctgacagcgggaatccagctccaagctttcctgcattcagtcctttggatgcctccaagtgtgatatctcagatgcttgctgcttgaacattcca

SEQ ID NO: 527539 - DNA, 365 bp, Homo sapiens
tctgtggctcagcaccgtgtaagtcattacacttttagaggctgaagtaagcatgaaccctgtgagtctcaatatttcgacaccatgcctgggcattggggctaaacactgacactaacatgaattacatatttatcctagtgtgattgcgaacctgtagtcccagctactcaggaggctgaggtaagaggatcccctgagcccaggagacagagactacagtgagcctagattgtgccattgcactccaggctgggtgacagagtgagacctcattcccccccacaaaaaacgattaactttcttataattctgaaataataaaggtaaaaatctaaaatataatctaagtctagcggtgaggg

SEQ ID NO: 527540 - DNA, 289 bp, Homo sapiens
gcccattcccaaacaataagcagcccagttgccaagcccaaatacccagctctcaactggattctcatcttttcctagatcatggcccaggaatgcttcactagtttgttagctttctgatgctttaacagataaatatttttaattctccagtatttctagcctttcttgagggtggatggttggagcaatattttatttgaactgttgagattactattagtagaagcagagcctgaaaaatttttatttttaattttaattcattcatttctaaatttatccaatt

SEQ ID NO: 527541 - DNA, 205 bp, Homo sapiens
tagagatccgcgtggttcttgcagatattggctgctgttctgctaccggcaggctcgttcagctcatgcacgctcttgccgacgtatccttgctgtcagcagtgctccagctcagcctgatggcctggttctgccgctccagctcctcatgtgcctcctgctcctcctccagtgcccgtgtcagtgacagggcccgagcctcacg

SEQ ID NO: 527542 - DNA, 191 bp, Homo sapiens
caggtactggtcctgcaccaacttagcaggcaacagtccctcccctagtggcacagggtaccagtttagtaggcctagtatgatggcgcgatgtaacacgagaaagcacataccaaggaccaccacacatccacctgatccaaaaaggccttcgattactgggataatcctatttcattacgctcagaagt

SEQ ID NO: 527543 - DNA, 159 bp, Homo sapiens
ccaccacacctggctgatttttgtatttttggtagagaccgggttttgccatgttggccaggctggtcttgaactcctgacttcaggtgatccacccacctcagccttccaaagtgcccatatggagatttttaaggtcagaggtataaactgtacata

SEQ ID NO: 527544 - DNA, 268 bp, Homo sapiens
ctggagagcgggaaggagacgctgcagcgcacggacccccgcaagacacatatgacccaccaccccatctacgaccatgaggccactctgagaagcagggccctgagcttctaccctgcggagatcacactgacctggcagcgccacggggaggaccagaccgaggacacggagcttgcgtagaccaggcctgcaggggatggaaccttccagatgtgggcagctgtggtaggaccttctgaagaggcgcagagatgcacctgccatg

SEQ ID NO: 527545 - DNA, 1000 bp, Homo sapiens
gccaagggggagtgggctgctggctgggtgcggccctgtgctgtgggccctgatgactgactgctactgaagagccaacgtgtatgggcatcccgcgtcttcctactagtagcggcgttgttatcgatggcacacgatgcctcgagctgaggtcagcgagcgtgctcgctccactggactcgggagccacatgtgggcacgcgacctccaggtctccagtccgtaaccagtgcatgagagctgctcgcgtgagggacattgcttgtaccactgtcatgagtgagtgtcggggacgcgcgtgcacgcgtggtggacgggtcgagcagagtgcagcggatgccttgggtgggcctggttgtagctcctgtgttgggcctgtgcttggagaacctgtggttcgctccgcgggtggaatgtgtgcagacagcagctacaggagttgggtaggaggtagcaccgagggaagagcaggcgattgccccggatatagagtcggaagaccatggtccctcatgagatccccgggatttgacgaggattgccagagaagggctctgtagtacgtggcttcggggagcaccttaggaatcactcgagtgagcgaaggggttccgtatcagctgacccaacgaaagtggccccggcgaggaagccaagcgcaggtgaccggacggtcggcatggagaaacactacaagctctaaacaaggtgtcctgccttgttagacttagatactattgccatccacccactacccgttaaagtgtgcaaaatagtagcaataactaatataattcttttgagaagtgtagaagaaaaagcacctggtgtgataaacgtggagtggagaggctggaggagaccgagccatagagaatgcttgttggtctgtgaacgtgaaacagagggtggaactacggggtctagatggagacggggaaggtacaggcaaggcgagtaacaggacggcgagaagagaggaaatgcatggataggggaa

SEQ ID NO: 527546 - DNA, 974 bp, Homo sapiens
  misc_feature (2)..(2): n is a, c, g, or t
  misc_feature (272)..(272): n is a, c, g, or t
  misc_feature (359)..(359): n is a, c, g, or t
  misc_feature (396)..(396): n is a, c, g, or t
  misc_feature (400)..(400): n is a, c, g, or t
  misc_feature (468)..(468): n is a, c, g, or t
  misc_feature (669)..(669): n is a, c, g, or t
  misc_feature (685)..(685): n is a, c, g, or t
  misc_feature (704)..(704): n is a, c, g, or t
  misc_feature (722)..(722): n is a, c, g, or t
  misc_feature (730)..(730): n is a, c, g, or t
  misc_feature (747)..(747): n is a, c, g, or t
  misc_feature (754)..(754): n is a, c, g, or t
  misc_feature (768)..(768): n is a, c, g, or t
  misc_feature (793)..(793): n is a, c, g, or t
  misc_feature (833)..(835): n is a, c, g, or t
  misc_feature (842)..(842): n is a, c, g, or t
  misc_feature (844)..(845): n is a, c, g, or t
  misc_feature (847)..(847): n is a, c, g, or t
  misc_feature (851)..(851): n is a, c, g, or t
  misc_feature (864)..(864): n is a, c, g, or t
  misc_feature (898)..(898): n is a, c, g, or t
  misc_feature (960)..(960): n is a, c, g, or t
anaaaaataagggtgggtgcgcttcccaaccatttaatacagagtaacagtgtaagaactctggtggaaaacagggtggggtcgggggatgacatccaactaaggaggggtccatggtctcgcctttgagtccgttgaagaggaaggcgtcctggtactccttcatgtcctgcgtggagcgggactggtccaggaagagtgagtggacccgcttgaggtaatccacctgcactcctgtccccttgcgtttccggcacaccaagctggcagcngtaatgagctggatggcgtacgcagtaacgtctccggcccgaggcgggtaagccccgtgtaggcgtcctcactcatctccacacctncttcctcgcaccggatgcggaggatctgcttcgtgtntttntcgctgttgggggtggtggagaagataagcagcgggtccagcaggcctatggggatgccgtaagggcnctggtagctggtgccccggattcgcgtaaggccacggttgggggccatgaacaggacaggggcaaagtaactttccagggcccggttgaggaaggagaagctctcgatgttcagcatgtggacctcgtcgatgaacagcacttcagggatgaactccgccttgccctcctcgcgccactaagccaccttggcattaatctnctcacggacttctganttgatctcccctgttttanctgaaaagagcgcaaggnagccctgnaaaaaaaaatagaagangtggatnttgtgcagggacanggtgtgcaccacctccttgcgtttntggagcccccatctgggcactgcacgaacttttttttttnnntcattgngnngnagtngcgggcgcgtatnaaggagcggcccaagcttggagaacttgcccgtngccttgtcgatggtgaacacgtccccggcctggaccttgttcttggtcagggactcaattancttggtgcccaggt

SEQ ID NO: 527547 - DNA, 162 bp, Homo sapiens
tcaaattggaccagagtttattaccattttggaattatcaaaaaaaattttaaattcccgtttcttaaagttttaaaaaaaatgccccgttgacacgggtccaaaagttcccatatagttaaacggatttttaattaatttttaatttttttttgaaaaagg

SEQ ID NO: 527548 - DNA, 629 bp, Homo sapiens
  misc_feature (405)..(405): n is a, c, g, or t
  misc_feature (615)..(615): n is a, c, g, or t
tcgagccggaccagacgtcattctgcatccaggatttttttttttctcttccaacttttaggttcagtgggtacatgtgcgggtttattatatgggtaaattatgtgtcacagggtgtgggtgtaccaattatttcatcacctaggtagtaagcatagtacccaagggtagttttggatctcaccctcctcccaccctccaccctcaagtcggtcccgggtgtcggtggttcccttcttggtgtccatgtgttctcagggtttagctcccacttataagtgagagcgatattgggtttttccgttccggtattaattcacttaggagggcctctagctccatccgtatggctgtaaaggacatggtctcattctttttttatggcggtgtagtatggcattcggncaagattggtaatggggggacttttttctaatagattggggtgaaagtggattttctattcgggcttttactaggctcggggaccccaggtaacctaggaattagagtaatatcggttagatcatggatttgaaatctttctttgggaggtaggcatttagaactataaactttccttttaacactgttctgctgcatcccagagaattncgtatgttatgtct

SEQ ID NO: 527549 - DNA, 336 bp, Homo sapiens
tacagtttatcctgccaggcgcaccttggcaaaacggtagcgactaaatgtctgaaacacctgggcccagacgtgtcgaggccaggccttatggacttgagcataggattttgacaaggatgccagtgtctctaggcaccagcatcctggggacagggccagagcatatgccatggacagtgctgccaggttttggatttctgccttgtgccgcaggtgagagtgagaggcacgatgacagcatagctgggcacaccctgtcacgaggggcccagcaggggctgggcagacagagctggccatgctgggagcactgcgtggaggcccttgagggcc

SEQ ID NO: 527550 - DNA, 608 bp, Homo sapiens
  misc_feature (16)..(16): n is a, c, g, or t
  misc_feature (137)..(138): n is a, c, g, or t
  misc_feature (140)..(140): n is a, c, g, or t
  misc_feature (209)..(209): n is a, c, g, or t
  misc_feature (241)..(241): n is a, c, g, or t
  misc_feature (283)..(284): n is a, c, g, or t
  misc_feature (347)..(347): n is a, c, g, or t
  misc_feature (351)..(351): n is a, c, g, or t
  misc_feature (407)..(407): n is a, c, g, or t
  misc_feature (495)..(495): n is a, c, g, or t
  misc_feature (518)..(518): n is a, c, g, or t
  misc_feature (548)..(548): n is a, c, g, or t
gcgctaaacctgcaancatcaccttcttatccatcaacatgaagaatgtcctacaatggactccaccagagggtcttcaaggagttaaagttacttacactgtgcagtatttcatcacaaattggcccaccagaggnnancctgactacagatgagaagtccatttctgttgtcctgagagctccagagaagtggaagagaaatcctcnagaagaccttcctgtttccaatgcaacaaatntactccaatctgaagtataaccgtgtctgtgttgaatactanntcaaacagaaccgtgggtcccaagtgtgtgaccaacccacaacgcctgggtgctcacctgggntggnggcgaaacactctttactgcgtacacgtggagtccttcgtcccaggggccccctcnccgtgcttcagcctttctgagaagcagtgtgccagggactttgaaagatcaatcatcagagttcaaggctaaaaatcatcttctgggnatgttttggccatatctaattancgtgttttcttttttctgtgatggggctantccatctacggatatatccacgttgggaaaagaggaacaccagcaaattttgattttgtt

SEQ ID NO: 527551 - DNA, 104 bp, Homo sapiens
gccccttatttttttttttctattcgtaaaggattcaaagcaggcacaggtggtgtacacttcaagtcccagctactagggagtctgaaggcagtctgtagggt

SEQ ID NO: 527552 - DNA, 136 bp, Homo sapiens
tgcggtccgtatagggctgtggtggttactgactgatggtagcatgaccctgtggacacagcacatattactgtgcacacagagcggatcacagcagctcgttgttgtgttcgagccctggggcccgggaaccgct

SEQ ID NO: 527553 - DNA, 233 bp, Homo sapiens
  misc_feature (52)..(52): n is a, c, g, or t
ctgcacccaccccagcgagaatccatctaaaaaaatttatccaaaaaaaaantttggggggctgtcggggggttttttaaaaacccattttaaaaccctccaaagggggatcttattttccagcccagggaaggaggccctgccctagggttaaaattgtagagccggaagaaaagagaccccagggcccccccctcttttagggtgggcctgttggggcccccctcccggca

SEQ ID NO: 527554 - DNA, 400 bp, Homo sapiens
aggctccttatgtcttgaccattgtagacattgcaagtaacacattctctacagtagcatagcccagttcaaacagtacttacatcttctgatgagtatcgtagttcacagctaggcacagagatatgcatagtcatacattatgggtaatttccagatggtgcgaatggtgtacacgcctccattagcacaggtaatggtgaccatatgtctgtttttactagtggcaagaattgtctcggacagtagtgtttgtgattcaagcaggatgtttcccaaactttgttggtaaatgatgctttcgtaagtgtgaaatcaactcatatcgatggcacgatggatcctcagataaaaaacccatgttttcccagaaacgccttcaattcagctcagtgtccac

SEQ ID NO: 527555 - DNA, 214 bp, Homo sapiens
tgtgggagtctgcattggacgcagtgttcgaagtagatgatgtacggactgggtaaaagccgcttccctcaagagtaacctacaatcttcccatgcacagatgataatacagatcttagcagaatcttgaaaagcgccagcagatcccaaaagaggccccttcgagcaccacgcaagaagatccatcgcagaaagggggttttcccccccctct

SEQ ID NO: 527556 - DNA, 365 bp, Homo sapiens
ctacaagcgcacgccaccacgcccggctaatttttttttttagtggagagtgggtttcactatgttggccaggctggttctgagctcctgacctcaggtgatccacccacctcagcactttgggaggctgaggtgggaggattgcctgagcccagaaatttgagaccaccctgggcaacacagtgagacctcatctctactaaaaggaaaaaagaactagctagatgtggtggtatatgcctgttttccagctattcgggaggctaaagcgggaggattgcttgagcctgagagcggtaggttgcagtgagccgtgatcacgcctctgcatctctgcctgggcaacagagtgcgatcctgtctct

SEQ ID NO: 527557 - DNA, 692 bp, Homo sapiens
tggtgaatcacctgaggttagaagtttgagaccagcctggccaacatggtgaaaccccatctctactaaaaataaaaaaattagctgcgtgtggtggtgggtgcctgtaaccccagctacttgggaggttgaggcaggagaatcgcttgagcccaggaggtggaggttgcaacgtgagccgagattgcgtcattgcactccagcctgggcgacaagagtgaaactctcactctccctcgaaaaaaaaaaaaattgtggatcctgtttgggtcccccggtgggaatccgtcttttctgacgtttggccgttgtttcccctcatcccccaggtggctagtaaattctcttcccctcgtgccttgcacccgtgttgcccttagctatagcctgggccgcctcacttgccgtgtcctgcattcagcccagccacagagtcctacaggtccggggcttgcttgtggaaacggcattgtcttctaaactctgggggcgggggctggggtgtgttcccttacttgtaaagggtcctgtggttggggagcagggagtaatggggatgaaaacgctgtgtgaaggcggcagcaccctggtatggggtaacgccctgtcccctcattgcaggtggttgggcatgaagcatcaggccagaggtgtgagtggcaagcctcacccaaattgctgtcctgttaaag

SEQ ID NO: 527558 - DNA, 1213 bp, Homo sapiens
  misc_feature (253)..(253): n is a, c, g, or t
ggcacgggccgcgactgcatgaatgaacgcagcactatacacggttcccactcgcggatacaggctggtccccagcatgtattatgctgctcatgactgaccatccagctcggttatgagaactgaaatctagaatcacagtgcggcacaatcaatcattacatgtgcgtcgcgtaaaccgggccatctcgatgtgcacgtctttccggcatatggcaatgcgtcgcgaggagccaatctgtactccgtgtcnactctaacatgacctatactgcgtgagcccgtagaccaagccatccgcatttcctgtggagttgagactacctttacgttgacactagacactaaggcaatgaatgcatcactcgaaggacttcagtgctagtaattatattccaacactgttcgctggtagtagcagctctggaccactaggctggtatccattcgtatccatgacaggcctacctaactgctagctcgtcatcagcgcatatctaatagtagaccctgctaaattctatgctgcgactctggtcatcgccgctgtagctctacgctaattccggatggaatagtgtcgttgggcacacaggcggcctacgggcaaagcgaagcgatcacggtgcagataatgtcacatacaccagcgtgaagggtcggcactgctctcctcgacaggcgtacctctcatgggaaccaggtgtgacaagactgacgtgggggaaacaaacctccacctgacaggtacacttgtcaacgccaggcaaaggcagcagcggggcgacactaaacgcttggacagcccacgagccataggggaccacagcaaggcacacggcggcactagcccccaagagggaacacggaggacaaagaaaccacacaggcagacgaacacacaccacttaaccaatcgaacgtagcaacgatactagaaacacaagttgcaccgcgatactataccacaagggctgggtcgactacgcacgtcgccagaacgaaaaacattcacaagcccaacgtcaggcgccgtaagacatgccacaaaaagcaggtgcaaatagacgtagacactactacataagacaaacgaaacgcgaacaagcagagcgactacaaaaagcatctagactaccacgtccccgctccctacgctcgtccgtctctcacacgctctcagcaacgaaagcacaaaagcccagagaaaaga

SEQ ID NO: 527559 - DNA, 327 bp, Homo sapiens
tccccaagcccccatctggtctaacactctgtaattagccaggcagagtcctgctcaagtgccactcatttgaagcatgaccaatgcaatccagctgaaagctaaagcaggcagcaataaattctcttcatacagtaggtttcctagagtaacctggtattccagtgtttcccaaacagtgttccctggaaccctgtcccataggttggcaataggagaagtgagagaagaggattctgtgtcaagaaaagttggcaaacattgggtttagtaaagttaaatagggttcttttgctcaaccgtgctaataaactcactaataaattc

SEQ ID NO: 527560 - DNA, 115 bp, Homo sapiens
aaaaaaaaccgacaaaagacaaagtggggggcttttgttgtttacaaaaaagttctaaaagctgtgtaaacagttttttatgaaaaatattaaaagactttggtgatgacattta

SEQ ID NO: 527561 - DNA, 739 bp, Homo sapiens
gggagagtagacagcagaacatgctggcggaggctaagcagagactgtagatagctggcgacagggcgacgacgtgcagcgattgctgtgtgctggggccagcccctgggactcccgggtgcaggaggacccgtgtcccgggtcctggcgctggcatccctgtggcaaaatgcgtggaggaacgcttgaaggaaatggatgtgcgtgagatgggcctgttttgagcatgtgaagttctcgggggctccagtacctggaatcccaactgcttgtgcctgctggtgccccactgtccccactggtccccaatgtagaagcgatgcagtgtcccagctggctcctgtgatccgcccaattatctgctgacaacacataccatgcatggtccagcagactctggaggcccgatgcagctgctgcaattaccacagtagttcctcccatggtgggtggccctccttttgtatgccctgttggctttgggcccctggtgatctgtagtcacccttggtaacaggcaccaagaggggcttctatgaaaatgccatttgtttcccttgcaggatagtgccaattacagtgcctgggcccccacggccataattcaagttgccaatattatgctccccccatatgatcaagtcgatcagtctggtattgcactcacacatcgtgactacttgtagtcacaccaaatgtaactctcaccccaatgaatgacgtccacataccactatgc

SEQ ID NO: 527562 - DNA, 531 bp, Homo sapiens
  misc_feature (229)..(229): n is a, c, g, or t
  misc_feature (317)..(317): n is a, c, g, or t
gggaggcggagctgcagtgagccgagatcgtcccactgcactctggcctgggcgacacagcgagactccgtctcaaaaaaaaaaaagattttaatagaggaagtgactattactcagataaacagagactactctgcccaatttcaaattatgaaaatctctggataggcaaacgggaaaagctagtagggcggcggtaaagtggtcctttccagtatctctcacggtncatactcacagggccagtgggcctctcaaatatcccattctggccagcctcaaaaaccgggtgcagctctgccatgaagtctcccggnatggaatagggtgtgaggggaaagggaaatgggttggcaccaaccttcggtgttccataagccagggacctaggaaaaataaatacaacattaggggagctctctcagggtccaggaagaaggggcttgaaatctggggcattatttaagagcagtctccacattttttaccaaatttctcctttttcgtgcgaagcagagccatgtctctcca

SEQ ID NO: 527563 - DNA, 860 bp, Homo sapiens
gtaatgcaacagccggagtggagagtgtctgttgaagctgctgctctttcactctctcatggcgtctaccgagagctcagcacccagggtgaacatctgataccattggcgcaacgaagtggacaagcctgatgcagtctgttgacatgttttccaaagtcctggagcatcagctgcttcagtattaccaaactggtggatcggaacatgggggttctgacagttccataatgctgggatcagatggatgaggatgaattggaacgcctgtacagatgagagactccaggcgactagaggaaagctcacacaatgcagcaagacaatagcacatggctttcctagaagggacatggggcaaatacagagaaatccctagtgaacgagactttccttctcagagatagtcacggcagtacgtgcccatgtggtgtgcccatgtcctacacgaggacgtccacattcgaggtgtagagagactagtagagacatctggcaatattgtccacagaaactaccgtcgtagagcaggattttgaagctgaatgtcggaaataagcacctgttcccttgtggtgaagagacattgcataattcaaagttcattcccatgacttagcaactgctactcagatgggaccaacatgccacgatcatgttgctggggttacctgccctatgcacttacccgatgacttcacccacaggcacgccttcccacacggcgcgcgcgggctcttgacactcctgcactacacagggaagattccataggacggcgcgccattcacacacccacacgccatgcggcaccaaccttcaacttcgtggaaaagaacacccaccgggacacgaccact

SEQ ID NO: 527564 - DNA, 757 bp, Homo sapiens
gatggtcacgatgcaggcgctatagtatggtccgtacagaagacgcttactgtcaccctagtcataagaatgagtcgttgatcatcctggtcatgatcacggccctcataagtcatgtttcctgtagtctgctgttccgtagtccgggtatgccctttgtgctaacattcacaaaaaaagtgaagtaatactaacatctcagactctcaggagatagaaaccgtgctgaagctatcctgcccgacagtcatcctagtccttcatcgaccgtcccatccctacgcgatcctttatataacaagacgaggtcaacggatcccttccctttacctatcaaactcaattggggcacacgagatggtactgaaccgtacagagtacagccgattacaggctggacgtaatctttcaatctccttgacatactttcccccgattgattggctagaaccatggcgaacgtgcagacgtccgttgaccgttgacaagtcgacgtaagtactcccgatatgaagagcccccattcgtataataattacatcacagagatgtcttgcactcatgagctgtccccgacattgaggcttaaaaacagatgcaattcccggaccgtcgtaaaacaaagcacgtttcaacgctacacagacggggggtatactagcggtcaatgctctgaaatctgtggagcaaaccgacagttgtcatgcccatcgtcctagaattagttccgcctaataatctttgaaatcaggggcgg

SEQ ID NO: 527565 - DNA, 217 bp, Homo sapiens
  misc_feature (111)..(111): n is a, c, g, or t
  misc_feature (178)..(178): n is a, c, g, or t
tgcacgaaatactgacctctgggacagggagctttgaatatgcctctgtagtgatttgtatcatttacctctttatgctgacttcctgttatgtggaattgctctactctntcctagttcttccatcacaagtgcttcctgaaccacagactggaccagaattcttggtgataagctntggtttggcccagggtttcttgatctcagcactattaac

SEQ ID NO: 527566 - DNA, 806 bp, Homo sapiens
agcggatgcagagcggctggggaactggaccagcagtcccgctgcaggctgatctgagcaaagcctctggcccaccgtacagtggccttcctgatgccctgctggtctgcgtcttcgtgaatgggctcctgtggttgaccatcgaatgggcgtctgggtagagctgcccctgctggtgatggcagctgcccggagggctggtacgctgccgctcctacctcgcggtggtcatccagctggccaatatcgggcccctcctggtcagcctgctccatcacgttccggcccagctgcgctttccgaagtgcccatgatcttcagcgcctggctcgggcgtgggagatccgtcaaccgtgcatccatcgtttgcctgtcactctcggagatatgagcctccgtggcgtgcgtggcatcggacacgcacagcgagtcgccttcttggtcctcaccttcttcctggccctggtggactgcacctcttcagtgaccttcctgccgttcatgatgccggctgcgccaccgtactacctcatcagcttcttggtgggtagaaggactcagtcggcctcttgcctgccctggtggctcttgcccagggctccggtctcactacctgcgtcaatgtcactgagatatcagacagcgtaccaagccctgtacccacagagggcagactgacatcgaagcagggagttcccagagcttcggatgtccggcctccccggcaatggaagcagccttgtcccgactggagagccgatacctgccgcccacttttcaccctggtcttcttcctcctcctatcc

SEQ ID NO: 527567 - DNA, 470 bp, Homo sapiens
  misc_feature (177)..(177): n is a, c, g, or t
  misc_feature (288)..(288): n is a, c, g, or t
agcgggggcggggccggggctgctgtgggagagttcggttgctgcggcggggcctgcacgttgactgtgggaaactcggaaacaagctcacatcttcctgtgggaaaccttctagcaacaggatgagtctgcagtggactgcagttgccaccttcctctatgcgggaggtctttgtngtgttgcttctctgcattcccttcatttctcctaaaagagtggcagaagattttcaagtcccggctggtggaggtggttagtgtcctatggcaagcaccttctttgtggtnctcagtgtcatccttgtgctgttggtcatcgatgccgtgcgcgagaattcggaagtatgatgatgtgacggaaaaggtgaacctccagaacgaatcccggggccatggagcacttccacaggagggtgggtggagcaggtggactggagtttttcttgagggcaataaaagttgtcatggtg

SEQ ID NO: 527568 - DNA, 618 bp, Homo sapiens
tggcagttttaacttttatttaaacaaaaaacgtgtgcacattgagcgtgccatacttcatttttctttcactgtgcgcagccgtggcattgtggggttgtgggtgacctcgtgagtggccagttggggacagctctttccacgagtggcttggcggttctgggaggaaacattgtgtgtgagcgactctcggacacagataaaattgtttgtgcacattcagcagcactttccagctctcctttgacgtttggtggaccaggaactttccggaagccactgtgggcagccatggtgcttgggttttattgggtgtgctctccatataaccacagtggtggggcatctcaaaactcgtgggcccttggaatctcttctcatagcgaaacccgtgttgtgtctcaatgtgccttctgggggtttctccggccgagttatacgccttataaattgtgtgaccattattcgggtctagacgggggtgccgagatatagaactctcttgggggtctcctctttttgagaccagactcttgggggctctcaccaagcggggctcttgaggcgcggccaattgattgccagaaaaacggacagagtggtgtgccaccttccgat

SEQ ID NO: 527569 - DNA, 1311 bp, Homo sapiens
  misc_feature (177)..(177): n is a, c, g, or t
  misc_feature (288)..(288): n is a, c, g, or t
  misc_feature (595)..(595): n is a, c, g, or t
  misc_feature (599)..(599): n is a, c, g, or t
  misc_feature (803)..(803): n is a, c, g, or t
  misc_feature (867)..(867): n is a, c, g, or t
  misc_feature (978)..(978): n is a, c, g, or t
agcgggggcggggccggggctgctgtgggagagttcggttgctgcggcggggcctgcacgttgactgtgggaaactcggaaacaagctcacatcttcctgtgggaaaccttctagcaacaggatgagtctgcagtggactgcagttgccaccttcctctatgcgggaggtctttgtngtgttgcttctctgcattcccttcatttctcctaaaagagtggcagaagattttcaagtcccggctggtggaggtggttagtgtcctatggcaagcaccttctttgtggtnctcagtgtcatccttgtgctgttggtcatcgatgccgtgcgcgagaattcggaagtatgatgatgtgacggaaaaggtgaacctccagaacgaatcccggggccatggagcacttccacatgaagcttttccgtgcccagaggaatctctacattgctggcttttccttgctgctgtccttcctggttaagacgcctggtgactctcatttcgcagtcaggccacgctgctggcctccaatgaagcctttaaaaagcagggggagagtgctagtgaggcggccaagaagtacatggaggagaatgancagntcaagaagggagctgctgtgacggaggcaagttggatgtcgggaatgctgaggtgaagttggaggaagagaatcaggagcctgaacggctgacctgcagaagctaaaggacgagtctggccagcactaagcaaaaactagagaaagctgaaaaccaggttctggccatgcggaatcagtttgagggcctcaccaaggagtacgnccgctttgctggaggagcacgcaaagctgcaggcttgcagtagatggtcccatggacaagaagnaagagtaagggcctccttcctcccctgcctgcagctggcttccacctggcacgtgcctgctgcttcctgagagcccggcctctccctccagtacttttgtttgtgcccttntgcttcccccattcccttccacaggtcatagctcgtcatttcggcccttgtccacactctccaagcacattacaggggacctgattgctacacgttcagaatgcgtttgctgtcatcctgcttggcctggccaggcctggcacacccttggcttccacgcctgagggtggagagcacgagttagttgtagtccggcttgcggtggggctgacttcctgttggtttgagcccctttttgttttgccctctgggtgttttttttggtcccgcaggagggtgggtggagcaggtggactggagtttttcttgagggcaataaaagttgtcatggtg

SEQ ID NO: 527570 - DNA, 80 bp, Homo sapiens
accttgcttacttctgagggctgcagctccgcagtgtggaagccgataagaaaaggatttgaagcattccagccaaaatg

SEQ ID NO: 527571 - DNA, 1258 bp, Homo sapiens
  misc_feature (177)..(177): n is a, c, g, or t
  misc_feature (288)..(288): n is a, c, g, or t
  misc_feature (595)..(595): n is a, c, g, or t
  misc_feature (599)..(599): n is a, c, g, or t
  misc_feature (870)..(870): n is a, c, g, or t
agcgggggcggggccggggctgctgtgggagagttcggttgctgcggcggggcctgcacgttgactgtgggaaactcggaaacaagctcacatcttcctgtgggaaaccttctagcaacaggatgagtctgcagtggactgcagttgccaccttcctctatgcgggaggtctttgtngtgttgcttctctgcattcccttcatttctcctaaaagagtggcagaagattttcaagtcccggctggtggaggtggttagtgtcctatggcaagcaccttctttgtggtnctcagtgtcatccttgtgctgttggtcatcgatgccgtgcgcgagaattcggaagtatgatgatgtgacggaaaaggtgaacctccagaacgaatcccggggccatggagcacttccacatgaagcttttccgtgcccagaggaatctctacattgctggcttttccttgctgctgtccttcctggttaagacgcctggtgactctcatttcgcagtcaggccacgctgctggcctccaatgaagcctttaaaaagcagggggagagtgctagtgaggcggccaagaagtacatggaggagaatgancagntcaagaagggagctgctgtgacggaggcaagttggatgtcgggaatgctgaggtgaagttggaggaagagaatcaggagcctgaacggctgacctgcagaagctaaaggacgagtctggccagcactaagcaaaaactagagaaagctgaaaaccaggttctggccatgcggaatcagtttgagggcctcaccaaggagtaccacctggcacgtgcctgctgcttcctgagagcccggcctctccctccagtacttttgtttgtgcccttntgcttcccccattcccttccacaggtcatagctcgtcatttcggcccttgtccacactctccaagcacattacaggggacctgattgctacacgttcagaatgcgtttgctgtcatcctgcttggcctggccaggcctggcacacccttggcttccacgcctgagggtggagagcacgagttagttgtagtccggcttgcggtggggctgacttcctgttggtttgagcccctttttgttttgccctctgggtgttttttttggtcccgcaggagggtgggtggagcaggtggactggagtttttcttgagggcaataaaagttgtcatggtgaaacaaaccccagccatcaccagccgcacccaccccggccttctgcgccaaccac

SEQ ID NO: 527572 - DNA, 412 bp, Homo sapiens
ggtcccggtaaactgcactgacacacattcgggaacgccgggagcgcaggtcattcctgtgggaagtggaacccgcagggtcctgtggagaactagcttggaatgctgtatgactagacacgaaacagtactctcggtaaaccacccagcacgtgagacctcgtcatttacccactggaaatctcctgcccacacaaaaacctgcacccggatgttgatagcatctttcttcataattaccaaaacctggaagcgaccaagatgcccttcagtagataagtggaaaaataaaccgtggtgcatccatactggactattatccagtactgaaaagaaatgagcagtcgggccaagagcaggcacatgggagaagcatcaagtccctgttactaagtagagaagcccctctgac

SEQ ID NO: 527573 - DNA, 1366 bp, Homo sapiens
  misc_feature (177)..(177): n is a, c, g, or t
  misc_feature (288)..(288): n is a, c, g, or t
  misc_feature (595)..(595): n is a, c, g, or t
  misc_feature (599)..(599): n is a, c, g, or t
  misc_feature (803)..(803): n is a, c, g, or t
  misc_feature (867)..(867): n is a, c, g, or t
  misc_feature (978)..(978): n is a, c, g, or t
agcgggggcggggccggggctgctgtgggagagttcggttgctgcggcggggcctgcacgttgactgtgggaaactcggaaacaagctcacatcttcctgtgggaaaccttctagcaacaggatgagtctgcagtggactgcagttgccaccttcctctatgcgggaggtctttgtngtgttgcttctctgcattcccttcatttctcctaaaagagtggcagaagattttcaagtcccggctggtggaggtggttagtgtcctatggcaagcaccttctttgtggtnctcagtgtcatccttgtgctgttggtcatcgatgccgtgcgcgagaattcggaagtatgatgatgtgacggaaaaggtgaacctccagaacgaatcccggggccatggagcacttccacatgaagcttttccgtgcccagaggaatctctacattgctggcttttccttgctgctgtccttcctggttaagacgcctggtgactctcatttcgcagtcaggccacgctgctggcctccaatgaagcctttaaaaagcagggggagagtgctagtgaggcggccaagaagtacatggaggagaatgancagntcaagaagggagctgctgtgacggaggcaagttggatgtcgggaatgctgaggtgaagttggaggaagagaatcaggagcctgaacggctgacctgcagaagctaaaggacgagtctggccagcactaagcaaaaactagagaaagctgaaaaccaggttctggccatgcggaatcagtttgagggcctcaccaaggagtacgnccgctttgctggaggagcacgcaaagctgcaggcttgcagtagatggtcccatggacaagaagnaagagtaagggcctccttcctcccctgcctgcagctggcttccacctggcacgtgcctgctgcttcctgagagcccggcctctccctccagtacttttgtttgtgcccttntgcttcccccattcccttccacaggtcatagctcgtcatttcggcccttgtccacactctccaagcacattacaggggacctgattgctacacgttcagaatgcgtttgctgtcatcctgcttggcctggccaggcctggcacacccttggcttccacgcctgagggtggagagcacgagttagttgtagtccggcttgcggtggggctgacttcctgttggtttgagcccctttttgttttgccctctgggtgttttttttggtcccgcaggagggtgggtggagcaggtggactggagtttttcttgagggcaataaaagttgtcatggtgaaacaaaccccagccatcaccagccgcacccaccccggccttctgcgccaaccac

SEQ ID NO: 527574 - DNA, 827 bp, Homo sapiens
  misc_feature (388)..(388): n is a, c, g, or t
  misc_feature (600)..(600): n is a, c, g, or t
gattaggagacaaggattcaccatgtggcaggctggtctcgaactctgacctcaagtgatctagcgcacctcggctcccaaagttcaggtattacaggcgcgagcaactgcaccaggcagtatagactgtatttctactactttttgggctttggaacaaattcagtggttatacagcttggagatcagaaataatttattagctcattacctgtaaaggagcacaagttagtcctgtggggaacgtttgaagtcttggagagaagatctgccttttggtaaataactgggcaacaggaagacatcctgcctcttgtacccccataccacttcctgttgaattagcattagtattaactgcctacagaaaaagcagtgctgaggcttngcagaactagcaggagccgaaagagaactgtggggccctttgggtcaaaatgggtcatctgccatgggaatagatgttgaagaacacatcaaactttggaaggtgcttcctatggcccatatgaaaccagtgtgagatgctggggtttgcacgggaatcagctgtgagtgcttatcagggggtgatgggtaaacccaggccatgtgacttcncaaagcctcttcttagcttataacagtctgggtcaagttttctttaaaagtaaaccagcaagttttgccatctgcctttgtttgagaagagatgggacactcataaaaattgcttaaaatggaagtgggcagagaaaccgttggcagccagccagggaaattttctttgtaaagggcatgtaagcgagaagcttgttctgggacaaaaaaagggaagagttcgatta

SEQ ID NO: 527575 - DNA, 1396 bp, Homo sapiens
  misc_feature (262)..(262): n is a, c, g, or t
  misc_feature (373)..(373): n is a, c, g, or t
  misc_feature (680)..(680): n is a, c, g, or t
  misc_feature (684)..(684): n is a, c, g, or t
  misc_feature (888)..(888): n is a, c, g, or t
  misc_feature (952)..(952): n is a, c, g, or t
  misc_feature (1063)..(1063): n is a, c, g, or t
agcggacgttgactgtgggaaactcggtgacgcgggctccgcgcgccgggctgggctccgggaccgcggaggctccccggaccactcgacgacgggacgagaggcgagcggcgcggggaggcccgggggccggggaatctcggggcccgcagcctagctgcgtgaaacaagctcacatcttcctgtgggaaaccttctagcaacaggatgagtctgcagtggactgcagttgccaccttcctctatgcgggaggtctttgtngtgttgcttctctgcattcccttcatttctcctaaaagagtggcagaagattttcaagtcccggctggtggaggtggttagtgtcctatggcaagcaccttctttgtggtnctcagtgtcatccttgtgctgttggtcatcgatgccgtgcgcgagaattcggaagtatgatgatgtgacggaaaaggtgaacctccagaacgaatcccggggccatggagcacttccacatgaagcttttccgtgcccagaggaatctctacattgctggcttttccttgctgctgtccttcctggttaagacgcctggtgactctcatttcgcagtcaggccacgctgctggcctccaatgaagcctttaaaaagcagggggagagtgctagtgaggcggccaagaagtacatggaggagaatgancagntcaagaagggagctgctgtgacggaggcaagttggatgtcgggaatgctgaggtgaagttggaggaagagaatcaggagcctgaacggctgacctgcagaagctaaaggacgagtctggccagcactaagcaaaaactagagaaagctgaaaaccaggttctggccatgcggaatcagtttgagggcctcaccaaggagtacgnccgctttgctggaggagcacgcaaagctgcaggcttgcagtagatggtcccatggacaagaagnaagagtaagggcctccttcctcccctgcctgcagctggcttccacctggcacgtgcctgctgcttcctgagagcccggcctctccctccagtacttttgtttgtgcccttntgcttcccccattcccttccacaggtcatagctcgtcatttcggcccttgtccacactctccaagcacattacaggggacctgattgctacacgttcagaatgcgtttgctgtcatcctgcttggcctggccaggcctggcacacccttggcttccacgcctgagggtggagagcacgagttagttgtagtccggcttgcggtggggctgacttcctgttggtttgagcccctttttgttttgccctctgggtgttttttttggtcccgcaggagggtgggtggagcaggtggactggagtttttcttgagggcaataaaagttgtcatggtg

SEQ ID NO: 527576 - DNA, 180 bp, Homo sapiens
ctggtgagaagtcttcagacgtttagtcaagcttggtttacttgccggagtgctacaggggcaacctgggtttccatccacaacttcaatattaattatcgaatcccagtgttctgtcagcgcgctcaaccagggtcaagtcttggattggaggcaggatcacaggctcgggtcgctgca

SEQ ID NO: 527577 - DNA, 137 bp, Homo sapiens
tttccagacttagttggaggcagactctctccctctcttcttcttcactttcttggagaggcaatttgtcatggattacattttcaaagcctttataaatgtgaattccagtgtggagagagccagtgtggagagag

SEQ ID NO: 527578 - DNA, 445 bp, Homo sapiens
ctctgaaaaggcgagtccattcacatctctgcgaatcagaatctcgaagtgtattctttgtagcctggccagataaatgtgtgaggctgcttagtggattgatgttcagaaaccggcttgatacaaatgtaggtgtacactcagtttcacatgatcaacaacgtagagtaaaagcactctgctagataccgtgaggaagtaaagatcaatcagggttggaccctgctaaagggataagatcaagtgggcaggagtggattcctaaaacctcctacacctcctctcctctactggcttttcttcttaaagagctgagaagactgaagtggtctgaagataaatgcggctccaccccgagcattgctacaatagcctctgtcttcccacctatcgccagctcctcttagagccaagccttgatttatgccccggaggttataggcat

SEQ ID NO: 527579 - DNA, 342 bp, Homo sapiens
aggatctggcccttgtgtctgcacgctcgtgagtgatctactatgacgctgggcattgcctgtacatcggtccaggttttcaggtcacgggattcgctggcgcgcacgccaatgccgaacaccacgatgtgcaccagcaccacaagcccgagcaccagccagagcaggccacgagatttacggcggggtgaacctggattggaaaacggaagtggacatttcataccccttgaatggcggtggtcgcaagcgtggtgtgctgacgccgcccgtgctcaagactgcaacctcagcggaaaccaggaacaacgtggcaatggttggcaaacgccaggcctgcca

SEQ ID NO: 527580 - DNA, 580 bp, Homo sapiens
  misc_feature (1)..(1): n is a, c, g, or t
  misc_feature (29)..(29): n is a, c, g, or t
  misc_feature (51)..(51): n is a, c, g, or t
  misc_feature (66)..(66): n is a, c, g, or t
  misc_feature (87)..(87): n is a, c, g, or t
  misc_feature (112)..(112): n is a, c, g, or t
  misc_feature (127)..(127): n is a, c, g, or t
  misc_feature (143)..(143): n is a, c, g, or t
  misc_feature (145)..(145): n is a, c, g, or t
  misc_feature (161)..(161): n is a, c, g, or t
  misc_feature (166)..(166): n is a, c, g, or t
  misc_feature (207)..(207): n is a, c, g, or t
  misc_feature (212)..(212): n is a, c, g, or t
  misc_feature (232)..(232): n is a, c, g, or t
  misc_feature (259)..(259): n is a, c, g, or t
  misc_feature (362)..(362): n is a, c, g, or t
ngaaggccaagggatttggggagaatttngaagtgcaaatttgtttggttnggattccggaaaggnggagttatgagattgggcagngaacatatttaaggaattaatggangaaacttggcagaantaaagaaaggttcaantntggagattgtcagtgnttgtngagtacttagtaaaattgatgaaaagagatgattcttaganacatnttggtgaaattttggaattntagtgataaagagaaaataataagggnttttagagagagaagagaaattacctaccaaggaacaagaatcaggttgacagcagacttatcactggacacactggatgctagaagtaaatggagcaatgtnttcaaagttctgctggaaaaaggctttaatcctagaatcctatatccagccaaaatggcatttgattttaggggcaaaacaaaggtatttcttagtattgaagaatttagagattatgttttgcatatgcccaccttgagagaattactggggaataatataccttagcacgccagggtgactacaaacaatatgctttcctcccccagcatgcatcc

SEQ ID NO: 527581 - DNA, 428 bp, Homo sapiens
cagagcaaatggtgactccctcccaccagaaggatactgccatgtctgtgcattgtggcatgccctgcacgtgttttagcaactgatatgtcagagtacggctcctctccccacattgaggttgatgcagcatgcttctgtttcattccactgtcccgagtcattgtctaaagacaccagcggccactcccagtaacactggtagctctagcatggtagtatcaatgactaaagcaatcagaatcagcaggacttcctaatttttattgtgttactgcaagaggatcgggcagaaggctgtaatgttcagtacttttatgacaggctatttaatgtccagttaacttctttcttaattgggaataatagctaagtaccatatcttatagtctgactaactcaaatcttatttaaaaggcttaactttg

SEQ ID NO: 527582 - DNA, 272 bp, Homo sapiens
ctgtgctttttccttctcagattcgcctgtcctgttcttgacaggagtcatcactactgacacggcctagcgcacagactttcccaatctaattaaggtatgctgtgtgaggtgggtgggatcgcaaaacgccttcacacgtttcctggctgccgtgaagggggaacccctactctcactttaatgacgtcccaggacatggcatgattgtttgtgcataacgggaatctcccaaaccgaaaaggcaaaactttcctcctctcttccagcgc

SEQ ID NO: 527583 - DNA, 483 bp, Homo sapiens
attatcgcccaacctacataacagtacttcacgtgactctcttggtatgtacattctatgggttcggatataatatatagtgacatgtatccacccttctgtctcctacaaacatagtcgcactgtcttacaaatcctctgcactctgcctatgtatccctccttaccctcagcccctgacaaccactgatcttttaatgtctccatagttttgcctataaccagaatgtcatatagtaggaatcatatgattggcttctttcacttagaaatatgcatttcagttacctccatgtcctttcatgtattgatagctcatttctttacagtgctgaataatgttccattgtctaggtgcgccataatttattctttcacctactgaagagatatgttggttgcttccaagttcgggaaattatgaatcaagctgctataaatatcagagtgcaggttacagaacagatatatgtaatgaactcc

SEQ ID NO: 527584 - DNA, 231 bp, Homo sapiens
tagctcctaactatagtaagttgccacgagggtcccaggcagagctgcagagctggaaccggaggctccacagtccttgcctgctcataggacctaccttacagagcacctttctaacagactaggactagcccagctaccgtaggggtaggcatactaggttatctaggtagctaattctagcccaaggttaatacgagctacctgcgctcatagtattccaaacatttc

SEQ ID NO: 527585 - DNA, 499 bp, Homo sapiens
gatgctctgtatccggcatgtgctgtatgccagcggcagcccatcgctgtctactggtcgattgaacgagactgtccgaattgctgtacacccttcggttaccgagaccctggggtgctgccttgggggcgcagctggaggaggaggaggaggactgtaggaatggagtcacaaaggccttcacagaagtcacccagacatgagctgcaggaccctcacccttcccgggaactgccctggcccatgcaggccagacgggcactcatggcaaagaaatgccacgcagagaccaggtggtctatggctctggaactaagacggaccgatgggcgcggctacttcggaggtccaaggagaaaacaaaggaaggcttgcgaagcctgcagccctgggcgtggacactgaagaggatcgggggccagtttggcgccggcacggagtcctacttctccctgctgcgcttcctgctccttcttaacgcgctggcctacagcacatg

SEQ ID NO: 527586 - DNA, 207 bp, Homo sapiens
  misc_feature (30)..(30): n is a, c, g, or t
  misc_feature (99)..(99): n is a, c, g, or t
  misc_feature (108)..(108): n is a, c, g, or t
  misc_feature (149)..(149): n is a, c, g, or t
  misc_feature (169)..(169): n is a, c, g, or t
  misc_feature (179)..(179): n is a, c, g, or t
  misc_feature (206)..(206): n is a, c, g, or t
ctgaagtggagagatcgcctgagcccaggnggtcaaggctacagtgagccgtgactgcaccactgcactccaccctgggcagaggtggaggagacactnaagcgactncagagccagaagggagtgcagggaatcatcgtcgtgaacanagaaggcattcccatcaagngcaccatggncaaccccaccaccacccagtatgccanc

SEQ ID NO: 527587 - DNA, 840 bp, Homo sapiens
tggagcggggcaaatcgtttaaggtgtaaaagtaggccaacgggggaggacaaggtcccaaaacccagcctttctccggatgcccgccgggacctgtgtgccggggccagtcccttgcctgcccaaagcctggaggcccagaagctcccagagaaggagggggaaagaaggtgggggggtggcagctcagccccacagagtacagggaggaaacaaacaggggcgtagtggaattaagcctggtgaaaaatccatctcgggagtgtggaatccatgaagttcttcagaatctccggtgcttcagtccgtcgtgaagtgggaagccccagggactcctgtcgcgggtcgatacagtcatcttgtgccaccaggcggggaagtcaataaggggtcgcaggtcggacagttgggaagtcctcagggataaatcttcgtggggtgatggactcgtcagggtcatgggaccaccagggggaatccaccactccatcttatggatctcctgccagaggcaaagtacaccacctgggccgcctcaagggaggccaaagagtgtctcactccgaccgtcacacatcgatggaggaggtccccactaaaaggatgtcgcggggtggcccctgtgaagccccacccggagaggttgccgccagtggaatgtccaccacacaaggtccgtccccctttcagccggagaagttctcaacagaaagggggcccgtcaggccacagtcccgaaagggttcgggtccacagcggaaactgggacagtcttggcccgcgacaagagggggacaagacctaggcatcacaaacgccccaaatccaagaatgggtcag

SEQ ID NO: 527588 - DNA, 208 bp, Homo sapiens
caaacacgcagcacacacgttgcacacgcaagcacccacctgcacacacatcagtgcgcacacacacgcacacccccacaaatattggatgaaaacaatagagtatatctaacgcaaatacagatatcgtgtagtggatcagggccaagatgtccgcgtctttagtagtgacgcaggggtggggtgtacccgacgtctcgattcttcg

SEQ ID NO: 527589 - DNA, 2114 bp, Homo sapiens
agtttcccttccgctcacctccgcctgagcagtggagaaggcggcactctggtggggctgctccaggcatgcagatcccacaggcgccctggccagtcgtctgggcggtgctacaactgggctggcggccaggatggttcttagactccccagacaggccctggaacccccccaccttcttcccagccctgctcgtggtgaccgaaggggacaacgccaccttcacctgcagcttctccaacacatcggagagcttcgtgctaaactggtaccgcatgagccccagcaaccagacggacaagctggccgccttccccgaggaccgcagccagcccggccaggactgccgcttccgtgtcacacaactgcccaacgggcgtgacttccacatgagcgtggtcagggcccggcgcaatgacagcggcacctacctctgtggggccatctccctggcccccaaggcgcagatcaaagagagcctgcgggcagagctcagggtgacagagagaagggcagaagtgcccacagcccaccccagcccctcacccaggccagccggccagttccaaaccctggtggttggtgtcgtgggcggcctgctgggcagcctggtgctgctagtctgggtcctggccgtcatctgctcccgggccgcacgagggacaataggagccaggcgcaccggccagcccctgaaggaggacccctcagccgtgcctgtgttctctgtggactatggggagctggatttccagtggcgagagaagaccccggagccccccgtgccctgtgtccctgagcagacggagtatgccaccattgtctttcctagcggaatgggcacctcatcccccgcccgcaggggctcagccgacggccctcggagtgcccagccactgaggcctgaggatggacactgctcttggcccctctgaccggcttccttggccaccagtgttctgcagaccctccaccatgagcccgggtcagcgcatttcctcaggagaagcaggcagggtgcaggccattgcaggccgtccaggggctgagctgcctgggggcgaccggggctccagcctgcacctgcaccaggcacagccccaccacaggactcatgtctcaatgcccacagtgagcccaggcagcaggtgtcaccgtcccctacagggagggccagatgcagtcactgcttcaggtcctgccagcacagagctgcctgcgtccagctccctgaatctctgctgctgctgctgctgctgctgctgctgcctgcggcccggggctgaaggcgccgtggccctgcctgacgccccggagcctcctgcctgaacttgggggctggttggagatggccttggagcagccaaggtgcccctggcagtggcatcccgaaacgccctggacgcagggcccaagactgggcacaggagtgggaggtacatggggctggggactccccaggagttatctgctccctgcaggcctagagaagtttcagggaaggtcagaagagctcctggctgtggtgggcagggcaggaaacccctcccacctttacacatgcccaggcagcacctcaggccctttgtggggcagggaagctgaggcagtaagcgggcaggcagagctggaggcctttcaggccagccagcactctggcctcctgccgccgcattccaccccagcccctcacaccactcgggagagggacatcctacggtcccaaggtcaggagggcagggctggggttgactcaggcccctcccagctgtggccacctgggtgttgggagggcagaagtgcaggcacctagggccccccatgtgcccaccctgggagctctccttggaacccattcctgaaattatttaaaggggttggccgggctcccaccagggcctgggtgggaaggtacaggcgttcccccggggcctagtacccccgcgtggcctatccactcctcacatccacacactgcacccccactcctggggcagggccaccagcatccaggcggccagcaggcacctgagtggctgggacaagggatcccccttccctgtggttctattatattataattataattaaatatgagagcatgataaggaaaa

SEQ ID NO: 527590 - DNA, 171 bp, Homo sapiens
tagggccataatctctagtggccactctcccgtttcctttctccaagatcttaaccctgggccatttgaaccctagttacttctttcttttgttttgttttggtttattggtttgtttgttttgagacgaagtctcactcccgcctgggcgacagagcgagactctgtctc

SEQ ID NO: 527591 - DNA, 395 bp, Homo sapiens
  misc_feature (73)..(73): n is a, c, g, or t
gatccccgtcagggtttccagcaagggcaccctcatcccttgtgcaggtgagaggcggcagaccacgccgaancaggtcacgcgggccggcggctgatgaggtgttggatcccaggcccctctctcgcggtctctctcgtctctgccgtctctatctgtgtctgtctctgtctctctctctgtctgtctcggtctgcctgtctctctttatctgtgtctctttctgtctgtctgtctctgtctgtctgcctttctctctccctctctttctctctgtgtctctttctgtctgtctgtctctgtctgtctgcctttctctctccctctctttctctctgtgtctctttctgtctgtctgtctctgtctgtctgcctttctctctccctctctttct

SEQ ID NO: 527592 - DNA, 111 bp, Homo sapiens
cattcattgtctgctcgtggcctgtggctgcagggcaggtgcacgcctgccgttcccggcgccggcgcagcccagctggcaggctcatccatggacgtgtcatcttcgggg

SEQ ID NO: 527593 - DNA, 494 bp, Homo sapiens
  misc_feature (219)..(219): n is a, c, g, or t
  misc_feature (242)..(242): n is a, c, g, or t
attgttaaaagaaaaaagtaaggctgagcgcggtggctcatgcctgtaatcccagcactttggaagggtgaggctgaggtcaggagttcgagaccagcctggccaacacggtgaaaacctgtctctactaaaaataaaaaaagttagccagtcgtgatagcgggcgcctgtaatcccagctactcgggaggctgaggcgggagaatcgctcgaacccanaaggcggaggttgcagggagcanagattgtgccactacactccagcctgggtgacaagaacgagactccatctcaaaaaaaaaaaaaaaagtagcaaaaaattcaaacatagaggcctatagaataaaaacacacctcagatcacacacctttttttagaggtaacccctccaaacactctggattatatacccttcagaatttgtgagaagcacatgttcatagttagcatttggagtacctatgaaatgcccggcacatagttttgcttttgg

SEQ ID NO: 527594 - DNA, 207 bp, Homo sapiens
gttttttttcccccccccccccccccccttttgctttttttaaaccccccgggggccccagggtttttttaatgttttttcccaaaaaattttgaaaattggggttttctccccgttccccccccaattttttttgtacggtaaaaaaaccgtttttttttttctttggccccccccttttttatggatttttaagggggtggggga

SEQ ID NO: 527595 - DNA, 134 bp, Homo sapiens
cttgagctgtggtttccctatctatagaatgggaatcaatacctcatggggttgttgtaacggtgacaatttgtcacctgccaagagcagtggttggcatatattaagtaataaatggtgattataggcttttt

SEQ ID NO: 527596 - DNA, 884 bp, Homo sapiens
ggcacccctctgacatccggctgttcttctcacatgacaaaaatagcccccatctcaatcatataccaaatctctccctcataaagtaagccttctcctcactctctcaatcttatccatcatagcaggcagttgaggtggataaaaccaaacccagctacgcaaaattcttagcatactcctcaattacccacataggatgaataatagcagttctaccgtacaaccctaaaataacccattcttaattaacctaatttatattatcctaatactaccgattcctactatcaattaaactccagcaccaggacctatatatctcgcacctgaaacaaagctaacatgataacacccttaattccatccaccctcttctccctaggaggctgcccccgtaaaccggttttgcccaaagtggccattatcgaagacttcacaaaaaaaatagctcatcatcccaacataatagccacatcaccctccttaactctattctactacgctaattatccacctcaatcaaatatccccatatttaacaacgtaaacattacatggccgctttgaacatttaaaaaaccaacccaattcctccccaaatcatggccttacagctaatcctacttatttccgtttataataataatcttttaagaacacacaaagaaccaacaaacactgtggcgccccgcagaaaagtttacaccactgcgggggcgccaaggaggaaggcaacgggtccgagaacgcgcaccgggggttccaaaaaccgggccggcttgacaccgagtggcatggcacgcagagcaccgccgcgccgcggcccgagggccgcgccacgcgaaacggcagaccaacggcaacgcacagcacagcgccac

SEQ ID NO: 527597 - DNA, 250 bp, Homo sapiens
  misc_feature (239)..(239): n is a, c, g, or t
ccaggtagactaactgacgtgcttctgctttaaatattgtgaaaacattacagcggaatgaattttcgcagatggttaggtcaaattgcagttaccatcatatgcaacagtgaagtttttgcgacaatttaaaggcgtttggctggttctttagatcagcttcttcctactgattcttcattcttcatgcagtttctaaccacggttagccagctgattcacgctgggttaggtctacnctgggggtacc

SEQ ID NO: 527598 - DNA, 638 bp, Homo sapiens
actcgcctgatccactgtctgccagaaagtgcaatggtatgcagaggaggctggtaaggggacagaagccagagatggtaactggccaccacactggctgaggaagagagcagtgggctctcaatcttagctctcatgccaagtgccatcctcatcccaacatccagcagcgtcccccataatgtgcactgcctggcctgaggtaaatggagagctcacctaaggcctaaagttgaaaaggggctttccagagccccaggagtgctggacatctcaccagccatggaaagagactgtgtcctcgtggccacagacaggcaatgatggaagactgccctcatttcagggccttctggagtcctcagttgagggttcagctctggcaacagaggacacttctggtgtccaaagattctcggtgcctggtggatgtaaaaccgattgatggcatctgctggcttctggagcactgcttagccattcttatctgtgttccccagccaaagcactgtagaaagcttggtctctggctagcattctggactgttagacagcctggctgcagctagcactggatggagagagtacagtgtggtgaagtggggacagggggcattctgccacatgggctaaggttc

SEQ ID NO: 527599 - DNA, 1018 bp, Homo sapiens
  misc_feature (1018)..(1018): n is a, c, g, or t
attatcactatatttaataatcacagtctagagatgttcatgggtaaaagtactgccttgcacaggagcctgtttctaaagaaacccatgctgtgaaatagagaacttttctactgatcatcataactctgtatctgagcagtgataccaaccacatctgaagtcaacagaagatccaagtttaaaattgcctgcggaatgtgtgcagtatctagaaaaatgaaccgtagttttgtttttttaaatacagaagtcatgttgtttctgcactttataataaagcatggaagaaattatcttagtaggcaatgtaacacttttgaaagtaacccatttcagatttgaaatactgcaataatggttgtctttaaaaaaaaaaaagaaagttgtactggttaagggtatttactcttattcttcaatggcgtgagtagaatctcatacttctagaatttaccaatatatatatggtatagctggacagggggtacatgatttttaaaggtaggtagttaggggatatctttaggtagtgatagtagcctgaaccacattttagataactcaattatgtatgtatgtgcataacacatatagcaaaacactaatggtagaatgctttttatgtgctagactattatattaggaggatgccgattgtactaggcaatatcacagtttggaaaattacaaatcccccctaatttaatactccaatacttagcaacgagaaacctggcaaatggcctacaatagtgtgaagggcagatgaccataaatgaggaagcttgccagccgaccgagcacgcactgcccaacgacgtgaagcgaaacaccgacatcgggcgcaagcaagaaaaggaagccaggatataaatgggacagtaccaccagcaccggagaaaagagaacgacgacgacggactcgcacagaacgaccgccgcacccaaccggccacgcgcgccaccaaccgagacccacacaccagaaccggaggcgcacacggacgagcacgcn

SEQ ID NO: 527600 - DNA, 104 bp, Homo sapiens
aaaaaaccccggttttaaatgggggaatccgttggggtttgtaaaaacttgtatgtggggaagacattgttgtctttttgtgaaaataaaaatccccccctgga

SEQ ID NO: 527601 - DNA, 567 bp, Homo sapiens
  misc_feature (213)..(213): n is a, c, g, or t
caactgtattgcctatttgaaaattgcactgggcatggtggttcacgcctgtaattcccagcactttgggaggccaaggtgggtggatcacctgaggtcaggagttcaagatcagcctggccaacatggtgaaaccctgtctcgggaaacccctgtctctactaaaaatacaaaaattatctgggcatggtagtgcatgcctgtagtcccagntatttgggaggctgaggcaggagaattgcttgaatcccagaggcggaggttgcagtgagtggagacagcaccaatgcactccagtctaagtgacagagcaagactctgtcccaaaaaaaaaaaaaaaaagggaaattgctaagagagattttaaatattcataccacaaaaaaagtgaagtgatggatatgttaattagcctggtttaatcacatgtatcaaaaagtcatgtagtaccctgtaaatgcagttatttgtcaattaaaaatgattaacgagtttaaaattttttcgaagtgtaacatttttaactttttcttgttcaaataaagttttctgttttttaaaatcaca

SEQ ID NO: 527602 - DNA, 290 bp, Homo sapiens
ggggggggggggggggaaaaaaggggttgttaacccccccccatcttaaaaaaaattttttgggtttttcccccatttagaggggggggttttccaaaaaaaaaggggggtttccccccaatttttttaaaaaaattggggttggcaagtaaaaaattttgtgggttccccaaaaacttcctcatttaaaaggttttttcccgaaaaaaaatgggcaaaattttttttcccccaaccccctggggtttttttatttaaaaaacaaaaccccctgggggttttttctttga

SEQ ID NO: 527603 - DNA, 175 bp, Homo sapiens
ctcaagcggtgtcggggaactgctacgcgcaccccgttgaggttccttctcgccgatgaccccggcgcaggtagacaatcatggccggcctgtacgccaaggaactcatgctgcgcggcgatctgagtcggatgctcgtcatcgccccgggcagcctggtcgagcagtggcagga

SEQ ID NO: 527604 - DNA, 349 bp, Homo sapiens
  misc_feature (17)..(17): n is a, c, g, or t
  misc_feature (237)..(237): n is a, c, g, or t
  misc_feature (244)..(244): n is a, c, g, or t
  misc_feature (248)..(248): n is a, c, g, or t
  misc_feature (252)..(252): n is a, c, g, or t
  misc_feature (255)..(255): n is a, c, g, or t
  misc_feature (259)..(259): n is a, c, g, or t
  misc_feature (280)..(280): n is a, c, g, or t
  misc_feature (306)..(306): n is a, c, g, or t
  misc_feature (332)..(332): n is a, c, g, or t
  misc_feature (340)..(340): n is a, c, g, or t
  misc_feature (346)..(346): n is a, c, g, or t
acggtgggatgggaacnaaaagcaaggacaaaaagctgttcgggacaaacttggagcaggaggatgaatttgaggacccaaatattgatggggaagaggagaaattacaacccccaccccagggcaggcaccccttttgcccattttaagagccccccgaaaccctttttgccttttgcttttattttgcctttgcccccagggcccccgggcccctcagcacctgatgaaaaggangaaaaanattncgantcntagngccttttgccccccagaccanagccccttttagttggttttagttgntttggggggaggaaaaaaggtaaagntgtttttnaatttntta

SEQ ID NO: 527605 - DNA, 289 bp, Homo sapiens
acagctgaaaggcactggtaagacgtaagtgtaaggcttatatcctacgacaataatgtactataatattttatatactattgttgcttggacgagctccctgtccctgccgagtgatgctgatctcgctcatgcacttgctccaatcagcgattctgctagctcctgagtactggactacgtgctgcccccactgctattttgcatttagagagaccaggttcctacattgccaggtagtctccactcctgactcaggtgatctgcccactcggtctcccaagggtac

SEQ ID NO: 527606 - DNA, 153 bp, Homo sapiens
cctaacgtgaactgctcgctccagctccagcgccagcgcagctggttgccaggcgtcattggagaggcctggctagccccagtggcagcagggagatggtggacctgatatgggcgtggcagagaggcctattggcctatgctagacaaagtg

SEQ ID NO: 527607 - DNA, 324 bp, Homo sapiens
aaaagggctttttcccccccccccccccccccctgggacgtttttgggaaaaagcttttctgtccggtttaaacaaaccgtttgacatagctcgttggcaaggacattttgttaaaccaatctaattaaagggtaatatggggcccatttgggttcccgttgtaataatttggtaagtaaacttctgggggcaaaattactgtttaattttactcttaaaatgttgcatgtttggcggcattcctaagggccctgtaattttaaacttttaattgccgtttgtggatatgaaagggtttctgaataaaaatctttcccccttta

SEQ ID NO: 527608 - DNA, 2578 bp, Homo sapiens
  misc_feature (2025)..(2025): n is a, c, g, or t
  misc_feature (2036)..(2036): n is a, c, g, or t
  misc_feature (2164)..(2164): n is a, c, g, or t
  misc_feature (2264)..(2264): n is a, c, g, or t
gctgatagcacagttctgtccagagaaggaaggcggaataaacttattcattcccaggaactcttggggtaggtgtgtgtttttcacatcttaaaggctcacagaccctgcgctggacaaatgttccattcctgaaggacctctccagaatccggattgctgaatcttccctgttgcctagaagggctccaaaccacctcttgacaatgggaaactgggtggttaaccactggttttcagttttgtttctggttgtttggttagggctgaatgttttcctgtttgtggatgccttcctgaaatatgagaaggccgacaaatactactacacaagaaaaatccttgggtcaacattggcctgtgcccgagcgtctgctctctgcttgaattttaacagcacgctgatcctgcttcctgtgtgtcgcaatctgctgtccttcctgaggggcacctgctcattttgcagccgcacactgagaaagcaattggatcacaacctcaccttccacaagctggtggcctatatgatctgcctacatacagctattcacatcattgcacacctgtttaactttgactgctatagcagaagccgacaggccacagatggctcccttgcctccattctctccagcctatctcatgatgagaaaaaggggggttcttggctaaatcccatccagtcccgaaacacgacagtggagtatgtgacattcaccagcgttgctggtctcactggagtgatcatgacaatagccttgattctcatggtaacttcagctactgagttcatccggaggagttattttgaagtcttctggtatactcaccacctttttatcttctatatccttggcttagggattcacggcattggtggaattgtccggggtcaaacagaggagagcatgaatgagagtcatcctcgcaagtgtgcagagtcttttgagatgtgggatgatcgtgactcccactgtaggcgccctaagtttgaagggcatccccctgagtcttggaagtggatccttgcaccggtcattctttatatctgtgaaaggatcctccggttttaccgctcccagcagaaggttgtgattaccaaggttgttatgcacccatccaaagttttggaattgcagatgaacaagcgtggcttcagcatggaagtggggcagtatatctttgttaattgcccctcaatctctctcctggaatggcatccttttactttgacctctgctccagaggaagatttcttctccattcatatccgagcagcaggggactggacagaaaatctcataagggctttcgaacaacaatattcaccaattcccaggattgaagtggatggtccctttggcacagccagtgaggatgttttccagtatgaagtggctgtgctggttggagcaggaattggggtcaccccctttgcttctatcttgaaatccatctggtacaaattccagtgtgcagaccacaacctcaaaacaaaaaagatctatttctactggatctgcagggagacaggtgccttttcctggttcaacaacctgttgacttccctggaacaggagatggaggaattaggcaaagtgggttttctaaactaccgtctcttcctcaccggatgggacagcaatattgttggtcatgcagcattaaactttgacaaggccactgacatcgtgacaggtctgaaacagaaaacctcctttgggagaccaatgtgggacaatgagttttctacaatagctacctcccaccccaagtctgtagtgggagttttcttatgtggccctcggactttggcaaagagcctgcgcaaatgctgtcaccgatattccagtctggatcctagaaaggttcaattctacttcaacaaagaaaatttttgagttataggaataaggacggtaatctgcattttgtctctttgtatcttcagtaattgagttataggaataaggacggtaatctgcattttgtctctttgtatcttcagtaatttacttggtctcntcaggtttgancagtcactttaggataagaatgtgcctctcaagccttgactccctggtattctttttttgattgcattcaacttcgttacttgagcttcagcaacttaagaacttctgaagttcttaaagttctgaanttcttaaagcccatggatcctttctcagaaaaataactgtaaatctttctggacagccatgactgtagcaaggcttgatagcagaagtttggtggttcanaattatacaactaatcccaggtgattttatcaattccagtgttaccatctcctgagttttggtttgtaatcttttgtccctcccacccccacagaagattttaagtagggtgactttttaaataaaaatttattgaataattaatgataaaacataataataaacataaataataaacaaaattaccgagaaccccatccccatataacaccaacagtgtacatgtttactgtcacttttgatatggtttatccagtgtgaacagcaatttattatttttgctcatcaaaaaataaaggattttttttcacttg

SEQ ID NO: 527609 - DNA, 158 bp, Homo sapiens
ctctagaggatcgggtatgctgacaggtaagggagagtggtgtcgtgttgaagtcagaggagacacctggtgtcagtgtagccaggatgccttgagggggcctccgacgcctgcttcaacaacttcttgatgtcatcatatttgggaggtttttctag

SEQ ID NO: 527610 - DNA, 589 bp, Homo sapiens
ctacatatacaatcagctctgtacccagaacgactataacaagtaagcctttaatcttggccaactttattacatgaagacgataaatgattcgatatgtgatagagtgcataactatacagagaatgagacttatgccagaaatggagagcacgaatttgaaacaacatgaatatctcaggtacagattgctagattctagctatttgtttaggcctgcaaggcaaggtcatacagctattgaaaggtggattccaaaagcactatgagtcacccgtgctgattggcatagctggcccactaagagaaatgtccgttgcgctctacactactgttctcccgtgcttgataatcccccactaaaaaatgttaggggaaaaaaacgcagctggttatgaaaagatatatctcatttcattaaaaaatcaatgtcaatgctgttaatagaatccttttatcttcaggacagaggcaatgccctaaacaaacaccagctcaagagcctctgatgccaacctagagggtacccaaacacaaacttagcatagaggtaagaatctctatgtcttttggtggaggcaaagccatt

SEQ ID NO: 527611 - DNA, 172 bp, Homo sapiens
acgcagtcccacgtatagacgttagtcaaggtgtagcccatgaggtggcacgacaatgggctacattttctaccccagacaacctacgatagcccttatgaaacttaagggtcgcaggtggatttcgcagtaaactgagagtagcgtgcctagattcagggtcttggtgcgg

SEQ ID NO: 527612 - DNA, 1629 bp, Homo sapiens
  misc_feature (516)..(516): n is a, c, g, or t
taggccaggtgcaggggctcacatctgtaatcccagcatctctgaaaggctgaggggggcgggatcacctggaggttggggatgttcaagggaccacgcctgggccacgcatagtggaaaccccggtcttctactggaaatatacaaataaattacgctggggcatgggtggtgtggggccgcctggtatatccgcagctactgtgagaaggcttcgaggcaggaagaaatgcgttgaaaccgtgggaagtgtgggaggtgtgcagtgtgagcccgagaatgtgcgaccagtgggtatttccacccgcgggtgtgaacaggtgcaagaacttcacatgtcttcaaaaacaaacaacaaaacaaatgtgtgtggacgatctctatttcacacagatttctacatataagaatcttaggtgtggtagaagggcgctttctcatacgtgtgagaagatgtgtgtgggggagatatatgtggggagacttctctataaatgtgtggtatacaccccccangagaaaagacggggagaaatttaaagcgctgtgtgggtattctgtattgtatagaacaccccatgtgtatcgcgcgctgttttacacttatatatatctcgggtggggtaaaaaattctccacgtgtggacacaatctcctataaaatagggcgagaaactatttggcacagagatataaatgtttgatttgtgatcccttttagagagagatatagacttagagaagattcccgagagtgccatataaagagggggggcacccctataggggaagcccgcgggggtgtgaaaacattttcgcgcggaaaagaagcaattaaacatttgcgaagtgtgtgttgtgtgtaacgccccaagaggttttagtacataaccttcgatcacacccgcacagaagtgaggagggcgggcccattgttctgccaccaacacttaaatagtgcagcctgcaaggggcggcagcccgccgtggtatactacaacaaccgcgtgtgggctatacagcgacccgccaagaaagaagagaacactaaccaactgggccaaagagggcgactgaggaagacagaacacatcaccagacactgggaggcgacacacaaagcaaggaggacgtggcgggcccacacaacagagagtagcgaccgcctgtcagaccagtaatgtcgtccagccagtaagagaacctagaaggggagcgctgtcagcccaggcatattttagcgccaaaccgggacacacatggggtgttgaccccaagaggataatattcccgcgcagagagaaaaagattgataacggccaccagccaacaacagcgtgggggtgaaaagcacccccactgaagaccgctagaaacgacgccggggagagggagaacaagcgaaaaagcaggaccaggcttctacaaaacaggcggcccgcagctgagccacaacagagtgagggggcccacacaccgagggtggaacacatcaggagtagcaaaacgaagtgtaggtgacacacaccacatctgagagagaagaccgagacagcgcagggacgagaaagtacacaagcaagaagaagacaagaggtgacggccgcatccaacaaacacacagcgcgg

SEQ ID NO: 527613 - DNA, 258 bp, Homo sapiens
gtgactcaccgatctctatatgctgtctcatgtacacacgtgagtatacagtgttactaatgtcttgattttgcactgccatagggaatgttcaggttacttggctggaatttatcagacttgtgagtaaacaagttgaagtttaaccagatgaaggggaatattgagggccctaagggtaaacaaaataatcagtatctgagatagtggctaatggggctccccagggctaattagggaaccgttattcctgattgc

SEQ ID NO: 527614 - DNA, 314 bp, Homo sapiens
ccttagtctctactaaagatacaaaaattagccgggatggtggcatctgcctgtagtcccagctactcggaaggatggaaaaggagaaatgcttgaacctgggaggcaaaggctgcagtgagctgagattgtgccactgcactgcaccctgggagtcagcaagattccttctcaaaaaaaaagaaaaaaaaacaaacaaacgggtattattggtgaacaattaactgtccatattaaaaaaaaactccgacagattctacaaagtaagaattaagatggctagacacaagactaaccaatttcagggctgtgga

SEQ ID NO: 527615 - DNA, 228 bp, Homo sapiens
acccccaccccttgttgggttttttttaaggggggaaccggaggggccccaagttattcctttccccatcccgcttttccttgaaagcttgaggaattgaattttttttgggaattttgttaatttggtttggttttttgttgtttccaattccaggaattttccatttttccctttgggggggattcttgaggaaaggagggccattaaaaggggttaaacccttga

SEQ ID NO: 527616 - DNA, 956 bp, Homo sapiens
  misc_feature (528)..(528): n is a, c, g, or t
  misc_feature (553)..(553): n is a, c, g, or t
  misc_feature (561)..(561): n is a, c, g, or t
  misc_feature (578)..(578): n is a, c, g, or t
  misc_feature (580)..(580): n is a, c, g, or t
  misc_feature (582)..(582): n is a, c, g, or t
  misc_feature (661)..(661): n is a, c, g, or t
  misc_feature (664)..(664): n is a, c, g, or t
  misc_feature (771)..(771): n is a, c, g, or t
  misc_feature (823)..(823): n is a, c, g, or t
  misc_feature (825)..(825): n is a, c, g, or t
  misc_feature (835)..(835): n is a, c, g, or t
  misc_feature (845)..(845): n is a, c, g, or t
  misc_feature (850)..(850): n is a, c, g, or t
  misc_feature (877)..(877): n is a, c, g, or t
  misc_feature (884)..(884): n is a, c, g, or t
gacaactccctgtcacctcatgactgcaggagcagactgtgtcatactctacccccgtactgaaagtgctggcgtttcgcagcaatagtccggattccgaccctgtgactatcctagcttcgctcttcttatcgctgtccaggggccaccccgtatggcgtgtcccctctgtacgatgaacgaacatgatgctccgtgcacgccatgcctgcactgtaggtgccatgatcgggatggagccccacatcgatggtgccagctgtcatggaaggctagtctgtacaccctaaggcgagccatgatcgactaggttccgagcacattcttgcatggaagcacgttgtcttcgagcgtccttggggagcaggattgctccataggaatcggtacacgatacgatcttctgccacaagaaaatcgcatttgcagctgcgcgctcaagtcattaaccatagcacagtgcacgcctgtctagcagctgaaatgggcgtgagccacgttgaagcatatcctaaggaagttgttcgntactaacgctgatgaagcgattggntcccttgncgatacggagcccatgntntngtcacggcatgggattctcacgcgggtatcgcgtacgtggcctgacacgcatgggatacgccagtggcctgccgtcccntgnctatgacatagacgttgtgatcctctccgggcgtagataagaggcgtttgccctgtgtgtcccatgttgaccacatccgcgaggtactagcaacccatgtctttccntctgcgctaggggtctcatcacacatttgccatagggacactgcgttgtggncntctacaggantccgagtccntgggncgtatcctatgagccccttgtcgtaangcaccanatcgagacgacggatgttgcgcgaaggactactatagcttcgcgatactatgctcattagcatagaggtctt

SEQ ID NO: 527617 - DNA, 939 bp, Homo sapiens
ctccaggccctccccttcgctggtgctggttcctcatccgtctcgtgctctccggggccctccccttagctggtgctggttcctcatctgtctcgtggtctccggggccctccccttcgctggtgctggttcgtcatccgtctcgtgctctccggggccttcactggtgctggcacacggcacagcaggagaccaacaagaccattgcagccagcgccagctccgtgaagcagatggccgagctgctgcgcagctcctgcccggagcgtctgcagcaggagcgtcctcagctggaccggctgaaaacccagctctcagatgccattcagtgctatggagtggtgcagaagaaaattgcagaaaagtccagagcgctgcttcccatggcgcagaggggcagtaaacagagtccccaggccccgtttgccgagctggctgatgatgagaaggtctttaacgggagtgacaacatgtggcagggccaggagcaggcgctgctcccggacatcactgaagaggacctggaggccatccggctgcgggaggaggccatcctgcagatggaggtgaggctggcgtgggcaagcgtgctcactctccacgctccacatgaggctgggaaccagaggagccaggtgcagcctgcttgcaccatttgcttgcccttgacctggaggggctggaactaggcctccatgggcttgcccattctaaaccacctctctctggcatctggtccataaggagagacgggcatcttggagcccatcccattccctcttcctgggtttcctaataggacagcctctggccagagcgggttttgtggggtacccccgccacgccctcttgcgttgttccaccccgaaggtcctggaaaaagggcaccccccactttgacggatctaccccctggcccccgggggccggcaaagctgc

SEQ ID NO: 527618 - DNA, 325 bp, Homo sapiens
  misc_feature (179)..(179): n is a, c, g, or t
aagcaaagcacacggtggtggtggcggcacagcgacggtggtggtaataactaccatttatccaacttcatcctgtggttcttatgtgccaggtattgtgctaaatactttatgtggattgtatcatttaatccagacacagggttgtgagagtaataggtgctgttatccctattttnctgataaagaaacagtcttatgtagctagtagggcagaaccaggattcaaatccaaggagtttgactccctaccttattcttctaaacactactctattctattttgattttgggtcctgagcataccctttcttttgtcttccct

SEQ ID NO: 527619 - DNA, 873 bp, Homo sapiens
gcggccgcagcatggacccttcctgcctcctgcccaccctcccctctgctgggtgctcccgggcccctacacccccacttgggacctgatgcgggggggctgatgacactggggactgacgtctgtggtctttcccaggtgaccggcgcctgggaggcccagattgatgcccagtgacaggctcgtggccgcagaaggcccccgcctcagacccagatcgtcccctcagagagcagatggggatagtgaagggaaaagcaccattttgttgaatttctgggcctgggttgtggtggtaatgggaggggtcagtgctaacaagatctgtctgtcatcagcagagtccccaggccccgtttgccgagctggctgatgatgagaaggtctttaacgggagtgacaacatgtggcagggccaggagcaggcgctgctcccggacatcactgaagaggacctggaggccatccggctgcgggaggaggccatcctgcagatggaggtgaggctggcgtgggcaagcgtgctcactctccacgctccacatgaggctgggaaccagaggagccaggtgcagcctgcttgcaccatttgcttgcccttgacctggaggggctggaactaggcctccatgggcttgcccattctaaaccacctctctctggcatctggtccataaggagagacgggcatcttggagcccatcccattccctcttcctgggtttcctaataggacagcctctggccagagcgggttttgtggggtacccccgccacgccctcttgcgttgttccaccccgaaggtcctggaaaaagggcaccccccactttgacggatctaccccctggcccccgggggccggcaaagctgc

SEQ ID NO: 527620 - DNA, 312 bp, Homo sapiens
tgagctcggtaccccagagtccaaacagggcccctccttgtaagttcatatttcaagttacatggatcatgccataaataaaccacacttgctttaacatggttcacaatggtgcatttaacaatcggacatacagctctgtaaacaattcagaggccattgagcttaccatgaagaaactgacacgtatgtaggaaccgtgtcctgctgcacacaagcacctgctctggctctggtgcggtgcagctcggtgcggtgcggtaaggtgaggtgaggtgaggtgggcaggtgtggaagggacaattcctgagg

SEQ ID NO: 527621 - DNA, 926 bp, Homo sapiens
gtagaaataaaaaagaatacacaagcctcaaataaccaaaccccaaacccaaccatttgggaaattacgaaatgctacctcttgaaaactttgtccatttatttgcaataagtctaacaaaccctctcaagaggtggtgctcaagggagctgtgcagtgggtttggatgaatgtgcaaccaacgctgaacaaacatccctattaaagggcgtgttgttccaggttacagtttctctcaagctaagggcagatcctttctctcaaagacacaaactggaaagccctgactcaggtgcccaaattaggtttgtggggtggtgggtcaaggattggaacggacccaacaggacagaagtatgagatgggacagcattcttggcatatccagagggagatgggttcaaggaagcaagatgaagttcgggcagagaagctgctacccttaagaaaaagctgaccgggcacagtggctcatgcctgttatcccagcactttgggaggccgaggtgggcggataccctggggtcaggagttgggaacaggctgaccaacatgagaaacctggactctactaaaaatgcaaaataacgtacggcgtggtggtgtatgcctgagatcccagctaactagggaggcggggcacgaaaataggtgaagcctgggaaggggagttgcggagctggaaatgagccatggatcaggctgggcacaacgagcacacctgtccggacaacaaccacacaaacagaaacaacacaaattggcgcggcacgagacataaaccactagtgcgcgggacaaaaagcacacacagcaacaaccgcagcaggggacacaaaacacgcgcggaacacaggggacgtcacgaccaacacagggcacggaagaggccaaacagaaacaaacagaccgaggacacagaggac

SEQ ID NO: 527622 - DNA, 264 bp, Homo sapiens
  misc_feature (140)..(140): n is a, c, g, or t
atttgcaactgactggattgatgcttgataattctcttaagtagaacacaatgaaataatagtggctggctaagttccatcaattgtttttaattctttttgactttttctcgcggtcttctgttatcctttctgcaggncgcttcttcaaccccttcattttcctggtttggaagttgcttaggtcttgcttctgcatatgaatccttccattaagtgtaccaaaagtatcatgggaaatatttttcttcttctttggcttga

SEQ ID NO: 527623 - DNA, 1256 bp, Homo sapiens
gtgctggtgtcaaggctgagcaagcaccaccagctgctgtttggcacggggctgctgaaggccgagcccactcgcaggtaccgcgtgtggagccgcatcctgcaggccgtgaatgcgctgggctactgtcgccgcgacgttgtggacctgaagcacaagtggcgggacctacgagccgtcgtgcggcgcaagctgggcgacctccggaaggcggccatggccccagccctggttccggcaagccccaggccctggctctcacgcccgtggagcaggtggtggccaagaccttctcttgccaggccctgccctccgagggcttcagtctggagccgccagagccacccaggtcgatccgtgcaacctccaggagctgttccaggagatgtcggccaacgtcttccgaatcaactccagtgtgacctccttggagcggagccttcagtccttagggacaccgagtgacacgcaggagcttcgggacagcctgcacacggcacagcaggagaccaacaagaccattgcagccagcgccagctccgtgaagcagatggccgagctgctgcgcagctcctgcccggagcgtctgcagcaggagcgtcctcagctggaccggctgaaaacccagctctcagatgccattcagtgctatggagtggtgcagaagaaaattgcagaaaagtccagagcgctgcttcccatggcgcagaggggcagtaaacagagtccccaggccccgtttgccgagctggctgatgatgagaaggtctttaacgggagtgacaacatgtggcagggccaggagcaggcgctgctcccggacatcactgaagaggacctggaggccatccggctgcgggaggaggccatcctgcagatggaggtgaggctggcgtgggcaagcgtgctcactctccacgctccacatgaggctgggaaccagaggagccaggtgcagcctgcttgcaccatttgcttgcccttgacctggaggggctggaactaggcctccatgggcttgcccattctaaaccacctctctctggcatctggtccataaggagagacgggcatcttggagcccatcccattccctcttcctgggtttcctaataggacagcctctggccagagcgggttttgtggggtacccccgccacgccctcttgcgttgttccaccccgaaggtcctggaaaaagggcaccccccactttgacggatctaccccctggcccccgggggccggcaaagctgc

SEQ ID NO: 527624 - DNA, 1349 bp, Homo sapiens
ctcagacatcccctcaatcccccctctgttttgatgggtcttcaaaaatacctaagtcctgggcttggttcgggttggcagggcaaggactctagagtggggcagtgaggcactggcctgtggggcagaattttaaaggggtgccaaaacactcagtaactcagatcgatactattttaatgcagcgtgttttttaaaattaattttaaaaaaacatgttggacaaaatatccaagtttaaatcaagacagagtctgactttgtactgcacacttggcctcatttgccttaccctagtcctggacacgtcagctcctgcctttatttaaaatgttgatagatattttgttcatcagggattggagtacaaaccagtctgatatgggggtcacttggatttccctgtgaaaatcatgaatgactgtggctaccatgtaaaaccatccctgattctttggtgttcctcaaattggaggtctccaagccacagagcaaggggttgtagagagaggagtactggacagggaggcaggtgggccaggttctagtcccagctctgcctgtaatgtgctgagtgacccttcccttctgggcctgaggctcttcatccataaaaggaggtaaagaggtacaggtgtgtgtctgagggctcttaggactgagacccaaagggactcttagctctgtccctcacccactatgagctcctgctgctgactggtttcgttagaggaagttctgctgcggctgcagaaacccagaaggtagagtgaggcttacatggcattccccccagaatccatgttaaccccaattctgggaaagatatttctaatttttgaaggtcaattctggaaggagcattgggttcaatgtcaagaggactagattccagtgttagttctgccacatgaccttggtagcatgatcttggacaagtcacttcaccaccatgggcccatttgcttaaatgtttaggatgagactgccagctgcagggtgatgttggaaggagagatgcagattctggagccagaaagtctgggttccagcccagggcccaccactagcagctatgaagctctgggccagttacttgagttcttggtttcctcagctgttaaaaggaaacacaaataatacacccctcataggattactgtcataaatgcaaaacattagcacaacgcctgttaaaataattgcccaatacactttagctatattttcattactatcattagtattatcttctactcttatcaggatttgtgaagatcactgtgtcaaatggatgggaaattttattttaatataaacagtaaaatagcattgttttcacttgcaaa

SEQ ID NO: 527625 - DNA, 142 bp, Homo sapiens
  misc_feature (12)..(12): n is a, c, g, or t
  misc_feature (14)..(14): n is a, c, g, or t
  misc_feature (39)..(39): n is a, c, g, or t
  misc_feature (86)..(86): n is a, c, g, or t
  misc_feature (112)..(112): n is a, c, g, or t
ggggaaggcctnantctaacttgaaacgtgtgggagaanccgactccggaggtgtcgtggtggctaaccctaagagagaacgaagnacctgaacgcctcccttgggcttacngtagatagagcctacactggtagattttat

SEQ ID NO: 527626 - DNA, 207 bp, Homo sapiens
atggatatactattagtcgttgacgggatgcaacaaagtgtgtgccgcacgtaagcctgagaccagagatctgaagtaaatactatcgggtactcacttccggaccctcagacacaggactattataccttctgtgatcatcatttcctctcctatagacatttctgtaccagtcgacactgatcttgggaaacttgccccttattt

SEQ ID NO: 527627 - DNA, 152 bp, Homo sapiens
ccccattcaggaccccattcaggacctcgacctctctcaaagggttccttcttccctctagtgtctgtgagagattcactaggaattcctgtatcagttccctttctatcagttcaatcatttcttcatctcttcagttccaaagccatacc

SEQ ID NO: 527628 - DNA, 209 bp, Homo sapiens
aaaagcagtcttgcccactaaaaacgctacatagtgtgtatatttgttcagctaagaattggaaagtatttgcttgccttttaagttactgacatcagcttcaccagtgtaaaaattgagtaaaacctgaagtttttgccataaaaatgccaatcgggtgcctggtgctttgaaagggttggctagtaagaaagcaattctttttgtga

SEQ ID NO: 527629 - DNA, 319 bp, Homo sapiens
  misc_feature (23)..(23): n is a, c, g, or t
ccccccttttttttggggcctantgccctcctttgcccaggaaatggggggggtttaaccactcagtgtccccaaataaaatccagtgtggagggccctttggtgtgtagggggccttttggaaacctgggcaacaaaatgccccctgccccccgggcaaggggccccgtttagggtttccccccccctggttagccgatgtccacccctgggactttcctgtcagtttccacccgatttaaagctgggtgcctggccaattatttatactggggtttccttttgcctgatttaaaatgggatttgtttgcccccctta

SEQ ID NO: 527630 - DNA, 448 bp, Homo sapiens
  misc_feature (53)..(53): n is a, c, g, or t
  misc_feature (68)..(68): n is a, c, g, or t
  misc_feature (308)..(308): n is a, c, g, or t
  misc_feature (313)..(315): n is a, c, g, or t
  misc_feature (320)..(320): n is a, c, g, or t
  misc_feature (322)..(324): n is a, c, g, or t
  misc_feature (346)..(346): n is a, c, g, or t
  misc_feature (364)..(364): n is a, c, g, or t
  misc_feature (444)..(444): n is a, c, g, or t
tggtacttctttttctctatgtatgcaggtgtgcacaatatactgatctctcncaggtaatggtagcnaccggtatatatcttgggttgcagattttttgggggctgttagggagatgagcaagtgtggctggatccctccagcatttcccttctccacgtcccatcctgagggaatgttgatgctggcaatgggcacagtgagttccttcaggacacttaggatgctgtggaacggttcccgaacatcgcccttgaagctgaagccaaagatggcatccaccaccagcccatacagttcatcaatcntcatnnnctctncnnncatttccccaaggaaagggatnttcattttctgacactgngtcaccaatgcagttaagaggggcttgttaggccttttggggtaatagatggttggctcgtagccaaagagtttgaggtntcga

SEQ ID NO: 527631 - DNA, 435 bp, Homo sapiens
ccagggccctgctccccggggaccctcccggcagaggcctttgtctggctggctgtgatgggtcctgacaccccatctgtctgtctgtcggtccacctaggtgtttccccccgggccggcctgccgtgacgatcacagccctgccgtctcaggtcacggttttggattctgcgctaacgaggtctcccaggtgggctggaaacactgatgaagacggatagaaaaaacaccagcccaccggattattaataaagataatcacacacaccccttcgtcggcagccggcctgacactttataaagcacgttaggatataatccaattgaaactgcaatatcgagaacatctcatcttatcacaaattgaaattatatcacattcctcttttcttaaattaaaaagctaaaaccttttcgtttgctctcaaaaaaaaa

SEQ ID NO: 527632 - DNA, 228 bp, Homo sapiens
agagaaaagcggaggcagcagcaccaggagcagaatgtcctctaagaatgcggcagcagcctggcattgagcttcccgagacagaactgagttttagagtagggaagggacagaggaggaattaatgatgaactggtagtgtcagcctcctgtaaggaaccagagcaggaaccagtgccagcacagttccagaaagtaaagcccccaaagaactaatcataaacgctg

SEQ ID NO: 527633 - DNA, 422 bp, Homo sapiens
  misc_feature (19)..(19): n is a, c, g, or t
  misc_feature (21)..(21): n is a, c, g, or t
  misc_feature (37)..(37): n is a, c, g, or t
  misc_feature (39)..(40): n is a, c, g, or t
gcgtgtcaccgaggtccangncccagcgtctggcagnanngcagctgggactcgagggcgagctgcgccggctcatggccaagcccggtgtttccccccgggccggcctgccgtgacgatcacagccctgccgtctcaggtcacggttttggattctgcgctaacgaggtctcccaggtgggctggaaacactgatgaagacggatagaaaaaacaccagcccaccggattattaataaagataatcacacacaccccttcgtcggcagccggcctgacactttataaagcacgttaggatataatccaattgaaactgcaatatcgagaacatctcatcttatcacaaattgaaattatatcacattcctcttttcttaaattaaaaagctaaaaccttttcgtttgctctcaaaaaaaaa

SEQ ID NO: 527634 - DNA, 248 bp, Homo sapiens
ctctagaggactcccgggactgggacgatgtctgagtgacgacgctcacgtcaggggaagtttaagtcagcctcagtttccacatccataaaaggggacgatttccttacccggccaggagggccccgtgggtgggagagaggtgtatgggctctgtgggctctgtccttggttgaatggccccagaggggttgcagctgggcgtggcggggctgaccaacgggaagtaccttcatcagtgccagagc

SEQ ID NO: 527635 - DNA, 231 bp, Homo sapiens
gcgtatgcatggctggaaatgtaaattttttaaatagttgaacttgtgactctgatacctttgcctttgttatttgtcagtacagtggagtataatttacagaattgtcaaaaaggaaggtgtaaagaaagcagctccaccgattttttaaagatttttttccctctaaaagctgcaaactttacctttaaacaaatacacggtcttttcagactactgaaattgtcataa

SEQ ID NO: 527636 - DNA, 356 bp, Homo sapiens
tcagtggagggtggctggataaaatgtggagcccgagtcgggcaaagaagggcacctgtggggaagcaaagattggttaggaagggggatgaccaaaatagacaatacattgaagataatggaagccagatatgtcacaatgagtgagaaaacggatgcaggactatttgaagagcagcttcctgcaagctcccccaagaccccacgtagagtgttcaccgtgctgatgatactgcagcaaacagggccttgaggagatatgagaaagcctgtttctgctcatgctaactgctacatgctcccatttcaaggagaaatatttcttcaaaagtgggttcttgaactcacaaatttgg

SEQ ID NO: 527637 - DNA, 995 bp, Homo sapiens
gaatggatcaaggtcgaggtgcagctcagatggatctgatccttggctgactacggcaagaaaaacaatgtgaacgtggcatcactgacatcaatcagaaattgctgacgcacatcatcctggggtatggacgatctcggcatccgtcacacgggagcggcagcagatcgctgagatcgataagcagaccacggagacattcgcagactgactggcagacgacagattcgcactgtctaaacaaggctatgcgccgtatgaagatcatcacctccatccaaggcatgggaactatggagacccagagctttctcatccaagactgaggttggtagtggtcagggccatctctgctgcacagacctgacagactaatggaccatagtcatcatctatgtttcgatctgactgatcatcaaggtagatgtggtctaggacctatgatccttctgcaagaatgtgcttaagaagttcagctgtgtatctgatcttggggcccatgttgcgggatacctatctggggtgtgcccatcggataacccccagggtgtaggtgatccgctgcattgtgatggtgccgccgtggggctctcaccattaccgtgcggctctgctctggccagctggccccagcatgagtcctcaggggatggaatccttatgttggatccctactcagccgtgtgagtccccgtcggttgtcccccggtgtctgcgcccatgctagatctggtgacatccatcgtgggatggggaggtgaccctttcatccgtgcgttccgcagggtctgtcagtgagggcttagttgccccgggtcgatgggccgccgacccacaggcccacccaggcgactgcttccttgagggctggggtcgcggcctgtttcggcccgcctggctcttgggttggtgcccgtggtcgtgccattccggcgccccttccgggggggggggtctctttccccccccctttgtttttggtcgggtggtgttac

SEQ ID NO: 527638 - DNA, 386 bp, Homo sapiens
taggggcccccctttttaatggtctcggatggcccaacccgccttcggggggttttttgtcccacttttgactttacctgggggggggccctgttccttattatccccaaggagaaaaaaacccttgttaaaaaagccaaaatgccccccgaaaacccttttttttccgagccttcccgggaccttttttggggagggccctaccgggcccaaaaggagttgggttggatgagagggttaaaaaggcccaaaataaaagggttttttttttttccctttttggctaagaaggtgcggttttttttttttggcccgtttgagggatgggggaacccatgttggccccccataacccgggatttttttttgttggggtgttttcccca

SEQ ID NO: 527639 - DNA, 329 bp, Homo sapiens
ctgctggtggcttgggacatcaatggggccaaaggttttttgtccctgggtcaactgtgatttggctttcccgggtcttttctggggaagccctgtttggggttttgtgggtttgggtgggaaaagggccatttgcctgaatgtaacctgctagctttccgaaggcccttcgggcctgggttgtgttagggtgtggacaatggtggcccccctgggcctgcttgtgttgcctacatgtccctggctgtttagggggtggttcagcctgcccccctcccctgttttataaatggtccttttgacctttttaaataaatatggatggggga

SEQ ID NO: 527640 - DNA, 799 bp, Homo sapiens
cggccttttttgagcttttcaaggtcgatcgagtgatgctgcgcgccagccccgtggggcttccggtgtggtttccgctttcttggggaggaactgtagccgagaaggttctttcttttggcccaagtccttttccctccctttggaggatataggagccccaggttcctgggatgccccaatctgccatcccctcgttttgtgtggccacccacgcccgaccgttttcccatccaggcgcaccgtggtcagccccccttatacccaagtgcccgtattcagagtgggataaaaatatatctccctgaactccctcgctctgaggaaggtattttcttctcacgagctcccccaagcctggagttgagggacactggcttaagttgggaaccacgtatagcccaaatgtcccgcttgttgaaactgaaatttgtgagttatcttcgttttgcctgccagaagtcactttgagggctcgttgtatccctatctaaaggagaatttagagtagggcccacatataaagggggctgcaacgtagttttcacttacggagaaaagagagtgtgaggcacgcccctttagtaattgagtgcctcccagatgtggtattcaccccacgcggtgaagggaaaatagttggggctgctggattctgtgaggtttacaagaagacctttacccctcctgagaatcagattttgctggttggttttcagagaagatgtttgcacctgcctgagaaggaatctacacccctgcactttagcctgggcaacagagcgagactttgtttcca

SEQ ID NO: 527641 - DNA, 360 bp, Homo sapiens
tactgggttcctatactgacgagtaatcgttggctcctacttgattgcacacggtttcttcagcgtctatgcatgtgtgtggacacgctgttacatactgaaatataggaggacctggagaggaatgacggctcggccgagaggccttacttcatgtcttccaccctcaagaaactcttgaaacaagaacaacacgaaggcagcggagtcctgaaggccccgatgactaccccacctctcaaggagtctcatgccgcagggtgctcagtaactaggtctgttcccccagccccttgggctcacctgaagtcctatcactgccgctctgcccctccccatgagccagatcccaacagtttc

SEQ ID NO: 527642 - DNA, 404 bp, Homo sapiens
gtcgacctatctcatttgctccctttgcagtagaaattatttccattttacaactgaggcttagagaggaggtgattgctagaattacacaattcctaagagaattgctctaaggtctccaactgtcttttaggaaatctatatttagcagttgcttgatatagatttcctaaaagacagttggagacctatatcaagcaactgctaaatattcagttctctgtgtgttgctgccagaatgatactaacagttcctgtttctgtggcatctcctctgcccaggcaggtgttggccattgaacatacatgactttgtttcagctcctcgacaatgtttgaggtgcaagatgctacagttcccatcacatccaaggaaatgggcacagactgggaaagtgacttgc

SEQ ID NO: 527643 - DNA, 116 bp, Homo sapiens
gcagcgcgatatctgagtgaccttctttactcgaggcgacgtttttcgcatttattcaccctcgcccgtggcacgagtccccagctcggcgccgaaggccttcaaggctgggtcat

SEQ ID NO: 527644 - DNA, 126 bp, Homo sapiens
cctcaagtggcgcgtgtgatcccgaacacaacacctcaggcggtccgcaggtgggcggctgatgggcagcttccggggcgtttcgtacgccttctgggcggtggcaggtgccgtgatcagccatca

SEQ ID NO: 527645 - DNA, 196 bp, Homo sapiens
  misc_feature (56)..(56): n is a, c, g, or t
gagaagacccggatagttcctcccggccacgccgcgccggctctgggcactcagcntcgttcccttttcctccgtgggtgcgctatggcggcggggaagaccctgaacccctgtgccgtggtggcccgagcgctggcggtgctggcggtcttcctccgcgcagcgcgggctctgttggacgtgcttgggaccaccc

SEQ ID NO: 527646 - DNA, 459 bp, Homo sapiens
attctggaacagagtgatttacaatattggtgagctaccagagattagttctagtttcagctcttccactatatggccgtgtgactttcagcaagttattagttcttcatgggcccataattccctgatctctaagtgaagatggaagtaattaggaggtttaaaaattttaactaaaaaatcttttgtctttttcaaaattaatcttatatagagcccctaaatttagatcaggtaaagtcctgattgctgaggatatggtgggagcaggaaccaaatcctaagcttattgaacgtacccatgcatcatgatttcaaagtcaaggggctaaacaaatttagggacacttccatgtgtaaatttattgaggtctatttttcagtgggaataatctgatttactttcagtagggaaatctctatttgctcaaaaatgtcaagttgatactaaccaccaaa

SEQ ID NO: 527647 - DNA, 250 bp, Homo sapiens
agaacgggtccagaaacggttggttcaattggccatttaagtttagtaggaaaaggcgggggtatgaaaacaagggcctcggtaaaccttcccgaaggaaaggagaatgttttggggccccccttggttttttttttggggggggcaggtttaaggtattaggttttaaaaacaggactttttaaaggaaacaacttggccaaaaatttgtcccaaaattttgaggccccttaaaaaaggttaatgggga

SEQ ID NO: 527648 - DNA, 302 bp, Homo sapiens
tcttacaccccatactcacactactagcccactgattcagagagctagaggtctccaagaacatgggacaaacgtccctctacagctatagacatagctataacaacgtaacagtcactctgctaggcccagtagctttgttgttcgattcagacagtaaaagaaacattacagtttacaaacactattctcaactagagtttggagcagggcaaggagatactcaaatgttaaagtgtcaatatttactgataagtaggagaatatcgttataatgggattttgaaaaattaaaagtcaca

SEQ ID NO: 527649 - DNA, 155 bp, Homo sapiens
ggtcgtgtttggaaatttacgtgcccgtctggctctcttgtgattgccgtcttcttcaaaacagaccttccccacttcggctcccatgattgtctcagctcttccccctggctcacaagccctgcaggttgtccctgacctctccaagcaaggta

SEQ ID NO: 527650 - DNA, 1067 bp, Homo sapiens
cactatgcgtctgacgttttacccttcacagaatctttagttctggactgcagttgagtggaaatgggcaacggcgggcggagcggcctgcagcaggggaaggggaacgtggatggggtggcagcgactcctactgctgcctcggcctcctgccagtacaggtgcatcgaatgcaaccaggaggccaaagagttgtaccgagactataaccacggtgtgctgaagataaccatctgagaacaaactgcctattttattggcatttttaccttcctgtgggtagaacggcccatgacggcaaaaaaaaagcccaacttcattttgctgctgaaagcattattattatctagctacggaaaactcttgctgattccagctgtcatttgggaacatgactacacatctgtgtgcctcaaactcattaaagtatttgttcttacatcaaattttcaggcaattagagtgaccctaaacatcaaccgtaagctctccttcttggccgtgttgagtggcttactgctggaaagcatcatggtctacttcttccagagtatggaatgggatgttggaagtgattatgccatctttaaatctcaggacttctgaagagttttattcttcttcactatctgtggcatgaccagctgtatctgaaagagaaaagacatgaaatataaaccaacctcctcatttctgttgagtaaaatgaagcaaagattggaaacactttctgaaaaagaaagcaatgataatagcggtggatacccacccccacaaatgcacccaagagacaagccatttacatacagatattcacagtcacacatagaaacacccacatggacacaaggaatgttgctgcagagactgaatgacatgcaacaggtgaaggtttatacgttatacacaaggccaggtaagcgctcataattcacacataataaaacatctaggtttcattcctttgacatgtttatatctttttaatttaaatgttgttactggcttaaaatattttgtgttcttacaatagaaacgcttttaataaagtctttcagaataaacca

SEQ ID NO: 527651 - DNA, 215 bp, Homo sapiens
  misc_feature (168)..(168): n is a, c, g, or t
gagcgcagtgccacaatcatggctcagtccaacctcaacttcttgggttcaagcaatccttacatctcagcctcctgagtagctgggaccatatgtgcgcaccaccatgcctagctaattaaaaaaaaatttttgtagggatagggtctcctatgttgcccaggctgntctcaaatgcctggcctcaagtgatccttgcaccttggcttcccaaa

SEQ ID NO: 527652 - DNA, 1211 bp, Homo sapiens
cactatgcgtctgacgttttacccttcacagaatctttagttctggactgcagttgagtggaaatgggcaacggcgggcggagcggcctgcagcaggggaaggggaacgtggatggggtggcagcgactcctactgctgcctcggcctcctgccagtacaggtgcatcgaatgcaaccaggaggccaaagagttgtaccgagactataaccacggtgtgctgaagataaccatctgaaaactctgcatattttgtttgctttgtgaagcatacctgaggtggtggcagcttcaagattccaaccagaatactgcccctgatgacttgatcagatatgctaaggaatgggatttctatagaatgtttgcgattgctgctttagaacaaactgcctattttattggcatttttaccttcctgtgggtagaacggcccatgacggcaaaaaaaaagcccaacttcattttgctgctgaaagcattattattatctagctacggaaaactcttgctgattccagctgtcatttgggaacatgactacacatctgtgtgcctcaaactcattaaagtatttgttcttacatcaaattttcaggcaattagagtgaccctaaacatcaaccgtaagctctccttcttggccgtgttgagtggcttactgctggaaagcatcatggtctacttcttccagagtatggaatgggatgttggaagtgattatgccatctttaaatctcaggacttctgaagagttttattcttcttcactatctgtggcatgaccagctgtatctgaaagagaaaagacatgaaatataaaccaacctcctcatttctgttgagtaaaatgaagcaaagattggaaacactttctgaaaaagaaagcaatgataatagcggtggatacccacccccacaaatgcacccaagagacaagccatttacatacagatattcacagtcacacatagaaacacccacatggacacaaggaatgttgctgcagagactgaatgacatgcaacaggtgaaggtttatacgttatacacaaggccaggtaagcgctcataattcacacataataaaacatctaggtttcattcctttgacatgtttatatctttttaatttaaatgttgttactggcttaaaatattttgtgttcttacaatagaaacgcttttaataaagtctttcagaataaacca

SEQ ID NO: 527653 - DNA, 249 bp, Homo sapiens
ttttgaaaaagcctgtccctcccagtttcgagcataagttcttgcacagtatgggatcgcatttcctttccaataaggtatcaagcatcttttgctgtgtaaggtccttctgcttttggttcccgtgctgtgaataggggatggctctcgtgtctgtatgaaagttttgctttcgtatggattttttattctgtgatcttgaagcaatacttggaattccctctgcaatattataggtcagaattatac

SEQ ID NO: 527654 - DNA, 1076 bp, Homo sapiens
  misc_feature (40)..(40): n is a, c, g, or t
gtgctgcgtcgtctctgaggatcccccaagggtccttaangctccaagggtccttagccctacagacatattcttttcaatactcaaataaatatccatggaaaactctgcatattttgtttgctttgtgaagcatacctgaggtggtggcagcttcaagattccaaccagaatactgcccctgatgacttgatcagatatgctaaggaatgggatttctatagaatgtttgcgattgctgctttagaacaaactgcctattttattggcatttttaccttcctgtgggtagaacggcccatgacggcaaaaaaaaagcccaacttcattttgctgctgaaagcattattattatctagctacggaaaactcttgctgattccagctgtcatttgggaacatgactacacatctgtgtgcctcaaactcattaaagtatttgttcttacatcaaattttcaggcaattagagtgaccctaaacatcaaccgtaagctctccttcttggccgtgttgagtggcttactgctggaaagcatcatggtctacttcttccagagtatggaatgggatgttggaagtgattatgccatctttaaatctcaggacttctgaagagttttattcttcttcactatctgtggcatgaccagctgtatctgaaagagaaaagacatgaaatataaaccaacctcctcatttctgttgagtaaaatgaagcaaagattggaaacactttctgaaaaagaaagcaatgataatagcggtggatacccacccccacaaatgcacccaagagacaagccatttacatacagatattcacagtcacacatagaaacacccacatggacacaaggaatgttgctgcagagactgaatgacatgcaacaggtgaaggtttatacgttatacacaaggccaggtaagcgctcataattcacacataataaaacatctaggtttcattcctttgacatgtttatatctttttaatttaaatgttgttactggcttaaaatattttgtgttcttacaatagaaacgcttttaataaagtctttcagaataaacca

SEQ ID NO: 527655 - DNA, 132 bp, Homo sapiens
  misc_feature (8)..(8): n is a, c, g, or t
  misc_feature (24)..(24): n is a, c, g, or t
  misc_feature (113)..(113): n is a, c, g, or t
gaggatgnctgctcaaccaggttnggtcacgcaggccctgatcttgctactctggttccatgtcctatggaagaccaaagtttaccaagatagatttttcccttcatagtggnagatggtgttaacccctgc

SEQ ID NO: 527656 - DNA, 1184 bp, Homo sapiens
cactatgcgtctgacgttttacccttcacagaatctttagttctggactgcagttgagtggaaatgggcaacggcgggcggagcggcctgcagcaggggaaggggaacgtggatggggtggcagcgactcctactgctgcctcggcctcctgccagtacaggtgcatcgaatgcaaccaggaggccaaagagttgtaccgagactataaccacggtgtgctgaagataaccatctgtaaatcctgccagaaacctgtagacaaatatatcgagtatgatcctgttatcatcttgattaatgctatattgtgcaaagctcaggcctacagacatattcttttcaatactcaaataaatatccatggaaaactctgcatattttgtttgctttgtgaagcatacctgaggtggtggcagcttcaagattccaaccagaatactgcccctgatgacttgatcagatatgctaaggaatgggatttctatagaatgtttgcgattgctgctttagaacaaactgcctattttattggcatttttaccttcctgtcatttgggaacatgactacacatctgtgtgcctcaaactcattaaagtatttgttcttacatcaaattttcaggcaattagagtgaccctaaacatcatggtctacttcttccagagtatggaatgggatgtctggaagtgattatgccatctttaaatctcaggacttctgaagagttttattcttcttcactatctgtggcatgaccagctgtatctgaaagagaaaagacatgaaatataaaccaacctcctcatttctgttgagtaaaatgaagcaaagattggaaacactttctgaaaaagaaagcaatgataatagcggtggatacccacccccacaaatgcacccaagagacaagccatttacatacagatattcacagtcacacatagaaacacccacatggacacaaggaatgttgctgcagagactgaatgacatgcaacaggtgaaggtttatacgttatacacaaggccaggtaagcgctcataattcacacataataaaacatctaggtttcattcctttgacatgtttatatctttttaatttaaatgttgttactggcttaaaatattttgtgttcttacaatagaaacgcttttaataaagtctttcagaataaacca

SEQ ID NO: 527657 - DNA, 428 bp, Homo sapiens
  misc_feature (47)..(47): n is a, c, g, or t
ttccgctcgcttatagcattgtagggcacagtggccagtgctactgntactggcccacgggcacgagttcattgttctcgtcttgaccacgtctacagggagaggctatgtacagtgcgtgcacgaagcctgccccaaaggcagaagtgaagtggccacgggaggtcatcctgtcatgcaggttggctttcaggcagcggcatccttgatgatggtcataggtcatcacctcagtacagttgacaatggcattacgagcaacattgggagaggtccctttccagaggccccggaacccttcctctcgggcaatggtcttgtaggcattgacggtgctttggtatctccgaccacctccagcccgggcctgagcttggaatcggacctttaccacatccgtgggctgggccacagccacagccagggca

SEQ ID NO: 527658 - DNA, 995 bp, Homo sapiens
  misc_feature (106)..(106): n is a, c, g, or t
  misc_feature (276)..(276): n is a, c, g, or t
  misc_feature (350)..(350): n is a, c, g, or t
cctggccgagccctattttaaatgaacttattacctgatacgttttatcagaatgcttgtcatcttgcaaactgtgacactgaaagtatcattttgttgttgttgncgttattctcttatagcgttagaattttttgttttctcctttgatattcacgggaatctccgcttgatatgaggagaaggggctcagtgttttgttgtaagtagaggctttggttctctaaaaatgtgtagatggaaaagtgggagaaggtaacagcatagattaataanaacaaacattgatttttccaaaaacagctttacaaaacaattcatactacccgaaatttacatgtcaatatcgnttcattaattctgaacttattggctgccttctcctttccagtgaccctaaacatcaaccgtaagctctccttcttggccgtgttgagtggcttactgctggaaagcatcatggtctacttcttccagagtatggaatgggatgttggaagtgattatgccatctttaaatctcaggacttctgaagagttttattcttcttcactatctgtggcatgaccagctgtatctgaaagagaaaagacatgaaatataaaccaacctcctcatttctgttgagtaaaatgaagcaaagattggaaacactttctgaaaaagaaagcaatgataatagcggtggatacccacccccacaaatgcacccaagagacaagccatttacatacagatattcacagtcacacatagaaacacccacatggacacaaggaatgttgctgcagagactgaatgacatgcaacaggtgaaggtttatacgttatacacaaggccaggtaagcgctcataattcacacataataaaacatctaggtttcattcctttgacatgtttatatctttttaatttaaatgttgttactggcttaaaatattttgtgttcttacaatagaaacgcttttaataaagtctttcagaataaacca

SEQ ID NO: 527659 - DNA, 696 bp, Homo sapiens
caaataaggctaggtcgagcctgtggtgtaatcaggcagaggcaagcgtgtggcttcaatgctggtcaacggggagcatccactacatcacccttgatggccgtgtctacgacctgcatggctcctgctccatatgtcttggcccaagtctgccaccacaaagcctggggacgaggacttttccatcagtgcttgatgaaagaatgcacgctggacatctccaacagcctcctaggattactgtaggctggccaggttgtgagcctagctcagggagcagcacagtcaccgtaggacggcagaggctagtaggccctgcctgttggctagtgggccgcgtgcgggtgaccgcctgatgggccgaaacatggttctgctagacgaccaaggggctgcggcttctcttatgatggctgctgcccacctcctcatgtccatccccagccccttccgtggacggctctgtggcctctgtggggaacttacaatgtgcaactggagatgactgactttgtccctgcccaatggcctcagccagcgtccaatgtgagagcactctttcggggctgcaatgagcggggtgccacgagctccttccaaggtgctgtgaccgaaggcttgactaatcccaatagcttgcccaaagttgcttgtgcagcaggacaattgtaccctaatgagagcaactaaggcatg

SEQ ID NO: 527660 - DNA, 1103 bp, Homo sapiens
tagttttctctgagcattagtgtggccctctgtaatgtcatcatcctaattcttctccccaggcatgttcctacttaagttccacatccaccacaggtcctctcttctccaaacttgccttatgctctccttaggtcctgcagtgcccttgtctccacctaaccagatacggtcagctttgcctctccatggaataagtgaagactttccaaaaactccagtttgcagtgcttactttttccgttgacctccgagtgctcagcttaacacctacagcagtcacgtgcccaagaacttctgacattgccccagggtcagatcttttgtttctacttttcataagtgcatctgcttgtctgacaatcaattataatttatagttaggaaaataaggtcacatatcttgaatcacttgaaagccattaccctgtattgtattatcttatgtttatacttatctatgtctgtctggtattacaatttcatgtgtttatgcctcactctcccagcctgttcagaagtctggtgctgggagaggcatgccttgggttccttgtatccaccttaactcagggcctgccctagtgtcatgtcagttggattttcagcagaatgtggcattctaaatacatcctttattatcacattttattcttcttcactatctgtggcatgaccagctgtatctgaaagagaaaagacatgaaatataaaccaacctcctcatttctgttgagtaaaatgaagcaaagattggaaacactttctgaaaaagaaagcaatgataatagcggtggatacccacccccacaaatgcacccaagagacaagccatttacatacagatattcacagtcacacatagaaacacccacatggacacaaggaatgttgctgcagagactgaatgacatgcaacaggtgaaggtttatacgttatacacaaggccaggtaagcgctcataattcacacataataaaacatctaggtttcattcctttgacatgtttatatctttttaatttaaatgttgttactggcttaaaatattttgtgttcttacaatagaaacgcttttaataaagtctttcagaataaacca

SEQ ID NO: 527661 - DNA, 1211 bp, Homo sapiens
  misc_feature (714)..(716): n is a, c, g, or t
  misc_feature (718)..(718): n is a, c, g, or t
  misc_feature (720)..(720): n is a, c, g, or t
  misc_feature (730)..(730): n is a, c, g, or t
  misc_feature (733)..(733): n is a, c, g, or t
  misc_feature (740)..(740): n is a, c, g, or t
  misc_feature (752)..(752): n is a, c, g, or t
  misc_feature (778)..(778): n is a, c, g, or t
  misc_feature (781)..(781): n is a, c, g, or t
  misc_feature (783)..(783): n is a, c, g, or t
  misc_feature (788)..(788): n is a, c, g, or t
  misc_feature (790)..(790): n is a, c, g, or t
  misc_feature (796)..(796): n is a, c, g, or t
  misc_feature (801)..(801): n is a, c, g, or t
  misc_feature (803)..(803): n is a, c, g, or t
  misc_feature (805)..(806): n is a, c, g, or t
  misc_feature (812)..(812): n is a, c, g, or t
  misc_feature (815)..(815): n is a, c, g, or t
cactatgcgtctgacgttttacccttcacagaatctttagttctggactgcagttgagtggaaatgggcaacggcgggcggagcggcctgcagcaggggaaggggaacgtggatggggtggcagcgactcctactgctgcctcggcctcctgccagtacaggtgcatcgaatgcaaccaggaggccaaagagttgtaccgagactataaccacggtgtgctgaagataaccatctgaaaactctgcatattttgtttgctttgtgaagcatacctgaggtggtggcagcttcaagattccaaccagaatactgcccctgatgacttgatcagatatgctaaggaatgggatttctatagaatgtttgcgattgctgctttagaacaaactgcctattttattggcatttttaccttcctgtgggtagaacggcccatgacggcaaaaaaaaagcccaacttcattttgctgctgaaagcattattattatctagctacggaaaactcttgctgattccagctgtcatttgggaacatgactacacatctgtgtgcctcaaactcattaaagtatttgttcttacatcaaattttcaggcaattagagtgaccctaaacatcaaccgtaagctctccttcttggccgtgttgagtggcttactgctggaaagcatcatggtctacttcttccagagtatggaatgggatgtcggnnncncntatccccccnttnacccccngcccccccgccnccccctcccccccccccccccctgtnccncnccccncnctctcnccaancncnnaccccnccnctataaaccaacctcctcatttctgttgagtaaaatgaagcaaagattggaaacactttctgaaaaagaaagcaatgataatagcggtggatacccacccccacaaatgcacccaagagacaagccatttacatacagatattcacagtcacacatagaaacacccacatggacacaaggaatgttgctgcagagactgaatgacatgcaacaggtgaaggtttatacgttatacacaaggccaggtaagcgctcataattcacacataataaaacatctaggtttcattcctttgacatgtttatatctttttaatttaaatgttgttactggcttaaaatattttgtgttcttacaatagaaacgcttttaataaagtctttcagaataaacca

SEQ ID NO: 527662 - DNA, 940 bp, Homo sapiens
  misc_feature (106)..(106): n is a, c, g, or t
  misc_feature (276)..(276): n is a, c, g, or t
  misc_feature (350)..(350): n is a, c, g, or t
cctggccgagccctattttaaatgaacttattacctgatacgttttatcagaatgcttgtcatcttgcaaactgtgacactgaaagtatcattttgttgttgttgncgttattctcttatagcgttagaattttttgttttctcctttgatattcacgggaatctccgcttgatatgaggagaaggggctcagtgttttgttgtaagtagaggctttggttctctaaaaatgtgtagatggaaaagtgggagaaggtaacagcatagattaataanaacaaacattgatttttccaaaaacagctttacaaaacaattcatactacccgaaatttacatgtcaatatcgnttcattaattctgaacttattggctgccttctcctttccagtgaccctaaacatcaaccgtaagctctccttcttggccgtgttgagtggcttactgctggaaagcatcatggtctacttcttccagagtatggaatgggatgttggaagtgattatgccatctttaaatctcaggacttctgaagagttttattcttcttcactatctgtggcatgaccagctgtatctgaaagagaaaagacatgaaatataaaccaacctcctcatttctgttgagtaaaatgaagcaaagattggaaacactttctgagacaagccatttacatacagatattcacagtcacacatagaaacacccacatggacacaaggaatgttgctgcagagactgaatgacatgcaacaggtgaaggtttatacgttatacacaaggccaggtaagcgctcataattcacacataataaaacatctaggtttcattcctttgacatgtttatatctttttaatttaaatgttgttactggcttaaaatattttgtgttcttacaatagaaacgcttttaataaagtctttcagaataaacca

SEQ ID NO: 527663 - DNA, 2657 bp, Homo sapiens
tgggaacacaaacttgctggcgggaagagcccggaaagaaacctgtggatctcccttcgagatcatccaaagagaagaaaggtgacctcacattcgtgccccttagcagcactctgcagaaatgcctcctcagctgcaaaacggcctgaacctctcggccaaagttgtccagggaagcctggacagcctgccccaggcagtgagggagtttctcgagaataacgctgagctgtgtcagcctgatcacatccacatctgtgacggctctgaggaggagaatgggcggcttctgggccagatggaggaagagggcatcctcaggcggctgaagaagtatgacaactgctggttggctctcactgaccccagggatgtggccaggatcgaaagcaagacggttatcgtcacccaagagcaaagagacacagtgcccatccccaaaacaggcctcagccagctcggtcgctggatgtcagaggaggattttgagaaagcgttcaatgccaggttcccagggtgcatgaaaggtcgcaccatgtacgtcatcccattcagcatggggccgctgggctcacctctgtcgaagatcggcatcgagctgacggattcgccctacgtggtggccagcatgcggatcatgacgcggatgggcacgcccgtcctggaagcactgggcgatggggagtttgtcaaatgcctccattctgtggggtgccctctgcctttacaaaagcctttggtcaacaactggccctgcaacccggagctgacgctcatcgcccacctgcctgaccgcagagagatcatctcctttggcagtgggtacggcgggaactcgctgctcgggaagaagtgctttgctctcaggatggccagccggctggccaaggaggaagggtggctggcagagcacatgctgattctgggtataaccaaccctgagggtgagaagaagtacctggcggccgcatttcccagcgcctgcgggaagaccaacctggccatgatgaaccccagcctccccgggtggaaggttgagtgcgtcggggatgacattgcctggatgaagtttgacgcacaaggtcatttaagggccatcaacccagaaaatggctttttcggtgtcgctcctgggacttcagtgaagaccaaccccaatgccatcaagaccatccagaagaacacaatctttaccaatgtggccgagaccagcgacgggggcgtttactgggaaggcattgatgagccgctagcttcaggcgtcaccatcacgtcctggaagaataaggagtggagctcagaggatggggaaccttgtgcccaccccaactcgaggttctgcacccctgccagccagtgccccatcattgatgctgcctgggagtctccggaaggtgttcccattgaaggcattatctttggaggccgtagacctgctggtgtccctctagtctatgaagctctcagctggcaacatggagtctttgtgggggcggccatgagatcagaggccacagcggctgcagaacataaaggcaaaatcatcatgcatgacccctttgccatgcggcccttctttggctacaacttcggcaaatacctggcccactggcttagcatggcccagcacccagcagccaaactgcccaagatcttccatgtcaactggttccggaaggacaaggaaggcaaattcctctggccaggctttggagagaactccagggtgctggagtggatgttcaaccggatcgatggaaaagccagcaccaacgtcacgcccataggctacatccccaaggaggatgccctgaacctgaaaggcctggggcacatcaacatgatggagcttttcagcatctccaaggaattctgggacaaggaggtggaagacatcgagaagtatctggtggatcaagtcaatgccgacctcccctgtgaaatcgagagagagatccttgccttgaagcaaagaataagccagatgtaatcagggcctgagaataagccagatgtaatcagggcctgagtgctttacctttaaaatcattaaattaaaatccataaggtgcagtaggagcaagagagggcaagtgttcccaaattgacgccacctaataatcatcaccacaccgggagcagatctgaaggcacactttgatttttttaaggataagaaccacagaacactgggtagtagctaatgaaattgagaagggaaatcttagcatgcctccaaaaattcacatccaatgcatactttgttcaaatttaaggttactcaggcattgatcttttcagtgttttttcacttagctatgtggattagctagaatgcacaccaaaaagatacttgagctgtatatatatatgtgtgtgtgtgtgtgtgtgtgtgtgtgtgtgcatgtatgtgcacatgtgtctgtgtgatatttggtatgtgtatttgtatgtactgttattcaaaatatatttaatacctttggaaaatcttgggcaagatgacctactagttttccttgaaaaaaagttgctttgttattaatattgtgcttaaattatttttatacaccattgttccttacctttacataattgcaatatttcccccttactacttcttggaaaaaaattagaaaatgaagtttatagaaaag

SEQ ID NO: 527664 - DNA, 290 bp, Homo sapiens
caggactggggttcactttcagggtttcaggggacccataaaaaaaacttacctgggtttaccacccccaaaatggcatgtgggcctaccccctttttttaaagccttagggggtgggcatcacttaaccccgcttttgggataaactgggtgggagacattcaaagctcaagttttgagtgggtacaaacttggggaaaactttgctcctccctgggccttagtttccccatttgtaacaaggataaaatagaccctgcctcaaaggaataaatgggacgtggtaacga

SEQ ID NO: 527665 - DNA, 1922 bp, Homo sapiens
cagacagtttgtaaatacagacaggcacatgtgcacatagcattgcaatgcacatgcaaggtcagactcatagtaggataccccagggtacggcgggaactcgctgctcgggaagaagtgctttgctctcaggatggccagccggctggccaaggaggaagggtggctggcagagcacatgctgattctgggtataaccaaccctgagggtgagaagaagtacctggcggccgcatttcccagcgcctgcgggaagaccaacctggccatgatgaaccccagcctccccgggtggaaggttgagtgcgtcggggatgacattgcctggatgaagtttgacgcacaaggtcatttaagggccatcaacccagaaaatggctttttcggtgtcgctcctgggacttcagtgaagaccaaccccaatgccatcaagaccatccagaagaacacaatctttaccaatgtggccgagaccagcgacgggggcgtttactgggaaggcattgatgagccgctagcttcaggcgtcaccatcacgtcctggaagaataaggagtggagctcagaggatggggaaccttgtgcccaccccaactcgaggttctgcacccctgccagccagtgccccatcattgatgctgcctgggagtctccggaaggtgttcccattgaaggcattatctttggaggccgtagacctgctggtgtccctctagtctatgaagctctcagctggcaacatggagtctttgtgggggcggccatgagatcagaggccacagcggctgcagaacataaaggcaaaatcatcatgcatgacccctttgccatgcggcccttctttggctacaacttcggcaaatacctggcccactggcttagcatggcccagcacccagcagccaaactgcccaagatcttccatgtcaactggttccggaaggacaaggaaggcaaattcctctggccaggctttggagagaactccagggtgctggagtggatgttcaaccggatcgatggaaaagccagcaccaacgtcacgcccataggctacatccccaaggaggatgccctgaacctgaaaggcctggggcacatcaacatgatggagcttttcagcatctccaaggaattctgggacaaggaggtggaagacatcgagaagtatctggtggatcaagtcaatgccgacctcccctgtgaaatcgagagagagatccttgccttgaagcaaagaataagccagatgtaatcagggcctgagaataagccagatgtaatcagggcctgagtgctttacctttaaaatcattaaattaaaatccataaggtgcagtaggagcaagagagggcaagtgttcccaaattgacgccacctaataatcatcaccacaccgggagcagatctgaaggcacactttgatttttttaaggataagaaccacagaacactgggtagtagctaatgaaattgagaagggaaatcttagcatgcctccaaaaattcacatccaatgcatactttgttcaaatttaaggttactcaggcattgatcttttcagtgttttttcacttagctatgtggattagctagaatgcacaccaaaaagatacttgagctgtatatatatatgtgtgtgtgtgtgtgtgtgtgtgtgtgtgtgcatgtatgtgcacatgtgtctgtgtgatatttggtatgtgtatttgtatgtactgttattcaaaatatatttaatacctttggaaaatcttgggcaagatgacctactagttttccttgaaaaaaagttgctttgttattaatattgtgcttaaattatttttatacaccattgttccttacctttacataattgcaatatttcccccttactacttcttggaaaaaaattagaaaatgaagtttatagaaaag

SEQ ID NO: 527666 - DNA, 174 bp, Homo sapiens
  misc_feature (126)..(126): n is a, c, g, or t
ttgctaatttctgcttctgcatgtctcacttactaatcacctccgaggctcatagactcttgtctctgtcttaggtggctctcagagtctgagactggtgagtagggaggagctgtcttgtgctgngacgttgtatgacttctctggttctgtgggtcaggagtcggggtgctg

SEQ ID NO: 527667 - DNA, 473 bp, Homo sapiens
  misc_feature (406)..(406): n is a, c, g, or t
tgcatacaaatgccagctatatatggttgtcgatactgttattatattcttctaaatccaaaattcggccaggtgtggtggcaaacacctgtaatcccagcactttgggagaccgaggcgggcagatcaactgaggtcaggagtttgagaccagcctggccaacatggcaaaaccttgtctctactaaaatacaaaaattagcccggtgtggtggtgcattcctgtaatcccagttacttgggaggttgaagcaggagaatcgcttgaacacaggaggtagaagttgcggtgagctgagattgtgccactgcattccagcctgggctacagagtgagactctgtcttgaaaaataaataaaaagggctgggcatggtggctcacgcctgtaatcctagcactttgngaggccaaggcaggcagatcacctgaggtcaggagtttgcaaccagcctggccaacatggtgaaacc

SEQ ID NO: 527668 - DNA, 508 bp, Homo sapiens
  misc_feature (7)..(7): n is a, c, g, or t
  misc_feature (207)..(207): n is a, c, g, or t
  misc_feature (258)..(258): n is a, c, g, or t
  misc_feature (286)..(286): n is a, c, g, or t
  misc_feature (320)..(320): n is a, c, g, or t
  misc_feature (380)..(380): n is a, c, g, or t
  misc_feature (385)..(385): n is a, c, g, or t
  misc_feature (403)..(403): n is a, c, g, or t
  misc_feature (424)..(424): n is a, c, g, or t
  misc_feature (435)..(435): n is a, c, g, or t
  misc_feature (445)..(445): n is a, c, g, or t
  misc_feature (455)..(455): n is a, c, g, or t
  misc_feature (494)..(494): n is a, c, g, or t
gcacganctgggcacagcaggacagaaggctttggagcttgtggcatgcatagaggaagtggggcttgcagaggaaacggccactgtttgtggactcctggccacgggaggctagctggctttacgcggctttagtttccctgtctggaaggctgcagatggattatccctgatccaaggctgtaggctgcacagggagcacttttncagcctgcggttcaggctggttctctcagataccaccgcataatggttgcnctaggtattacattttaatatatatggnacttatcatagtcttgctggtgtcgttatttttnccagttgggagttgaagagtagaaatcttcaactccattttatggcccttcacatttagnattancctttaaaatattttccnttttacatacattttaggaanccatattcagncagtggttantaatttttgntttttaagccacccaaaccattggttaaggaaaactttngctccgggagtttt

SEQ ID NO: 527669 - DNA, 674 bp, Homo sapiens
gtcacaggtcacttcccagccacatgccaggcaagcaggactaaactacctccaaagcaagcagtctttttcagttttgactgagtgatgtgagaaacttcttgttctttgtcttgttctttttttttttttgaaacaggcccccttattgtgccccaggactagatggcggacaaaaaaacaaaagtcatagagaacgggagtaatctcccaccctaaggtgacgagataagtactaggcagcgactcgccagtaatgacgaagcagcaggagacagggacccagaaagaacaagaatataggcacgcccgtgaatttctaccctctttaacgggagaaggtcgagacacttttgaggacaggggagaccatctgtgtgtctccccagtctaatcgcaggagatacacactactgtctccgagaaattaacgtagcaacactttgacgtggtgtgtagaaggctcttcgaataaagggaagtcgctatagccagaacgtctgtgagtaaacttgctataagagcgcgagttatattactcatctataaaagagtttgaaggcacaaaaatttggataccttccgacaaggggggtttatagaaaagggggtttacacgaaaaaacgtgctttgggagaaatttccaagtaagggggattcccaacaaattttt

SEQ ID NO: 527670 - DNA, 427 bp, Homo sapiens
tcaggtgctgcgatgatgcctcatctagtcaggactaaattgtgtaggaaactgcgttgggaagaatatgcttactgctcaggctacgagggtcactgctctgtccttagaaattcagagtaacatgagcataacctcagctaaaacccattttagtggcatggattgtgcatgatcttcgataagaattcctcatgtacttgtgcctagttttacaaggtataggctgtactatagatgcagtgattgtcccagctagctctgttaccagccttttggtgtagtctttatgtacatttggagagtcagggcgaaagacaggtgatgtagcacttctgtatataatcattattgcttaacatacctattaatagtttggggtcatttacagggacttgaggaagctacccaggattacagaagagtg

SEQ ID NO: 527671 - DNA, 864 bp, Homo sapiens
gtttttcctgcttgttgtagctccaggaaggcaaggcctatgtctgttgctctccaggctcttaaatccctggcgtgaggagtaggggctgttagggggaagataaagtttagccagaggtatctggatgtggggcctgtttctttagaacggctgtggctgtgcgactggtgctcccatgagaggtgatgtctccttttcagtgtgtggcgatagatgtgtcatcaccagtcccctgaatgactttcagccaggtccatggggtaagggctgaccgcaactgggtgcatgagtgaccctgtagagggaaagggttagaccgacatcctgctgtctagtgctgtgtatatgcctcagagccgataacatcattccgtttatccagactggtgtttattactgcactttgctgttatcctgaggtcttaacatgtgtactggtactatgccaaacacttcagtattccttcaatcagatagcctgtaagtctccgtgcgtgtgtgacagactactgttcgaatttctagggaataccacaatgaacaaaaccgcaagagattcctgctcccgttggaaaggcggaggccgacagaaacataaagcctcgctgatggcagaagtcccgcggggaaaacttaagtggggaagcgggaacagggagcccacggggggctacaatgtggaactttctgtttcactctcacaactgcttttgtgaggagtacataccactatgttacagaagaggacactgagtgcacagagaggttgagtgagtcgtataacggtcacgaacgtaatcggttgacgcttggccttgtgatttgttttgtaactacttcttccttcctgttaacaggaac

SEQ ID NO: 527672 - DNA, 169 bp, Homo sapiens
ctagaggaccctataaatgttggtcattgattggaacggacatttaccgttactatgccgcaaacatcgtaaaaatttgccgatctttattgtttcacacgtaacagaagggaggtttggcaatgaatttatatacgcgtacaggggatcaatgaccaacaatttattg

SEQ ID NO: 527673 - DNA, 143 bp, Homo sapiens
taggtgacttgaggatcttcccgactagccgacagtacagaaggaagtcatggttcagctcagcctggagctgttcaaggaagggtaagccagaggtctagaaccaagactgcacagagcaggcgctgggagcctgccctcgg

SEQ ID NO: 527674 - DNA, 638 bp, Homo sapiens
aaaaaaaaaaaaagatataaaaaaaaaaaaaaaaaaaaaaaaaaaacatgggattttaataaaaacaaaaaaaatataaactaaggcaaaatttaaacaaacaaacaaattaaaaaactaacttaaccaatctcaaccctataatgactcatattacaattcactgcccacctttttacaactttcatacttcaaaacccttttcgttacccaatttaatccccttgcaccacatccccttttccccatctccctttatatccaacaaccccacacctatcccctttcccaacattttcccaccctaaattgcaattgcaaattgtaccccttaatatttttttaaaatccctgttaaatttttgttaaacaacttcattttttacccaataccccaaaattcgcaaaatcctttataaatcaacatattccaccgaaatatccctgactttttccccattttctcaccaaaacccatttttaaaaaccttcttcccaacttcaaactcccaccctttacatccctttgccccattcctaaccatccccctaataacttttttgccacaattccctaaaccacttgcaccctataagtaccccccctttacactttcaccgaatcctctcttattcct

SEQ ID NO: 527675 - DNA, 514 bp, Homo sapiens
  misc_feature (395)..(395): n is a, c, g, or t
  misc_feature (452)..(452): n is a, c, g, or t
  misc_feature (479)..(479): n is a, c, g, or t
  misc_feature (492)..(492): n is a, c, g, or t
attacaggcttgagccctgcacccagcctgtaagatattttaaaatccacacttggccaagcgtggtggctcacacatataatcccagcactttgggaggccaaggtgggcggatcacaaggtcaggagttcgagaccagcctggccaatatggtgaaatcccgtctctgctggaaatacaagaactagccgggcgtgttggcttacacttatggtcccggctactcgggtggctgaggcgggagaatcgcttgaaccaggaggcggagtttgcagtgagctgagatcgcagcactgcacaccagcctcggcaacagagtgagactccgtcttgaaaaaaaaaaaatccacgctgttttatatttctaacatgggggtaggataccatccttccntgaattagggtgcaagtgttgttgaattgcagatggggattcttttcccagttagcntgacagagaagttgagcatttcccttnggcaatttttttnaggaatttttccccggggagaa

SEQ ID NO: 527676 - DNA, 202 bp, Homo sapiens
cccctttttttttcccccccccccccccccccttttttttgtgggggggggggggggggggggggggcccctccccccccagggcgggggggttttttcccccccctttgggggggggtttttgggggttataaaggggccttttcccccctggttttttttttttttttccccctagggggggggggggcgggggggggga

SEQ ID NO: 527677 - DNA, 587 bp, Homo sapiens
tgtacatgaacaaacacaggaacccaaagccccttttccccacaatcctccccacttacattatgggaagaaatgtctttaaatggacttggtctacatacatatagcaccgaacccgtgaataaaaatatctttatgaagaattttgttgtgctattatcttagggttgaatcagggccaagatggaggcagaggcaagtgaggtctggggatctcttagagatcagaatttgtctgagaggcacagagcctatagttcacccagaaagggggatatatctaagaggacaggggctagaactggctaggctgaaagttttttcaagtgtatgtgtgagggtaagggtagctataaatccattctctttccttccccataccttccctagctcccagatagaagggcaggggaccctgaacagggaacagagtcacaattccctcaagtttcatctgattcccacagagcttccagcaggcagtgagttgggcatatcccctggtgctgcatgaccccttcccccagctcagggctttcttctctccacctgtgagcaccagggcctgcaggatgtcagacagtgat

SEQ ID NO: 527678 - DNA, 732 bp, Homo sapiens
  misc_feature (55)..(55): n is a, c, g, or t
gcaagagggaggaggagaaggaaagagcttgaacagcgtggaagcgccatgaacncaatcggaaggacgagggaaaagggggagaggagagggaagggaggaaaaggggagaggttaaggaaggaaaaaagggattggaaaggggagggaaaaggaggaaaagaggggaaaaaagaagagaaggaaggggaaagagagaaagaaaggaagaggaaggagagaagaaaagagaaggggaaagaaaaggaaagagaaaggaaagagaggaaaagggaggaaaagggaaagagggaggaagggaagagaagggaaaaaaggaagaagggaagagggaggaagagagagagagaaaaggaataaagagaagagaagggaaagagagggaaaaggtggaaaagagaggatgagggaaagagaggaaaaggaggagagaaaaggaggaagaggaaggggaaaaaggagagtggaaggagggagaaggaaagagagaagaaggggagaaagtggggagaggaagaaggggggaaaaaaggggaaagagaaggggaaaaagaaggaggaaagggggggaaagagagaagaagagggggaaagaggggaaggggaagaaaagaaaaaagaggagaaagagggaaaaggggaaaagagggaaaggaggagaggaagagaaggagagaggaagaagggagagagggggggggggagaaagaggagggaagataggaagggggg

SEQ ID NO: 527679 - DNA, 359 bp, Homo sapiens
tgcttgaagaagagtactaaggaagtgtttgatgaactagtggcccttttgcagcccctgccctgtccttgctttgccccagttctgtcttcagaggtttgccttatggaacttccctttgggagcaacacttcagaccaggatctccatggctctggctgtggggaatggcctgaagacacctctctctatttgtacttcctacaggagcttcatgaacaactgggaggtgtacaagcttctagctcatgtcagacccccggtatctaaggtactggcaagttgacttgccctctccccttttccttctccaacccccagtctctcttcataaatgctaccacagtccatacaacata

SEQ ID NO: 527680 - DNA, 833 bp, Homo sapiens
  misc_feature (833)..(833): n is a, c, g, or t
ggtggctacatctgccgatctcattcgttccgagttatcgaactgcgggtttgcagtaacatcccgattgtactcatagccactctgctagtaccagcctgtactgctcgtcaagtagagatgaactgaagaagctttaggcctcatcgcagtctgagtctcgcaggggccaacccatgatgggcaaaccagccgttgtaaaggagccattgtaagagagcttgacagtaaagaccatgaggcgcatagagaaaatcgagaagatgaaagaagtcaagggatgcatggatctccatcttgtgaaattccgatctggtgatacgagactttagagaatcacagagatcagaccagctccgacgagaacgaaacgcttcgttttggtgcacccaatgcgctcacttcctgggccacactggtcgaaccaaaagggtcgcaaaaggcaagtaagggggtgcagagacatcgcttcggtttctggacgacattgatttgcaacaggcaatgcgattgaccaaggcgatgcgtacaagcacgaaatggatcgtcaaagaggttccttgcgtcacaaagtaacgcattgcatgccaaaccaagacagatgcgaagcaatggcataggctttgcacgtacaaagctagtacttaccatgcaaggcgtaacggtgacgcattgccagcaaggtgacctgtccagtctacggctaacgaaatgcttcgtacgtaataccagatgcttgcgataccaaattccctggaactggatatacaagaactgggaaacgattaactgccagcatctatgaggaatgctatcattggaggctccatggn

SEQ ID NO: 527681 - DNA, 306 bp, Homo sapiens
agtttgggggcataggatatgtggggtgtagaatggactggatctagtcacaatcccagagatgggcagagttcgactgtgggatggagttccagctgtgcagaatcctgaccctggagttgaaactgtcgctgtgctcccccctcagaccaaagatgtgaccaaggccatggatgagaagaaatttgacgaagccctgaagctgagaggccggtgaggagatgacgggaagctcactagctacagaaatcagaggcgtgaacgaagccaaagatctccatggctccaggcccaaaacatgagctt

SEQ ID NO: 527682 - DNA, 1750 bp, Homo sapiens
  misc_feature (13)..(13): n is a, c, g, or t
gcagataccccancctgtgtagtgagcctctctggtaaccaggctgtgcgcctgcccctcatggaatgtgtccaggtgaccaaagatgtgaccaaggccatggatgagaagaaatttgacgaagccctgaagctgagaggccggagcttcatgaacaactgggaggtgtacaagcttctagctcatgtcagacccccggtatctaagagtggttcgcacacagtggctgtgatgaacgtgggggctccggctgcaggcatgaatgctgctgttcgctccactgtgaggattggccttatccagggcaaccgagtgctcgttgtccatgatggtttcgagggcctggccaaggggcagatagaggaagctggctggagctatgttgggggctggactggccaaggtggctctaaacttgggactaaaaggactctacccaagaagagctttgaacagatcagtgccaatataactaagtttaacattcagggccttgtcatcattgggggctttgaggcttacacagggggcctggaactgatggagggcaggaagcagtttgatgagctctgcatcccatttgtggtcattcctgctacagtctccaacaatgtccctggctcagacttcagcgttggggctgacacagcactcaatactatctgcacaacctgtgaccgcatcaagcagtcagcagctggcaccaagcgtcgggtgtttatcattgagactatgggtggctactgtggctacctggctaccatggctggactggcagctggggccgatgctgcctacatttttgaggagcccttcaccattcgagacctgcaggcaaatgttgaacatctggtgcaaaagatgaaaacaactgtgaaaaggggcttggtgttaaggaatgaaaagtgcaatgagaactataccactgacttcattttcaacctgtactctgaggaggggaagggcatcttcgacagcaggaagaatgtgcttggtcacatgcagcagggtgggagcccaaccccatttgataggaattttgccactaagatgggcgccaaggctatgaactggatgtctgggaaaatcaaagagagttaccgtaatgggcggatctttgccaatactccagattcgggctgtgttctggggatgcgtaagagggctctggtcttccaaccagtggctgagctgaaggaccagacagattttgagcatcgaatccccaaggaacagtggtggctgaaactgaggcccatcctcaaaatcctagccaagtacgagattgacttggacacttcagaccatgcccacctggagcacatcacccggaagcggtccggggaagctgccgtctaaacctctctggagtgaggggaatagattacctgatcatggtcagctcacaccctaataagtccacatcttctcagtgttttagctgtttttttcattaggtttccttttattctgtaccttgcagccatgaccagttctggccaggagctggaggagcaggcagtgggtgggagctccttttaggtagaatttaacatgacttctgccccagctttatctgtcacacaaggctgggcacctctagtgctactgctagatatcacttactcagttagaattttcctaaaaataagctttatttatttctttgtgataacaaagagtcttggttcctctactacttttactacagtgacaaattgtaactacactaataaatgccaactggtca

SEQ ID NO: 527683 - DNA, 1387 bp, Homo sapiens
ctcaattttcatgtctcttccccttccaattccccttcccctccccgccatcactgatcaactaggactctacccaagaagagctttgaacagatcagtgccaatataactaagtttaacattcagggccttgtcatcattgggggctttgaggcttacacagggggcctggaactgatggagggcaggaagcagtttgatgagctctgcatcccatttgtggtcattcctgctacagtctccaacaatgtccctggctcagacttcagcgttggggctgacacagcactcaatactatctgcacaacctgtgaccgcatcaagcagtcagcagctggcaccaagcgtcgggtgtttatcattgagactatgggtggctactgtggctacctggctaccatggctggactggcagctggggccgatgctgcctacatttttgaggagcccttcaccattcgagacctgcaggcaaatgttgaacatctggtgcaaaagatgaaaacaactgtgaaaaggggcttggtgttaaggaatgaaaagtgcaatgagaactataccactgacttcattttcaacctgtactctgaggaggggaagggcatcttcgacagcaggaagaatgtgcttggtcacatgcagcagggtgggagcccaaccccatttgataggaattttgccactaagatgggcgccaaggctatgaactggatgtctgggaaaatcaaagagagttaccgtaatgggcggatctttgccaatactccagattcgggctgtgttctggggatgcgtaagagggctctggtcttccaaccagtggctgagctgaaggaccagacagattttgagcatcgaatccccaaggaacagtggtggctgaaactgaggcccatcctcaaaatcctagccaagtacgagattgacttggacacttcagaccatgcccacctggagcacatcacccggaagcggtccggggaagctgccgtctaaacctctctggagtgaggggaatagattacctgatcatggtcagctcacaccctaataagtccacatcttctcagtgttttagctgtttttttcattaggtttccttttattctgtaccttgcagccatgaccagttctggccaggagctggaggagcaggcagtgggtgggagctccttttaggtagaatttaacatgacttctgccccagctttatctgtcacacaaggctgggcacctctagtgctactgctagatatcacttactcagttagaattttcctaaaaataagctttatttatttctttgtgataacaaagagtcttggttcctctactacttttactacagtgacaaattgtaactacactaataaatgccaactggtca

SEQ ID NO: 527684 - DNA, 1699 bp, Homo sapiens
  misc_feature (13)..(13): n is a, c, g, or t
gcagataccccancctgtgtagtgagcctctctggtaaccaggctgtgcgcctgcccctcatggaatgtgtccaggtgaccaaagatgtgaccaaggccatggatgagaagaaatttgacgaagccctgaagctgagaggccggagcttcatgaacaactgggaggtgtacaagcttctagctcatgtcagacccccggtatctaagagtggttcgcacacagtggctgtgatgaacgtgggggctccggctgcaggcatgaatgctgctgttcgctccactgtgaggattggccttatccagggcaaccgagtgctcgttgtccatgatggtttcgagggcctggccaaggggcagatagaggaagctggctggagctatgttgggggctggactggccaaggtggctctaaacttgggactaaatttaacattcagggccttgtcatcattgggggctttgaggcttacacagggggcctggaactgatggagggcaggaagcagtttgatgagctctgcatcccatttgtggtcattcctgctacagtctccaacaatgtccctggctcagacttcagcgttggggctgacacagcactcaatactatctgcacaacctgtgaccgcatcaagcagtcagcagctggcaccaagcgtcgggtgtttatcattgagactatgggtggctactgtggctacctggctaccatggctggactggcagctggggccgatgctgcctacatttttgaggagcccttcaccattcgagacctgcaggcaaatgttgaacatctggtgcaaaagatgaaaacaactgtgaaaaggggcttggtgttaaggaatgaaaagtgcaatgagaactataccactgacttcattttcaacctgtactctgaggaggggaagggcatcttcgacagcaggaagaatgtgcttggtcacatgcagcagggtgggagcccaaccccatttgataggaattttgccactaagatgggcgccaaggctatgaactggatgtctgggaaaatcaaagagagttaccgtaatgggcggatctttgccaatactccagattcgggctgtgttctggggatgcgtaagagggctctggtcttccaaccagtggctgagctgaaggaccagacagattttgagcatcgaatccccaaggaacagtggtggctgaaactgaggcccatcctcaaaatcctagccaagtacgagattgacttggacacttcagaccatgcccacctggagcacatcacccggaagcggtccggggaagctgccgtctaaacctctctggagtgaggggaatagattacctgatcatggtcagctcacaccctaataagtccacatcttctcagtgttttagctgtttttttcattaggtttccttttattctgtaccttgcagccatgaccagttctggccaggagctggaggagcaggcagtgggtgggagctccttttaggtagaatttaacatgacttctgccccagctttatctgtcacacaaggctgggcacctctagtgctactgctagatatcacttactcagttagaattttcctaaaaataagctttatttatttctttgtgataacaaagagtcttggttcctctactacttttactacagtgacaaattgtaactacactaataaatgccaactggtca

SEQ ID NO: 527685 - DNA, 331 bp, Homo sapiens
  misc_feature (85)..(85): n is a, c, g, or t
aggaacccccatttaaccccttttttttttttgctttcatttttaaaaaggaaaaaaggacctgtcagataggcagccccctgcnacgtgattttttatggtggggtgttttgttttggaaaatggaaaattttttaaatctgggggttttaaaaaaaaaaaaaaggccaaaaaaatcttgttatggccttaaaaagggggtagggcatctttcaggggtccctttgccatggggaaaaaaaagctgtttccccaacagtttttttttaaaaaaccaaaaaccaaaaaaatccaaaaatcaaaaaaataataaacttctttttacccttga

SEQ ID NO: 527686 - DNA, 1662 bp, Homo sapiens
  misc_feature (13)..(13): n is a, c, g, or t
gcagataccccancctgtgtagtgagcctctctggtaaccaggctgtgcgcctgcccctcatggaatgtgtccaggtgaccaaagatgtgaccaaggccatggatgagaagaaatttgacgaagccctgaagctgagaggccggagcttcatgaacaactgggaggtgtacaagcttctagctcatgtcagacccccggtatctaagagtggttcgcacacagtggctgtgatgaacgtgggggctccggctgcaggcatgaatgctgctgttcgctccactgtgaggattggccttatccagggcaaccgagtgctcgttgtccatgatggtttcgagggcctggccaaggggcagatagaggaagctggctggagctatgttgggggctggactggccaaggtggctctaaacttgggactaaaaggcttacacagggggcctggaactgatggagggcaggaagcagtttgatgagctctgcatcccatttgtggtcattcctgctacagtctccaacaatgtccctggctcagacttcagcgttggggctgacacagcactcaatactatctgcacaacctgtgaccgcatcaagcagtcagcagctggcaccaagcgtcgggtgtttatcattgagactatgggtggctactgtggctacctggctaccatggctggactggcagctggggccgatgctgcctacatttttgaggagcccttcaccattcgagacctgcaggcaaatgttgaacatctggtgcaaaagatgaaaacaactgtgaaaaggggcttggtgttaaggaatgaaaagtgcaatgagaactataccactgacttcattttcaacctgtactctgaggaggggaagggcatcttcgacagcaggaagaatgtgcttggtcacatgcagcagggtgggagcccaaccccatttgataggaattttgccactaagatgggcgccaaggctatgaactggatgtctgggaaaatcaaagagagttaccgtaatgggcggatctttgccaatactccagattcgggctgtgttctggggatgcgtaagagggctctggtcttccaaccagtggctgagctgaaggaccagacagattttgagcatcgaatccccaaggaacagtggtggctgaaactgaggcccatcctcaaaatcctagccaagtacgagattgacttggacacttcagaccatgcccacctggagcacatcacccggaagcggtccggggaagctgccgtctaaacctctctggagtgaggggaatagattacctgatcatggtcagctcacaccctaataagtccacatcttctcagtgttttagctgtttttttcattaggtttccttttattctgtaccttgcagccatgaccagttctggccaggagctggaggagcaggcagtgggtgggagctccttttaggtagaatttaacatgacttctgccccagctttatctgtcacacaaggctgggcacctctagtgctactgctagatatcacttactcagttagaattttcctaaaaataagctttatttatttctttgtgataacaaagagtcttggttcctctactacttttactacagtgacaaattgtaactacactaataaatgccaactggtca

SEQ ID NO: 527687 - DNA, 665 bp, Homo sapiens
gcatggacgccggcgcgtgcctactcgcactatcacggcggagcccgcatcctttcggaaacggcttcggcgcgccttgcttcaccgctcgtgatcaagttcgaagagttgcgctcgcgcgacggctatgacccgcaaaaaccatcggataactttcccgtcgtctggcccggcggcgagtggcacctgcgcgacatcacgaactacatgacgaccgccgctttcgaactccttcgccacgccgccgtcaatcgtgaacgctggctccggcgcttctatgagatcggcaaagaggcgattcgcgagcgcaaagagggcgaactcttcgccttcgtcgttccgccagcaccggcaggctccgaccgggcgcgccgcaccgaagtgctgctcgcgacgctccagcgcggcggcgtcgagatcgaacgcgcatcgtcgtttgtcgccgacggcacgcgctatccggacggcacggcagtgatacgcatggcgcagccgtacggtagttttgccaaagctctgctcgaaagacagacgtaccctgatctgcgcgacgcagcgggccaaccgattccgccctacgacgtgacggcgcacacgctgccgctgttgatgggcgtcgaggtgcgtcctatcttcaagccttttcaatacacggcgcgcaaaga

SEQ ID NO: 527688 - DNA, 1209 bp, Homo sapiens
  misc_feature (14)..(14): n is a, c, g, or t
ccttgtgattcacncacctcggcctcgccaagtgttgggattacaggcgtgagccactgtgcccagcccatagtctctagttcttaacaatgcagtttggtgacacagcactcaatactatctgcacaacctgtgaccgcatcaagcagtcagcagctggcaccaagcgtcgggtgtttatcattgagactatgggtggctactgtggctacctggctaccatggctggactggcagctggggccgatgctgcctacatttttgaggagcccttcaccattcgagacctgcaggcaaatgttgaacatctggtgcaaaagatgaaaacaactgtgaaaaggggcttggtgttaaggaatgaaaagtgcaatgagaactataccactgacttcattttcaacctgtactctgaggaggggaagggcatcttcgacagcaggaagaatgtgcttggtcacatgcagcagggtgggagcccaaccccatttgataggaattttgccactaagatgggcgccaaggctatgaactggatgtctgggaaaatcaaagagagttaccgtaatgggcggatctttgccaatactccagattcgggctgtgttctggggatgcgtaagagggctctggtcttccaaccagtggctgagctgaaggaccagacagattttgagcatcgaatccccaaggaacagtggtggctgaaactgaggcccatcctcaaaatcctagccaagtacgagattgacttggacacttcagaccatgcccacctggagcacatcacccggaagcggtccggggaagctgccgtctaaacctctctggagtgaggggaatagattacctgatcatggtcagctcacaccctaataagtccacatcttctcagtgttttagctgtttttttcattaggtttccttttattctgtaccttgcagccatgaccagttctggccaggagctggaggagcaggcagtgggtgggagctccttttaggtagaatttaacatgacttctgccccagctttatctgtcacacaaggctgggcacctctagtgctactgctagatatcacttactcagttagaattttcctaaaaataagctttatttatttctttgtgataacaaagagtcttggttcctctactacttttactacagtgacaaattgtaactacactaataaatgccaactggtca

SEQ ID NO: 527689 - DNA, 1585 bp, Homo sapiens
  misc_feature (13)..(13): n is a, c, g, or t
gcagataccccancctgtgtagtgagcctctctggtaaccaggctgtgcgcctgcccctcatggaatgtgtccaggtgaccaaagatgtgaccaaggccatggatgagaagaaatttgacgaagccctgaagctgagaggccggagcttcatgaacaactgggaggtgtacaagcttctagctcatgtcagacccccggtatctaagagtggttcgcacacagtggctgtgatgaacgtgggggctccggctgcaggcatgaatgctgctgttcgctccactgtgaggattggccttatccagggcaaccgagtgctcgttgtccatgatggtttcgagggcctggccaaggggcagatagaggaagctggctggagctatgttgggggctggactggccaaggtggctctaaacttgggactaaaaggactctacccaagaagagctttgaacagatcagtgccaatataactaagtttaacattcagggccttgtcatcattgggggctttgaggcttacacagggggcctggaactgatggagggcaggaagcagtttgatgagctctgcatcccatttgtggtcattcctgctacagtctccaacaatgtccctggctcagacttcagcgttggggctgacacagcactcaatactatctgcacagcaaatgttgaacatctggtgcaaaagatgaaaacaactgtgaaaaggggcttggtgttaaggaatgaaaagtgcaatgagaactataccactgacttcattttcaacctgtactctgaggaggggaagggcatcttcgacagcaggaagaatgtgcttggtcacatgcagcagggtgggagcccaaccccatttgataggaattttgccactaagatgggcgccaaggctatgaactggatgtctgggaaaatcaaagagagttaccgtaatgggcggatctttgccaatactccagattcgggctgtgttctggggatgcgtaagagggctctggtcttccaaccagtggctgagctgaaggaccagacagattttgagcatcgaatccccaaggaacagtggtggctgaaactgaggcccatcctcaaaatcctagccaagtacgagattgacttggacacttcagaccatgcccacctggagcacatcacccggaagcggtccggggaagctgccgtctaaacctctctggagtgaggggaatagattacctgatcatggtcagctcacaccctaataagtccacatcttctcagtgttttagctgtttttttcattaggtttccttttattctgtaccttgcagccatgaccagttctggccaggagctggaggagcaggcagtgggtgggagctccttttaggtagaatttaacatgacttctgccccagctttatctgtcacacaaggctgggcacctctagtgctactgctagatatcacttactcagttagaattttcctaaaaataagctttatttatttctttgtgataacaaagagtcttggttcctctactacttttactacagtgacaaattgtaactacactaataaatgccaactggtca

SEQ ID NO: 527690 - DNA, 142 bp, Homo sapiens
caaacgtataattataggctcgtaataaacatcttccgcttcccggccgagagtcctttcttacggtctcctccaacgagtagtttaggcctcttcaataagtaagatagaaaaggctcaatgaaacttacaatgaattgat

SEQ ID NO: 527691 - DNA, 169 bp, Homo sapiens
  misc_feature (169)..(169): n is a, c, g, or t
gtgctatcaggtctctcaccttagctggctagaaaaaaaaacttctacagcctttctttgaagcctctcaggtgccacttttggagatggccttcagagcttcctaaggcttgtaggacttcaaccaaggatttccaaagcaaggaggggtttatattcccagctcttn

SEQ ID NO: 527692 - DNA, 1696 bp, Homo sapiens
  misc_feature (13)..(13): n is a, c, g, or t
gcagataccccancctgtgtagtgagcctctctggtaaccaggctgtgcgcctgcccctcatggaatgtgtccaggtgaccaaagatgtgaccaaggccatggatgagaagaaatttgacgaagccctgaagctgagaggccggagcttcatgaacaactgggaggtgtacaagcttctagctcatgtcagacccccggtatctaagagtggttcgcacacagtggctgtgatgaacgtgggggctccggctgcaggcatgaatgctgctgttcgctccactgtgaggattggccttatccagggcaaccgagtgctcgttgtccatgatggtttcgagggcctggccaaggggcagatagaggaagctggctggagctatgttgggggctggactggccaaggtggctctaaacttgggactaaaaggactctacccaagaagagctttgaacagatcagtgccaatataactaagtttaacattcagggccttgtcatcattgggggctttgaggcttacacagggggcctggaactgatggagggcaggaagcagtttgatgagctctgcatcccatttgtggtcattcctgctacagtctccaacaatgtccctggctcagacttcagcgttggggctgacacagcactcaatactatctgcacaacctgtgaccgcatcaagcagtcagcagctggcaccaagcgtcgggtgtttatcattgagactatgggtggctactgtggctacctggctaccatggctggactggcagctggggccgatgctgcctacatttttgaggagcccttcaccattcgagacctgcaggcaaatgttgaacatctggtgcaaaagatgaaaacaactgtgaaaaggggcttggtgttaaggaatgaggggaagggcatcttcgacagcaggaagaatgtgcttggtcacatgcagcagggtgggagcccaaccccatttgataggaattttgccactaagatgggcgccaaggctatgaactggatgtctgggaaaatcaaagagagttaccgtaatgggcggatctttgccaatactccagattcgggctgtgttctggggatgcgtaagagggctctggtcttccaaccagtggctgagctgaaggaccagacagattttgagcatcgaatccccaaggaacagtggtggctgaaactgaggcccatcctcaaaatcctagccaagtacgagattgacttggacacttcagaccatgcccacctggagcacatcacccggaagcggtccggggaagctgccgtctaaacctctctggagtgaggggaatagattacctgatcatggtcagctcacaccctaataagtccacatcttctcagtgttttagctgtttttttcattaggtttccttttattctgtaccttgcagccatgaccagttctggccaggagctggaggagcaggcagtgggtgggagctccttttaggtagaatttaacatgacttctgccccagctttatctgtcacacaaggctgggcacctctagtgctactgctagatatcacttactcagttagaattttcctaaaaataagctttatttatttctttgtgataacaaagagtcttggttcctctactacttttactacagtgacaaattgtaactacactaataaatgccaactggtca

SEQ ID NO: 527693 - DNA, 623 bp, Homo sapiens
  misc_feature (623)..(623): n is a, c, g, or t
agccatgtaaagagatgatgatgctatacagatatatgagaggagattacacgaggatacacctaacacatgtgtgcacgagaagcgtaagatatgcgcattcgaaaagcgccacaggaaaaatgtgggaggcgcattcgggagctgaatgagtatctggaacacatttggtggagacacacagaagcctggcatgagacttgcagaactttacattaatgagacatgactatgccaaagcaggcttttggttagagagagactaatgaggactaattcacacaaccacttatactgtgagcagtatgctgaagataagtatacccaaggtggacttggaaacctcgaactcttaagaaagtgttttgcacaagcattggaactcggcacacacgaaatatgagagctttggttggactcttatatgtcggcaagtcatattgcgtttaatacgccagtgcgcaaacgatatcaatttgcaagtcgaagttagaaggagaacccatattctcttaaagctgtcgaagacatgttggaaacattggagatcacccagtcttaaagtgttacaaactctctgacactagatatcacaactgtgctgcttattgggccggactctn

SEQ ID NO: 527694 - DNA, 100 bp, Homo sapiens
  misc_feature (34)..(34): n is a, c, g, or t
  misc_feature (86)..(86): n is a, c, g, or t
tccaggagaaggaaaacttccacttataactgtntcagcctgactataatgaagagactagcaacacctcctgaacacaagcctantgagcccagtcttt

SEQ ID NO: 527695 - DNA, 976 bp, Homo sapiens
atgctcatagctgattctagagggtaaaattacggccagggaatccccgagaacggcagtcgcatgttgaacaggctgaaacaaaagatgaaaacaactgtgaaaaggggcttggtgttaaggaatgaaaagtgcaatgagaactataccactgacttcattttcaacctgtactctgaggaggggaagggcatcttcgacagcaggaagaatgtgcttggtcacatgcagcagggtgggagcccaaccccatttgataggaattttgccactaagatgggcgccaaggctatgaactggatgtctgggaaaatcaaagagagttaccgtaatgggcggatctttgccaatactccagattcgggctgtgttctggggatgcgtaagagggctctggtcttccaaccagtggctgagctgaaggaccagacagattttgagcatcgaatccccaaggaacagtggtggctgaaactgaggcccatcctcaaaatcctagccaagtacgagattgacttggacacttcagaccatgcccacctggagcacatcacccggaagcggtccggggaagctgccgtctaaacctctctggagtgaggggaatagattacctgatcatggtcagctcacaccctaataagtccacatcttctcagtgttttagctgtttttttcattaggtttccttttattctgtaccttgcagccatgaccagttctggccaggagctggaggagcaggcagtgggtgggagctccttttaggtagaatttaacatgacttctgccccagctttatctgtcacacaaggctgggcacctctagtgctactgctagatatcacttactcagttagaattttcctaaaaataagctttatttatttctttgtgataacaaagagtcttggttcctctactacttttactacagtgacaaattgtaactacactaataaatgccaactggtca

SEQ ID NO: 527696 - DNA, 345 bp, Homo sapiens
attcgcgggcgcgtcgacaaaaggttgttggcactttagtaggaatagcattgaatctgtaagttctttgggcagtatgacaattttaataatactgatttttcctatccatgagcatggaatgtttttccatttgtgtcttctctgatatttttgagcagtgctttgtaattctcattgtagaggtctttcacccccctagttagctatattcctagatatttgattctttctgtgaatgggattgcctttctgatttaactcttgtcttggctggtggtggtgtacaggaatactagtgttttttgtacggtgatttttgtatcttgaaacctttgctggaag

SEQ ID NO: 527697 - DNA, 113 bp, Homo sapiens
ttgcgtgtgatgcgcacaggatggtgtgaatgtgatcatacagtaaatagcttttcgctgccgtgacttcttttgctcttgcaggacaatgtttgaggtttatccacagttgt

SEQ ID NO: 527698 - DNA, 382 bp, Homo sapiens
agacgtaatctcgctctttctttctttttgttgagggggagtgtcgctctgttgccaagtctggaatgcagtggtgcaatattggctcactgcaacctccacctcaggggttcaagcaattctccttcctcagcctcccgaatagctgggattataggtgcctgccacctcacctggctaatttttgtattatcagtagagacaaggtttctccatgttgggcaggctggttctctaagagcacttgaccaactcctgacctcaagtgatccacccgctcagcctctgaaagtgctgggattacaggcctgagccactgcatttgcccagattattatttcttaagcatgttcactacgtaattgattcctagatgttgaaa

SEQ ID NO: 527699 - DNA, 878 bp, Homo sapiens
ggcggtggctcacgcctgtaatcccagtactttgggaggccaaggcaggcggatcacgaggtcaggagatctagagcatcctggctaacacagtgaaaccctgtctctactaaaaatacaaaaaaattagccgggcgtggtggcatgcgcctgtagtcccagctatgtgggaggctgaggcaggacaatagcgtgaacccgggaggtggagcttgcagtgagctgagatcgtgccactgcacctccagcctgggcgacagaacaagactccatctcaaaaaaaaaattttttttccaacaaatttgtttttgataagaaaatatctgataacttattaattatctgcccccatccaatgcaagatggaagtagtgctgaacattaatctagaacaattcagactttttaaatatatccataagcttgtatgtttgacatcatgaagaaaaccacatattccctaaaatatattatacctttatgtcctaagcagagacagactatggcgtgaatttaggtccaaattggaatttagcttgcccatagcctttttttttgagcacatttttcaccacgcttattagttttcatattttccattcaactccctctgggtatctaagactagaaattgaatgttacctttcaatacaccttgtccaagttaaccccctgtaattagggcttcagtgcagacctggggaccctagaaattcccagaaacaattttcgcaaacaaaatcccttaaaatatggtatttagacataatctcatagtggccggacatcaacggttacgttgtgctctcccaattttcgtagagcggtctagaagggtcgggtagctcagagacacgaggaacgcgggagaagattc

SEQ ID NO: 527700 - DNA, 184 bp, Homo sapiens
acaacccaaggcattacggacaaagtggtttctcttgcctctctctgttggcaagatcagaaatcggagaagtcattcttgtgaggaagaccacgctaccctagtgaatcaggaaagtgagcaatcagatgatgaccttctgccactttccagtccgcatggcaatcccattggtgacaagcct

SEQ ID NO: 527701 - DNA, 156 bp, Homo sapiens
gccctgacaagattatacacttcctttaccgaaccaatttcagacagccatgttggcttcagccctttggcctggcatttgtcctgggagtcgtcatcgtcaccctcaacatccactcaagaaagcaaactcatcggtgtagtgtgggaaatgaac

SEQ ID NO: 527702 - DNA, 166 bp, Homo sapiens
actctatgagtatcccttcgatgtggtactcagagtacacacatggaaggagcagctcaaataggggcttggaaagggccctgtgaggtcacccgtgtagaagggcccatcagacctcagcagccccttcctctctgggacacgagtcccgcctgacggagcgagg

SEQ ID NO: 527703 - DNA, 130 bp, Homo sapiens
tccctcctttccgaactggagccccatcctctccagagtatccagggcttcttcactcccgggtacctgcccttcggccccttttcaccacagctgtgctactgtcaaccagtctttgctgcataggcat

SEQ ID NO: 527704 - DNA, 1096 bp, Homo sapiens
ggagaccacaagcttagagagcccatgtctctgatggtaaaatattgtcgatttatgcgctccgaattttctacacggtgaagctgcttgcagaagtttgtaacaactgttatcttccgtgtaccctatggtagaatctattctgtcagggaagaccattgcataagtacaattgagtgcgttcaaaagtataaacgcagctgggctacggcctgtaagagccctgatccccaacaggacttccagagtttctggtttactcatcgttcagaaaatgtggaccatgctgagtgaaattagtccaggtaagctactacttctggtcttgtagagagattatgtgctagtcttctaacattacttatctatggcattttttaacgcactatcactgggcattgaaagattgcttcatagtgggcggaagggcactttctcttgaccaggacctcagactgagcagtcctgatctcacagtgaatggtctgaatcacagtggggctgtccatcgctgtcttttgcagttcttggctggaaatgcatgggcgcttacagcctgatcctatactttcaaatcaagttccttttaacctcttgtaaagcgtctgttgtcttgcctgctgggaaagcctatgaatacgattccacgagcccatcatctgtcttactgtggatcgctgatgtagtgcagcgaaagggtgagggcaggatgaccagagcagaatgaattttgaagggatgagctgtgtgtttgtttgtgagtagtgtgggtacacacacatctcagtgaattttttgaacaagttgctaatattttctgatcatattctctgagaaaaaagtgtctacttttttttacagaaaagaggccaggcatggtggctcatgtctgtagtcccagcactttgggaggatcaaggtaggcagatcgtattgagaccatgctctgggcagcatcgcgaaatcccatctctacaaaataatagaaaagttagctgggcgttcgtggtgtgcgccatgtaggtcccaggtacttgggaggctgaggcaggaggatcacctgagccgaggaaacgaggctgtggtgagtctgtga

SEQ ID NO: 527705 - DNA, 389 bp, Homo sapiens
actagcataacactatctgtatgtctatcctcgtcagacccgctgctcctttttcaactaagtttaagtcatattctaagtccctcgttgccagttgaataatgctcacagcatcttcaccaggactagattctacctcaagaaaccacgttctttgctcattcattaaaagcaactcctcatccattcaagttttatgagattgcagcaatccagttacatcttcaggctgcacttctaattctagttctcttgctatttccaccatatgtgtagttgcttcctacactgaaggcttgaaccccttaaagtcatccatgagggttggaatcaacttcttccaaactcctgttaatgttgacactttgaccttcttcctgaatcatgag

SEQ ID NO: 527706 - DNA, 274 bp, Homo sapiens
tgggatctgagccccttatgttcttctggcagtagcgtgccctccagacacagccctctggctgcatctcctgcctcctgcccactccccaaacccagtcgcccatgagcccagcctcctccaggaagccctcaggcttccggcatgtccatcaggaagctgcaggtcccgggctgactatgaaggaccagctgagagtcgaagcttcctgaatttcaatctgctgtgtagcttcagagcacgcacctgtgggctctctgaacctatttcccca

SEQ ID NO: 527707 - DNA, 857 bp, Homo sapiens
gaacccggaaccatggacagtgtccgctcagggcctttggtacatctcttcggcctgagactttcctctttggtcagcagtggggccggcacaactgggccaagggtcactacacggaaggagtgtgaaaactgctaactgcctgcagggcttccaagctgacccactcgctgggtggcggcacgtggctccggcatgggccgttgctcatcagcaaaggtgcgtgaggaatatcccgacctgcgataatgaacaccttcaagcgtcgtgccctctaccccaaggtgtcgagacacgagtggtgatagccctacaacgccatcgctgtccatccaccagactggtggagaacacggatgagacctactgcatcgacaacgagtgctgctctacgtacaatctgcgttccgccatccctcaagctggccacgcctcgactctacggggacctcgaagtcacctggtatcggccgaccatgagcggagtcaccaggctccttgcgcttcccgggccagctcaacgctgacctgcgcaagctggccgtcaacatggtgcccttcccgtgcctgcacttcttcatgcccggtttcgcccccctcacagtcccggggcagccagcagtatcgggggcctgagcgtgcccgagctcacccagcagatgttcgatgccaagatcatgtatggccgcctgctatccgagccacggactgctacctgacggtggccgccgtgttccgggggccgcatgtccattaatgacgggtggaccgacagatgctgggcatccaagaagcagaacagagttactttgtggagtgggatcccccaaaggtgaaggtggccttgtttaatccgc

SEQ ID NO: 527708 - DNA, 162 bp, Homo sapiens
atggcccctggtattactttcccgtgttcgtcgcgccatcattggtatatggttcgtgtgttggttagtcggcctagtatgaggagcgttctggagtggaagtgaaatcacatggctaggccggagttcattaggagggctgagagggcccctgttaggggt

SEQ ID NO: 527709 - DNA, 142 bp, Homo sapiens
tagccgaggaggtaacgtacatctcaatgtatcccagcaaagatacaactctagtaggtcaaggagggatagctatccttgtattgcgatctatatagcctatgacattactacaataggtagtacactacaggctaccact

SEQ ID NO: 527710 - DNA, 604 bp, Homo sapiens
  misc_feature (42)..(42): n is a, c, g, or t
  misc_feature (60)..(60): n is a, c, g, or t
  misc_feature (70)..(70): n is a, c, g, or t
  misc_feature (78)..(78): n is a, c, g, or t
  misc_feature (84)..(84): n is a, c, g, or t
  misc_feature (95)..(96): n is a, c, g, or t
  misc_feature (102)..(102): n is a, c, g, or t
  misc_feature (117)..(117): n is a, c, g, or t
  misc_feature (320)..(320): n is a, c, g, or t
  misc_feature (376)..(376): n is a, c, g, or t
  misc_feature (394)..(394): n is a, c, g, or t
  misc_feature (554)..(554): n is a, c, g, or t
  misc_feature (565)..(565): n is a, c, g, or t
ctgtgcccttccgctgactcctactgttcctgaggtgcaatnctgttgtaacacaagggncaggctccantctccctncctttncaccagtgccnnagcctngtctggaaaaaggancaggggttccggaggaacccatttgtgctttgcttggacagcaggcctggcactgggaggtgggggtgagccccttacaaccttgcccctccccaagggtggcaacctgccttccattgcccaaagagagggcagggaacagggtactgtcctttcctgtggaaatgccgaaaaatttagccccttgcatgctggatttgggntgcggggaggctttttttttccctggcctccagtgccccccaggaggatttgggcncggtgcacagccccccanagcactacagccttttatttagtggggtggggcaaatgctgggctgtggttgtgccctgacagcattttccccaggcaacggctttgtggaggaggccatactcccctagttggcccctggggccccccccctgaccccccctgtgcccctcattgttantaccttgtganataaaaactgatttaacctttgtggctgtggttggctga

SEQ ID NO: 527711 - DNA, 282 bp, Homo sapiens
cgcaagaagcttagtatactaggtacagaatatataaataacttaaataatttactaagagtagtaagcgttatttgcatcagtaagacagggaacacagtgactgcttttgcttggtttggtgagacagggtcggctctgtgcccagggtggagtggagtagtgcaatctcagctcactgcaacctcgatcacccctccatcgccgctccgaagcgcccgcaagctcggtcaagcgatggtcccaccacagcttccagagtagctgggattacaggcgcct

SEQ ID NO: 527712 - DNA, 780 bp, Homo sapiens
cgtgacgtacccgtgaagcacgtgtacagagtcctgcagtgtcaggaagaagagctcacgcagatggtgtccacgatgtccgacggctggaaattcgaacagctcatcagcatcggatcttcctataactacggcaatgaggatcaggcagaattcctctgtgttgtctccagagaactaaataattctaccaatggcatcgtcatagagccgagcgaaaaggcgaagattcttcaggagagaggatcgcggatgtaaactaagaccccgaaaactccagaccttcaggagagcagtcagcagagcccctctgtgaagtgaaacctcactcctgtccagtgaccgagccactgcaaagcacagctgatcctggcccccccccaggtctgggacgcaggtgatgccagccaggcccaggagtgcccagcatcccccaactgatgacacagtagcactgattctgtcttttcctcagaatctggcctttttccatggcaatgaggtggggcccagcctcctctaaagtgactttgtttctgcacagttgtaactgctcttggggatgtcagtgaggctgggagcagggagccacgggatgctgagagaggaggcccgagaggacaccccaccctccagcgtggcctttgatccagacttagggacgaggctgtcactggtgggcaccctctgttcctgtttgtgtgtttgaatagtctgaaatgctgtgactttttttgtgtgaataaagatatgaaacttctgaatctcaaaaaaaaaaaa

SEQ ID NO: 527713 - DNA, 270 bp, Homo sapiens
gaggccttgtggagaagggctcagaaaagcctgactagagtttggttaaggagagaatcttggtcagcagctgtgttagttaagaggctattgcagagtccaggaggaagatcatgggggtttggactgtgggtagcagtatacatggagacaagtagatgattatgggagatattttagagagggggctaagaagacgtgcttttgaattggtatactccctgtggaattgattgaaaatggtttctttttccttgactgaaaaagact

SEQ ID NO: 527714 - DNA, 3107 bp, Homo sapiens
cgtgacgtacccgtgaagcacgtgtacagagtcctgcagtgtcaggaagaagagctcacgcagatggtgtccacgatgtccgacggctggaaattcgaacagctcatcagcatcggatcttcctataactacggcaatgaggatcaggcagaattcctctgtgttgtctccagagaactaaataattctaccaatggcatcgtcatagagccgagcgaaaaggcgaagattcttcaggagagaggatcgcggatgtaaactaagaccccgaaaactccagaccttcaggagagcagtcagcagagcccctctgtgaagtgaaacctcactcctgtccagtgaccgagccactgcaaagcacagctgatcctggccccctgtgaagaagtgttctggtcaaaactaaaggaactccctccccacctgcaggactccgaagacagtgcgacttctggctgcagaataccttttcagaaacctgctttcatttgcttagccagtattagaacagatctttacaacagcagctgggctgggttcccagtcggagcctttcggggatctgggggatgagggcggaaggcctagctccttggaaatggcctgtactttaaggacgctggagccaagaggattgttcccgtgccgtgccatggtttcaccctatgtgtgccacaatggacgttagcagctgcttcggaacaccgtccctcctatgcaccctccaagacgtgcagcagatgcaaagggttctagctgcagtttgtcgaattgaggttttaggtaaagcatagagttgccagagtaccccgcattcccatgaatagagcctccaaggaaagggaggatggggtgtcctttgttgtggttggaggttggtgatcattgctctggatttggggctcccggctgccaccacatgcagctttgcctcacctttctccagcagccgggaccctctggagagcttgttttccctccaagaagaggtttgagacaggcggcatcctgcactgagtcagacaagtgggagctgtaggaactgcacctgcagcctcttcttactccccattgaccctgtcttccttccctggctttttcaactggaccaaagatgaaggcacttatggaccctttgatggcttggagtggggaaggctgtttctttgaaagttgccaaatgtgttatgttgtgtctcagagagagttatttctgtgactctcttggaaatgccttgactgaatgtgcaatatttgtgtctcttggtttctaaccttggcggacctgctcccctctgtactgtccccagtggtatgtatgtatgtgctaggcagtctggggaccccctgtgtctctgaccacccccctgacccccgccattactttcttttctggagtgccatgctggcgaggatccggatgcggcagcaccctctttcgggctgcatccacagagtttgtgtccacactttctctccgagcatgtgggtctcgctgagcagtcatggaatgcggtagagccaggggaccctgtctgccccgaataactttcagtagtatggcagatggcacagagaaagggaaggggctctggggacttctccttctatgaaagcctcctcgagccaggtgctcctgggcaccttcagaagtgatgtcctgtgtgctccacagctcacctgcttgccaaggtacgtctgggtagtagtttctggaaatgactgcagactgtgccaaatgtcttttgagcttctgacctgaccatgcccagatggcataacttttccctaggaccctcagtctccttgtttctctgtatctgtagcatagcatagaacccggtatacaggggtttctgctgacacatcaacgtctacacacctatgcgccacattttacagctgtaaagtgttagatgaactgccgtcctcagtaaaagcagccaccccttcaagagtcacaggcatccatccagtcgtatctttcagagaaaaaaaaagttagatgtagccaaggaaagtagtgatcacgggaaggactgctctgagccgggtaggatggaggactttggaagaggcgctccttggccaggtccaatgagtaacatcagactgacagaggaaaagcagcttggtttgcggccttgtgcccagtctcgttgaggcgcttgtccctgtctgctttcctggggcatgcctgatcagcgtgggctggagctcctagaccaaccccagctttctcaccaggttcagcaaggaggcctgggggtcagacaccaatgttgagcacctcctgagggcgccgtttccttcattcctcttagattccatagttgccgccatgaaaagactgctcttgagccccaaggcacaggcacgtgctctgggaaatagacaggagtggtatttccgccctctcggagggctggtgttcaccaagtttccctcctcgctgcaacccaatgacacctgtattgttccagcgctccaggactctgggttcttaagatttctgggagcgttgttcacccaccccctttaggaaccaggctggtgttcttgcttgaaagcgttgtgccctctgagtgtctggctgatcacatcagagaggtctgcgtggcagtttggggctgtcacgtgaccagtgacccacactctctgctgcccagtactgccaagtggggagggtcctgcctttttctctgccccaggtctgggacgcaggtgatgccagccaggcccaggagtgcccagcatcccccaactgatgacacagtagcactgattctgtcttttcctcagaatctggcctttttccatggcaatgaggtggggcccagcctcctctaaagtgactttgtttctgcacagttgtaactgctcttggggatgtcagtgaggctgggagcagggagccacgggatgctgagagaggaggcccgagaggacaccccaccctccagcgtggcctttgatccagacttagggacgaggctgtcactggtgggcaccctctgttcctgtttgtgtgtttgaatagtctgaaatgctgtgactttttttgtgtgaataaagatatgaaacttctgaatctcaaaaaaaaaaaa

SEQ ID NO: 527715 - DNA, 195 bp, Homo sapiens
tgtcaccaagttgttattgattaacgtacggcagtttctgtgtgtcagcactattctcaatgcagatgctgttgaacagctcttatgaatttatttctcgaggcagtcctatggggcattaccattatccccattttgcagatgaggacaattgagacacagagaagttgagtaatttgcttagggtcctttaca

SEQ ID NO: 527716 - DNA, 2805 bp, Homo sapiens
cgtgacgtacccgtgaagcacgtgtacagagtcctgcagtgtcaggaagaagagctcacgcagatggtgtccacgatgtccgacggctggaaattcgaacagctcatcagcatcggatcttcctataactacggcaatgaggatcaggcagaattcctctgtgttgtctccagagaactaaataattctaccaatggcatcgtcatagagccgagcgaaaaggcgaagattcttcaggagagaggatcgcggatgtaaactaagaccccgaaaactccagaccttcaggagagcagtcagcagagcccctctgtgaagtgaaacctcactcctgtccagtgaccgagccactgcaaagcacagctgatcctggccccctgtgaagaagtgttctggtcaaaactaaaggaactccctccccacctgcaggactccgaagacagtgcgacttctggctgcagaataccttttcagaaacctgctttcatttgcttagccagtattagaacagatctttacaacagcagctgggctgggttcccagtcggagcctttcggggatctgggggatgagggcggaaggcctagctccttggaaatggcctgtactttaaggacgctggagccaagaggattgttcccgtgccgtgccatggtttcaccctatgtgtgccacaatggacgttagcagctgcttcggaacaccgtccctcctatgcaccctccaagacgtgcagcagatgcaaagggttctagctgcagtttgtcgaattgaggttttaggtaaagcatagagttgccagagtaccccgcattcccatgaatagagcctccaaggaaagggaggatggggtgtcctttgttgtggttggaggttggtgatcattgctctggatttggggctcccggctgccaccacatgcagctttgcctcacctttctccagcagccgggaccctctggagagcttgttttccctccaagaagaggtttgagacaggcggcatcctgcactgagtcagacaagtgggagctgtaggaactgcacctgcagcctcttcttactccccattgaccctgtcttccttccctggctttttcaactggaccaaagatgaaggcacttatggaccctttgatggcttggagtggggaaggctgtttctttgaaagttgccaaatgtgttatgttgtgtctcagagagagttatttctgtgactctcttggaaatgccttgactgaatgtgcaatatttgtgtctcttggtttctaaccttggcggacctgctcccctctgtactgtccccagtggtatgtatgtatgtgctaggcagtctggggaccccctgtgtctctgaccacccccctgacccccgccattactttcttttctggagtgccatgctggcgaggatccggatgcggcagcaccctctttcgggctgcatccacagagtttgtgtccacactttctctccgagcatgtgggtctcgctgagcagtcatggaatgcggtagagccaggggaccctgtctgccccgaataactttcagtagtatggcagatggcacagagaaagggaaggggctctggggacttctccttctatgaaagcctcctcgagccaggtgctcctgggcaccttcagaagtgatgtcctgtgtgctccacagctcacctgcttgccaaggtacgtctgggtagtagtttctggaaatgactgcagactgtgccaaatgtcttttgagcttctgacctgaccatgcccagatggcataacttttccctaggaccctcagtctccttgtttctctgtatctgtagcatagcatagaacccggtatacaggggtttctgctgacacatcaacgtctacacacctatgcgccacattttacagctgtaaagtgttagatgaactgccgtcctcagtaaaagcagccaccccttcaagagtcacaggcatccatccagtcgtatctttcagagaaaaaaaaagttagatgtagccaaggaaagtagtgatcacgggaaggactgctctgagccgggtaggatggaggactttggaagaggcgctccttggccaggtccaatgagtaacatcagactgacagaggaaaagcagcttggtttgcggccttgtgcccagtctcgttgaggcgcttgtccctgtctgctttcctggggcatgcctgatcagcgtgggctggagctcctagaccaaccccagctttctcaccaggttcagcaaggaggcctgggggtcagacaccaatgttgagcacctcctgagggcgccgtttccttcattcctcttagattccatagttgccgccatgaaaagactgctcttgagccccaaggcacaggcacgtgctctgggaaatagacaggagtggtatttccgccctctcggagggctggtgttcaccaagtttccctcctcgctgcaacccaatgacacctgtattgttccagcgctccaggactctgggttcttaagatttctgggagcgttgttcacccaccccctttaggaaccaggctggtgttcttgcttgaaagcgttgtgccctctgagtgtctggctgatcacatcagagaggtctgcgtggcagtttggggctgtcacgtgaccagtgacccacactctctgctgcccagtactgccaagtggggagggtcctgcctttttctctgccccaggtctgggacgcaggtgatgccagccaggcccaggagtgcccagcatcccccaactgatgacacagtagcaccaagcaccagcacgaattccctt

SEQ ID NO: 527717 - DNA, 2426 bp, Homo sapiens
cgtgacgtacccgtgaagcacgtgtacagagtcctgcagtgtcaggaagaagagctcacgcagatggtgtccacgatgtccgacggctggaaattcgaacagctcatcagcatcggatcttcctataactacggcaatgaggatcaggcagaattcctctgtgttgtctccagagaactaaataattctaccaatggcatcgtcatagagccgagcgaaaaggcgaagattcttcaggagagaggatcgcggatgtaaactaagaccccgaaaactccagaccttcaggagagcagtcagcagagcccctctgtgaagtgaaacctcactcctgtccagtgaccgagccactgcaaagcacagctgatcctggccccctgtgaagaagtgttctggtcaaaactaaaggaactccctccccacctgcaggactccgaagacagtgcgacttctggctgcagaataccttttcagaaacctgctttcatttgcttagccagtattagaacagatctttacaacagcagctgggctgggttcccagtcggagcctttcggggatctgggggatgagggcggaaggcctagctccttggaaatggcctgtactttaaggacgctggagccaagaggattgttcccgtgccgtgccatggtttcaccctatgtgtgccacaatggacgttagcagctgcttcggaacaccgtccctcctatgcaccctccaagacgtgcagcagatgcaaagggttctagctgcagtttgtcgaattgaggttttaggtaaagcatagagttgccagagtaccccgcattcccatgaatagagcctccaaggaaagggaggatggggtgtcctttgttgtggttggaggttggtgatcattgctctggatttggggctcccggctgccaccacatgcagctttgcctcacctttctccagcagccgggaccctctggagagcttgttttccctccaagaagaggtttgagacaggcggcatcctgcactgagtcagacaagtgggagctgtaggaactgcacctgcagcctcttcttactccccattgaccctgtcttccttccctggctttttcaactggaccaaagatgaaggcacttatggaccctttgatggcttggagtggggaaggctgtttctttgaaagttgccaaatgtgttatgttgtgtctcagagagagttatttctgtgactctcttggaaatgccttgactgaatgtgcaatatttgtgtctcttggtttctaaccttggcggacctgctcccctctgtactgtccccagtggtatgtatgtatgtgctaggcagtctggggaccccctgtgtctctgaccacccccctgacccccgccattactttcttttctggagtgccatgctggcgaggatccggatgcggcagcaccctctttcgggctgcatccacagagtttgtgtccacactttctctccgagcatgtgggtctcgctgagcagtcatggaatgcggtagagccaggggaccctgtctgccccgaataactttcagtagtatggcagatggcacagagaaagggaaggggctctggggacttctccttctatgaaagcctcctcgagccaggtgctcctgggcaccttcagaagtgatgtcctgtgtgctccacagctcacctgcttgccaaggtacgtctgggtagtagtttctggaaatgactgcagactgtgccaaatgtcttttgagcttctgacctgaccatgcccagatggcataacttttccctaggaccctcagtctccttgtttctctgtatctgtagcatagcatagaacccggtatacaggggtttctgctgacacatcaacgtctacacacctatgcgccacattttacagctgtaaagtgttagatgaactgccgtcctcagtaaaagcagccaccccttcaagagtcacaggcatccatccagtcgtatctttcagagaaaaaaaaagttagatgtagccaaggaaagtagtgatcacgggaaggactgctctgagccgggtaggatggaggactttggaagaggcgctccttggccaggtccaatgagtaacatcagactgacagaggaaaagcagcttggtttgcggccttgtgcccagtctcgttgaggcgcttgtccctgtctgctttcctggggcatgcctgatcagcgtgggctggagctcctagaccaaccccagctttctcaccaggttcagcaaggaggcctgggggtcagacaccaatgttgagcacctcctgagggcgccgtttccttcattcctcttagattccatagttgccgccatgaaaagactgctcttgagcaacttggtcacacgcacttggtcacacgcaatttggcaccctctaaatcaccacgatcaaaagg

SEQ ID NO: 527718 - DNA, 1741 bp, Homo sapiens
  misc_feature (1679)..(1679): n is a, c, g, or t
  misc_feature (1727)..(1727): n is a, c, g, or t
cgtgacgtacccgtgaagcacgtgtacagagtcctgcagtgtcaggaagaagagctcacgcagatggtgtccacgatgtccgacggctggaaattcgaacagctcatcagcatcggatcttcctataactacggcaatgaggatcaggcagaattcctctgtgttgtctccagagaactaaataattctaccaatggcatcgtcatagagccgagcgaaaaggcgaagattcttcaggagagaggatcgcggatgtaaactaagaccccgaaaactccagaccttcaggagagcagtcagcagagcccctctgtgaagtgaaacctcactcctgtccagtgaccgagccactgcaaagcacagctgatcctggccccctgtgaagaagtgttctggtcaaaactaaaggaactccctccccacctgcaggactccgaagacagtgcgacttctggctgcagaataccttttcagaaacctgctttcatttgcttagccagtattagaacagatctttacaacagcagctgggctgggttcccagtcggagcctttcggggatctgggggatgagggcggaaggcctagctccttggaaatggcctgtactttaaggacgctggagccaagaggattgttcccgtgccgtgccatggtttcaccctatgtgtgccacaatggacgttagcagctgcttcggaacaccgtccctcctatgcaccctccaagacgtgcagcagatgcaaagggttctagctgcagtttgtcgaattgaggttttaggtaaagcatagagttgccagagtaccccgcattcccatgaatagagcctccaaggaaagggaggatggggtgtcctttgttgtggttggaggttggtgatcattgctctggatttggggctcccggctgccaccacatgcagctttgcctcacctttctccagcagccgggaccctctggagagcttgttttccctccaagaagaggtttgagacaggcggcatcctgcactgagtcagacaagtgggagctgtaggaactgcacctgcagcctcttcttactccccattgaccctgtcttccttccctggctttttcaactggaccaaagatgaaggcacttatggaccctttgatggcttggagtggggaaggctgtttctttgaaagttgccaaatgtgttatgttgtgtctcagagagagttatttctgtgactctcttggaaatgccttgactgaatgtgcaatatttgtgtctcttggtttctaaccttggcggacctgctcccctctgtactgtccccagtggtatgtatgtatgtgctaggcagtctggggaccccctgtgtctctgaccacccccctgacccccgccattactttcttttctggagtgccatgctggcgaggatccggatgcggcagcaccctctttcgggctgcatccacagagtttgtgtccacactttctctccgagcatgtgggtctcgctgagcagtcatggaatgcggtagagccaggggaccctgtctgccccgaataactttcagtagtatggcagatggcacagagaaagggaaggggctctggggacttctccttctatgaaagcctcctcgagccaggtgctcctgggcaccttcagaagtgatgtcctgtgtgctccacagcttnctcaccaggttcagcaaggaggcctagagaggtcacatgacttgctanagagagatgcgcat

SEQ ID NO: 527719 - DNA, 332 bp, Homo sapiens
gtagagagtatgaagtttctgacctgagtacgagaggtgactcgtccaggggtctgtccagttgccggaaattcagtgcatgaagataagaacgttgctggacgaaactacatgccccacgttcctgacaaccctcttcattactacgaataacttgctgtgacgcactgttaaacgacacctgtgcagaccgcctggtactccacgacagaactactgacaatttgcaaccaaacagaacgggctgcttcctcactagggccaccttgactgagcacttacgtgacacggcattccccatatggcctgaccgggtacccgacgctcgaact

SEQ ID NO: 527720 - DNA, 1656 bp, Homo sapiens
cgtgacgtacccgtgaagcacgtgtacagagtcctgcagtgtcaggaagaagagctcacgcagatggtgtccacgatgtccgacggctggaaattcgaacagctcatcagcatcggatcttcctataactacggcaatgaggatcaggcagaattcctctgtgttgtctccagagaactaaataattctaccaatggcatcgtcatagagccgagcgaaaaggcgaagattcttcaggagagaggatcgcggatgtaaactaagaccccgaaaactccagaccttcaggagagcagtcagcagagcccctctgtgaagtgaaacctcactcctgtccagtgaccgagccactgcaaagcacagctgatcctggccccctgtgaagaagtgttctggtcaaaactaaaggaactccctccccacctgcaggactccgaagacagtgcgacttctggctgcagaataccttttcagaaacctgctttcatttgcttagccagtattagaacagatctttacaacagcagctgggctgggttcccagtcggagcctttcggggatctgggggatgagggcggaaggcctagctccttggaaatggcctgtactttaaggacgctggagccaagaggattgttcccgtgccgtgccatggtttcaccctatgtgtgccacaatggacgttagcagctgcttcggaacaccgtccctcctatgcaccctccaagacgtgcagcagatgcaaagggttctagctgcagtttgtcgaattgaggttttaggtaaagcatagagttgccagagtaccccgcattcccatgaatagagcctccaaggaaagggaggatggggtgtcctttgttgtggttggaggttggtgatcattgctctggatttggggctcccggctgccaccacatgcagctttgcctcacctttctccagcagccgggaccctctggagagcttgttttccctccaagaagaggtttgagacaggcggcatcctgcactgagtcagacaagtgggagctgtaggaactgcacctgcagcctcttcttactccccattgaccctgtcttccttccctggctttttcaactggaccaaagatgaaggcacttatggaccctttgatggcttggagtggggaaggctgtttctttgaaagttgccaaatgtgttatgttgtgtctcagagagagttatttctgtgactctcttggaaatgccttgactgaatgtgcaatatttgtgtctcttggtttctaaccttggcggacctgctcccctctgtactgtccccagtggtatgtatgtatgtgctaggcagtctggggaccccctgtgtctctgaccacccccctgacccccgccattactttcttttcttctaaagtgactttgtttctgcacagttgtaactgctcttggggatgtcagtgaggctgggagcagggagccacgggatgctgagagaggaggcccgagaggacaccccaccctccagcgtggcctttgatccagacttagggacgaggctgtcactggtgggcaccctctgttcctgtttgtgtgtttgaatagtctgaaatgctgtgactttttttgtgtgaataaagatatgaaacttctgaatctcaaaaaaaaaaaa

SEQ ID NO: 527721 - DNA, 318 bp, Homo sapiens
  misc_feature (314)..(314): n is a, c, g, or t
agaaaaatcaacatgggtgggtcaggctttacgctgtggtactgcctccctttctgatacagcctgatgttgggagctgcataaaggctcattaggacccatggcagtttggtttgtaagagtgttttaatgaatcataaaacctccgtgaatttgccatccactgacatggtgcagcctggaaaatttccgtgcctcctgacttgagtaactgtaaggcatattgtggtgtgatacagttaacataggctatggaaagaaaaaatattcctttcaatctgcagcaatcctccttcccccaaataatataatancccc

SEQ ID NO: 527722 - DNA, 1639 bp, Homo sapiens
cgtgacgtacccgtgaagcacgtgtacagagtcctgcagtgtcaggaagaagagctcacgcagatggtgtccacgatgtccgacggctggaaattcgaacagctcatcagcatcggatcttcctataactacggcaatgaggatcaggcagaattcctctgtgttgtctccagagaactaaataattctaccaatggcatcgtcatagagccgagcgaaaaggcgaagattcttcaggagagaggatcgcggatgtaaactaagaccccgaaaactccagaccttcaggagagcagtcagcagagcccctctgtgaagtgaaacctcactcctgtccagtgaccgagccactgcaaagcacagctgatcctggccccctgtgaagaagtgttctggtcaaaactaaaggaactccctccccacctgcaggactccgaagacagtgcgacttctggctgcagaataccttttcagaaacctgctttcatttgcttagccagtattagaacagatctttacaacagcagctgggctgggttcccagtcggagcctttcggggatctgggggatgagggcggaaggcctagctccttggaaatggcctgtactttaaggacgctggagccaagaggattgttcccgtgccgtgccatggtttcaccctatgtgtgccacaatggacgttagcagctgcttcggaacaccgtccctcctatgcaccctccaagacgtgcagcagatgcaaagggttctagctgcagtttgtcgaattgaggttttaggtaaagcatagagttgccagagtaccccgcattcccatgaatagagcctccaaggaaagggaggatggggtgtcctttgttgtggttggaggttggtgatcattgctctggatttggggctcccggctgccaccacatgcagctttgcctcacctttctccagcagccgggaccctctggagagcttgttttccctccaagaagaggtttgagacaggcggcatcctgcactgagtcagacaagtgggagctgtaggaactgcacctgcagcctcttcttactccccattgaccctgtcttccttccctggctttttcaactggaccaaagatgaaggcacttatggaccctttgatggcttggagtggggaaggctgtttctttgaaagttgccaaatgtgttatgttgtgtctcagagagagttatttctgtgactctcttggaaatgccttgactgaatgtgcaatatttgtgtctcttggtttctaaccttggcggacctgctcccctctgtactgtccccagtggtatgtatgtatgtgctaggcagtctggggaccccctgtgtctctgaccacccccctgacccccgccattactttcttttctggagtgccatgctggcgaggatccggatgcggcagcaccctctttcgggctgcatccacagagtttgtgtccacactttctctccgagccccaccctccagcgtggcctttgatccagacttagggacgaggctgtcactggtgggcaccctctgttcctgtttgtgtgtttgaatagtctgaaatgctgtgactttttttgtgtgaataaagatatgaaacttctgaatctcaaaaaaaaaaaa

SEQ ID NO: 527723 - DNA, 369 bp, Homo sapiens
catcataccatcagagcccagataggtgtgatgactcacccatgtagacaggtatgtatgttgacagctattgaacaccagaactagtgcttcagttgcgacgtgtatcgtcgatcctttgagcgacctcacatatcctcagatacatcttctccagagccaatcttgtagtagctagaacttcatggggggttctgtcacaagcttagaataccatgatcttggtgtcgcaacgcttcagccatgctgtcggtggtatctcgggtaccgttctcgagaactgcatccttggtgcttatcttgttgcagcttgaacatcataaagtgtacttacacaaacctagatgggataatctgctgcacacctag

SEQ ID NO: 527724 - DNA, 1525 bp, Homo sapiens
cgtgacgtacccgtgaagcacgtgtacagagtcctgcagtgtcaggaagaagagctcacgcagatggtgtccacgatgtccgacggctggaaattcgaacagctcatcagcatcggatcttcctataactacggcaatgaggatcaggcagaattcctctgtgttgtctccagagaactaaataattctaccaatggcatcgtcatagagccgagcgaaaaggcgaagattcttcaggagagaggatcgcggatgtaaactaagaccccgaaaactccagaccttcaggagagcagtcagcagagcccctctgtgaagtgaaacctcactcctgtccagtgaccgagccactgcaaagcacagctgatcctggccccctgtgaagaagtgttctggtcaaaactaaaggaactccctccccacctgcaggactccgaagacagtgcgacttctggctgcagaataccttttcagaaacctgctttcatttgcttagccagtattagaacagatctttacaacagcagctgggctgggttcccagtcggagcctttcggggatctgggggatgagggcggaaggcctagctccttggaaatggcctgtactttaaggacgctggagccaagaggattgttcccgtgccgtgccatggtttcaccctatgtgtgccacaatggacgttagcagctgcttcggaacaccgtccctcctatgcaccctccaagacgtgcagcagatgcaaagggttctagctgcagtttgtcgaattgaggttttaggtaaagcatagagttgccagagtaccccgcattcccatgaatagagcctccaaggaaagggaggatggggtgtcctttgttgtggttggaggttggtgatcattgctctggatttggggctcccggctgccaccacatgcagctttgcctcacctttctccagcagccgggaccctctggagagcttgttttccctccaagaagaggtttgagacaggcggcatcctgcactgagtcagacaagtgggagctgtaggaactgcacctgcagcctcttcttactccccattgaccctgtcttccttccctggctttttcaactggaccaaagatgaaggcacttatggaccctttgatggcttggagtggggaaggctgtttctttgaaagttgccaaatgtgttatgttgtgtctcagagagagttatttctgtgactctcttggaaatgccttgactgaatgtgcaatatttgtgtctcttggtttctaaccttggcggacctgctcccctctgtactgtccccagtggtatgtatgtatgtgctaggcagtctggggaccccctgtgtctctgaccaccccccccccaccctccagcgtggcctttgatccagacttagggacgaggctgtcactggtgggcaccctctgttcctgtttgtgtgtttgaatagtctgaaatgctgtgactttttttgtgtgaataaagatatgaaacttctgaatctcaaaaaaaaaaaa

SEQ ID NO: 527725 - DNA, 1435 bp, Homo sapiens
cgtgacgtacccgtgaagcacgtgtacagagtcctgcagtgtcaggaagaagagctcacgcagatggtgtccacgatgtccgacggctggaaattcgaacagctcatcagcatcggatcttcctataactacggcaatgaggatcaggcagaattcctctgtgttgtctccagagaactaaataattctaccaatggcatcgtcatagagccgagcgaaaaggcgaagattcttcaggagagaggatcgcggatgtaaactaagaccccgaaaactccagaccttcaggagagcagtcagcagagcccctctgtgaagtgaaacctcactcctgtccagtgaccgagccactgcaaagcacagctgatcctggccccctgtgaagaagtgttctggtcaaaactaaaggaactccctccccacctgcaggactccgaagacagtgcgacttctggctgcagaataccttttcagaaacctgctttcatttgcttagccagtattagaacagatctttacaacagcagctgggctgggttcccagtcggagcctttcggggatctgggggatgagggcggaaggcctagctccttggaaatggcctgtactttaaggacgctggagccaagaggattgttcccgtgccgtgccatggtttcaccctatgtgtgccacaatggacgttagcagctgcttcggaacaccgtccctcctatgcaccctccaagacgtgcagcagatgcaaagggttctagctgcagtttgtcgaattgaggttttaggtaaagcatagagttgccagagtaccccgcattcccatgaatagagcctccaaggaaagggaggatggggtgtcctttgttgtggttggaggttggtgatcattgctctggatttggggctcccggctgccaccacatgcagctttgcctcacctttctccagcagccgggaccctctggagagcttgttttccctccaagaagaggtttgagacaggcggcatcctgcactgagtcagacaagtgggagctgtaggaactgcacctgcagcctcttcttactccccattgaccctgtcttccttccctggctttttcaactggaccaaagatgaaggcacttatggaccctttcctttttccatggcaatgaggtggggcccagcctcctctaaagtgactttgtttctgcacagttgtaactgctcttggggatgtcagtgaggctgggagcagggagccacgggatgctgagagaggaggcccgagaggacaccccaccctccagcgtggcctttgatccagacttagggacgaggctgtcactggtgggcaccctctgttcctgtttgtgtgtttgaatagtctgaaatgctgtgactttttttgtgtgaataaagatatgaaacttctgaatctcaaaaaaaaaaaa

SEQ ID NO: 527726 - DNA, 1307 bp, Homo sapiens
cgtgacgtacccgtgaagcacgtgtacagagtcctgcagtgtcaggaagaagagctcacgcagatggtgtccacgatgtccgacggctggaaattcgaacagctcatcagcatcggatcttcctataactacggcaatgaggatcaggcagaattcctctgtgttgtctccagagaactaaataattctaccaatggcatcgtcatagagccgagcgaaaaggcgaagattcttcaggagagaggatcgcggatgtaaactaagaccccgaaaactccagaccttcaggagagcagtcagcagagcccctctgtgaagtgaaacctcactcctgtccagtgaccgagccactgcaaagcacagctgatcctggccccctgtgaagaagtgttctggtcaaaactaaaggaactccctccccacctgcaggactccgaagacagtgcgacttctggctgcagaataccttttcagaaacctgctttcatttgcttagccagtattagaacagatctttacaacagcagctgggctgggttcccagtcggagcctttcggggatctgggggatgagggcggaaggcctagctccttggaaatggcctgtactttaaggacgctggagccaagaggattgttcccgtgccgtgccatggtttcaccctatgtgtgccacaatggacgttagcagctgcttcggaacaccgtccctcctatgcaccctccaagacgtgcagcagatgcaaagggttctagctgcagtttgtcgaattgaggttttaggtaaagcatagagttgccagagtaccccgcattcccatgaatagagcctccaaggaaagggaggatggggtgtcctttgttgtggttggaggttggtgatcattgctctggatttggggctcccggctgccaccacatgcagctttgcctcacctttctccagcagccgggaccctctggagagcttgttttccctccaagaagaggtttgagacaggcggcatcctgcactgagtcagacaagtgggagctgtaggaactgcacctgcagcctcttcttactccccctcccctctgtactgtccccagtggtatgtatgtatgtgctaggcagtctggggaccccctgtgtctctgaccaccccccccccaccctccagcgtggcctttgatccagacttagggacgaggctgtcactggtgggcaccctctgttcctgtttgtgtgtttgaatagtctgaaatgctgtgactttttttgtgtgaataaagatatgaaacttctgaatctcaaaaaaaaaaaa

SEQ ID NO: 527727 - DNA, 407 bp, Homo sapiens
acctttactcacaggcggaggttacgccgacgatcatctggtctgtacgacaatcgaccagtgtgcaaacagtgggaagaattccgcgaacagtacacaccgtgggtgggtacatcagcaccgaaggcggtgggcagcaatgctcgcatggacgtcacggacaagtacaagtacccagaaggctctgaccaggaaagacaagtgttccaaaaggctttggggaaacttaaacccaacacgccatttgccgcgacgtcttcaatgggtttggaaacagaggaacaggagcccagcatcatcgggaagctgaaggtcgctggcatgctggcagtaggcaaagaagtcaacctggtcctactgctcaaaaacctgagcagggatacgaagacagtgacagtgaacatgac

SEQ ID NO: 527728 - DNA, 180 bp, Homo sapiens
aatgcgatatcggtgaagcaaatggactcgttgacgtggcagataggccttgaccacaaacataggtggtgctgtgcatcttggactcctcgaacactgtgtgcccgcttcctgttcaaatacccctgtacgatgccacctgaccaccgtgctcgtggacactttgatctcgcacacagg

SEQ ID NO: 527729 - DNA, 1018 bp, Homo sapiens
cggcacgaggtctttttgtataactaatctcaaatgttatttggagtgagaaagagtttaaacaaatatcactaatgaccctaacttcactttcttgtgaggtgtggcagtccctggaccctgattccctgtgggcaactggatgcgctggagcttctggtcctacagagctgggattaacccagctcttttgatatgttgctcagggttcttggttccacaatcagactaactcaagctgtaagcagaaaacaaatttattgaaaggaggtcaaatagtttacaagagagctaagaatgctggtgaatgaggcctggtgtatgggaaaaaacacaggaagcaaaatagacccaagatggcatgtgaagtctgtttaagaggctaccattggcattgtcaccatgaccactagctatgatttcaccagccacacctgactctaccctccatcagaggcaccaaccttaatctctaaaggttcactggaaatttgcattgctcagtgaagaatcaaatcctagccagatgttcctagtggcctgagcttccggggaaggaaatgtctaaccctttgggcttgggctttctttattggtatttcctgaaataggagggcagggcaggcaaaatagtcaaaagtccacttcacttggtgaccctgtgaggctctaccagagcagccagccaactcatgtccctggtttattgtcacctctttttttttttttttttttttcttgagacacttgttgcccagactggagtacagtgagccaatatcgcaccactgcactccagcctgggcgacagagtgtgaaactctgtctcaaaaaaaaaaaaaaaaattcgccagttcttttctctgccctattgaaccatatatgccagagaaagagcccccaaactgtgttttttaaatgctgcaggtaatcattttcatctggaagttctgggaaaattgttctaagccaacctgtgatctcagcaaataaaacactaaacaaataccaaatttaa

SEQ ID NO: 527730 - DNA, 180 bp, Homo sapiens
aatatcttcatccaggattgatatctagtgtagtctatactcttctaataccatattatcctaatgtgcttctagttcgagataaactcttttcttctattagtaggctgtgtggcgaggccacaataaccgtgagtaggagatgcaggtttcccatacaagttcctgattagaactagg

SEQ ID NO: 527731 - DNA, 495 bp, Homo sapiens
tgtataaccttgatggtatgcccctttaataccagttgagctcgagggttgaatcatgaagggatacggatatgacaaatgctagtctgagtctgttgagatgatcatatgatatcgtcttataaatagggtgtatgtggtgtatcacatttattgattgagatgtgttcaaccatctgtgcgttcctgctgtgaacaccatttggtcatgctgtatcatattgaggatattcttttggattgggttagctcgtatttcgtagaggatatcagtatctgtgttcctcaggtatactggtctgtagttgtcttgagtatgtcatgtcctgtcctggttacggtattggggtgatgtcggcttcatagaatgactgaggatggatttcctcttgctctgtcttttggaatagtgcactaagatgggtacatttcttcttgcagtgtctgatagagttcaggtgtgaaaacctctggtcctgtactacttgagttggc

SEQ ID NO: 527732 - DNA, 202 bp, Homo sapiens
taaatttatttatgggtgtaaaaccacctttggaaccagcaattatcaagtctgaaaagcaattgatgttcccattaatcttttctctggggggaaacccttatttctaaggattataccatcctgtaattgaagttaccataacagtattccataagcagccttttattggtcaggaccattgccgtgattttattttaat

SEQ ID NO: 527733 - DNA, 788 bp, Homo sapiens
gaagacagttgatcatgactcaagatgcattggtgataatatgtgggctcttagctcttatgtatttagggatctactcactacactatttccaagatgtccctgatttgtatttacaagaacagtcaatcagagaacccactcgattaaccaatgaatcctcgatttatcattctaacaaaagcagcaacttaagagttgggttggatattagatacgattcatataaacttagaagtggaaatttgaatgatatctgggaaattgcaattcaatttgccaagaagaccgatagaggtataaatatcgacaataatttaattaccattggatatattaattattgtattgaaaacctacaattgggttcacacaaagttatttccattcctaaagattataaaattgatagtaaatggttggttgtgttatttgtgggtttgttaaacaattgactgttgagttttatattgataagccgattgctgatgatgctattgatatttcaaaaatatgtttaccatcacctccgcaaggctcttacaagtttattaacaaattatacaccagagaaagatcaaggtattgcatcagatttacaccaatcaaatttctcaaggaataaagtcgatagtttgattttacaccaatttgaatatagtccagtggggttgcatctacaatttaaacactttggccaaattctgatactttacaggaattcaaacaatggtgatgtactcggagcaattccacacaagaaggatatcacttaattgattgttaac

SEQ ID NO: 527734 - DNA, 157 bp, Homo sapiens
ccttcctcggaatgtgcgtatgctcggttcagaacatatcctctctactggcgctgcaggtgtggcaagtcatcctagctgaacgggagctcagctgcatgcttcgtgtcgcactgccacgtgtcagtgttggactgacctgtcgggctagtcgggg

SEQ ID NO: 527735 - DNA, 305 bp, Homo sapiens
  misc_feature (6)..(6): n is a, c, g, or t
  misc_feature (29)..(29): n is a, c, g, or t
  misc_feature (33)..(34): n is a, c, g, or t
  misc_feature (36)..(36): n is a, c, g, or t
  misc_feature (49)..(49): n is a, c, g, or t
  misc_feature (64)..(64): n is a, c, g, or t
  misc_feature (109)..(109): n is a, c, g, or t
  misc_feature (114)..(114): n is a, c, g, or t
  misc_feature (116)..(116): n is a, c, g, or t
  misc_feature (123)..(124): n is a, c, g, or t
  misc_feature (126)..(126): n is a, c, g, or t
  misc_feature (131)..(131): n is a, c, g, or t
  misc_feature (146)..(146): n is a, c, g, or t
  misc_feature (161)..(161): n is a, c, g, or t
  misc_feature (172)..(172): n is a, c, g, or t
  misc_feature (184)..(184): n is a, c, g, or t
  misc_feature (186)..(187): n is a, c, g, or t
  misc_feature (196)..(196): n is a, c, g, or t
  misc_feature (201)..(201): n is a, c, g, or t
  misc_feature (210)..(210): n is a, c, g, or t
  misc_feature (236)..(236): n is a, c, g, or t
  misc_feature (241)..(241): n is a, c, g, or t
  misc_feature (243)..(243): n is a, c, g, or t
  misc_feature (274)..(274): n is a, c, g, or t
tgtaanatcttttatttgtatacaattanaaannanaaacttgttttantaggttttttaaaanttatttttcgtcaacttagtcccttttatttaccagcagtttgcnctgananaaaaaannanaaacnattgttttgtttaanccctttaaccaacangtcaggcacanagggtggagaanannagcccccantttanggacagagnggaaacactgtacccaaatttagggnaagananagcggggaaaaaagccttgggcttccaaagncacaactgcttttttgcaaaactttggaaaa

SEQ ID NO: 527736 - DNA, 522 bp, Homo sapiens
gcacgagattcattcactccaagaaaagtaacagacaaggctataagaaggtcatagtgacctagtctgagaagtaaaagccaaggcccagaatgtggcaaggcaaaggttaaaaagaaaggaagagcaagtttttctctgcctagcaagctcacttcaaagacaattataagataatgctcttcgagaagtcgaaaccaaaggaataggctccagacatcccccgtctggagcaagggtgaaggaaaaaaaaaaaaggacaaatgtctgtctgtatttagccagttcttgttttttctttccacgcagctacaaggccaccagctatgcaaagccacaagttatgccaagtcatcagttatgctatagattatgtgacctgtcattatatgattaactgcctgttttgcttctgtaagcctgcttataaaaatcctgctcagtctttgttcaatgctcagctttttggatgtgaatccactgagctaatgcctaccttaaaataaacatcgtcctgttttt

SEQ ID NO: 527737 - DNA, 613 bp, Homo sapiens
gagtcctcatttctgtggaatctgaagaagcccatgcagattttaattcccagtctagattctggcttcatcgtctatgaagcactatgatgatcccgtggatagtatctagatcaccatggcgactggacagaagttgatgagagctgtcagagttgtcgaatctggtggaccagtgagtcctgaacattgcgatcagatattgcagtaccgattccaaaagaccatcaggttctaatcaaggtccatgcatgtggtgtcaaacccggtggagactatacattcgctctggtacgttatagtagaataaccactcttaccctatactcctggctcagatgtggctggggtgatagaagctgtcggcgataatgcatctgctttcaagtgcctgtgtgaaagctggagagagtgttctgcgttcatggtggcaacgtggaggacgtcggattatgcagcatgccaaattgctagagcttcatggcttcccacgattcttgggcactgctggtactgaggaaggacaacacgatagtttggcaaacctggagcccatgaacgtgttcaatcaccagagaagtgaatcacatcgataaccttacgaacgtatgtg

SEQ ID NO: 527738 - DNA, 816 bp, Homo sapiens
tttgcatccgaaaccggaaagaaatacagcggtgggaggcagggccaaaaaaaaaaaaaaaaaaaaaacaacaaaaacaaaaaaaggggggggcgccccccgcggggcttttttctattcttattttttacttcttatatatatatatagtttatgatagatcgatacctgagacaacacaccacctacctctatgtcacccggaacagaaacatcgacggcatagacctctaaaagactaaaagcacggacgcaactgaaggctaatacacaacacgatagtttcaagacacaaagcccagacaccatattactcaccgattccacaaccacacaaccacacaagcaaccacacattataaatgacacaacacgcccgcggcgtcactcccacacacaatcaaaacaacaccagagtacaagaccaagcgtagtgcaggccaggacaaaccacagatgaacaaccaccagaagaaaccacgcgacaaaacaaactccaagaacacgaagaacacaaacaacacaaaccaacaccacggcacggcacacacgcacagccgcgcaacacgcacagcaccacacacaaacaagcaaaagagagagacagaaggacactacctcaccaccaaccccgcaccaccacccacagcaagaaacgagccagcaggagcagagtgagaccaacccagacaacccacgtccgccccgaccgaccaagacagcccaccccacccacccccaccagggcggaagcaacacaccacacaccaccgcgccatgacaaccatcaacccgccccggccacacacgcaacac

SEQ ID NO: 527739 - DNA, 796 bp, Homo sapiens
ggtcccctcagagggttcctgctgctgacggtgccttggatcctccccctcccttctcgattctactgccctcagtgagcccggcgggtcgggactcccgtccgtgccggtgcgggcgctcggcttgtgtggtgtgggatggaccagggacggctctcctggggccctttctccttcctgttgctagtgctgctgctggtgacgcgcagcccggtccaatgcctgcctcctcaccgggcagtctctttcgttctactgcgcgtcttcagtctttgagcacaggtgcctctcttgcaggggccctggtggtgctccaagccccgggaccgcaatttctgccatcgcccaccgtggcggcagccgacgcacgcgcccgagaacacgctggcgtgccattctggcagcttagaatggagcaacaggcgtggtagttggacattgagtttacttcttgactgggattcctgtcgttaatgtcatcgttagtagacacagataagatagcgcacgacctgatgtggactgggagactcgtgtgatatgaccctgagccccggtggggacgctgagtccgtacggccagacctagtgtcacgagactgctgtttctttgaattcctctgactcgatccccctggaggtgaagcatgctgggtgcgagtggggctagtacataatcttcaccaggtgattcctcgtgagtggtacggatcgccgcgctagagctaaggcgtaggtgtcctgcctctatgtgggggctcgccttttggcccctagacccctagtggggttcccc

SEQ ID NO: 527740 - DNA, 323 bp, Homo sapiens
catggcttgatatagatgaagatgcagctgccatatttgatggaaaccacagtaatatgtgaagaacagttgttcatgtattctagaggaaaagaaaggaatatcattatatactgcttatggtatctgagcatgagatctttaggagaggacctgcatcacagctaaaatgatcaatggcattggagtcacagaattcgagctggaggcctaagctaagtggtggaacaatgatcatcaagccagccacccaacagcagagaactaataagggattctgtgctgcggagatcattacggaagcaacagtagcgaggtggcct

SEQ ID NO: 527741 - DNA, 657 bp, Homo sapiens
atcttcaaagattttaggagttgtatgccaggggaactgggtgatgagtgatagatggatggcaattacctcgtgcggtgaggggagaggggctgatggttaagctgattaccaaatgggccagagatttagagtcagatcatgcctatgtaatgtaagcctccataaaaacgacaaaaggtactaggggttggacgaagctggtccagataagcgcgaaatacaaggaggtctctcagtggcgtggtgcttctggaagaggaatggaaactcgcatgctcctttctcgcgcgataccgttgccacatagtgcatctcttcatctaggtagacatttgtaatatccataaggaagcacgtagaatgtgagcatggcgtatggtaggcgtgagtgccatgtaatactctagcacttgggaaaggcgtgagggaggcagattgcggtgagttcatgcgacgttccaatgatacatgccctggggccacaaacattggggtcgataaacccccaatcggtcagaacatacatggcaaaataaataaggggcggggccggcctctataaaaaagttagttccccttacgagagtggtaggcgctcaaacgttcgattatagcccgctggttaacccctatggagttatctttttgtcccaa

SEQ ID NO: 527742 - DNA, 456 bp, Homo sapiens
atgcctgttgtgactaccggttggggtcagatctggggtgaagaatgagtaagtttctgcatgcttcgtctctacctgagacacttctacaacaagccaagtataatctctccagtcctgcggatttacacctgacttgttcaggcccatgcgtagactcccgctgcaggcctctggcctgatggctcactgcatgcatcccctggcgtgcaagtacatatgtgctccgacaggctgcgatgtgctatcgtagtcccttgctactgctacctaggctcagggttcaaaactggccaggcgccgaaaaagcctgactgccttcttatcgtggaaaaacagcactgtcaccccggtgcctgttgatgcactgccaccccatttacctcttagctgagctagttccctcaatatacccaagagggcaatgccccctcgtcggtgccctcggcgggcgat

SEQ ID NO: 527743 - DNA, 904 bp, Homo sapiens
gtggcgggcgcccgctagtcccatttactcgggaggctgagacaggagacttgcttgaacccgggaggtggaggttgccctgagctgattatcatgctgttgcactccagcttgggcgacagagcgagactttgtctcaaaaaagcaagaaaagatattactacccatacatgatttcttgtgaatattctcgcttatattgtctctctagtaaccttatacctactacccgagacttttaggcaacctaacacactacacatgtattactaggtagcatatagtttaacaagcccacaataacaggtatatagtataaaaaaaaaacaaaaacacaacaaaaaacaacaaaacacacaaaaaaacacaaacgaacacaaaaaaaaaaaacaacacataaacaccacaacacaaagcaacaatacacgcaccaccaacaaaaaatatctactatactcatacagaaaaaacttaagccactataagaaactcctcaaaaacaaacaaatcagtatctacacaaacacacaaacatactacacaagaacacacggaggagcggggcgacgagaacggagcggaggggctcgcgagagcggacagggacgcgctggcagacccgacagacaggagcggatcggaaggaggtgcgggagcagaagcgcggggccgcggtaaagtggcggcggagccataacagaacaatatatacaactaactcatatacaaatacttctacttcacaaaacactacaaatcaacacctacactagacgcataactactctcaactacaataaacactaacaaatacacataatccaactaacaactacgactaattccaccactcacactaacggacaacgatgtggtcaacgagtaccgactgagccagacagac

SEQ ID NO: 527744 - DNA, 461 bp, Homo sapiens
tccattgtagtgcatcagtgattaccttccagtgccctgtagtactaggcccctctgaatttacccaaacctgcgctagagtccatgattgttaccatccagtagatcattcttgtcatagtgaggagaaatgtccccctatgcgctttcctaactactacacgtggtgcatggcgcgagcattagcagtaccactactggccgtcgaacacaaagaaaagaagtcataatatgaaaacgatacctgcacacgcatgttaatagcagcacaattcacaattgcaaaaatgtggaaccagacaaagtgcccatcagtccaaacaaagtggataaagaacttgtggtgtatctatacgtaccatgaaatactactcagccaggaacggaataatggcattcaacagcaccctggatggattcgcagaccaatcattctacataagtaactcaggaatggaaaa

SEQ ID NO: 527745 - DNA, 151 bp, Homo sapiens
ccgcccgcccgcccgcccgccaggggttgccctgcaggtgcttttgtcctcccgggccagcccccgcccgcccgggtcccaaaatgcactgttgaggagcatgcccccccccccccccccagtgggcagattaaagcaagtcagttcttca

SEQ ID NO: 527746 - DNA, 329 bp, Homo sapiens
gtggacacagcgtcgtgtcgacctggctatgccttgccctctgtttctctcatatacccttgtacgtcacttgcctgaggtctataggccctttaaggttgccagcccagagccagaagagattggtgtccctaaagttcagaaagccacctttgcctacagatggtgttcacagtgttggtgtggagtcacagcttgacttttggtaagagcagcaagtattctgactgtaaagagtttattgtaactaggcactggtggctcatgcctgtaatcccagcagttagaaaggctgatgtagagaaagatcgcatgagtccacattaatg

SEQ ID NO: 527747 - DNA, 393 bp, Homo sapiens
  misc_feature (49)..(49): n is a, c, g, or t
gctatgaggtacaaggctcatattgtgatgggtatatgaatggactgcnaaagaacgtgtaattgcaatggagtgcgaattatgatggaagaagaagagatgcctaagatgaagtcacaaagcagaaaagatcacttaattggaccaaatgataatgactttggaaaatatagttttttgtttaaagatttaaactaatatgctggctggtacgtatgatatttaatcagagcattgaccagaaaaattgaaagtgttctgaggcacatagcagaggagctgcagatatcctgcttgtattggcgtatatcgttcctcctgagcagaaacccacagtaggtaggaaaatgggctgtctcacaggcctggccacgctctcacggaaccactggc

SEQ ID NO: 527748 - DNA, 303 bp, Homo sapiens
tgacctagaggatcccatccagcactttggaggtgaggttgtggatacctgagataggagtcatgacagctgcaacatgcaaactcatctctactaaaaatataaacattagctgacgtggtgccacacctgtaatccggctacgctgaggctgaggcaggagaatcacttgaacctgggaggcagagattgcagtgagctgagatcgcgccatttgactccagcctgggcaacagagcgagactgttcaaaaaaaagggaatttatttttctaatccatcaataattaattacttttactta

SEQ ID NO: 527749 - DNA, 229 bp, Homo sapiens
gcttgaggtatattcattcaatgtctttggttcacatggatataaaacctagtaatattttcatatctcgaacctcaattgcaaatgctgcctctgaagaaggggacgaagttgattgggcatacaacaaagtatgtttaaaataggggatcttgggcatgtaacacggatcttcagtccacacgttgaagagggcgatagtcgttttcttgcaaatgacgttttttag

SEQ ID NO: 527750 - DNA, 177 bp, Homo sapiens
tagagttacccaaaagtgcactcttctactatctacctaggaacaggcgttttggcagggtgatgtcccagctttgcgcgcctgatgtctcggccttttcgtcgttcaaaatgcggatcagcaaaccggccttggcgtagttcacgtgttctgtagatatagaagagtgcacttttg

SEQ ID NO: 527751 - DNA, 438 bp, Homo sapiens
actccaacatccgataggctcaaggggagttctaggtacctgtcatctaggtagcacccatagacctcatttgactacagacctgtactagtgtacacagagaagagaactgctctcaagaattaggctttgaacctgtaacctacataggtagcacctgctaaaagttcctaggaatggggcagtgtcttcaaaggattactaggacctcggtattctcaccagcagggaatacctctatgtccacacagtccttcactgtgtcctctgtgtgttgttctttctcagtattgtgccagatttctcttttccccacattcgccacgattacatttttcacctccacttcactggctcttcctagggtcccatcccctgtcgacttgagggcatttaactcttcttttgtcatcatggtcgaaccgactggggatcctc

SEQ ID NO: 527752 - DNA, 178 bp, Homo sapiens
  misc_feature (107)..(107): n is a, c, g, or t
gaggatccaacaaccatagagcacataaaaaccgcccaacgatctaactaatatacaacggctaaccgggccattcaaaagctcgcccagattaaatgcctgccganagcaagtacatggggaggattactacttcctggttgccaaccacccttccggctgcccttgtgttgacttg

SEQ ID NO: 527753 - DNA, 649 bp, Homo sapiens
agcacttgtttaatcacatggtagtggactcaatccacgtaaatggaatcgataaccagctttagctatcccgatcacccaggacagagaacagctgatgttcccttaccactttgttgaccgcgctgggaaagcacgacgtgaacagtacactctcacggtgagccgggtaggttcgggcagctaggctgggcatgcattgtatcgaactaggcagatggctataacacgccttgtgacttgcttttgtcctacagagggagcagacgagtccgagttgagaactgagaacaaatgctggaaataacttactacttgaattccaaccgttgtgtaggaggcccacggtagagaaaagtccacgccacaggaagtgggcagaccctcggcacgccaaaagtcataacggtttggacaggaaagatcgcctaaaggggttattgcatacccagtgaaagcgccgcaggagacgcatgctaatgcgtactcttgtttaccgggcaccctgttggggcaagaccaccacaatgggtgaaacctttaactttgagcttttgaaccccggggggccaccaatatttttttttggggccaacaaacacgggagaagaggggacacaaaaagagggaacaataaccattggctcgg

SEQ ID NO: 527754 - DNA, 357 bp, Homo sapiens
  misc_feature (36)..(36): n is a, c, g, or t
  misc_feature (39)..(39): n is a, c, g, or t
  misc_feature (41)..(41): n is a, c, g, or t
cacaagtgtccagtgtttcgattccattggcttcanagnanagaaagcctagatggcctaaacagaaatgtgcgatatttgacccttgatatttttgctggcccccctaattatccattttctgatgaatattaacatggagggcattgcatgaggtctgccagaaagccctgcgtgtggatggtgacacaaaggatggctttatgctggtgactgggcacatcgcctctgggtaaatctcttctggttggcgactttagtaagcttcggctaaacccatccggcggaaaagaaaaacaataattttggtttttattttgaaaaaataaaagctctcttctaaagattcttcacccc

SEQ ID NO: 527755 - DNA, 136 bp, Homo sapiens
cccctgttattacaccgaggattgttaaccccgaagttattgagcgtagcctgggcacacagcaagaccccatctaagaaaaaaatgttttttaaatcagcttagcccaaagcggttgtgcactgggggctatacc

SEQ ID NO: 527756 - DNA, 600 bp, Homo sapiens
ctatattcatgctctattcttgtacttaatactagaataaattgtagccatggagtatattagtaagtattcagagacaagtatcagaataccagtaagccagatctctggaaagtagtagtccctttataggaacaagtggtccagtctagcctagcttccttaggcactggccaggtaggtttgccattgagagcaagtactgaatggaataccataccacttttacatcaaacaaaatagtggtgcctaattggaggcaaacgcaaataggtttaaggacagtgacaagccattcttatgattattgatgtaacaattcttagtgaaatatcagcatatgtaatcctcctcaaagtcatcatatttctctattggctcatctcttagtataattcacaatataagtcaaaaatttggtgattagtctaatagatcattttcactgtcatccacatttctcaatttttactctaaatcttttatgtcggcgccaactgtattgcggtaactgattttacagaggctgtatgtagtgaggtatgtatctgtcatcgatgtatctcccgttctcattccatatagctaacatatgaatgc

SEQ ID NO: 527757 - DNA, 860 bp, Homo sapiens
  misc_feature (196)..(196): n is a, c, g, or t
gcaacttcttgtaaacgggtccctcctattcattcctagaagaaggttcaaccctgttcctgccccccttccggcagtttttcgtgctccccggcgttccctcctgggtacttttcccccgcggtcacttaacacccacaaaagtcggtcccacccccgtgtggtccccgagggtccaccacgtgcgcggccactntgtgtcttagagacaagccaccccctgggtttttctgcacggcaattttcttcaccgcacatcctccgctcactctgctgtgctccccgcgatgaacctgtgaacatcgggagtgtgtcctctcccccccccgctctgttgccacacaagcgtctgtcccaccactaaaattgtattcgccccgcacatccttcacacctcccggatcaaggttgtttcatcatgaacccccacccgtcgtgaggaaatttctttattcaccctctccaccttcaactcctcccccacaacgaccctttggcgcgccaataatatcatcttgcttacaaccagttctacacataagacagccaatactcgggtccccccttttgtcccccaaaatatcaagcataatgtcggcgcccccgtatctaataataagaatactcacatgtgagcaacactggccacacctcgttatatctctgtttcttggccactctatgcgtaccctgtgccctgaacccttgtaaaagcctcccctcctcctaatgttctcttgaaaatatactacccccccctttctcccccctatcactaaagaacccaaacttcctcccattgctactggacagtagttctctcaacaaaaaaaaagcgggggtttttctcccacataaca

SEQ ID NO: 527758 - DNA, 914 bp, Homo sapiens
  misc_feature (3)..(3): n is a, c, g, or t
  misc_feature (6)..(6): n is a, c, g, or t
ctnccngccgtgtcgtggcggagcaggggggagtgtatgctttatctgtttcacggaggttgtatgccggtttttcctggttgcttcctaatacctgcgaacattccgacgggcacaatggtctcggcgttcaacttttcgcgttttaaccgggggccaccccccatgtggcgcacgacgttatgccggacattatcccttcctggttaagggacggccttgccctgctggccccccccccccttgctgtcggaacattacccgcgttaccaaatcctaatcggggacgggcacccacctttccctttaggggttagaaaaaaaagttcggggctttggcaccgacccacaacgggtttttttaaggggaaaccagaacccctggtccaggtccccgccccaaacaggggaaataagaaaggcgcgctcaaacaacaagacccaccagggctgaccgccgggcgccgcaacccccctgaaacagttgacaagcggggggagaaaaaaaaaaaagtggcaatcaactaccttcgtgaccaacacgccaaagcgaggagcctccaccacgatgcgcccccgctttaatacagttcacgagggactgcggtataacccccccgggtgcgaaaccctgtctatcgcacaaaatcatagcgagtaaacgcgcttcaggtggaaatttttcagacaccatttcgtcacaactttcgtcgaatagtcatccagatatggttcttcgtacccccggccacggacggtttcgggccgcacacagctaagacgggccttccattgcccatacaacaattggtagcacgctatggtacacccgcatgatttgttcgggcgcagcgctattcaaaaacgccaccgccccacaaaaaccaacgtgggtcttacaaccaacaaaacaa

SEQ ID NO: 527759 - DNA, 291 bp, Homo sapiens
ttaggatatatatagtacttgaccatacaaaggcattatgtgtcccctttattgtcaagttattaaccataggctatcatgcatgtatacgtatatatagagaccacggcatgcgtaaatgtacatgcacatttgccaagtctgaacaaaggatatatagaacttcgtctgatgtgcatcgcttagtatgagactatttctacctggatcaagcacgaatgatccaccaaaacgtatgcaccgcagctgtctttcgcatgcgcagcgatgttcacaatatggtgctctcag

SEQ ID NO: 527760 - DNA, 147 bp, Homo sapiens
  misc_feature (11)..(11): n is a, c, g, or t
  misc_feature (14)..(14): n is a, c, g, or t
  misc_feature (81)..(81): n is a, c, g, or t
  misc_feature (95)..(95): n is a, c, g, or t
tttgtgataantcnatggtcgcattccgatgcactcggctaggcatacgcgtttgtgtcgcaggtcgtacttcaggctagncgtcttgcttctcntcttctgcagttcgctttccgtagcttaatcgggctctttagttcgattagc

SEQ ID NO: 527761 - DNA, 818 bp, Homo sapiens
gtgtatgtatgtgcatgtatgtgttcaatctaatttaattcttttttttttttctagcctgtgtgaaagcaccttgggttccaccctccattctgagcactctttggaagggattagcactcccagactctggactcgggggctgggaaaagctctataggttggagatttactgtggttccaggagctgagagataggccagcctgagtcagggccggaagaatgtcttctatggtctgttggggggacaggcactctggcagtcatagtatctttcactctatcgctttcactgcacgggtctggttggcgaggttgtccccagcagcctccggcttggtggcccatcactcactccacatggtcctccctgtaatctggtcttctggtgccagccatccttgaagtgaccttccttttttggtcggtggtttggagacagagtctcactctgtggcctaggctgcagtgcagtggctaatctgtggtcatgaaaatctgcctccttgggttcaagcaattctcctggctcagctcccagagaaggtgggatttacggtgatcgcaccaagctggtaaatttgtgattctcagaagggagggttttggcatgtgtgacaggtggtcttcaaatcctgactcaagtggtctgcctgctgggtcccagtgtggatcacggggtggcccattcagcggatggctttaggtggttttacagggggctccctcgcgggccgcggacccaggcttgtctttgtttccaccacccgtgtttgcccacgcggtccttcaacttgcgcttttctctggttgcggc

SEQ ID NO: 527762 - DNA, 234 bp, Homo sapiens
ctatcactcgaccgttacgtggctgtgggttgacgtggcttattcttggactctagcacctgcctcggcctccaaaagtactgggattacaggcatgagccaccgcacccggccaacaaataattattgaatagctacttactgtatgctccaggcatgtgctagagtccaagaatacgccataatcaaccaggcaaggttcctgccttggatgtcacaatccggtcaagggga

SEQ ID NO: 527763 - DNA, 86 bp, Homo sapiens
tgagaaatcagacaggaacagaccttggtggagaaaacgttttttttctttctttctaaatggtataggagctttaggcatggctg

SEQ ID NO: 527764 - DNA, 315 bp, Homo sapiens
cccttagactcgaaatttcgctcctatcgtcccatccttgtagtaagaaagtactctttctaaggtttaataacaaattttactcttggcaattacaaggaaatcgactatattaaaatagctaacgagaggaaattactgaagctacaaagtcaaagtctcataatcaaagttatccttgacaactgacaggagttgttagatcttctattggtctttctgctaattcaaccctagtcttaaaacaaaaatagcctcctattgcctaatcccttgtacacacaaaaccactgcacttcggtatttctaatgtcg

SEQ ID NO: 527765 - DNA, 254 bp, Homo sapiens
gtagtaaacaaggagcacctgttgcccggcttcaataacaagaggtagcaaggatgtggaaaaattggaaccttcatacactcctgggggaatgcaaaatgatgcaggctctttgaaaaacagtctggcagttcctcaaaaggttaaacatagagttttcatgtgacccatttcctaagtctatccctaagataatgaaaacatacttctacacaaaaacttgcacatcaatgttcctagctgaatgatctcaa

SEQ ID NO: 527766 - DNA, 306 bp, Homo sapiens
aagagaatggtaccagaaattggtatttctagctagtactatttaacacaacttcacaatactaaaacaaatacaaataagaaagggttaggtagtggggcttcatttacttttttccttttcttttttttttttttttttaaaaagggaagccctgggttggatttcaaaggggtggggaaaggagggggggggaaaaacccccaaattacagggtaaattcatatgttaatttcacccaacgggtttatcttcccatttaccttttctcattaagcagggttgtacttctcaaacatttcttta

SEQ ID NO: 527767 - DNA, 284 bp, Homo sapiens
gggccatccggctttgggggtcaaggaggcctcggccctggactttgatgtgtccagcaaccccatttattggacagacatcagcctgaaggtagggtgggcccgaacatgcccacgtgcagcctatatgggaaaaccttccctctggacctgcctcaaaggtttcaaacattttttttaaagccctataatatttattgtaacccaattccagctaattaaatatgagcaagcctatttcaaaaaaaataggcgattataatgagcaaatccggtggacccca

SEQ ID NO: 527768 - DNA, 179 bp, Homo sapiens
atagaggatcccctgagtgcttgttgggagatgccagacgactccaaggcaggtcaactggcttatgtcagtgagtggaatgcttggccataagaatggagacaaacatgttaccaataatcttgtgcagcttgttatgcacagatgctaaaactatcttcatggtatggcctactacc

SEQ ID NO: 527769 - DNA, 193 bp, Homo sapiens
  misc_feature (19)..(19): n is a, c, g, or t
  misc_feature (31)..(31): n is a, c, g, or t
  misc_feature (83)..(83): n is a, c, g, or t
  misc_feature (152)..(152): n is a, c, g, or t
cgcaatcaacgacaatgcnatccgcgcacgntcacctccggaaatacatccaccggttcaaaggcacgatctcaaggaaaatnccatttacccaaaaagtcgcgtatggattggattggtgcttgcggcgcaagggtacggaaatgatcaancggcgattgtccctcgtgcagtgattcaaccgtgtgctgtg

SEQ ID NO: 527770 - DNA, 800 bp, Homo sapiens
  misc_feature (687)..(687): n is a, c, g, or t
  misc_feature (695)..(695): n is a, c, g, or t
  misc_feature (705)..(705): n is a, c, g, or t
  misc_feature (712)..(713): n is a, c, g, or t
  misc_feature (721)..(721): n is a, c, g, or t
  misc_feature (730)..(730): n is a, c, g, or t
  misc_feature (732)..(732): n is a, c, g, or t
gcccctaaccctgaggctgccgcgcggggtcactgcgccggggtagtgggccccagtgttgcgctctctggccgttccttacactttgcttcaggctccagtgcaggggcgtagtgggatatggccaactcgggctgcaaggacgtcacgggtccagatgaggagagttttctgtactttgcctacggaagcaacctgctgacagagaggatccacctccgaaacccctcggggcgttcttctgtgtggcccgcctgcaggcaagaaggggttaaaagtggaatgtatgtggtaatagaagttaaagttgcaactcaagaaggaaaagaaataacctgtcgaagttatctgatgacaaattacgaaagtgctcccccatccccacagtataaaaagattatttgcatgggtgcaaaagacaaatggtttgccgctggagtatcaagagaagttaaaagcaatagaaccaaatgactatacagggaaaggtctcagaagacacttgacgacatcatcaaaaaaggggggaaccacaaactctttagaacataacagaatatatctaagggtatctatgtgctaatataaaatattttaaacacttgagaacagggatctgggggatctcccacgtttggatccaatttcagcagtgctctgaaggagtatcttaacttggggattccntggttttnagatataaanaagaaanngggatggnagttagacnanttaaaagggggtatgagggctgaatattgtgtaaaatggatggtgagttacccctttgtgagcattga

SEQ ID NO: 527771 - DNA, 219 bp, Homo sapiens
gactgacaatactctgaggctctcaagatgccaggagaagctggagctggcagagaaaaggccaccgatgctgaagccgacgtagcttctctgaacagacggatccagctggttgaggaagaattggatcgtgcccagaagcctctggcaacagcttttcagagctggaggaagctaagaaggcagcagataaaattaaaaaggcattaaagtcattta

SEQ ID NO: 527772 - DNA, 441 bp, Homo sapiens
  misc_feature (1)..(1): n is a, c, g, or t
  misc_feature (73)..(73): n is a, c, g, or t
  misc_feature (108)..(111): n is a, c, g, or t
  misc_feature (116)..(116): n is a, c, g, or t
  misc_feature (160)..(160): n is a, c, g, or t
  misc_feature (226)..(226): n is a, c, g, or t
  misc_feature (235)..(236): n is a, c, g, or t
  misc_feature (239)..(240): n is a, c, g, or t
  misc_feature (249)..(249): n is a, c, g, or t
  misc_feature (317)..(317): n is a, c, g, or t
  misc_feature (346)..(346): n is a, c, g, or t
  misc_feature (348)..(348): n is a, c, g, or t
  misc_feature (352)..(353): n is a, c, g, or t
  misc_feature (358)..(359): n is a, c, g, or t
  misc_feature (361)..(364): n is a, c, g, or t
  misc_feature (381)..(381): n is a, c, g, or t
  misc_feature (440)..(440): n is a, c, g, or t
ntgaaattccatcatcgcccagcgcccaccacgcttctgtttccctgcagtcagatccaggtctcccggccanggcttttgggtgcagcttcctctcaccagctccannnnggggnactgtctgtccctccagcaaagccacctccactgggtgtctgtnctcgttttctctctccagcccaaagagccctctgggcagcgcacagcacccaactgcagacacggnggcctgggnnggnntcctctgtnaggaggctgccacctgtttgccagggggaagcgggcagcgctgcagtgcaggcacggatgggtcaggnctgctgcccagagcttctgcgtgggagcncngggnnctgcnngnnnnactcactaaaatccggnccgtctgtactgccccagcccagcttttgtgccctctgcaccagcgggtccagacagana

SEQ ID NO: 527773 - DNA, 950 bp, Homo sapiens
  misc_feature (277)..(277): n is a, c, g, or t
  misc_feature (283)..(283): n is a, c, g, or t
  misc_feature (309)..(309): n is a, c, g, or t
  misc_feature (378)..(378): n is a, c, g, or t
  misc_feature (382)..(382): n is a, c, g, or t
  misc_feature (391)..(391): n is a, c, g, or t
  misc_feature (837)..(837): n is a, c, g, or t
  misc_feature (845)..(845): n is a, c, g, or t
  misc_feature (855)..(855): n is a, c, g, or t
  misc_feature (862)..(863): n is a, c, g, or t
  misc_feature (871)..(871): n is a, c, g, or t
  misc_feature (880)..(880): n is a, c, g, or t
  misc_feature (882)..(882): n is a, c, g, or t
gcccctaaccctgaggctgccgcgcggggtcactgcgccggggtagtgggccccagtgttgcgctctctggccgttccttacactttgcttcaggctccagtgcaggggcgtagtgggatatggccaactcgggctgcaaggacgtcacgggtccagatgaggagagttttctgtactttgcctacggaagcaacctgctgacagagaggatccacctccgaaacccctcggggcgttcttctgtgtggcccgcctgcaaggatttaagcttgattntggcanttccccaagggcaaaacaagtcaaantgtggcatggagggatagccaccatttttcagagtcctggcgatgaagtgtggggagtagtatggaaantgancaaaagcantttaaattctctggatgaggcaagaaggggttaaaagtggaatgtatgtggtaatagaagttaaagttgcaactcaagaaggaaaagaaataacctgtcgaagttatctgatgacaaattacgaaagtgctcccccatccccacagtataaaaagattatttgcatgggtgcaaaagacaaatggtttgccgctggagtatcaagagaagttaaaagcaatagaaccaaatgactatacagggaaaggtctcagaagacacttgacgacatcatcaaaaaaggggggaaccacaaactctttagaacataacagaatatatctaagggtatctatgtgctaatataaaatattttaaacacttgagaacagggatctgggggatctcccacgtttggatccaatttcagcagtgctctgaaggagtatcttaacttggggattccntggttttnagatataaanaagaaanngggatggnagttagacnanttaaaagggggtatgagggctgaatattgtgtaaaatggatggtgagttacccctttgtgagcattga

SEQ ID NO: 527774 - DNA, 282 bp, Homo sapiens
tcgttctgtgaaagaaaatccagcagagttgttgcctccgttgtagttggtgggccccgtagcattggatgcctttgccaaatggttcagtgtggacacagcaaaggcaaacagactctgccactcgattcgcagaatgttctgtagaaatccggatgtgcatgtgcagaattcccttttgcaggtataaaatagtaataaaaatagtcctgcctgaggttgcagtgagccgagcttgcactactgcactccagcctgggtgacagagtaagactccatgtc

SEQ ID NO: 527775 - DNA, 138 bp, Homo sapiens
ctacaggatcccgcgtcagtacggaatgaagggagctagtgtttaggtagcactcaccattatgctcaatgctggtgatccttattgtatggccctccaaagggaactcgtcttcagacctttgctcttttgatggtg

SEQ ID NO: 527776 - DNA, 420 bp, Homo sapiens
ggggttacatcactggttctcatgatctgcctgcctcagcctcaagtgctgggattacaggcgtgagccactgcgcccagcctattagttcattttcatactgttgataaagatacccaagactggataatttataaagaaaaagaagtttaatggactcacagttcctggtggctggggaggcctcataatcatggcagaatgcaaaaggcacatcttacatggcggcaggcaagagagaatgagaaccaagtgaaagtggaaaccccttataaaaccatcagatctcatgagacttattcactaccatgagaacagtatgagggcaactgcccccatgattcaattatctcccaccagttccctcctacaacacgtgggaatgatgggagctacaattcaagatgagatttgggtggg

SEQ ID NO: 527777 - DNA, 1001 bp, Homo sapiens
ggcgcgcgggttagaacgcgccagaggtcggggcgcgcagacccgtaccgacccgaccccaggtagtgagggcagctgattccgacgtgtgtgagggagcggcagtggtcggcgggcaggagggggctggcgtgcggtgggggtcgggggcggggtatgcgcttccgccggcacccgtctagcgcccgttggctggtacaacagcgagaggttgtgggaaggccgcgaataaagccggatactggcagcccgacctgtgtactacctccgggcttcacattctcgtaacgagcgcagcaggatgctgtactggtcaacgggagcgtggcaatctgggaacttttggcgccggcgtcggtatgttgaggcatgaagcatacacgcaggccaccgcgtatgtcagtgagcagtgcatcatgacacattgtagacacgctcgaacacgtagcagatgtactccatgactgcctgacgactctctactcaactgtgtgaacaccgtgcggcgaaccgtgatgcacgatctggagtggggctgccgctcataattcattccaactaccatgcaatctggaatccctggagagatggcacgcagtctgcgagagcttgggactccagagaactccttcactgtgtcgtgcgctcgcatgatgtatgaggctcccgtccgtggtcactggaacccgctgttagtactggacccgtggtatcccatggtgcagctgcgatactgcggtccccgatgctccctgcatgtgtaccccggggatgccgggagggaatctccagaccagaggggctctactcactgaggggaaggaagcagcgtagctggtaaatcattcacccgtgtactgggaatctaccggtccatcttggactggctacgtcatcgaatttacacagaaaactatgggaccactccctgtgtcatggaggacgcatggtatgatggaaacacaagatggcccaagatgagggaatccggaaaaggaagc

SEQ ID NO: 527778 - DNA, 146 bp, Homo sapiens
ttgacagtcggattgggggtgaactcggtcagaggtaagaactcggtcagaggtgagaactcggtcagaggtgggaactcggtcagaggtgagaactcggtcagaggtgggaactcggtcagagtgtgagaactcggtcagaggtg

SEQ ID NO: 527779 - DNA, 222 bp, Homo sapiens
tccggaaatagcgacgcagctatcctcaggagctagacagataaccaatccctcttccatatgactaattttaaaaggagaaccatcaggtaatccttcatcttcttttctctggggttaatattactagtcccttcaatcattcctctttagtaagtatataattccggtatctggttttcacatttggatggttctccttctggagattatcccaatggc

SEQ ID NO: 527780 - DNA, 218 bp, Homo sapiens
ctgcggttgagtctagaggatccgcgtgcggtgcttacagaaattaaaatgacaaaaaaaaggaaggaagggagaaagggaagcagcttcactgctcaggggagctggcccaagcctcatgttaaaatgagtgatgtgtctgcaaggaccccacgcatcatgtgtgctgcacccgcagtgcagagcagcacctgatatccgtctgcaaggaacccacg

SEQ ID NO: 527781 - DNA, 527 bp, Homo sapiens
  misc_feature (22)..(22): n is a, c, g, or t
  misc_feature (338)..(338): n is a, c, g, or t
  misc_feature (419)..(419): n is a, c, g, or t
  misc_feature (423)..(423): n is a, c, g, or t
  misc_feature (442)..(443): n is a, c, g, or t
tctttacataaaaatataaaanttagctactcaggaggctgagacatgagaatcgcttgaacccaggaggtggagtttgcagtgtgatgagatcatgccacgtgcactccagcctgggcgacagagcaagactctgtctcaaaaaaaaggaagaatgagaaagcaccttatgtcatgacatgacacaaacgttcaacatataaagtggccgggcacagtggctcacaccgtgtaatcccagcaacgtagggagactgaggtgggaggatcacttgaggccagaagttggagatcagcctgaacaacacagcaagaccccatctctaaaaaagtaaatnaataagtttgaggctgcagtgagctatgattgtaccacttcactctcagcctgggtgacaaagcagaatcccatctctaanaatnaaaatagaaaataaaaatnnatagtccagagaacagaatatgcatacacacagagatacagataaaccaaatatgggtaaaatgtcagcaattgaatgaatcct

SEQ ID NO: 527782 - DNA, 188 bp, Homo sapiens
catatccggcctcaaccatggatggagagaagctaaagtctcccaacagaggtgctggcttttataccaaaggcaaagaaatgggagaaccgaaatggctggagaagggcagtgagggaggcgagtgttaccctttgagattaccggttccaggatccagtctggcttgagacccaagggtgttaacg

SEQ ID NO: 527783 - DNA, 256 bp, Homo sapiens
cccgatagcccgacagtggtgggctcccgtaccccgtgcatcctgtgtgaggagctcttcaagctgctgaatggagggcatcgctatgattcaagcccgctcaactgcacacacgatctgtacatgatcatgcgggagtgctggcatgccgcgccctcccagaggcccatccttcaagcagctggtggaggacctggaccgtgtccttaccgtgacgtccaccgacgagtacctggacctgtcgggctagtcgggg

SEQ ID NO: 527784 - DNA, 501 bp, Homo sapiens
gcccccctgtggatagctcaataagatagtggtcatataatgctacgcgtcccagtcagcatatttattccagctaaaatcaatttgctctatttagttgtggttgtgtttacaggcatctcgatggtccccatttatctgcccgttgatacagcactttttaaaggtcgtgacttggagagtccttgcgcccgtcttatcagagaagatataatggatctgcccgagctgttcattgagtgtggtggttctagcttttgcgggtgtgtccttctcagcatagtacatttgcaggtcccagttgatgaagtgactctgtccaagacgaatcacttccacgctaggaagacagaagattattttccgtagagagctcggatacgagtggcaagtagtagagattttattctcattgtacagacgagagcaagctgcttatttactgctatggtctgaatgttagaatccccctccaaattcatatgttgaaacccaatcccc

SEQ ID NO: 527785 - DNA, 92 bp, Homo sapiens
  misc_feature (63)..(63): n is a, c, g, or t
ggcgcacagcggacaaggctgcagagaaccatggttgttgtgccactgcactttagccttggngagagagcgagcctctgtctgagaaagat

SEQ ID NO: 527786 - DNA, 542 bp, Homo sapiens
tgtacccacgtttgtgtggaggactggggaatacagaaatgagtgagcaactagagaggtttaactaaaacaatcagctgagggtcaaggggaagttgcctccccaccatcacagaaggcaatgcccagtgtaggagtctggcaggccagctgactgctactaagagctagagtctgctacttagagtaatgattaaagacagaaccacccaagttcagacagaaatgacagtggaaaaatttcaagctggctgcagtcagagtagacctcaagaacccagtaaaaatctctactagactttgtattctgcagaaccctccctccttgaaccacaaattgcttctattcaacaaggcgaaaaaaacaaaggaacattttccttaaccccccttaaaaaaaaggggggggggtttctcgcgggttctcttttcgggaaacccttcaactctaaaaaaaaattaaaaaaaccccccaaagggccctttccccccctggaaaaaaattcgaagaacaccctgaagacccccacaacacagggaga

SEQ ID NO: 527787 - DNA, 602 bp, Homo sapiens
ccaggctgagatggaggtaatagcttatgtcatgctctagcattcaaccccattacatagggtgagtcacagtgcagcggtggcgcaaggtgagagctgacatgagtgagacggtgacgacccctgtgctgccgcagagctacagctctctccctagcacagaaaccaaatgggggcccactgaaatctcaacctcaaacacctgctggctcaaccacgtggccagcgccaggggttgcctcactcacgccaggggtcgcctcactctcaccaggggccagattcccggtttcaacacaatgacacttgcatccaaagtcccaagaaaggaagcgccaagctgattagagatttctgtttccctagtgaggagaacacggtttgaggaagtgcactggagagaggacacgtgtcagggacctgataggcccctagagcaacagaatctatctgaaacgcaatcagccgcagaacccacgtagctgcagcaatgggaatatgagactcatggatctcaaggtaaaaaaggacatggtgataaaacagaagaggccaaattcgctccacaaatgaaaagcctaacccctaactgatgagacggc

SEQ ID NO: 527788 - DNA, 159 bp, Homo sapiens
gtacgaatatcgctgccataagcatctctgtctctgtctgtaatctgttcttcagttgtctatcctgtttggctctctctttctccaatcgatgcatctcccattgttctgccacatactccatgaatatctggacattgactataagtgcctctgctt

SEQ ID NO: 527789 - DNA, 1411 bp, Homo sapiens
  misc_feature (421)..(421): n is a, c, g, or t
  misc_feature (643)..(643): n is a, c, g, or t
gtgtcgcgtgtgggatatcttgcgggactacggtgacagatcacttccgatcgttcgggcctgtgtgtcggtgcacactagctgggcttcgcatcgccgagacccctatgacgacactggctagctcattcttcgcatcgtgcctagcgggcatgctcggcgctactctccgcagtggttggtctacctagcagggtatcctgcgtcggtgcacctgtgcctacgtgctgacgttgcactcgagcgtaaccagcagcgcagtacaacacatcgatctggggctgtcacgctcgtcccgaacggctgcaacataccaagtgcactacatgactgcacgcgctctcggtgcaacatatgcatgtgatgctatttcacattctaggtgcaatcctatcagaagcacatgggccatgtggcacanacgtatgtgtgactccgaatggtgcatgctgttatatgatgacgttcggtggcatgtgtctgacatgtagtatgatgtagacgcaagagggacagccaggtggtaccccagtctaggggtgatgacaaggtaccacacagggctcgtggtagcgtgtatgctagagcagtgctggtccgagccaagggaacacttcgtgcgtgcgattgtgggaagagcgangcatatcgtttggggacacgcttgtcggttgttacacaagctagtgtgctccctagtgccagcccgagggccccatgcgtgcaagggaagctttgacacccagcatagcactcacttgtggcaataacagcctcgtccgagacgttgtgtccctccaaccggtctcagccgaccagaccatcaaaccgtgtatgctcgtacgagtgtcgttcgcttcccctgtcggcttgcatgagaacaagtttcgacttggtcttacacgtggacggaagtgtttctggcgattgttcccgggttttccttggggggcccccggaaggaacttccccacagtttggttcggtaggccctgtccacataaggcccctgtcccttaaaaaggtgttttggagtctgcctggaccgttctaggccctgccagtaatccttcccgcggggcaccagcggggattattcgttcctggggccctgggatgtttgttcccggaagagggggggggctcttttggcccacgcttgtttgcgccaggggagcccgaaaacggttcggaattctgggaggaacgtggaccaacggggtggcccaggggaatattccctgggcatacaggagatcccgggtcacccagcaggaggttgggtgtccgacatcagacattacgcgctcagggagaactctgggcgaaaaacgttccagagagtcacgtgctccagtgggcgctctcgaacacttgcttttccacaaagcggtacacgtgatctatcgtg

SEQ ID NO: 527790 - DNA, 762 bp, Homo sapiens
  misc_feature (187)..(187): n is a, c, g, or t
tcttacaactagtcatagatgaaggcactcacagtagatggtgatatggtgacattagtggctgaaattctaaataactagaaactgtttagtaggcaaccctgtgaggcgagtaaaattgctcctcaagactctgtagtgaggttcttatggggttaaatttgactgtggggcaccctgtattaanttgtacttagtcgtgcatgctataacctaaggaaaataagccagcaacatctggggtgtgcttaaagagaccagacatcagcagtttgaatgctacttgctgatcctgagagggccatgaaagtctaaacactgacgattacatcctgggcgcgttgcagttcatcctgggcacaggctcttgctgcctcatgaagagtgtgtccaatgactgctgtcccattagttcaagtgttcccccgagttaagcccacaggccagtgccaggtcttgcagttgttcaccctcactaaggtctaggcgccccctcattgtgactcgcttcctgatgagtacgagtctcgaaaattttcttcttccgacttattttgaactaaataagacgtggctataaatccggagcaatagttgaattttccacgattgcccagctacggagatttgcgatcctattaccaggttcatacgaaatcccaggtcatgtcgataccaacggagttttccagaacgtttgtgccagctcccctcattttagcctcaacccgccgaaaaggtaaaacccttgtattgacccgg

SEQ ID NO: 527791 - DNA, 337 bp, Homo sapiens
  misc_feature (33)..(34): n is a, c, g, or t
gcagcgtgtttcagaggtttgaattagagaaanntttgcaggacagaataccctctgcgattctggtattgtgctctgagaaggtgcccatgtcaccgaccacactggaggccaatgtatatactgggggaaggttccatggtagctaagtgtggacaagctaatcactgaagttctttgttgcagagttgagggtctcaatagagttggatgaaagactgtgctgccttgaagctctgagagatgccatgccaattcaaggcagggtctttattgctgaaactcttgcgtaacgacatctttattgattgcgtatttcaggatgaatttcaactat

SEQ ID NO: 527792 - DNA, 366 bp, Homo sapiens
gcgcgaggctatgtgctttcaatgacaatttgactgatggctatcgtgacattacttgctatcttgagtcctcctgacatgttccatcctccattttgaatttctccaaagagttttgtgactttggtcttgttttcttggagacggagtctggctctgtcacccaggctggagtagagtggcacgatctcggctcaatgcaacctctggctcctggattcaagcgattctcctgcctcagcttcccaagcggccgggaccacaggcgtgtgccaccacgcccagccaatttttgtattttttagtatggaaagggtttcactgtatgttggccaagctggtcttgaacttctgacctcagatgat

SEQ ID NO: 527793 - DNA, 149 bp, Homo sapiens
tgccccggtgatgccaatgggcatttgcaaaaggagcccccaatgccccccacctgaggccccggtcacacagttttttggcttttcctccccggtgccccccccgaccctaccttgaaggcccccccaaataaaggcgctgcccctca

SEQ ID NO: 527794 - DNA, 288 bp, Homo sapiens
  misc_feature (117)..(117): n is a, c, g, or t
ggaacccccccaaaatttggggggcccccggcccccccttgcccaaaggggggggccccatttttggttggggggatatttttttttcaccccccccccgggggggcgggtttaatnaaaataacccccgggggtttttccccccccccgggggggggtttccctgggcccccaggggggggggggggggggggggttcccttcccctttttttttggggggcccccccccccccctttgtttttttttttgggcccccccccccaaaaaaaaattttggggccccca

SEQ ID NO: 527795 - DNA, 652 bp, Homo sapiens
  misc_feature (10)..(10): n is a, c, g, or t
aacggggggnccgtgcaatcctgcttaagagacccgcagtggggcgcctcgtccgaagccaggcgcgtccgccatagtgcctggcttggaggtgtcgccgcgctcggtgagagcccccgagcggagggggccaaacaaagggggggagaagccctagccgctgccagcagcttgcgggcgtgtctcgcggttcgggctcaaggcgacggaaacgaaaggcgagcgaagcgcggagatccggcgagaagaagcgtcagggagcctcggcggtgtcccggggtccgcgaagccaaccggcgcggctgggcccggggtggtgaggaagtgctccgaggcctcgccgaggcctagcgccggctttgtgtccgaggcggcggcggctgcggggggaggcggagccgggggcggctgcgggaaggctctcctccgcgacgcgcgttttcggcctagccgtggggccgctcgtggcctccggggaacaagcgccccgggggtctgtgtgcggtgggggcctggcctgggctggggaagctgacgccggtcgtcggaagccaggaggaggcgtgagggcgttcgtggactccgggcctaggcctctcccctcaacttctccggggctgggtcacccaatccaaggaagagaaccgcggag

SEQ ID NO: 527796 - DNA, 466 bp, Homo sapiens
  misc_feature (6)..(6): n is a, c, g, or t
  misc_feature (15)..(15): n is a, c, g, or t
  misc_feature (47)..(47): n is a, c, g, or t
  misc_feature (83)..(83): n is a, c, g, or t
tttggngtacccctncaccccactttccctatccatgtccgtatctngcatagcccatggtatagttatgcaaactgaaaaancattggaatattattaaccaataatctttcttagaagttgcactgtgtttacttgttatgtcttcttagcgttctccaaactgtgaccatttctcagtcttgtcttttatgactgacacttttacagagaacagataagttattttactgaattaccctcagtttagtgttgtcatgattagattgagggtatgcattattatgatgaataccacagacatgataggcttttctgagtgcattgtatcagtggctacgttgtgttggtatgtctcactcctggtaatgttaaccttgattacttggttaaggtaaaatctgacataattcatgactgagctccaatttttcccattgtaataaataaatattgggatgagata

SEQ ID NO: 527797 - DNA, 889 bp, Homo sapiens
agcggaggagagcatgccacgctgcgcccgctccgggacgcgccgccgacttactggtcctgcgagaaatccatcttcggcaaccacaattcgtgccagcggaatctggtgcagacgctctacgtataactacgagtggtttgagtcctctctattcctgaatgtgggatactatcgggaagacgctgacaaaagcatggtcatgatagcaccgtggaccctattacttcgtgaaccgaattctacctctgcatgaagttcataacacctgaattcatcagctacctttataaagaagcaggttcttgcttgtagcactaacgagtacaagtacactattattttgatctgaagtgatcaagtactgtagtcttgcgccgtgcctaacccaatagttgcgtgaacattcacactgtttagtccgacctggcagtaagattggacccacattatttgaaagggaaaactttgggacctttccacggggtcaattccgatctccaagttaaccttggccagaaagaacaaattccacttggccaccccttgtagacttacggctcaggcacaggttctgaagttctcggccactgggccacatttcaattccccgtctaagacaacttattggggagtatacccttaacacgaaacaccggtaatttggagtcacggaaaacttactttcattattggggctcccttattccgagagacgcacgcagctggaggaaaagggcccgcagtttggcacaccacgtctctcgaacatttacagccctctcacccgggacgtatggggcccatttaagaaacgcaaggcgggttccaacgaaaccgaaactccgtagcctaacgtgacgtgctccctaatttttttttcccaaat

SEQ ID NO: 527798 - DNA, 113 bp, Homo sapiens
  misc_feature (112)..(112): n is a, c, g, or t
tctctcccctccttcctgttcctcttatataccagtttctccccattctttttttttttcttactccaaaataaatcaaggctgcaatgcagttggtgttgtccggtttttna

SEQ ID NO: 527799 - DNA, 105 bp, Homo sapiens
cggacctatggcagagagccattgtcaacagcagagatgctagttgaaactaatcccaacttagccaaattattcagtcctttcaggctagctgaataatctcaa

SEQ ID NO: 527800 - DNA, 183 bp, Homo sapiens
ctggtgaatgatgaagtaattcaaaatacagtctcatcccttaggaaggcagtttaccattcaaaagaagagttatttgtaatgtcactatattgacaagagcagaaggctatagtgtatcaaaacaaaacaaaaaaaaaaggccaggaccaaaacacggaagccaaaaggtatcctccgggt

SEQ ID NO: 527801 - DNA, 342 bp, Homo sapiens
cgcaaaccggatttcactggattaggcaggcgcaacggcttgtcagtaggacgatttggtggtaggatgcagatccagagcctcaagtctagcgatgagattccactggacattgccataccttacgggtttactttccatctccttgtataccaatgtcatgttacctatcttggctccagactatgtttgtctatcccattccaaccacagagaattggacacacaatgcctacatgtgttcgggagttgtagtccaaattttctctaactgttaagtgtctgacattccgtttaccaatttcctacatactctcttctggactgtcacggtggcccagc

SEQ ID NO: 527802 - DNA, 246 bp, Homo sapiens
tgattaaggatcccatccccggttctgggtacaagtgattctcctgcctcagcctcgcaagtagctgggatcacaagtgtgtgccaccatgccgggctaatttctgtgtttttagtagagactctttcaccacgttggccaggctggtctcaaactcctgacctcaagtgatccatctgcctcggcctcccacgatgctgggattacaggcgtgagccaggcgcctggccttcccctttgctttta

SEQ ID NO: 527803 - DNA, 100 bp, Homo sapiens
cctttaaagaatccccttttccccggcagaactatttcgccagagccctagatgggtaccgaacttttattgctgattggtgatactaatccattcaccc

SEQ ID NO: 527804 - DNA, 113 bp, Homo sapiens
tttctagcctgccagtgtggtcagcccttgcgacagagcgagagtttatctcaaaaaaaattaaagaaaaaaaaatagccaggcatgatggtatatgcacctgtggtcccagc

SEQ ID NO: 527805 - DNA, 1110 bp, Homo sapiens
agcggggctcggcgggcgctgtgagggagtcgggccacgaatgtggtcgtgtgtataccttcccgcgcggacgccggtgctggcaagcggcaatgggcgggcctctgttgcctatgaaaggtgagagattaacgtgctggaatccggcagtgtgccacattgtgctctgggtgcgtcgaacagatgagaacgtgtggcatctgcaggtatggccatataacggatgctgccctgactgctaggtgaccggctgacgactgcaccagctcgggtgtgcgggccgatgtgctcccacacatgacgtatgcacaccattgcacttgtcgattccgtcaaacgttggttagttacgacaacaagcagggttgcatgacagtcacgtagctccgcgatgttggtccggcacggaaatgtgagacgtctcaaggcatggtcgagggggccacgaccctagggcttctcagactcgcgcagaggcgtcagtccgtgaagcagcgtcctgtacctctagtagctaggctggcccgataggactttgctttggagtggactaagtcgccaccactgaaggctggcaaactaaaggatgtgaatataccaatacggcgctgggcagtccttgctggttgttgcttcggtggcgcaatccaccatcaattgttttgacgaggctttttatacgttcccaaaactatatcgtggaaatatggctttctaggtgtgagacatcgtaccctttcgaccaactcgattaagtatccatggctctcagacacacgaacaaagtttctgtaccgcaaagtgtgcccgtgtgttgtcacggagacacatctagaggggcgcggcttgtaggttgcctgtttcgagcgggtgtggcgggggtcctcgcctgggtttaccccagcgctttatctgggctacccccgcgtctccacagggagaggcggcgagtttggcgaatcttctgtgagcgccttgtcagcggccctacacgttcggcgcgggtggcctaaggggccatggttggcggcccttgtgtgtggtttgggaacaacgtcgtcgcgtgtgtacttcgcgcgggatccagacgtgtgtttcgactcgcgcatt

SEQ ID NO: 527806 - DNA, 370 bp, Homo sapiens
gtatgtttttgctatttgtatacttcatgctctgtcaattttgaatgtgtggcacctttttcaacttatgtcatagctcacaaaagtatcattgtctaaataaaaactgtcttccctgtactataagttttcactgatatgtagaacaaaaagttgttgagtacttttaccttatatactgtatatgtgtcaaggactgatttatattttctccacaggtagtttgtccaattgtaaaacaaaatatatctaaagcactcaacatgacagtaattgctcttctatattgtgttgcatgataatatagcatgataatatatgacatccagtagaatcatttaataaagaattttggtcaataaaaaaaaaa

SEQ ID NO: 527807 - DNA, 887 bp, Homo sapiens
caagttgttgcttaatttattgtttcttaactaactaatccagataacaagtagtggggcttcagggtgacctggtcccaaagtttctgaagggcagttccgtggcagccccaggctctgctgtgggaatggggccgctgcctgcctctttctcatctattccactggggtgtgtctgcctgggcccagtctctgcatggagaggcctcgggctgggacagtctcgcagtcgtcgaccctcggtgcccttcgcttgccaggcccatgtctatgtcgtgtgtctgaattgtggagtcgtgcagccatggttattgtggcgatacctgctggaacctgcagaccaataagtcaatatgggactaatactcgttcgagtcggagaagacctttgctggtgacatcaggccatgtcccagtggttgggcggccatttactgtcacaaagttaaaaggcgggatccatttgattgaggaaggtccaaacattgcattgaaaagaaaagcttgattgatagtgttggttccccgcctgaaaaggccttgtattatacagaaatggtttgcatggaaaccacatcttcctcaccttagtggagagcacgtaacggttacacatgaatgtactgttagagcacaatgggtgaatagaatgctttgtgcccagaaaatgggtgcttcaagatctcagctgggataccaacgaaagtgggaactacacgaccattttaacataatgcgtcggggaacagtattccgtagcaagattgttccctccacttacttggttgttgacaactacttaggcagtgataaaagggaaattaggcaccatcgaggcctccaaggcaatcttgactccttaattttacgccgctgctgcgcggaaa

SEQ ID NO: 527808 - DNA, 318 bp, Homo sapiens
gaagggttcgcatcccattccagacttatcccagccttggtctgattgtagcaatgagccaaaaacaaccatatccaagagcggagggtgggggaagataaaggaagaatggatctcaggcagagatgactgcttcggagcagagaccctgggaaaccaaggggagcgtcacagctgggcatcaaccaagcccaggacagactgcggaagaccacagtggggctgtgctgaccaactggtgggggatgggagcactgcagcaatgaactaggacagtcccacaggtaccttcagatcatctatactctccataacagt

SEQ ID NO: 527809 - DNA, 216 bp, Homo sapiens
ataccacctttcttaatcaggctgctttgtaccgcctcagtggagactggaatccttacacacattgatcctaactctgctagtctagcaggttttgacagcccatatacatggattatgtacatttggatttctgccagcgtgtgtacagcaggtttgcagatattgatgtgcaaggttcaaggcagttaggttcgttttgcaaaccagtatatc

SEQ ID NO: 527810 - DNA, 427 bp, Homo sapiens
  misc_feature (5)..(5): n is a, c, g, or t
  misc_feature (30)..(30): n is a, c, g, or t
  misc_feature (120)..(120): n is a, c, g, or t
cttgnactcttggactcaagcaatccttcnacctcagcctcccaaagtgccatcattaccagatggattacctggcccttggggaaatgtttagtgaaaaatttagggaaaggattatanagtaattaaggttttgtcagggttgggcacaaggtgtcacgccaaaatcccagcactttgggaggccgaggtgggaagatcacttgaggccaggagttcgagacgagcctgggcaacatagtgagacctcatttctacaaaaaataaaacagccagggttgtggcacatgcccgtagtcccagctactcatggggctgaggtgggagaattgcttgagcccgggaggtcaaggctgcagtgagccatgatcacaccactgaaacccagatcctgggtgacagagtgagatcctgtctcgaaaaaaaa

SEQ ID NO: 527811 - DNA, 332 bp, Homo sapiens
atacactaggctaggtagcgaggcgggtgttgctcatatcatcccagtgggcataccttcttcaaggacgagaccaccgccctgtggatcgtgttcaacgtggtctcggacaccttcttcctcgtggaccctggtgtgaacttccgcacctgcattaatgaatcggcagcgagcgcagatgaaggaggacgcaggaaagaacggcgacgagatctagcagatcacacagagcaagaagggcgcgaggcaagaagcagatgatgagtcagcatgacgctcacgtgagcacagcgcagcgtaaaagcctttatacaacacacaacaagaccacc

SEQ ID NO: 527812 - DNA, 386 bp, Homo sapiens
caacagcttttacagagtacatcaactcagagtcaacaaaatgttctgagtgggcacagtcagcaaacattttacccagtcagacacagagcactcttacagcccccctgtataacactatggtgatttttcagcctgcagccggaagcatggtccagattccatttagtatgccccaaaacagcccccagagtgctgcagtaactccattccctcaggacaggcagataaggtagttgtcatatttcctttgttatttttaaaattgtaaaccgattgattagaaaccaataatttgattttttaatcaaattttttaatgtgattttaatgagatgccccctccagccaatgtttttaaatttgaaataaaaaccctgaatgta

SEQ ID NO: 527813 - DNA, 984 bp, Homo sapiens
  misc_feature (771)..(771): n is a, c, g, or t
  misc_feature (899)..(899): n is a, c, g, or t
gagtgaaccgggaggtactaccaggtcgccgtcgttgctccgttcgctctgagagagcatggtcctgagaggcgtctccgtgcggtgttgaagctgcggaccccggcctgcacgtcttcgcacgtggtctcgtcgggtggcgcagagcggagaatggcggggagaacacagagccaaagtgtaaagtcctcgcgtccggagtttgaattggcaaggacccggttggtggtggagaagcagttgacccacagatgaagatccctcataagggacacctttctgcacctagtgccaggagagatcattgcctcgtattcctggttgtggcaaattcgggaaccgaaagttttctccatcggcggagactccattcggacgatggggggggatgttgggttgttcggctggccccaaccattcaaaagggagattattgggctgtcgtggaggggtccgtcttgtggcctattggctctgtgggccgtgaagaggcttgcacgggtgtgggccacgtgctacaaaggtccgcagatggatgtgtccagtcctccctcagttcattggcacctaattttatgcttattggcagcgcggcgaaaaccagcggcaagaaatgtaccttgccccagttggccaaggggggaccttcctgggtgtttcgggctacacaggaggccaaaatgtgatgttgcccctggcaggtgtggaaccaagagcccattaaaagttatttcaaaaaggagtttaccctttaatgggcccaggcctggnttcggaatcggctattggccgaccttgttggtttgggtcgtgtaagatgcagcttcggtcctgctcgagaagggttgggtctttggcccaggttctggcatttcctcgggccccacgtgtcacatggngtggggccagaatgtcctttgcacggggctccggcgacccagcgactggtagttattcacagacactttggtaaaataggtcatt

SEQ ID NO: 527814 - DNA, 292 bp, Homo sapiens
  misc_feature (1)..(1): n is a, c, g, or t
natgagattgcaccactgcactccagcctgggtggtactgagtaagaccaggtctcccaaaaaaaaagaaaaaaaaaaacagcgtcagttccatctattttaataggtttctgtaaaattcacgcctgaggtgctgttttagttttttttgttctccaagcccacgggtcaacccgactgcgttgctgggccacaggcttccgtgctggttgttcgccatttaattgtaccggcagagttttcaatcgaggttggcgcaagcttcttcacgccagatttctgcgggttcaag

SEQ ID NO: 527815 - DNA, 1136 bp, Homo sapiens
gggccgacctggtggagaaggtgcggtcgcgagggtcgatggcagcgcgcgcgcgcaggaaaaggagcgcgagcgctgagcgggaacgcgagaaatgagcgcgaggcgcgagaaggagcgcgagcttgatagcgctagctgtgaatgttggctcaggaggtgccgtgtctccgagtgtgaatgcccatctctgggacccagtgcgccctatcgctcctccagtttggaaccgggcaggtggcggtggcgtacagttgcccccgcgtaccttgggtccttgacactccagtcattgcgcactctcagtgaatatgcccggcctcatggttcatgtcatccatggtcaatcgcaagcatccattctagcgtgtcccctgggggcttgtggacgcctggggctcctgggttacaattgtcccgggcctgtacagcagtgatccagctgcccgggagagggaacgggaagcccgtgaacgagacctccgtgaccgactcaagcctgggtttgaggtgaagcctagtgagctggaagccctacatggggtccctgggaccgggcttggatccctttccccgacatgggggcctggctctgcagcctggaccactgtgctgcaccctttcccctttcatccgagcctggggcccttgagcgagaacgtctagcgctgggaagctgggcagccctgcggctgacatgtctatgctgagcggtggagctgaaaggcagacggaaaagggttggggacctgggcaatggaccaattggcccggttggagatgtccaatgtgaatcccaataacaacaagaagtccaaattcactgcacttgcgttggcagcaagatgatccatggagctttgctcggtgacccttatttagccctggcgctcagaggtgcacataagggaaccctatacaaggggaatttccgtaacccggtgttcaccgtagcaaaaggaatttgctaagcgttttgtgccttgggaaggggcccattgaccatgagaaagagggagaccaagagataagagacgaaagaggggatcaccgaggtctcgagacacagagaggagcacatcgcacgcgctgggtgggatgtagacacaccgacgccgagagacagaggaggagaa

SEQ ID NO: 527816 - DNA, 290 bp, Homo sapiens
  misc_feature (253)..(253): n is a, c, g, or t
gtctactctatgagtatccccatttgtcctgtgactcacttccaacagcagacagatatctcccagggaggctgctacttgtacagactgactggaaaggaaccgcgagaaagtgccgcccaggctctgggttaccaaagttgagagcctggggacctgaaactagggtgagagactccccaaccaccccgtgtaggtaccagcacccacaggtgctttttgcacacatgaccctgattccagaaggctagantagagggccgcggtgtacctctccctcttgccgccca

SEQ ID NO: 527817 - DNA, 726 bp, Homo sapiens
  misc_feature (434)..(434): n is a, c, g, or t
gggtgttccccggaaaacccttaacagttagtttagttattgcccctaacccttgtggttaggcccttgtgtaaggccaataaaagagtggcccggccttgaacagggttgtttaaatcagcagaaggaagcctgtccagttgaagtgttccggattgttagctctcacaggggggcaatgttaaccttcaccttgatctggaaggtctcatcttataccgggagatgtttgtaggaggtgcacgaacagataagaactccaggcctctctctctcaagtgaggaattgctgtgatgtttccacaggtatgacatttatgatggagaagtatagcctctgttatagtttatgttttcctgcatatagatcttgctgtgttgagcagcctggtctagaatcgctgggctcaagccatcatcatagttgagcctcntgagtagctggagatacaggtatccggtgcacccatgcgtgtcatttatggacattttaaggttggtccgtgtgttttcaaggtagcatggggagcaggctgtgggtttttgtccaccgtctgtttttggatttgaggacgctagtctttggtgatgggactcgaggtgcttagaggtggtcgtcatagtaggtctgcatgcagcacagcaaggtgctcggggtccagatgtagttcatatccgtctctggtcgtgtgtgtggtgtgtctacagcccctcctcactgatgac

SEQ ID NO: 527818 - DNA, 276 bp, Homo sapiens
tggcgagaggatccctccataatgtgtgccaagctcaatgatgcgatcattcccattttaacttcccacacttaccatactacaaccagattacagtaacaatctatctgccttctctgcctttaactagctccttcccctaaactctacacattgctgacagattactttttcctaaagcattactctgaatactctatcccagagacactgacctgcagtggcttttttttttttggagacggagtctggctctgtggctcaggctagagcgca

SEQ ID NO: 527819 - DNA, 305 bp, Homo sapiens
tagtagtagattcgcggccgctcgacgttgtgttttttttgtttggatgtggccgtcatgtccgttagtggctgagctcccctctgcctgcacgaagtcctttatggctttgtagatcagtttggatattttctactaaaaatgattttcttcttcatcttcagtttggatattttctaataacctgttttgacctatctttcatcttttctgctgtgactaatcatctgttctactgttctacttgttattgtagtgaaaacgcataaaatttatcttaaccattcgaagtacacagttcacta

SEQ ID NO: 527820 - DNA, 536 bp, Homo sapiens
ccccacgctgcaccggcagtcaaattaaacactatttaatcttccagatatcactttttgtcaaaactcaagagttatgaatggaccttaccatactggtgctctctgactgagctcctctctactctgaatgcaagagaccctcataggtaggcagaaatatcgcccctattcagccggaagaagttatagaggatggatcttcgtccctctgcacacccttagaattaagggttctcttcataaacagggacagggggaaaatgtatggaggcgtgtgaaccagagctccatctttaacaggcagcagggtaaaatgaggctgagcactaccatgcagcattcccagagaggaattctatgtcccaagatgagatgggaggttagcacaagatacaggtcataaagatcttgctgctaaaacaggttgcagtgaaggagctggctaaaactcgccaaaaccaagatggtgacgcgagtgacctctggtcgtcattactgctaacctcccatcagcgccctgacagtttacaaat

SEQ ID NO: 527821 - DNA, 801 bp, Homo sapiens
agagatctttctcttcaagatatttggcgcctgatcaaaatagcattgtcttgcatggtacatacctggtcaaacaacctaattcgtcgaatcctgttaaatctcaaggtaattcttctagcacagatgttttacaccgcgttatgtgatttagcgatgtgaaagtgccatttcttgtcagctggattcacgaccgatcatacagtgaaatcaggtcaacacaagagatgacacaactctggtagttgctgactgtgcttgattgccgaactgggcttgaacaagctctctgcgagaagacagtgatctagactgcacagacagtgttgctacattacaagattgtgttcctcaatgacgtcaattagcaaagtaactatctcaagagtacaacctttctatgacaaacaaatacagctgtcacaaaaaaggaaatcgtaggttcacttctacattcgggcaacactgggcaattgacagagaccattttcctaacaccatatatgtgctagtactttaactttataaaattccacttctacgtttggtcaataataacaatttctatcataagttcacgaatgttatacgtaccgaaagtatgcagccaacactcgatcagatcgaaaccattttacctgggacgtttggtaactgggtctacaacttgctctgacatctgtcatcacgaaacactaacagacacaattgaactttgccagacgacaaacgacaacccacaaacacacgacaaatacactgagggccagagccacgaccccacgaacagccttctcacac

SEQ ID NO: 527822 - DNA, 135 bp, Homo sapiens
  misc_feature (124)..(124): n is a, c, g, or t
caaggtgctgggattgcgggcgtgagccgccacactccgccttattcaattttaaaaataaaaataggctgggcgtggtggctcacgcctgtggttccggcgctttgggaggccgaggcaggtnggatcacaaga

SEQ ID NO: 527823 - DNA, 310 bp, Homo sapiens
  misc_feature (46)..(46): n is a, c, g, or t
  misc_feature (219)..(219): n is a, c, g, or t
attttggagcttgatagggctttatatattggaatcactggttgtnagtgtgtacttcctaaggagttttatatttgtattcacatggtgccccaggggtattttcagtccaagattactacttaaattcatttcttaggctgggcatggtggctcatgcctataatcccagcactttgggaggtaaaggcaggaggattgcttgagcccaggagtttnagaccagcctgggcaacatagcaagaccctaccttacaaacaaatataaaaaaattagccagggatggttggtgtacaagtagctacggat

SEQ ID NO: 527824 - DNA, 496 bp, Homo sapiens
atgagagccccttcatggggggcgcgcggggccacgccgtgtacgtggagccccacggccacggcccagcctgagcgtgcagggcctctcgcgcgccacgcccgtgcgcctgctcagcctggccttcgcgctgtcggcccactcggtctttgagggcctggcctgggctgcaggaggagggggagaaagtggtgagcctgttcgtgggggtggccgtccaagagacactggtggccgtggcctgggcatcagcatggcccggagtgctacgcatcgtcgatcagccaagctggcggtcaccgtaagcgccatgatcccctggcatcggctgggctgggcattgagagcgccagggctgccgggcagcgtggcgtccgtgctgctgcagggcctggcgggcggcaccttcctcttcatcaccttcctggagatcctggccaaggagctggaagagaagagtgaacgtctgctccaggtcctcctcctggtgcttggc

SEQ ID NO: 527825 - DNA, 386 bp, Homo sapiens
  misc_feature (17)..(19): n is a, c, g, or t
  misc_feature (40)..(40): n is a, c, g, or t
  misc_feature (54)..(54): n is a, c, g, or t
  misc_feature (56)..(57): n is a, c, g, or t
  misc_feature (84)..(84): n is a, c, g, or t
  misc_feature (91)..(91): n is a, c, g, or t
  misc_feature (93)..(93): n is a, c, g, or t
  misc_feature (106)..(106): n is a, c, g, or t
  misc_feature (180)..(181): n is a, c, g, or t
  misc_feature (250)..(250): n is a, c, g, or t
  misc_feature (303)..(303): n is a, c, g, or t
  misc_feature (325)..(325): n is a, c, g, or t
  misc_feature (327)..(327): n is a, c, g, or t
  misc_feature (343)..(343): n is a, c, g, or t
  misc_feature (371)..(372): n is a, c, g, or t
  misc_feature (381)..(381): n is a, c, g, or t
cagggctttactatctnnncatctcattaattcaattaanaccattaccttaananncccctctttcgaagtgtggtgtctttnatatttnanttaactgtatgangtcatagataatagtacatgtcaccttaggtagtaggaagaattacaatttctttaaatcatttatctggattnncatgttttattagcattttcaagaagacggattatctagagaataatcatatatatgcatacgtaaaantggaccacagtgacttatttgtagttgttagttgccctgctacctagtttgtnagtgcatttgagcacacatttnanttttcctctaattaantgtgcagtatttcagtgtcaatatattnnctatttagngattg

SEQ ID NO: 527826 - DNA, 323 bp, Homo sapiens
tcgacgggcgatctggctgcgacatctgtcaccccattgatcgccagggttgattcggctgatctggctggctaggcgggtgtccccttcctccctcaccgctccatgtgcgtccctcccgaagctgcgcgctcggtcgaagaggacgaccttccccgaatagaggaggaccggtcttcggtcaagggtatacgagtagctgcgctcccctgctagaacctccaaacaagctctcaaggtccattgtaggagaacgtagggtagtcaagcttccaagaccccaggtcgacgcggccgcgaatttagtagtagtaggcggccga

SEQ ID NO: 527827 - DNA, 435 bp, Homo sapiens
tcgacgggcgatctggctgcgacatctgtcaccccattgatcgccagggttgattcggctgatctggctggctaggcgggtgtccccttcctccctcaccgctccatgtgcgtccctcccgaagctgcgcgctcggtcgaagaggacgaccttccccgaatagaggaggaccggtcttcggtcaagggtatacgagtagctgcgctcccctgctagaacctccaaacaagctctcaaggtccattgtaggagaacgtagggtagtcaagcttccaagaccccagaccatcctttagtagacaaagagaaaaccataaacactgcagctgcttttgtggcaagtgagagagcaatgaaaacataattaacagccgtggaacacctgcaaggtcaaaggtcgacgcggccgcgaatttagtagtagtaggcggccga

SEQ ID NO: 527828 - DNA, 1086 bp, Homo sapiens
agatttggatagtctaaaacagattttaaaaaataattcagatggggctttatcataattaggaggggtggctagtactgctcagccccagttgcatgttaggattatctgcagaccctgggtcacgccctgagagattccattttatctgtttgtggtaggacccaggcatttacagttttaatcaaattaaatttaatctacttttaaaaattaaaaattcccaggttattctagtaggcagtcagggttgagaaccccttatgtaggttataattatgcttctgtaactatttctgtatatggggggagagcacatcataattttttaacaacagtttgtcgattacattatagtgtgcaaagttttacataatttaatgctttttcccagggactactattatacagtgggaaccggtcttacagtgactggtcttagattatacaacagttaggaggaattgggattggaagccaagacatctgacctttaatctactatctttctcaccacaccagtattttgacctcagagtcctcaactgaaatgatggatcttgaattatttcatcttcagaactttatgtattgtgaagtactttttgcctgtggctatgttctgtaagttagctttacacaaaatactaaaggcacagtgaacttcattcaaatgcagtgtggaactctcaggtttccttggtctgcctcagtcttctactcatcagcaccacactgtcaaaatgttggacattacaaggggcgaacatagacataaataaaaaatattggtattgcatagacacttgatgcctaaacctaataattattaacttttatgtgcaagcttgggttcttgactaattggtaaatgataaatgaactagattagatccaattattagaaaagcactcttaagagtgcaatgaatgtgatttgaaaacttgaaagcagcctagattttactatatttgttattgttatcaatgggggtttgtcaaccttaaaaattattttttatgtaaagatacctaggaatttctagtaactgtatttgttttaataaactttgactttgctgtaaa

SEQ ID NO: 527829 - DNA, 645 bp, Homo sapiens
  misc_feature (173)..(173): n is a, c, g, or t
  misc_feature (180)..(180): n is a, c, g, or t
  misc_feature (182)..(182): n is a, c, g, or t
ggttggaaacaatatcaggaaacttcatctataagaaacaccgtgggctgggcgcagtggctcacgcctgtaatcccagcacttgggaggctgaggcaggtggatcacctgaggtcgggagttcgaggccagcctgaccaacatggagaaaccccatctctactgaaaaaaanaaaaaantncgaaaaagatttagccaggtgtaggggtgcacgcctgataatcccagccactttgggaaggctgaggcgggagtatcgcttgagcctgggaggtggatggttgcggtgagctgagaatcagtgccattggcactctccaggccggtggggcagacaagaaggtggaaacctccattcttccaaaacaaagagagaaaaaacaagagggcggggcgtggagggggactcaacacaccggttagaactccgagagccgcacctgtgggagagaggccagagaggagagagcgcgggagatcctcaagagagaggcgctcgagagagagagatctgacagagacccgcactcgcgggggagcataacacagcggggagaagacacacgctctcaatctctctctcaatcccatacaatatcacacacaagaaaaaatctacgcgcccggggggcggaagtggcgcg

SEQ ID NO: 527830 - DNA, 179 bp, Homo sapiens
  misc_feature (145)..(146): n is a, c, g, or t
tgaggggagaaatgcaatcacagaagatgccacaatgcccgtgcagtccatcccagacatctaagaccgatgtctggaagctatgcagaggtgtgtcctccttatttattgttttcctaataagaaatcctaacaagctcagagnnctgactcctttcccagaccggaggagaccaaag

SEQ ID NO: 527831 - DNA, 573 bp, Homo sapiens
agttcaagaccaaactaggcaacatggcaaaaacctcatctctaggaaaaaaaagaaaaaagcaaagaattaaattagctgggcatggtggtgcatgcctgtggtcccagctacttgaggctgaggtggaaggatcgcttgtgcccaggaggttgaggctacagtgagccttgatatcaccaactgtgctccagacgctgggcaaataggagacgagagacccatctctaaaaaaaaaaaaaaaaaaaaaaaaaaaaactttttgggggcgcagcacgaaaaaaaaattctcgataaaccacatattgaggtggacggcgcggcgcaactgtaacacaaactcaagacacaggtgggacaacagaggggcgtcacgggaagaatcacggggaggacaaaaagacgggatgggaaatctagcccacaaaataaagaagacgccgggaggagaaacaggagggttactgaccaacactacatgcagcagtgccagagaaaaaacaggggacgtcctaacacacaagggaggacaagcgagaggagaacaaatataagccccgacgggagcacaca

SEQ ID NO: 527832 - DNA, 187 bp, Homo sapiens
cgtcgacgcatagtgtcacgcacctgtgatcccagctacttaggaggttgaggctgggaggatcacttgagcccaggagtctgaggctttagtgatctaagatcatgccactgcactccagcctgggcaacagagtgagaccctgtttctaaaaaaaaataaagttagctaaattatctgtcgacgc

SEQ ID NO: 527833 - DNA, 856 bp, Homo sapiens
  misc_feature (312)..(313): n is a, c, g, or t
acatgcagcaggggcccgggccacctcacgttccatacctagtgcctgagtgggggatgggatgctctgcttgtgatgtggccctgaagccagccgtaccgtccattgcggttgaacgtggccttttcccacagtgcttccttctcactgcgcacgcagagttcgtccccttgtgcaagatagatgtggtgtgggccatcgtggtccccttgagcccagccaagcttggacctcccaagtgtggggtgctttaccagaccacccttaaagtgacttcatcgtgttcctctttcaccaaaatatactcgtatnntaatattctccccagtgtggctggcatatttccaggaaagaggcatttaaaattatccatgggtatctttcttttttcccctcattgtgaatcagaatttttatataaaacaaaacagtgtgtgtctacacagaatttcatattcgtgcaaagaggggatttttgttggatccaatcatgatgtgtaggtcttccagtgcttgacaaattgtgcgtgtagacaacattatttaaaaatttaataaatccctacaattgaggaatatttattaaccttgaatattcaggaatattctccaaaatctaagttggtaatgtggaattctggagttttgtggtagcaacaaagtgaggcaagtaaagtgcaatttaaggtattatacctttgtgtacagaattattggcttgtggggaactaggatatagggttatatggactaattaccggagtatgaggcttggtttgggacagaaagcgggtccaaacacacggggacaacttgcgcccagtattcagaaattatttgggggcacaataatgat

SEQ ID NO: 527834 - DNA, 261 bp, Homo sapiens
  misc_feature (64)..(65): n is a, c, g, or t
agagagggtccaagggtgatggagaaggaagcatggcctgggagcttggaagggaggctctggnnccctgactgctgtaaacttctgtgtcccccgctttaaactgtctgtctagtctggcatgcctaaacctggccttgtaagaggtcccctttggtattaaggagctctagaactggctggtggagcccatatggcatactcactgctgttcactaggccaatgagatgccaataatccattacatgtctttggcatat

SEQ ID NO: 527835 - DNA, 235 bp, Homo sapiens
tgtgagaagactccatctcaaaagaaaaaaaaaaaaaaaatctggaatttataaccttctacaaatgggatggtcaggttccacttttttactggtagggattgggtagaagggactggaacccaaggttactagcgggtaagtgggatggcgatttcggggctacgctccacccttcggctattctcttcattggtgatttttggatcttggtggaccattccccattttcata

SEQ ID NO: 527836 - DNA, 453 bp, Homo sapiens
  misc_feature (327)..(327): n is a, c, g, or t
atgaaaacttgtctcaagtatttgtgttgaaatctcaattaactgggcgactgctcccgttccattttattctgtaaaatatgtggcatcctttgtgttgaggcggcatttactaaacacccccaaggtgcaaggctgcaagagaatcgagcgccgcaaggcgagcttatcttccacacctggtacagtgcccaggacagagaaggtgtttagcaagtttctgctgaatggaagagtgagcgagaagggaaagtgcatctaaaaagcacagggaacctacaaaatatttgggaaagggtttcatcagttcgggtgaaatcttgaacngcaaagcaccatgggggtggctggacaggcttgttggagtcgtataatgcaatgaataaaaacttacggctgccttaaatgcaaatgtcaagcccttaaataaaatttaacaaagtcaaaaaaaaa

SEQ ID NO: 527837 - DNA, 131 bp, Homo sapiens
  misc_feature (14)..(14): n is a, c, g, or t
  misc_feature (18)..(18): n is a, c, g, or t
  misc_feature (83)..(83): n is a, c, g, or t
  misc_feature (88)..(88): n is a, c, g, or t
gatcgggcggattnaggntgtcacccccatcccctctgaacagcactcgcaggaaggggggtcgccgtggtcgccgtctgtanacaanattcctcaaaatattttctgttaataaattgccttcatgtaaa

SEQ ID NO: 527838 - DNA, 844 bp, Homo sapiens
agcggcctttgttgtcttcgtgctgagtagactgagaaggaggaagaggagggattggtcttgctgtctcaatggtggcagaggcagaagaaaatctgcatataaatggacccacttgattcaaatgtgttgttcaagggtcagctgtatattggttggctctcattatctaatattttacgtaagaatcttctctgtcataaataaaatgaacttaaaattttcttttgttgtactgacttggttttacaaatcaaggttatactagcctcagaaatgactagaattgcttttattcttttctattttccgaagcaatttacttggataaaaatttctaattaataaattaaataatttgcttcctgaaattctatgagaacccatcctccaaaaccatctagattgaaacttttcctatgaaattaggataatttctatttcaatctttttcatattagtggctattaatccatttggagtttctatttttaaatctgagattaatggttgcttataattttactattttatgccagacatggtggctcatgcctgtaatcccaacagttttgggagacccaggagggtggatcacctgaggtcaggagttcgagaccagctggcaacatggtgaaaccccatctctactaaagatacaaaaaattagctggcgtggggggcgcatgcctgtatccctgctactcaggaggctgaggcaggagaatcacttgaacctgggagacagaaggttgccagtgagctgagctcgcgccactggcaatccagcctggtgacagaatgagattctggttccaaaaaaaaacaaaaaatctccagcgcg

SEQ ID NO: 527839 - DNA, 590 bp, Homo sapiens
tgaatttagaattatcaaagagcaagcttgaatttgaatttgatactattattgtgttataaagaaagaatctattgtgcagtgttaaaacaccagaaggaagatagtatgtttgaatatcttttaattgatacttatatttaaaagatgctaaactatacaataatgtcgtagttggcaaaatatcatttgagtctgaaagatatcactgacaatttgactgcttttagattagctttaatatagtttccatggtgcgtatgtgtgttccccattttaggttatagtgttgttggcattgagaatatctcccaattgatgcatgagtaagagactaccagaaataaaaagtatatcctaatctgatatgcatttagcgaaatgtttttgattagtattaacattttaaatgttactactgcatcataactgctgtaatagtgtaattaatatttgacctgtaatgagtatttttcttaaaaacctttatttaccaccagaattaatgcctgagtttccccttatatagacatgtatctgaacattgttgaccccaaatgttaaaataaattaagagatttttggttaga

SEQ ID NO: 527840 - DNA, 99 bp, Homo sapiens
actacgtcacggttgctagtcgtggaagggagaaaggtgaattcaccgaatttacaaggtgtgtcggcagccaaccgtggactagtgggtaccgagctc

SEQ ID NO: 527841 - DNA, 290 bp, Homo sapiens
atattgtcatcgtccaatgagtacgaggcggcagatatggcattatttgagcgcgattaagccataacttaggcgtctgaggtagctcaggattatccgtctagatctgatgagttctatctatgtacagtcatatgagtctgcatgtcagtagtcttgcgataacgaatagtcaagtcctgctaggacgcatcatgctgacgagaagtaggacgtcgatatctcctcaggcaaccatagtgaatggtatagggagacggctgtgcgaatggtagggtagtgcactgcac

SEQ ID NO: 527842 - DNA, 212 bp, Homo sapiens
cgcttaccatagataaatgtacacgtgtattcacacaggaagctattcagagacgtacaccagctctattaaagaaaaaaaaaacaagacaaaaccttgaaatcaaccctaatgtccttcacctggaaattggtcacctcctggtaaaaaataagtgaggctgagccccgaataacctaataaccggatgtgcatgtcggagagtaaaatcc

SEQ ID NO: 527843 - DNA, 426 bp, Homo sapiens
  misc_feature (306)..(306): n is a, c, g, or t
  misc_feature (312)..(312): n is a, c, g, or t
  misc_feature (373)..(373): n is a, c, g, or t
  misc_feature (379)..(379): n is a, c, g, or t
  misc_feature (416)..(416): n is a, c, g, or t
  misc_feature (422)..(422): n is a, c, g, or t
agcagcaggacgaagtggactgcaatatcaaggaggctcatgagaagctggagatggagatggaggttgctcgccttcatcaatgccaggtcatgctaatgaggcaggatttgatgaggtgtcaagaagagctgtggaggatggaaaagctgaacaaccaagagatgcaaaaacgacggcaactggagcccatgcgagaggagtgcaggcactaggaggaagcaatgcacttggtaatggcaggaaagattcacttggaaccttctctgatatgagacagcaggaagatacagatgggccagatgnttgttnggaggtgcctataggcataaccggaggcaccatgccccctgcttcctgtgccagctggaancccaanttcctccaagaacctgaaacctatgatgcctagaatnaccccnccca

SEQ ID NO: 527844 - DNA, 236 bp, Homo sapiens
  misc_feature (139)..(139): n is a, c, g, or t
gcggagtatgaacagccagaaggacctcctggtagcggaggcgtgccgcggtggacacctacggcagacacaactacggggtgggtgagagcttcacagtgcagcggcgaggttcacacctcaggtgactgtgtatccnttcaaagacccagcccttgcagcaccacaacctccttggtctgttctgtgaatggtttctatccaggcagcattgacgtcaggtggttccggaacgg

SEQ ID NO: 527845 - DNA, 112 bp, Homo sapiens
cacagttcgtttgatttccaccttggtcccctggccgaacgtccacggggtattgtaactctgttgacagtagtaactgtccacgcggccgcgaatttagtagtagtagacc

SEQ ID NO: 527846 - DNA, 537 bp, Homo sapiens
  misc_feature (16)..(16): n is a, c, g, or t
  misc_feature (47)..(47): n is a, c, g, or t
  misc_feature (284)..(284): n is a, c, g, or t
  misc_feature (400)..(400): n is a, c, g, or t
aattattgatcccctngaagtcttccctgaatgatccagccacaganggcatcatactgattggtgaaattggtggtcacgctgaagaaaaatcgtgccgcgtttctgaaggagcataactcaggtccaaaagccaagcctgtagtgtccttcattgctggtataactgctcctcctggcagaaggatgggccatgcaggggcaattattgctggaggaaaaggtggcgctaaagagaagatctctgctcttcagagtgctggggtggttgtcagcatgtcccncgcacagctgggaactaccatttataaggagtttgaaaagaggaagatgctttgaaggacacaacaagaaattctttaaagctgtggaagaaatctagacgtgagggccagtccangctgtcagcccatgcagctgacactggttggtctctcagtatgtgggaaatccaggcaagttttagaatgtcctaaattgagctattttcacttactgtgtaacagagacagataataaatctatcatttgatttga

SEQ ID NO: 527847 - DNA, 855 bp, Homo sapiens
acacgctctgtaccagcacgatgccgcctgccgtgttattgcccgtctcaccaaggaagtcactagctgcccgaaaagctctggctaccctgaaaccacaggctggtcgtcgattgtgcccccacggctgctgctcaagttcccaaaccgaagtgttagtggcgtgcggtgtgagcctagatggaattcgcggctgcgctggtgggaatgatcccgagagattattcacaagcttcaagacaatagccactgtgctagacacgagtaggacgcacgaagagacgggaaggactgtgcctgtagggagctgagtgaagccagaagagctcagcaaactaccggcatggtggcatctcgcacgtggggttgcacagtgccagcattcctgggatcctgggcccgtggacctctgtccctgtccgaggaccaacaagatcctcactggtggggcgcgataacaaatgtcgtggtgttggacaaaagttctgaacaaatcctggactaccctcaaaggccataccaagaaggtcaccagcgtggtgtttcacccttcccaggacctggtgtcttctgcttcccccgatgccattatcaggattgggtcggtccccaatgcctcttgtgtacaggtggttcgggcccatgagagtgctgtgacaggccttcagccttcatgccactggcgactatctcctgagctcctccgatgatcagtactgggcttttctctgacatccagacagggcgtgtgctcaccaaggtgacagatgagacctccggctgctctctcacctgtgcacaagttccaccctgacggactcatctttggaacaggaaccatggactctcagatca

SEQ ID NO: 527848 - DNA, 168 bp, Homo sapiens
ggcatctcagacacatcaatcatgtatccatattatagcttcttcgtttagtataggttttaggtatgctgggtttgccttttaaaatgggacatactttttaagttattcataagctgtatattcacccaatgtggccaatccatggatattttcaaatcacagcat

SEQ ID NO: 527849 - DNA, 500 bp, Homo sapiens
  misc_feature (86)..(86): n is a, c, g, or t
  misc_feature (88)..(88): n is a, c, g, or t
  misc_feature (338)..(338): n is a, c, g, or t
  misc_feature (342)..(342): n is a, c, g, or t
  misc_feature (353)..(353): n is a, c, g, or t
  misc_feature (360)..(360): n is a, c, g, or t
  misc_feature (367)..(367): n is a, c, g, or t
  misc_feature (427)..(427): n is a, c, g, or t
actagtccacgctgggctggaagacctggattttttcccgaacatgtggattgactggaagacctggatttggtggaagacgtagntntttctggaagacactgactgactggaagacggatctttctggaagaccgatgactggaagacctggatttctttctggaagacactgatgactggaagatctagatttttctggaagaactagatttactggaagacttggatttggtggaagacacagatttttctggaagacatggaggccattggaagatgtggattttctggaagacatggcttgtttggaagacgtagattggcaggaagacccnaatnatccggaaganttggatngttgggnagacgtggattttctggaagactgggaggttactggaagacatggattttctggaagacntggattttctggaagacgtggatcttcaggaagacatatatgctggaagacctggagcccaccgtggactagt

SEQ ID NO: 527850 - DNA, 371 bp, Homo sapiens
  misc_feature (86)..(86): n is a, c, g, or t
  misc_feature (88)..(88): n is a, c, g, or t
  misc_feature (209)..(209): n is a, c, g, or t
  misc_feature (213)..(213): n is a, c, g, or t
  misc_feature (224)..(224): n is a, c, g, or t
  misc_feature (231)..(231): n is a, c, g, or t
  misc_feature (238)..(238): n is a, c, g, or t
  misc_feature (298)..(298): n is a, c, g, or t
actagtccacgctgggctggaagacctggattttttcccgaacatgtggattgactggaagacctggatttggtggaagacgtagntntttctggaagacactgactgactggaagacggatctttctggaagaccgatgactggaagacctggatttctttctggaagacactgatgactggaagatctagatttttaggaagacccnaatnatccggaaganttggatngttgggnagacgtggattttctggaagactgggaggttactggaagacatggattttctggaagacntggattttctggaagacgtggatcttcaggaagacatatatgctggaagacctggagcccaccgtggactagt

SEQ ID NO: 527851 - DNA, 201 bp, Homo sapiens
gtataatcacattgcactatgatgtgatggagaagaggtcaataaaagtcaacaagctcacagctgccaggagtaaaaagaagaaaaaaaaaaaaaaaaccccaaaaaccattataatttggcttggaaaataaaagtccaaaaggaaaaaggcccttttttttttggttcctaagggggaaggaataattctttccctaa

SEQ ID NO: 527852 - DNA, 172 bp, Homo sapiens
tgaccttttggacgatatgatttctctttggaagttatttgatcattttccgttttatgtaaatactccttggtgagggggagtaaaataaaacccgacacacagttacggtctggtgtttattagaatctggtgcagaggtacacgtctagtctagaggtacaaggatagg

SEQ ID NO: 527853 - DNA, 156 bp, Homo sapiens
tgaagtcaaaactgtttattaatatttggagacacaagaacttatgttggccgaaaatcataagttacattgccttggtacaatgcacctgagattgtcaacgatgacgcaacatggctgtgaaatacaggacaagacagcttccttctgggaggt

SEQ ID NO: 527854 - DNA, 430 bp, Homo sapiens
acagcacatcgaggggactgtcggtggactccacaagctatcggatggcgagcatgctagtaacccgacaaattccgtcgttcaccgcgagggagcgtcatatagagaggaagagctggggcagcgacttcatgcccggtacctacaagcgacaccagcgtcggcaaggcactgtatggcaccgggatgaacacgtataaccgcagaagaacgacaggcgtatcgacacaaagtttcgacaaaaattttgtcgaaactcgcaggaaaatacgacctaggtcgagaataatacattacggagttgttcatctgggatatcgtattcccgaagaaacgattgaggaaatccgtcgggctgttgatctagtcgatgtcaatagcgattatgtccagctcacaaaacaggacgccattattttggactatgtcc

SEQ ID NO: 527855 - DNA, 256 bp, Homo sapiens
catacccatgtttcctatcctgatgtctcaaaaatcaaagaacaggatatagctcaagtccttcatcagagcctcctaaaaaacagaccacatatactgaagggttacgtccagagtctatcgttactagtttcaggaagcagttcttcattttggaaacaggcagtgatctcaaccaagtcggtaacctggaattgtaagctccagagatgcgacatagacccagcccatcagagactgcacctcttgaaagatc

SEQ ID NO: 527856 - DNA, 353 bp, Homo sapiens
taagtgtaggatttaatctagagtgatgtgcatgtacatctgtgttcatagaagtgtgtcctgtgataattacacatgtaaaaatctcagtgtgcacacacattgtaacatctgtttcatctttaggtctggcaggcagtatcccagctatataattgaattttcttggtgattgataccttaattaatctgtcctttaaaagtagttcctccactttgttctagaattatttaaatattttgacaatgcattatatatttcctgtcagttaaagctgaagttcttaatactctgtagcagtaccataaacctgtgtcctttttcacaattaaaaccttttttttttaactta

SEQ ID NO: 527857 - DNA, 274 bp, Homo sapiens
atagtgagatgagtacagtagtagtgttctcataaaccattctgatggcataataaaccaagagaacgttaacacaatgccagaaaaggcattaaccgtgtaacacacatatacgccacacatgcacacacacacatacacgcacactaaggttatattctgaacacaaaagtgatagaaaaaagctttgaactgcgctaaactcaaactaaaaacccctttattataataaagctgtggaaactacctgtgagcggctcgactggggactcct

SEQ ID NO: 527858 - DNA, 468 bp, Homo sapiens
atggcatgtatgtgaggacattcattcatttagtaaatatatactatatgctagacattgagattagggagggagcaaaacaaaccatctgtcctcatggaacttataatctaattgtgactaacaataaaaaagcacatcctataacacaatgcagcaatgacgcagtaggttctgaggtgtagtaacaggaagaaaataatttaccacatcctttatgcattgggtgtaacaggcaagcttgagcagaaaaagctttttttttttttttccgagactctcactctgtcgcccaggctggagtgcagtggcacaatctgggctcacggcaagctccgcctcccaggttcacgccattctccggcgtcagcctccgtgagtagatggcagtagtgaggacattttccatccagttagtaaatttttactatatgctagacttggagatcggggggggagcaaaacaaa

SEQ ID NO: 527859 - DNA, 156 bp, Homo sapiens
tgcgtaaccactctaagggcgttacctcagcaatcagagacctccagctccggcgtggctcctccggtcaccaggtccgtatcaggctgaggatattgtcattgaagtacgtcgcgctcatgagtgagtccaggacactgacggcaaatgctgtcc

SEQ ID NO: 527860 - DNA, 309 bp, Homo sapiens
ccaaactaaggggaaagccaaagaagtgggggcaaaataaagaacaaaccacagggccatgtgggaaaagaaagcaaacctgtaagtcaagctgagaactcttgctttgtggggcccggccgctcgggccagaaccccaagaacttcttcttccatccacaaaagacacccctcagagcccacaccagcccccgaaaaaaaagggcgccgacacggggttaacaaaaaccaaaaaaaaaagagacgactataataatatggttacggttctgacgcccctggggggcccgaaaaaaaacccaaacaacc

SEQ ID NO: 527861 - DNA, 817 bp, Homo sapiens
aaactaaacaacagaagaaggtgcggcgcgcccgcctggatgagcccccgtgccgccaagggctgccctggcagccattttggggacaatgaagaccaaacgggttccgaccccagccgtagatctcaaaagggcggtaaacacacccagaccaaaggccgggtctttacaaaaccaggccaggctagaaagctaagaactgcgcgcctaaaatatacggctgggtgaaaatgaagggacctgtctcgggaacaattccagggtcaaggggtgatgccccaacaaaaggtgcggcccacgggacgtcggggacaaacataattgtaaaatcccgcgggccagccacatgccgcccgcacccccgggcggtaaacccacaagggaacccgggtattctttgggcgagcgtccccgcgcgctttcccggagaccactggttggcgacaaccacttgcggagaaaaacaaacaatcttcgaagggggagaaccgtggaagaccataaatcaccgggagcctcctcaacgatatctaggacaaatatgcgggcaatcttccagggaagatttataccacgatcgcgctttgaggaataaaagttgcgatgttctatacctcgtccatacttgggcggccggagatatataaggcacgtcttgggcagaccaccaaaagctcaaaggcgcccaaagttcccccactagcgagaaaaagtgggaaattccagaccccgatcggagaatgcgaaaacaatagtctccaaaagtgtttcaagaaagaaagactatcaaaccacttaccaattttgggaaaatata

SEQ ID NO: 527862 - DNA, 375 bp, Homo sapiens
  misc_feature (2)..(2): n is a, c, g, or t
  misc_feature (112)..(112): n is a, c, g, or t
  misc_feature (236)..(236): n is a, c, g, or t
  misc_feature (299)..(299): n is a, c, g, or t
  misc_feature (324)..(324): n is a, c, g, or t
cnagaagtataaaaaagcctggtaaatccactgtctgaaacattcagtattacaggaatgtaggtgacaggaggtagagcaggaaatgaagctagcagagggcagagccctnagaagtattaaataattacaaatgtaaagtgctgtgaagggaattacctggatccctgagaagacaaaatgaaagtctaacctcatttgaagctctttggggaagctcctgagcatttcagctnacactgaataggaattaaaaatcactctggaatgagtgagttgagagataggaaataaagttnacaggacatggtgtgatcagaaatnagggattagaaaaaaatatcagggatgacttctacatctttggtttagtgt

SEQ ID NO: 527863 - DNA, 771 bp, Homo sapiens
  misc_feature (450)..(450): n is a, c, g, or t
  misc_feature (491)..(491): n is a, c, g, or t
  misc_feature (503)..(503): n is a, c, g, or t
  misc_feature (537)..(537): n is a, c, g, or t
  misc_feature (544)..(544): n is a, c, g, or t
  misc_feature (548)..(548): n is a, c, g, or t
  misc_feature (560)..(560): n is a, c, g, or t
  misc_feature (578)..(578): n is a, c, g, or t
tatcttaatgggtgtgaccaatcctgtttcctatgctctgggtgaatagagccggatggtatactactgcttgggcaatggcatacaactgtgcattgacaaagtgaatatggtaaatgatggtctggggtacaatggatgttacagatataaaagttaggaacagtagaaatccaaagaactatgtaaacaagaaaagctgtttgttttgtttacaaagtatagtttaaggattattctgctgaagatgcagtttaggagtgtccttgggaagaactaagtaagaaatacgattgcctaacgatggttggccaggtaataagtgttgtgcacttcatgtccattacgtcaggtttctcatgagttcttaaaattagtgagattaaaaatctaaaaattttgcatttcatgctatcagaaacagtattttcttcccaaatcaaaataaangaaatatgatcagagcttgaacacaggcttatttttaaaantaaaatattttnaacatgggtttccttattgaaaaatcagtgtatnagtcatnaaanacatcattaagnatattgacataaagttgntttcagtgcagtttcaattatatctcattcatttatagcgtctcagtctttgtatattgccttttcatgtagttaatatctcattatcttttgcctaagttttctaatactaaatgtattcttaagactcaggggatataggggacaatactggttgggagaatgttgttgacaaataaaaattttttgggcc

SEQ ID NO: 527864 - DNA, 154 bp, Homo sapiens
aagtcttaggaagagggtgtacggagcagaggtttcaggagtgatacggaaaatgagtgcaataaccctcccacttatactcagtggtatctttagagaattacatggatcacgagactccatcctctgccagtgcagacggcactggtgggag

SEQ ID NO: 527865 - DNA, 101 bp, Homo sapiens
tcagcaagcgttccgcccgcagctgcgcgtgtggtaggtgacagtgcttgctgggttcccgcctagttcgatgcgggaacttgtggtcacgtgcctccgcg

SEQ ID NO: 527866 - DNA, 338 bp, Homo sapiens
tgacagcagagggatggggccagatggggtaaaaaggaatggcacaggccaggtgtggtggctcacccctgtaatcccggcactttgggaggccgaggtgggtggatcacctgaggtcaggagttcgagaccagcctgaccaacacggcaaaaccctgtctctactaaatatacaaaaattagccgggcgtggtagcgtgcacctgtaatcccagctacttggggaggctgaagcaggagaatcacttgaacctggaggcagaggttgcagtgagccgagatcgtgccactgcacaccagcctgggagacagagcctaagactctgtctcaaaaagca

SEQ ID NO: 527867 - DNA, 421 bp, Homo sapiens
aaaaagtggaaacaaccccaatgtctaccaactgatgaatgggaaataaaatgtggtctgtccacgcaatggaacattattagactctaaaaagaaatgaagtactcacacatgcccccacatggatgagccttgaaaacttggtaagtgaaaaaaaccaggggcaaaagcccacatattgtctgactgcattgaaatgcaatgtctaaaatggacgaatctatatagagtgaatatagattagcgtttgccagggcctggaggctgtgaaagatgaggcatgactactaagggtttggggtttctttttcgggtgatgaaaatgttctgaaattagtggtgattgtgcccgattttgagaatggactaaaaacccatgaacttttaaaaataaaaataaccaaaaaaaattccccagatg

SEQ ID NO: 527868 - DNA, 102 bp, Homo sapiens
ctctcctattgtatctagcactttgggaggctgagtgcaggtgatgctgagtcaggagttcaaaatcagctgggcaacatggtaaaaccccgtctctgcaag

SEQ ID NO: 527869 - DNA, 143 bp, Homo sapiens
agtggtgggtcgacttgcttgtgccctctggttcgaaatgtactcgatctgctggtcaggctcttgagggtggtgtcacctcgacgtcacgtgtcacgaaccagattggcatcatcagccctggtagtagcggccaccatggc

SEQ ID NO: 527870 - DNA, 323 bp, Homo sapiens
gtcgacagactcctaggcgacccagacaatattatctagccaccccttaaacacccctcccacatcaagccgaatgatatttctattcgctacacaattctcgatcgtcctaacaaataggaggcgtcttgcctattactatcatctcacctagaataatcccatcctcatatatcaaacaacaaagcatatatttcgccactaagccaatactttattgactcctagcgcagacctctcattctaactgaatcggaggcaaccagtaagctaccttttacatcattggcaagtagcatcgtactatattcaacaatctaatc

SEQ ID NO: 527871 - DNA, 161 bp, Homo sapiens
ctacaggatcttagcggcggcctttatttgggctggctagtctcggacgcaagggttcaaggttacttcgcgggagctggaactgcgggccgcgcaggccctgaagggctcgcgagcccaggggcgcggccgcgatgcgctccatggcatctggaggtggt

SEQ ID NO: 527872 - DNA, 233 bp, Homo sapiens
cggatcctgcagctatcggttcatgagtcacctctaatcacacgatcaaagggacagcatcagcacgcagcaatgcagctcaaaacgcttagcctagcccacaccccacgggaaacagcagtgattaacctttagcataaacgaaagttactaagtatactaacccaggttggtcatttcgtgcagccaccgggtcacacgattaacccaagtcaattgaaccggatagcttg

SEQ ID NO: 527873 - DNA, 102 bp, Homo sapiens
acggccgtgtattactgtgcgagagatcggggctactatgatagtagtggttgtaccaactggtccgacccctggggccagggaaccctggtcaccgtctcc

SEQ ID NO: 527874 - DNA, 869 bp, Homo sapiens
gctggctagtatgcctatcttcaccaataacacacagccaccctgccgcagctgctggcacagaagaggacggaagcactcgtggagtaccacaagcacgagtgggaggcttgagtgggaccatactgaccactattacgattgtaattagctcagcagggtgggttgcggttagggcgacactatacagcctctgactcaaactcctcccttttagtcttctagtccacaggttctaagacccaaacgtggagtgggtggactacaagagagttcccctagtgcacggagatagtgatggctgttgcgggcagggtgtgtcaaatatatttcctatactctagtttggcacatgcagtgtagtgtggtgaacagagagaacccatgagggtaccttgcaggaggagggacctactgatcccagagtctggaagagatttacacagctacatagattcctactctatgccgggcgtggtggcacgcgcctgtaatcccagtctacccaggaggcgtgaggcatgagcaatcgcttgaaccgggagagtggaggttgcaagtagatgctgtagcatcgacgccatatgtactccatgcctgggtcgacacgactcgagactgccatattcactatgtaaatgtatccttcccgtcgtatatatggtgagcccagttcaagggtccagtaacccaggtgctcttcatgcagactccatcattttgcaaaacctcaatcagggctaggggcgggtgaacctatgcttgaccctgaactttggttacgccgtgctgccactaagtgctttgaagtctgagatccggcaacaccaactgggggaactccgtccgtgcccaggaataggtttact

SEQ ID NO: 527875 - DNA, 173 bp, Homo sapiens
tccgctcgcaaggatgaggaagtgaattaccacttgttttacatggctaaatatagcccttggactttggtcttctcctttctggggtacatttggtaatatgttagttgatggtatagctggcacagtgcctgaagtatctacgattgcttgacctatgtttagtccaattt

SEQ ID NO: 527876 - DNA, 580 bp, Homo sapiens
  misc_feature (580)..(580): n is a, c, g, or t
tttgccagcaaaaaaaaaggctttttatttaaaacatgcaaaaaaaaaatgcctttgaattttaatacacaaatcatttttctttttttaataataacatattaatacctcaacattagataagtttgagctttttgggacagtcaatgcaactgttacagagtttggagaatagcaaatttttttgcccagggaaacataggaaactttccgtaagggaggtcgaatgttcactaaatcttcagggaagggaaaatgggagatgacaggtgaaaaaaggctttacagatagggaaagatggataatgccccaaaggaaagagagctgcagggactgcacagaagcagccaggccatttgtttttttttagacaggaatgaagcacagctggtaaaagggcggcccagaggcaaatccattgacaactggaggggggtcaaggttctttgggtcaaccagagatttcaggttaaagttcttgaaaatggaggtcaggaataaaaacagttccatgccggccagggcttctccacacaaatccgttttcctgttgagaaaggcatgaagtatttacttttn

SEQ ID NO: 527877 - DNA, 346 bp, Homo sapiens
tgagatggagtttcactctgtcacccaagctggtagtgcagtggcgtgattctcggctcacagcaacctctaccttcaaggttcaagcgattctcctacctcagcctcctgagtagctgggattacaggcacgtgcctccacgcctggctgattttggtatttttagtagagacagggtttcactgtgttggccaggctgatctcgaactcctgacctcaggtgatccacctaccttggcctcccaaagtgatgggataacaggcatgagccaccacacccagctaagttttctttcgaacactcaaatactaacaggtgcttaaacagaacaagtacaaggctat

SEQ ID NO: 527878 - DNA, 1975 bp, Homo sapiens
  misc_feature (1456)..(1456): n is a, c, g, or t
  misc_feature (1464)..(1464): n is a, c, g, or t
ctactccttcagagactggaccagagaagccactgtgtgccactgtgggtggcccttgcaccccgcaactctcgccggctgtgcctagagagattcagcgcgtgccgatctcagggtgcccctgctcacaggctgcgaggccacacacgaatgactggccatcatggaggcctccacagacttcctaccaggcctgaacttcagcaactgcagccgacgggccctggagaaagccctcctggatggaatgggcagctgcctcttcgaacggctgcctagcctaccccctatggctgctttctgcggaaatatgtttgtggagccgggcgagcagtgtgactgtggcttcctggatgactgcgtcgatccctgctgtgattctttgacctgccagctgaggccaggtgcacagtgtgcatctgacggaccctgttgtcaaaattgccagctgcgcccgtctggctggcagtgtcgtcctaccagaggggattgtgacttgcctgaattctgcccaggagacagctcccagtgtccccctgatgtcagcctaggggatggcgagccctgcgctggcgggcaagctgtgtgcatgcacgggcgttgtgcctcctatgcccagcagtgccagtcactttggggacctggagcccagcccgctgcgccactttgcctccagacagctaatactcggggaaatgcttttgggagctgtgggcgcaaccccagtggcagttatgtgtcctgcacccctagagatgccatttgtgggcagctccagtgccagacaggtaggacccagcctctgctgggctccatccgggatctactctgggagacaatagatgtgaatgggactgagctgaactgcagctgggtgcacctggacctgggcagtgatgtggcccagcccctcctgactctgcctggcacagcctgtggccctggcctggtgtgtatagaccatcgatgccagcgtgtggatctcctgggggcacaggaatgtcgaagcaaatgccatggacatggggtctgtgacagcaacaggcactgctactgtgaggagggctgggcaccccctgactgcaccactcagctcaaagcaaccagctccctgaccacagggctgctcctcagcctcctggtcttattggtcctggtgatgcttggtgccagctactggtaccgtgcccgcctgcaccagcgactctgccagctcaagggacccacctgccagtacagggcagcccaatctggtccctctgaacggccaggacctccgcagagggccctgctggcacgaggcactaagcaggctagtgctctcagcttcccggcccccccttccaggccgctgccgcctgaccctgtgtccaagagactccaggtaaatctgggccagggcccgccctgagccaaggcaggtgggaggcttggtaccctaactgcagttctcatncctgctcnctgccagtggtgctcttcattaggtgatcggggtgccctcagccttcagacactctgagccccagaagcagcaaagggtgagcctcctgccttggtttctaccaccatctggtggtcaatggcgggactgcagtcggccagggactgcggttgacctacaccttcctcccctgagacatcagctggcatgcctccaagccctctgcgcatgccctcattctctcctgccccctggctgactttgcatgttgacttgaacccctctggggaatctctgtgcatgtccacagcccctggttatgctctcacagccactgcccctctctctgttcaggctgagctggctgaccgacccaatccccctacccgccctctgcccgctgacccggtggtgagaagcccgaaggtaacggtggggggagagaagggcacggcctctccccccacctagggctgtggtgctggtagacatgacggtggttggcgtggtgagatgccccctcagggcatg

SEQ ID NO: 527879 - DNA, 1875 bp, Homo sapiens
  misc_feature (1356)..(1356): n is a, c, g, or t
  misc_feature (1364)..(1364): n is a, c, g, or t
gaccatgatttgcctgggaatagctgcccctgtccaggtccagccccagccaagacctgcatcatggaggcctccacagacttcctaccaggcctgaacttcagcaactgcagccgacgggccctggagaaagccctcctggatggaatgggcagctgcctcttcgaacggctgcctagcctaccccctatggctgctttctgcggaaatatgtttgtggagccgggcgagcagtgtgactgtggcttcctggatgactgcgtcgatccctgctgtgattctttgacctgccagctgaggccaggtgcacagtgtgcatctgacggaccctgttgtcaaaattgccagctgcgcccgtctggctggcagtgtcgtcctaccagaggggattgtgacttgcctgaattctgcccaggagacagctcccagtgtccccctgatgtcagcctaggggatggcgagccctgcgctggcgggcaagctgtgtgcatgcacgggcgttgtgcctcctatgcccagcagtgccagtcactttggggacctggagcccagcccgctgcgccactttgcctccagacagctaatactcggggaaatgcttttgggagctgtgggcgcaaccccagtggcagttatgtgtcctgcacccctagagatgccatttgtgggcagctccagtgccagacaggtaggacccagcctctgctgggctccatccgggatctactctgggagacaatagatgtgaatgggactgagctgaactgcagctgggtgcacctggacctgggcagtgatgtggcccagcccctcctgactctgcctggcacagcctgtggccctggcctggtgtgtatagaccatcgatgccagcgtgtggatctcctgggggcacaggaatgtcgaagcaaatgccatggacatggggtctgtgacagcaacaggcactgctactgtgaggagggctgggcaccccctgactgcaccactcagctcaaagcaaccagctccctgaccacagggctgctcctcagcctcctggtcttattggtcctggtgatgcttggtgccagctactggtaccgtgcccgcctgcaccagcgactctgccagctcaagggacccacctgccagtacagggcagcccaatctggtccctctgaacggccaggacctccgcagagggccctgctggcacgaggcactaagcaggctagtgctctcagcttcccggcccccccttccaggccgctgccgcctgaccctgtgtccaagagactccaggtaaatctgggccagggcccgccctgagccaaggcaggtgggaggcttggtaccctaactgcagttctcatncctgctcnctgccagtggtgctcttcattaggtgatcggggtgccctcagccttcagacactctgagccccagaagcagcaaagggtgagcctcctgccttggtttctaccaccatctggtggtcaatggcgggactgcagtcggccagggactgcggttgacctacaccttcctcccctgagacatcagctggcatgcctccaagccctctgcgcatgccctcattctctcctgccccctggctgactttgcatgttgacttgaacccctctggggaatctctgtgcatgtccacagcccctggttatgctctcacagccactgcccctctctctgttcaggctgagctggctgaccgacccaatccccctacccgccctctgcccgctgacccggtggtgagaagcccgaaggtaacggtggggggagagaagggcacggcctctccccccacctagggctgtggtgctggtagacatgacggtggttggcgtggtgagatgccccctcagggcatg

SEQ ID NO: 527880 - DNA, 1499 bp, Homo sapiens
ctactccttcagagactggaccagagaagccactgtgtgccactgtgggtggcccttgcaccccgcaactctcgccggctgtgcctagagagattcagcgcgtgccgatctcagggtgcccctgctcacaggctgcgaggccacacacgaatgactggccatcatggaggcctccacagacttcctaccaggcctgaacttcagcaactgcagccgacgggccctggagaaagccctcctggatggaatgggcagctgcctcttcgaacggctgcctagcctaccccctatggctgctttctgcggaaatatgtttgtggagccgggcgagcagtgtgactgtggcttcctggatgactgcgtcgatccctgctgtgattctttgacctgccagctgaggccaggtgcacagtgtgcatctgacggaccctgttgtcaaaattgccagctgcgcccgtctggctggcagtgtcgtcctaccagaggggattgtgacttgcctgaattctgcccaggagacagctcccagtgtccccctgatgtcagcctaggggatggcgagccctgcgctggcgggcaagctgtgtgcatgcacgggcgttgtgcctcctatgcccagcagtgccagtcactttggggacctggagcccagcccgctgcgccactttgcctccagacagctaatactcggggaaatgcttttgggagctgtgggcgcaaccccagtggcagttatgtgtcctgcacccctagagatgccatttgtgggcagctccagtgccagacaggtaggacccagcctctgctgggctccatccgggatctactctgggagacaatagatgtgaatgggactgagctgaactgcagctgggtgcacctggacctgggcagtgatgtggcccagcccctcctgactctgcctggcacagcctgtggccctggcctggtgtgtatagaccatcgatgccagcgtgtggatctcctgggggcacaggaatgtcgaagcaaatgccatggacatggggtctgtgacagcaacaggcactgctactgtgaggagggctgggcaccccctgactgcaccactcagctcaaagcaaccagctccctgaccacagggctgctcctcagcctcctggtcttattggtcctggtgatgcttggtgccagctactggtaccgtgcccgcctgcaccagcgactctgccagctcaagggacccacctgccagtacagggcagcccaatctggtccctctgaacggccaggacctccgcagagggccctgctggcacgaggcactaagcaggctagtgctctcagcttcccggcccccccttccaggccgctgccgcctgaccctgtgtccaagagactccagtctcaggggccagccaagcccccaccccaaggaagccactgcctgcgaccccaggccggtgccatcgggtgactgcccggccaggggctgaatcccgcctagtggtacctccaga

SEQ ID NO: 527881 - DNA, 1496 bp, Homo sapiens
ctactccttcagagactggaccagagaagccactgtgtgccactgtgggtggcccttgcaccccgcaactctcgccggctgtgcctagagagattcagcgcgtgccgatctcagggtgcccctgctcacaggctgcgaggccacacacgaatgactggccatcatggaggcctccacagacttcctaccaggcctgaacttcagcaactgcagccgacgggccctggagaaagccctcctggatggaatgggcagctgcctcttcgaacggctgcctagcctaccccctatggctgctttctgcggaaatatgtttgtggagccgggcgagcagtgtgactgtggcttcctggatgactgcgtcgatccctgctgtgattctttgacctgccagctgaggccaggtgcacagtgtgcatctgacggaccctgttgtcaaaattgccagctgcgcccgtctggctggcagtgtcgtcctaccagaggggattgtgacttgcctgaattctgcccaggagacagctcccagtgtccccctgatgtcagcctaggggatggcgagccctgcgctggcgggcaagctgtgtgcatgcacgggcgttgtgcctcctatgcccagcagtgccagtcactttggggacctggagcccagcccgctgcgccactttgcctccagacagctaatactcggggaaatgcttttgggagctgtgggcgcaaccccagtggcagttatgtgtcctgcacccctagagatgccatttgtgggcagctccagtgccagacaggtaggacccagcctctgctgggctccatccgggatctactctgggagacaatagatgtgaatgggactgagctgaactgcagctgggtgcacctggacctgggcagtgatgtggcccagcccctcctgactctgcctggcacagcctgtggccctggcctggtgtgtatagaccatcgatgccagcgtgtggatctcctgggggcacaggaatgtcgaagcaaatgccatggacatggggtctgtgacagcaacaggcactgctactgtgaggagggctgggcaccccctgactgcaccactcagctcaaagcaaccagctccctgaccacagggctgctcctcagcctcctggtcttattggtcctggtgatgcttggtgccagctactggtaccgtgcccgcctgcaccagcgactctgccagctcaagggacccacctgccagtacagggcagcccaatctggtccctctgaacggccaggacctccgcagagggccctgctggcacgaggcactaaggctgagctggctgaccgacccaatccccctacccgccctctgcccgctgacccggtggtgagaagcccgaagtctcaggggccagccaagcccccaccccaaggaagccactgcctgcgaccccaggccggtgccatcgggtgactgcccggccaggggctgaatcccgcctagtggtacctccaga

SEQ ID NO: 527882 - DNA, 287 bp, Homo sapiens
  misc_feature (46)..(46): n is a, c, g, or t
  misc_feature (83)..(83): n is a, c, g, or t
  misc_feature (119)..(119): n is a, c, g, or t
gtggaagagggagacaagacagaagggtagtccggtcttgagtttnctttgtggggagtggtgaagaggcaaaaacggatctnagagtgaccttcgagtaaagaagacatggggctgtntggagtggctcacacccataatcccagcactttgggaggtggaggtgggaggttcacttgaggccaggagttcaagacccacctgggcaacatggcaagatcccatctctataaaattttaaaaaattagctgggtgtggtggtgtgcacctgtaatcccgggtactt

SEQ ID NO: 527883 - DNA, 2055 bp, Homo sapiens
  misc_feature (1384)..(1384): n is a, c, g, or t
  misc_feature (1536)..(1536): n is a, c, g, or t
  misc_feature (1544)..(1544): n is a, c, g, or t
ctactccttcagagactggaccagagaagccactgtgtgccactgtgggtggcccttgcaccccgcaactctcgccggctgtgcctagagagattcagcgcgtgccgatctcagggtgcccctgctcacaggctgcgaggccacacacgaatgactggccatcatggaggcctccacagacttcctaccaggcctgaacttcagcaactgcagccgacgggccctggagaaagccctcctggatggaatgggcagctgcctcttcgaacggctgcctagcctaccccctatggctgctttctgcggaaatatgtttgtggagccgggcgagcagtgtgactgtggcttcctggatgactgcgtcgatccctgctgtgattctttgacctgccagctgaggccaggtgcacagtgtgcatctgacggaccctgttgtcaaaattgccagctgcgcccgtctggctggcagtgtcgtcctaccagaggggattgtgacttgcctgaattctgcccaggagacagctcccagtgtccccctgatgtcagcctaggggatggcgagccctgcgctggcgggcaagctgtgtgcatgcacgggcgttgtgcctcctatgcccagcagtgccagtcactttggggacctggagcccagcccgctgcgccactttgcctccagacagctaatactcggggaaatgcttttgggagctgtgggcgcaaccccagtggcagttatgtgtcctgcacccctagagatgccatttgtgggcagctccagtgccagacaggtaggacccagcctctgctgggctccatccgggatctactctgggagacaatagatgtgaatgggactgagctgaactgcagctgggtgcacctggacctgggcagtgatgtggcccagcccctcctgactctgcctggcacagcctgtggccctggcctggtgtgtatagaccatcgatgccagcgtgtggatctcctgggggcacaggaatgtcgaagcaaatgccatggacatggggtctgtgacagcaacaggcactgctactgtgaggagggctgggcaccccctgactgcaccactcagctcaaagcaaccagctccctgaccacagggctgctcctcagcctcctggtcttattggtcctggtgatgcttggtgccagctactggtaccgtgcccgcctgcaccagcgactctgccagctcaagggacccacctgccagtacagggcagcccaatctggtccctctgaacggccaggacctccgcagagggccctgctggcacgaggcactaagcagtgaccccaggagggcacaagggcagtggtgctcagaatggccttccgtaggcccaggtcaccatgttagaanggctgcaggctagtgctctcagcttcccggcccccccttccaggccgctgccgcctgaccctgtgtccaagagactccaggtaaatctgggccagggcccgccctgagccaaggcaggtgggaggcttggtaccctaactgcagttctcatncctgctcnctgccagtggtgctcttcattaggtgatcggggtgccctcagccttcagacactctgagccccagaagcagcaaagggtgagcctcctgccttggtttctaccaccatctggtggtcaatggcgggactgcagtcggccagggactgcggttgacctacaccttcctcccctgagacatcagctggcatgcctccaagccctctgcgcatgccctcattctctcctgccccctggctgactttgcatgttgacttgaacccctctggggaatctctgtgcatgtccacagcccctggttatgctctcacagccactgcccctctctctgttcaggctgagctggctgaccgacccaatccccctacccgccctctgcccgctgacccggtggtgagaagcccgaaggtaacggtggggggagagaagggcacggcctctccccccacctagggctgtggtgctggtagacatgacggtggttggcgtggtgagatgccccctcagggcatg

SEQ ID NO: 527884 - DNA, 184 bp, Homo sapiens
tctggacatgctcctgaatggcatcaaaagtgatggactgcccattgctggagaagacttctctcctactgtcatatggagccctccagactgagggctccccttgtctgcaggattctgacgtctaaatgtcgtggatgtgtggcttggatgctcctacatctatgatgcagcttggaagccc

SEQ ID NO: 527885 - DNA, 1426 bp, Homo sapiens
ctactccttcagagactggaccagagaagccactgtgtgccactgtgggtggcccttgcaccccgcaactctcgccggctgtgcctagagagattcagcgcgtgccgatctcagggtgcccctgctcacaggctgcgaggccacacacgaatgactggccatcatggaggcctccacagacttcctaccaggcctgaacttcagcaactgcagccgacgggccctggagaaagccctcctggatggaatgggcagctgcctcttcgaacggctgcctagcctaccccctatggctgctttctgcggaaatatgtttgtggagccgggcgagcagtgtgactgtggcttcctggatgactgcgtcgatccctgctgtgattctttgacctgccagctgaggccaggtgcacagtgtgcatctgacggaccctgttgtcaaaattgccagctgcgcccgtctggctggcagtgtcgtcctaccagaggggattgtgacttgcctgaattctgcccaggagacagctcccagtgtccccctgatgtcagcctaggggatggcgagccctgcgctggcgggcaagctgtgtgcatgcacgggcgttgtgcctcctatgcccagcagtgccagtcactttggggacctggagcccagcccgctgcgccactttgcctccagacagctaatactcggggaaatgcttttgggagctgtgggcgcaaccccagtggcagttatgtgtcctgcacccctagagatgccatttgtgggcagctccagtgccagacaggtaggacccagcctctgctgggctccatccgggatctactctgggagacaatagatgtgaatgggactgagctgaactgcagctgggtgcacctggacctgggcagtgatgtggcccagcccctcctgactctgcctggcacagcctgtggccctggcctggtgtgtatagaccatcgatgccagcgtgtggatctcctgggggcacaggaatgtcgaagcaaatgccatggacatggggtctgtgacagcaacaggcactgctactgtgaggagggctgggcaccccctgactgcaccactcagctcaaagcaaccagctccctgaccacagggctgctcctcagcctcctggtcttattggtcctggtgatgcttggtgccagctactggtaccgtgcccgcctgcaccagcgactctgccagctcaagggacccacctgccagtacagggcagcccaatctggtccctctgaacggccaggacctccgcagagggccctgctggcacgaggcactaagagtctcaggggccagccaagcccccaccccaaggaagccactgcctgcgaccccaggccggtgccatcgggtgactgcccggccaggggctgaatcccgcctagtggtacctccaga

SEQ ID NO: 527886 - DNA, 856 bp, Homo sapiens
cctggtacgccccggatttacgggatgcggagcagtgggctggctgcgctgaagcggagctgtctggctcggtacgcccccacctcgtccaggaatctaggagtcggggtgtattccgaagccatctccttccgctctcccgcccctgcaggctgtgtgccgagcttggaagaacagtgtgacccgttcgacgtgaacaataggacatgacatgccctggccccgtgctggccactgcgtgagcgttaggaacattccctaaaatgcgctggcctggcgctgtcgtgaacagtggcgggagtgcggctggcgcgtgggggcgggacggggaggggcgcggccagccggggcttcttgcttcctgctgaccccgtgctgtgttgcatgggctggtgtggagtacgcgagagataagatcctcagtgggctgatccctgccctggagccctggttgaagccctgagggagacggcaaggcgatctatggtacgttcgcttacattatatcaatatttggacagtccctttaaagctcctaagagatattcaggagtgtcggacaaatacttccctggcgcccaggcaattcgaatattgtatgcgttcataagggatctgattgtggctgggactttgggacattttggtacactagtagaacttaggaaaggaatcatgttgaatggtaggggaagtaaggggagggggataaaatctttgggatgaactttagagggatgctagggttttccaattggtaggggataattaaattaatgcaaaaagaaaaaagaaatcacaggaaaagaatttggccatgaagaagacaaattaaaaaagaacgatattatgtgaa

SEQ ID NO: 527887 - DNA, 1356 bp, Homo sapiens
ctactccttcagagactggaccagagaagccactgtgtgccactgtgggtggcccttgcaccccgcaactctcgccggctgtgcctagagagattcagcgcgtgccgatctcagggtgcccctgctcacaggctgcgaggccacacacgaatgactggccatcatggaggcctccacagacttcctaccaggcctgaacttcagcaactgcagccgacgggccctggagaaagccctcctggatggaatgggcagctgcctcttcgaacggctgcctagcctaccccctatggctgctttctgcggaaatatgtttgtggagccgggcgagcagtgtgactgtggcttcctggatgactgcgtcgatccctgctgtgattctttgacctgccagctgaggccaggtgcacagtgtgcatctgacggaccctgttgtcaaaattgccagctgcgcccgtctggctggcagtgtcgtcctaccagaggggattgtgacttgcctgaattctgcccaggagacagctcccagtgtccccctgatgtcagcctaggggatggcgagccctgcgctggcgggcaagctgtgtgcatgcacgggcgttgtgcctcctatgcccagcagtgccagtcactttggggacctggagcccagcccgctgcgccactttgcctccagacagctaatactcggggaaatgcttttgggagctgtgggcgcaaccccagtggcagttatgtgtcctgcacccctagagatgccatttgtgggcagctccagtgccagacaggtaggacccagcctctgctgggctccatccgggatctactctgggagacaatagatgtgaatgggactgagctgaactgcagctgggtgcacctggacctgggcagtgatgtggcccagcccctcctgactctgcctggcacagcctgtggccctggcctggtgtgtatagaccatcgatgccagcgtgtggatctcctgggggcacaggaatgtcgaagcaaatgccatggacatggggtctgtgacagcaacaggcactgctactgtgaggagggctgggcaccccctgactgcaccactcagctcaaagcaaccagctccctgaccacagggctgctcctcagcctcctggtcttattggtcctggtgatgcttggtgccagctactggtaccgtgcccgcctgcaccagcgactctgccagctcaagggacccacctgccagtacagagtctcaggggccagccaagcccccaccccaaggaagccactgcctgcgaccccaggccggtgccatcgggtgactgcccggccaggggctgaatcccgcctagtggtacctccaga

SEQ ID NO: 527888 - DNA, 203 bp, Homo sapiens
gatcctgaggagatcccgaggagatcctgaggagatcctgaggagatcctgaggagatcctgaggagatcctgaggagatcctgaggagatcctgaggagatcctgaggagatcctgaggagatcctgaggagatcctgaggagatcctgaggagatcctgatctcagtgaggtcctcccctcaggatatctcaggatactcg

SEQ ID NO: 527889 - DNA, 442 bp, Homo sapiens
  misc_feature (1)..(1): n is a, c, g, or t
ngcagcagaaggtcgtcttcttgtaaatatttgtgaacaggacttccggagcacacacacagaagaatgcggccacacccttcctagccaactaacactgcatccttggacggaacggtgcccaagttcattttgctgtcctcttgactggatctgtcacaagccaacttggggtccctcagcactttgccctgatttcggatcctgagtaacagataccactgaattgctgtaacaatggggtgacacctttgggttttagtttttcataacactgagcctgttggttgacaaaacttggctgttggcgtcggtacagacaccagccaccgagctctctgacacatggacactggttcacatctacagctatttgaggtgccgggcaaaggagaactttaaaattgatagaaaactaaatttgaggaattaaaatcaagca

SEQ ID NO: 527890 - DNA, 1201 bp, Homo sapiens
  misc_feature (954)..(954): n is a, c, g, or t
  misc_feature (971)..(971): n is a, c, g, or t
  misc_feature (1188)..(1188): n is a, c, g, or t
ctactccttcagagactggaccagagaagccactgtgtgccactgtgggtggcccttgcaccccgcaactctcgccggctgtgcctagagagattcagcgcgtgccgatctcagggtgcccctgctcacaggctgcgaggccacacacgaatgactggccatcatggaggcctccacagacttcctaccaggcctgaacttcagcaactgcagccgacgggccctggagaaagccctcctggatggaatgggcagctgcctcttcgaacggctgcctagcctaccccctatggctgctttctgcggaaatatgtttgtggagccgggcgagcagtgtgactgtggcttcctggatgactgcgtcgatccctgctgtgattctttgacctgccagctgaggccaggtgcacagtgtgcatctgacggaccctgttgtcaaaattgccagctgcgcccgtctggctggcagtgtcgtcctaccagaggggattgtgacttgcctgaattctgcccaggagacagctcccagtgtccccctgatgtcagcctaggggatggcgagccctgcgctggcgggcaagctgtgtgcatgcacgggcgttgtgcctcctatgcccagcagtgccagtcactttggggacctggagcccagcccgctgcgccactttgcctccagacagctaatactcggggaaatgcttttgggagctgtgggcgcaaccccagtggcagttatgtgtcctgcacccctagagatgccatttgtgggcagctccagtgccagacaggtaggacccagcctctgctgggctccatccgggatctactctgggagacaatagatgtgaatgggactgagctgaactgcagctgggtgcacctggacctgggcagtgatgtggcccagcccctcctgactctgcctggcacagcctgtggccctggcctggtgancagcctgggtgggcaanaccaggtgtgagaagggacatttggaccacaatgaacagagcccagacttcaccattcaccaatgtcaaaggcagggactccaagggaagtcagtttcttacttcagatggagcaaagtcctatcaactcactatgccttggtttccccatctgtaaacgcagggtatggcctcaaccttattggcctcccagtcccattaaagctttgtgggaatntgaaaaaaaaaaa

SEQ ID NO: 527891 - DNA, 215 bp, Homo sapiens
  misc_feature (176)..(176): n is a, c, g, or t
  misc_feature (181)..(182): n is a, c, g, or t
gatcctgaggagatcccgaggagatcctgaggagatcctgaggagatcctgaggagatcctgaggagatcctgaggagatcctgaggagatcctgaggagatcctgaggagatcctgaggagatcctgaggagatcctgaggaggaggacctcactgagatcaggatctcctcagntctcnnatcctcgatctcctatcctcagattcctaaggg

SEQ ID NO: 527892 - DNA, 211 bp, Homo sapiens
tggactctagaggaccccgtgcattatggttcttagtgagcttaagttcagcgaacaacttgtcccacctccggtcggttaaatagtttttgcagaatagtcttcgaaaatagttttggcaataatagagattgtgatctttacaataagtgcacaagtcgatccaactgtgctgcgttagggaatatccttattacacgcctgttccatc

SEQ ID NO: 527893 - DNA, 1357 bp, Homo sapiens
  misc_feature (686)..(686): n is a, c, g, or t
  misc_feature (838)..(838): n is a, c, g, or t
  misc_feature (846)..(846): n is a, c, g, or t
ccacagctttttacctcacagctgtgcccctgtggggtggctggattgctagggccatttctccccaggagcccctgtgctggataagtagggtcttccctcaagctaataaatactgccccccaccccggccctaccacaattttacctaaaccacacataagtgcctgcaaagggttaaccccactcagggatggcatatggtagaaaacagggtctgaggctgggccctctcccttcttgcctttcctcatgcatagggcagcccaatctggtccctctgaacggccaggacctccgcagagggccctgctggcacgaggcactaaggtgagtcccggatgccagaggaaggggactccaccttggccgggcatccagcttgggccctggggggtgcgcattaaaggctccagactcagagaaaggctagcactgcccaagagtcagtcgaaggagtcagggccagccctgccctcccctcccctggctacaggcagggaagctgagtccagaagagtggggagggcagccagctggagcaggagctgctgggctccgtccgctggccaagaggtggctttgagaggtgggtctatccatgcccccagcagtgaccccaggagggcacaagggcagtggtgctcagaatggccttccgtaggcccaggtcaccatgttagaanggctgcaggctagtgctctcagcttcccggcccccccttccaggccgctgccgcctgaccctgtgtccaagagactccaggtaaatctgggccagggcccgccctgagccaaggcaggtgggaggcttggtaccctaactgcagttctcatncctgctcnctgccagtggtgctcttcattaggtgatcggggtgccctcagccttcagacactctgagccccagaagcagcaaagggtgagcctcctgccttggtttctaccaccatctggtggtcaatggcgggactgcagtcggccagggactgcggttgacctacaccttcctcccctgagacatcagctggcatgcctccaagccctctgcgcatgccctcattctctcctgccccctggctgactttgcatgttgacttgaacccctctggggaatctctgtgcatgtccacagcccctggttatgctctcacagccactgcccctctctctgttcaggctgagctggctgaccgacccaatccccctacccgccctctgcccgctgacccggtggtgagaagcccgaaggtaacggtggggggagagaagggcacggcctctccccccacctagggctgtggtgctggtagacatgacggtggttggcgtggtgagatgccccctcagggcatg

SEQ ID NO: 527894 - DNA, 248 bp, Homo sapiens
  misc_feature (209)..(209): n is a, c, g, or t
  misc_feature (214)..(215): n is a, c, g, or t
gatcctgaggagatcccgaggagatcctgaggagatcctgaggagatcctgaggagatcctgaggagatcctgaggagatcctgaggagatcctgaggagatcctgaggagatcctgaggagatcctgaggagatcctgaggagaggacctcatctgagatacagggatcctgaggggaggacctcactgagatcaggatctcctcagntctcnnatcctcgatctcctatcctcagattcctaaggg

SEQ ID NO: 527895 - DNA, 375 bp, Homo sapiens
  misc_feature (62)..(62): n is a, c, g, or t
tcagttttctccccccagtgccctcaccccccagggaggcaagtccttgagctacacacacntggctgtagtgcaagatatataaacataggccgggctcggtggctcatgcctgtaatcctagcactttgggaggccgaagcaggtggatcatctgaggtcgggagattgagactagcctgaccgacatggagaaaccctgtgtccactaaaaatacaaaattagccgggtgtggtggcacatgcctgtaatcccagctactcgggaggctgaggcaggagaatcacttgaacccaggaggtggaggttgtggtgagccaagatcgcgccgttgcactccagcctgggcaacaagagtgaaactctgtctcaaa

SEQ ID NO: 527896 - DNA, 215 bp, Homo sapiens
cgctagttgggtctcagtaggttataaaagaatatatggtgatgataaaacaaagtaggtaaaacaaaaggcttagaatttggacataagggtttggttggataatgacttccaatggttgtttttacaggtgacacattcaccttatggtggtaggctatagtggataacaatttcttcagctgcctccaacatggccatgcctccataaatta

SEQ ID NO: 527897 - DNA, 511 bp, Homo sapiens
tactttccacagggcaaatcaggggggctgaagcaatcgggaaatttattcactgtcatgtaagatcagatgctaggcttctctaaggataggttgatttaacagtagccaatgcagctgtggcagagcatggttgactttcatgtgatttttttggcttgagcagtcatggttggcaggacacgtgcagttgttctgaggatcatggtctaacacttgagcatctagaggcaggaagggaatacctcttaagaatgaggagaacagctagaaaattccaaagtgctggggttacaggtgtgagccaccgcgccctgacagggtggtatgtcttcgaagacatttctattttttcaggtagtgacgttctcttatgtgaacataatcctcatagttgtgtaggcatttgtttggtatttaaattcgttagctgctcactattagtctttttaccacaggtattccagtaagttcattgttcctcttaaatcggttgatttttattcacttt

SEQ ID NO: 527898 - DNA, 824 bp, Homo sapiens
gcacgagggaacttcatgtaaaaggattgtgttcagttttgggaatagattctttcagcgtgttttgcagtttgcacctgtagtcccaactacttgggaggcagtttgcacctgtggtcgcacctacttgggaggctgaggtgggcagattgctggagcctaggagttcaaggctgcaatgcgctgtgatcacaccactgcactccagcctggttgacagagtgagaccctgtctcaagaacaaacaaacgaaaagtaatggtatataggagaaaagtagaaaatatagataaatgaaaagaagaaaaattatctatgttcatacaacccagagttaactaagtattctaaatcttctgacgtgtatccttccagactttttcatattgatacacacatgcacatatacacagtttcttaaaatttatttttgttttcattttttgggggtagagatggcatctctctgtgttgcccagactggtcttaaatctgacctcaaggaatctccccacctcacacacagctttaaatgtattttacatcgcaaatgggattatattatatatactgttttataaactttttcatttaatgtataattttcaccaaaaaattttttgccccatgatatcaattcttttgataatagaacttcacatttctgtcagatgattttcatagaatatagtcaagattctttgaagctgagcatggtagctcttgcttgtagtcccagctactcaggagggtgaggtgggaagatcgctagagcctaagagctcaaggccagtcttggtaacatataagacctcgtctcttta

SEQ ID NO: 527899 - DNA, 114 bp, Homo sapiens
gatcgctgtccacggaagtgaaggagcacgtggccacggagctattcgggaacaagagtactactacatcccgcagtacaagaactggagaggacacactattcgagagcacag

SEQ ID NO: 527900 - DNA, 131 bp, Homo sapiens
tatgtgaaggggggcacgagacagagggcagcaacaggcttctctcctgggctctgtggagcctgggaaagaaaactaagcaccagcacctgtttcctgacacaggagacagccacgaagctcgaggcaag

SEQ ID NO: 527901 - DNA, 421 bp, Homo sapiens
  misc_feature (7)..(7): n is a, c, g, or t
  misc_feature (41)..(41): n is a, c, g, or t
  misc_feature (352)..(352): n is a, c, g, or t
  misc_feature (391)..(391): n is a, c, g, or t
ggcgggncatggtggctcatgcttgtaatctcagcactttnggaggccaaggcgggcagatcatgaggttagcagttcgagaacagcctggccaatatggtgaaaccctgtctctctaaaaatacaaaaattagccgggcatggtggcgcacacacctgtagtcccagctactcaggaggctgaagcagaagaatcactcgaactgggaggcggaggttgcagtgagctgagattctgccgctgcactccagcctgggcaacagagcgacactccgtctcaaaaaaaaaaaattagccacccgtggcttgaggcagaacttgcttgaacctggggcgccagaggttgcagtnagccgagattcacaccatttgcactccaacctggggttnaggagaggaagattctgttcccaccgcaaa

SEQ ID NO: 527902 - DNA, 235 bp, Homo sapiens
cagaactccgagtaaaggctcgcaggacctcaccccgtgtaagcttgaaacatgtatcaattgaattgtcaacttgattgatgatccatggttgatgtattagctagcttgataatgtgtcacaatataaagacagataggatgacaaattatcagataatgaaagacattctcattacagtgtacttgcatagtctgttggttggttctatacatcatcgattgtatcgttgat

SEQ ID NO: 527903 - DNA, 303 bp, Homo sapiens
tgtgggtagcagcaatccagagcgcttgcgtgatgctgctacacatgtgatacgaagagccagatatcgaacgatcgaacatagcgacgtccctgtgaatgcttggccgccacaagccagttatccctgtggtaacttttctgacacctcctgcttaaaacccaaaaggtcagaaggatcgtgaggccccgctttcacggtctgtattcgtactgaaaatcaagatcaagcgagcttttgcccttctgctccacgggaggtttctgtcctccctgagctcgccttaggacacctgcgttaccg

SEQ ID NO: 527904 - DNA, 679 bp, Homo sapiens
cagcaacggtctgcagccggtcagaactcgtcctctatccccgggaatctgcgagctccccgctttgcctccggatcaggcagctcgaagtttacacccctgtggccgtctgtccaaagccgaaagccttttgcttcagctgccggtgtttccctcctgggtttgtttgttgttggtgttttgcacgggggttggggatggggtgcggtttgtatggattagtggggagatggtgcggaggctggatttgagtttatatagactttttgcatgttgtattatcgtttattattgtaattttttttaagatctgggaaaaagcgatgcaaccagggaaaaaaaaattgacaacaaaacaatttttagttggttaatggtgtttacctggtgatggtgtttggccagcctggaatcagtgtcgccatcgacgtgggagcagggctatctccgggaccctatttccaatacctatagaggcgtcccgttttctcacaaaaaaaactattacgtttctcccccatttcgtgtgcaagtggacagcatgggagggggagcgacggaagggggacaggggttaggaaaactgcacgcaaaggcccgggagccccgatagtccccagaaaacaccaagaagaaacccgccactaaaacgcatagaaggagcacacgcaaggagcgc

SEQ ID NO: 527905 - DNA, 1522 bp, Homo sapiens
gagattcaaagggtttcttcactgtgtgacttctcagagccttctgtgacaattacataataactctccaaaaggaagagtccatatgtggtgattccaaagcatatttgatctttttttgttcgtccatggagctcccatggctggagtggtggagcaaactctgggaaaagtgagattaatgcagagctgtgagaagacagaagcagtggaatgacaccacaacatctgtgcattgagaagggcactctgctgcggcatggcagtcaaggctcaatggaataatctggagaagcttttctacaatgtctacactccagggcccacacctgccaatgaaatctgtaccttaaacctgaagaggaccaggtatcaatattctttgaaaagcagcccagatgatgcagctagtagtgtgataacagccagcgagtcaatgagcactcagaactgtcatatgcgagagagtatctcatcagacgacacattcagatctcagatcactactctcagatgcagagacatatctgtgacatgcgtatgagatgctgcactgctgactcatctgagactatacgtagctagctttttgtatgcctggctcatcagctcacctctggctcacgtccttcactcagctcaagatctggactcagacacctgcaccatgtctagctatttgatggttggtaagatggaagttcacatgtggccagctggtcctggtctaaactcctgaactcgagtgattctcagcctcagctccaagtgctgagatgacaaggtgtgaagccactgtgtctggtctgagtgcatattaatgtctctgagaaacctgtgccaagaaactattacctcggcttaatccagtaattttccaggaaagctgctttttatttcatagcacctacaccctgtggacctccagaatggtgattcacgatgagaggaagagtactgagccctgtcaaggcagcattgggtgaggagcctctcaattacatgttaggaagtgaagtcacccagacctcggattccaattttgatgcttcagttttaaaatggtgggggtgaggggctgatggagaagagtctttatggacacaaatggaccagggtgctttgaccttttgttctgtggtctcctcacttattaggtcacataaccttcagtgggctacataaacctctttctcatctttagcagaacaaatctgtggtctgggcttagggccagttggactgggcttggtcattgattcgcgctggtctttgaaatgtgagtggagggacagacaggtgttgagtccaagcagaagccttcgatgctcttgtgtggcttggctctgcctctgtgcttctccctcctccttgagaacaatatgccccacatgggagctgctcctttagccaggcctccaggaccagaggacaaatggggctgagcacaaccaagcccagctgagccaggtcagggttcaatgtagcctgaacatgaaataaatgtttataattttaaacc

SEQ ID NO: 527906 - DNA, 181 bp, Homo sapiens
tgcgtccccgggaaactccagtgtattgggcaaagatactacccagagtaaaccagtctcttcaccattgcccactaaaccatgggagggccaagcagaaggtgacaggggtgaatgcaaagggggagatgaagaagagaatgatgagccacccaaagtagtagtggccgaagctagatca

SEQ ID NO: 527907 - DNA, 102 bp, Homo sapiens
tcccttgtgaactttaatcatggtccggattgagaactatccttttcaggaaataccttgttaagtgtaatttcctgaggctgcatatccacagggccaact

SEQ ID NO: 527908 - DNA, 652 bp, Homo sapiens
tgtaagcacaccctttagttaaagggcccttcggataacagatatgcatgcacgaagcaaatatttcactgtagtcccgccttttgattatgacaataatagcggcaaactgatatgtgtttgctataatgtgctgctcaatgatggatccattaagtggtgaaaactctgattgcaaagcagcacacagagaaagcattatgacaacaaaacctatctttgtaactatcaggaagtgggagttttactacttgaagaaaaatgaaagcttcctggggaactgtattttagaagagttctctaggatgtgaatcctgaacatgtttcatggcccatggagtggtgagtgtagacaagtatgagtggagggatggcggctcctctgcccagaaatattcttctactgacaagtcacagtccaaggcctcagaacctcccgatcaaagtgcaaataaatactgtggggatatttatctacctctgggaccctaacatgcctttaatagataactacttgaaatcatggaaaccaaaatgcagattcattaaggaatttaacacaagactatcaagagtcagttttgttttgggaacagttgatggtgttaatggaagggtgccaaagagggtagaatgtcaatgtgactgggtg

SEQ ID NO: 527909 - DNA, 208 bp, Homo sapiens
tccatgatcagtacagtcttgccaagcgcatcacccgttccctcccaggttcaaggaatacccctgcctcggctccctagtagctgggaccacaggcacccgctatcatgcctggctaatttttgtatttttgtagagacagggtttcaccatgttggccaggctggtcttgaacgctggagctattgatctagtcgaatgacccgtg

SEQ ID NO: 527910 - DNA, 434 bp, Homo sapiens
tggatgcgttctagaggatcccttcatgtgtgagaacgtgtggttcttcctccctaattctccagggaaaggatgctactaaaatttccgactacttttctttctttaaacttccttgagattcttttatttttgtttgagagagagtctcactccatcgcccaggctggagtgcagtggcgcgatctcgctcgctgcaatctcctcttcccgcgttcaaaagattctcttgctttagccttccgagtagctaggactacaggcgcccaccactatgcccggctaatttgttatatttttagtggagacagggtttcaccatgttggccaggctggtctcaaattcctgacctcaaatgatccgcctgcctctgcctcccaaagtgctgggattacaggcatgagtcaccacgcctagcctagatgtcctgaaa

SEQ ID NO: 527911 - DNA, 513 bp, Homo sapiens
gtaagctcggtaccttacaggctgatgctgtaataatacccaaaaatgcagaagtcttcggaactgggtaacaggcagaagttggagggctcagaagaagacagcaagatgtgggaaagtgtggaatttgctagacgacttgttcaagtggctttgaccacaaatgctgactagtgatatgagacaataacagtccagagctgagtgtggtctcagtatgtagacaagagaacttgctggggaactcagagtaaaggtcactctatacttcgcaacagagactggcagcattttgcccctgccctggagatctctggaactttgaacttcaaaagagatgatttagggtatctggcagaagaagcttctttttttttttttttttggaaagggattctggctcggccgccgggataaagtgcagtgtaacaatctgggctcagggcaacctccacttcgggggtccaaaaaagtctccggcatcagccggtccaggggggatcctcaaaagtc

SEQ ID NO: 527912 - DNA, 687 bp, Homo sapiens
  misc_feature (635)..(635): n is a, c, g, or t
atagcattacgagacatacctagtgtaaatgacgagttaatgggtgtagcacaccaacatggcacatgtatacatatgtaacaaacctgcaggttgtgcacatgtaccctagaacttaaagtataattaacaaaaaattaaaaaaataaataaatgcaagcggaatattgtcaaaaaaaagaaaaaaaagaaaaaaactggataaattaggcttcatcagaaacttaaaatttctcagctaacaaactgagagaaaaatatgtgaaaaatatgtgtttgatacaagactgttgtcacaagatatgtaaagaactacaaactggtaataaaaagtagcccctttggcttgaaaaaaaaaaaaaaaatgggcaaggaattgaagagacacttctcaaaagtagaatcattaaatgggcaatcaatacatttaaaaggtgctcaaccctatttagtcattagaggaattcacacttaaactggttttaggaaataatcacttgaatggcttaaaagtaaaaatgccattggccaaatgttgttaaacttgggagcaacttgaacttttatacacatgtgggtggaagggtttaaaatggtccaacttgtttggaaaaaaaaggtgtttcttttacaanacacaagtgctctttttgacccacacatttaatttcatggcctttatacttg

SEQ ID NO: 527913 - DNA, 768 bp, Homo sapiens
tttactctaagcatctacaacaaatcatttctgcaatcagtttgtgacgttcaatgaaatgtggattttatacgacaactggtgatcgaccagctcagtggctagaccaagtaagctcctaaaacacttcccaaagccaaacttggaccacaaaagaaggtcatgttcgcatgtttcggtggtctgactgctggtctgatccactattgctttctgactcccggcgaaaccattacatctgagaagtatgctcagcaattcaaagagatgaaccgaaaatcttcaacccctgcagtcagcaatggtcaacagaaagggcccaattctccacgacaatgcatgatcgcacattacacaactaaagcttcaaaagttgaactaactgggctacgaagttttgcctcatccaccatattcacctgacctcccgccaaccgactaccacttcttcaatcatctcgacaactttttgcaaggaaaacacttccacaaccatgtagaatgcaataaagtgctttccaagagttcactgaatcctgaagcacggatttcttatgctacaggaataaacaaacttatttttacacttggtaaaaatgtgttgattgtaatggttcctattttgattaatgaagatgtgtgttgagcctagttataactgatttaaaattcacgatcccaaaccggcaattacttttgcatcagcctcaatatgaggaagtaatagttgaacagaataattctttcttaccaccttggcatttgcct

SEQ ID NO: 527914 - DNA, 499 bp, Homo sapiens
  misc_feature (394)..(394): n is a, c, g, or t
  misc_feature (417)..(417): n is a, c, g, or t
  misc_feature (482)..(482): n is a, c, g, or t
tgaggatcctacaggaaacaaagccctgtggagccgtggcttgctcaatggggcctcccagaaggtaagattgcagaatgggccccagggagaacactgcttagcacttttcctgttgccctcactgaagaaattgcctttggtgaattattcatagtgcacacgactgtgctgagtgctgtccgtccacagtcctttcttaccaatctgcaaaaaatctccttggagagtagcgagttccttagagagagtccattcccagtcctctgctctgaggtgtgtcctgggctttactttctcctgtaggcatgtgctgctttaatagagcatctctggactttcgggcaaatctattttagaagacaagcctagtgattgctgttttctataaatnttgctttgtgttttccctttttnatggcaagcttgataaatttaaccaaaatgattcttatcctaagaaatgatgaacaataactttngccattttttatgaagg

SEQ ID NO: 527915 - DNA, 1594 bp, Homo sapiens
  misc_feature (283)..(283): n is a, c, g, or t
  misc_feature (333)..(333): n is a, c, g, or t
  misc_feature (973)..(973): n is a, c, g, or t
taaaaaatgtttattttttcaaagaaaacggcaatagccaattgggaaaccttacttatcctttcaacctccaattttgggttttcttttaaattttagaagtgtgactttacgtgattttactatttttaaacaaacccccccttttccccttttaaagtgtttaccattcttacctcggtggcgtgaatctccttctccagagaggaaattgtggcctccagcgcgtttatattcttccgaggtgtccctcgcgctttgtggcctccttttatacacaaanaaaagcgccaaaaaccacaattctcacactcggtggcattcttatagagnggcgcctccaatctcgtgctcaaaaaaaaacaaaaaacaaaacagaaaaaaaaacaaaaaaaagagagagaggcggcgcgcgcgcgcgctctatagagagatatatctctctccgcgaagagagagagcgcacccacacgagatattatgcgccgcgcgtatcatccccacgagcgtctattcgtgtcgtgtgccacaccagagaaggcgggccaccacatatatagtgagagagcgcgcgcgctatatatatatagtagagcgagcagagagcacgcaggtggcgcgcgcgcgacgagtttttacaaaaagagagcgagtgcgagaagagcgcggtggagacaaacaccgcgctctgctaccaacgccgcgaggggagcagcaactctattgagtggcgagaagagcagagagaccatctaatataacatctcgcaggggggggggggggggagagcaccacatatcatattgtgggaggagacgacacaacatctctctcccatcactaaaaaagagaagattatattaatacaaaaacgcgtctctataacagcaggggcgcacaacaacatcctcattatcacaacaccttttctctcaccgagaaggccgtgatataatcatcaacagccggtgntggtgctgtatcaacgcaccaactaacgaagcggcacggaacaatatataatagatgccgcagcagcgcacgaagcgcttacgagaaagacaacaaaaacacttgggcgcacaccccaccaagccgaagcgacatatatcatgcatattttctacagtccgaaacaacaacctatcttttatctaaccccccgcgggggctcgcctttcgctttttttattatatatattataccgaccatcaactgcaaacttatctcacaaacaccagcaactcctaatcgtaccaacacgaaccctagaaaccagaccacccaaccaagacgatcacacactaaaggaagaagagcagcgagcgcgaacgcaaggaaggacgaatcaacagatgaacagtaagatcaaaaactcataatgcacaagagacggcagagaccagcacttgagagaagacgacgggaacggaatgatcaacactagacctaacgccagcacgacgcgaacacaagatcaacctactgagacagctcaaccatcagaaaaaacatgataagatacacagaatactgagtcgagaccgacagtgagcctcaggagaacgataatcaggaagagcagagccgaa

SEQ ID NO: 527916 - DNA, 157 bp, Homo sapiens
cttttacttgctccattttaccttgatctcctttccacattacgtacagttgaaaaggagatgtatgaaaatgtttattatgatttcagaaaaatatggaggacactttgtaagatgaggaaatgaagaaggcgttgaggaagtataaagcgttgag

SEQ ID NO: 527917 - DNA, 360 bp, Homo sapiens
tttttttttttcccccccccccggaaaaaagggaagccccggggaaggccccccttaatttttttctttaaaaaattttggggtgggttttcccccaaaggggggggtccccaaaagggccccccctgccccccccgggggggggcgggggggggcccatttttggcccctgccccctccccccggggggggctttttcccgttttttttcccttgggggggccccaaaagggccccccccttgaaaaaaaagggaaaatttttaaaatttttttgttaaacccccctttccccgggggggggtttttttttttttttcttttttgggggcccaaaaaaacccctttttttttcggggga

SEQ ID NO: 527918 - DNA, 246 bp, Homo sapiens
gggcgtgttcgcaccaaaaacgtgaagaaggcgggccgggtcatcatacgataaacgtactacacgcgcctgggcgatgacattccacactggaacaagtcgcgtgtgcaaggatgatcgcacattatccccagtgaaaaagctccgttaacaaagtgtatcagggttatgtcactacattcttatgaagctgaattcagaagaggcctcagtatcaggtatctccatgcatgctgccaggagtgc

SEQ ID NO: 527919 - DNA, 203 bp, Homo sapiens
ctcttgcacgagcagtcagacctattccacgtggttaagtgcttctactaccattaaagcgaggcactgaagctagagcttattagtcctctgtctctccagaggaccaagaaatacctattgacacaggccacttcagatgtgtacagcaaattctatagtgcttcttagcccagcaggtctttaccttccccttgagagtt

SEQ ID NO: 527920 - DNA, 1239 bp, Homo sapiens
  misc_feature (1208)..(1208): n is a, c, g, or t
  misc_feature (1215)..(1215): n is a, c, g, or t
  misc_feature (1219)..(1219): n is a, c, g, or t
  misc_feature (1230)..(1230): n is a, c, g, or t
attcggcactggagaagaaggggccctgtgaccgggattacaagaagttctgggcaggcctgcagggtctcaccatttatttctacaatagcaatcgggacttccagcacgtggagaagctcaacttgggagcatttgagaaactcacagatgagattccctggggaagctcacgtgaccctggcacccacttcagcctgattctccggaatcaggagatcaagttcaaggtagagaccttggagtgtcgggaaatgtggaaaggcttcatcttaacggtggtggagctccgtgtcccgaccgacttgaccctgcttcctgggcacctatacatgatgtctgaagtcttggccaaagaggaggcgcgccgtgcactggagacaccctcgtgcttcctgaaggtgagccggctggaggcacaactgctcctggagcgctaccccgagtgcgggaacctgctgctgcggcccagcggggacggcgccgacggcgtgtcggtcaccacgcggcagatgcacaacgggacgcacgtggtccggcattacaaggtgaagcgggagggccccaagtacgtgatcgatgtggaacagccgttctcttgcacctccctggacgccgtggtcaactatttcgtgtcgcataccaaaaaggcgctggtgccattcctgttagacgaggactacgagaaggtgctaggctacgtggaagccgataaggagaatggcgagaatgtgtgggtggcgccctccgctccgggcccaggtcctgcaccctgcacaggtggccccaagccgctgtcacctgcgtctagccaggacaagctgcccccactgcccccactaccgaaccaggaagagaactacgtgacccccattggagatggcccagctgttgactatgagaaccaagatgtggcttcctctagttggccagtcatcctgaagccaaagaagttgccaaagcctcctgccaagcttccaaagccacccgttggacccaagccagagcccaaagtctttaatggtggcttgggcaggaagctgccagtcagttcagcccagcctcttcttccccacagccgggctggcagacatgacggcagagctacagaagaagctggagagaagaggcgggcactggagcactgattcggacaccccagggaccagcgggctagtcccagggcatggccaacggccagattcttnttcccangatnaaaactctgancccaggaaa

SEQ ID NO: 527921 - DNA, 292 bp, Homo sapiens
gatcattcacctccttttgtggtatgtggtggtcatggcacacaaaagacacgcacataaatctgaaaaaggaaaatgaaaaaagaaacggtttagggattgaaatatgagtaaaggctggacaaatggcttagtggttaaaaaaaacttgctgcttttctgtaggatccaagtttggttcctagcattcacagtgaatgactgacaataacttgaaatttcagctctggggggggaatctcatgtcatcttctgccctgtgtgcatatgttcacatattagtagcattcat

SEQ ID NO: 527922 - DNA, 1378 bp, Homo sapiens
  misc_feature (1347)..(1347): n is a, c, g, or t
  misc_feature (1354)..(1354): n is a, c, g, or t
  misc_feature (1358)..(1358): n is a, c, g, or t
  misc_feature (1369)..(1369): n is a, c, g, or t
attcggcactggagaagaaggggccctgtgaccgggattacaagaagttctgggcaggcctgcagggtctcaccatttatttctacaatagcaatcgggacttccagcacgtggagaagctcaacttgggagcatttgagaaactcacagatgagattccctggggaagctcacgtgaccctggcacccacttcagcctgattctccggaatcaggagatcaagttcaaggtagagaccttggagtgtcgggaaatgtggaaaggcttcatcttaacggtggtggagctccgtgtcccgaccgacttgaccctgcttcctgggcacctatacatgatgtctgaagtcttggccaaagaggaggcgcgccgtgcactggagacaccctcgtgcttcctgaaggtgagccggctggaggcacaactgctcctggagcgctaccccgagtgcgggaacctgctgctgcggcccagcggggacggcgccgacggcgtgtcggtcaccacgcggcagatgcacaacgggacgcacgtggtccggcattacaaggtgaagcgggagggccccaagtacgtgatcgatgtggaacagccgttctcttgcacctccctggacgccgtggtcaactatttcgtgtcgcataccaaaaaggcgctggtgccattcctgttagacgaggactacgagaaggtgctaggctacgtggaagccgataaggagaatggcgagaatgtgtgggtggcgccctccgctccgggcccaggtcctgcaccctgcacaggtggccccaagccgctgtcacctgcgtctagccaggacaagctgcccccactgcccccactaccgaaccaggaagagaactacgtgacccccattggagatggcccagctgttgactatgagaaccaagatgtggcttcctctagttggccagtcatcctgaagccaaagaagttgccaaagcctcctgccaagcttccaaagccacccgttggacccaagcccagtagagacggggtttcaccatgttgccaggctggtctcgaactcctgagctcaagtgatccacccacttcagcctcccaaagtgctgggattaccggcgtgagccaccaaacctggcctcaatctgtcgtctcttgcagagcccaaagtctttaatggtggcttgggcaggaagctgccagtcagttcagcccagcctcttcttccccacagccgggctggcagacatgacggcagagctacagaagaagctggagagaagaggcgggcactggagcactgattcggacaccccagggaccagcgggctagtcccagggcatggccaacggccagattcttnttcccangatnaaaactctgancccaggaaa

SEQ ID NO: 527923 - DNA, 1170 bp, Homo sapiens
  misc_feature (1139)..(1139): n is a, c, g, or t
  misc_feature (1146)..(1146): n is a, c, g, or t
  misc_feature (1150)..(1150): n is a, c, g, or t
  misc_feature (1161)..(1161): n is a, c, g, or t
attcggcactggagaagaaggggccctgtgaccgggattacaagaagttctgggcaggcctgcagggtctcaccatttatttctacaatagcaatcgggacttccagcacgtggagaagctcaacttgggagcatttgagaaactcacagatgagattccctggggaagctcacgtgaccctggcacccacttcagcctgattctccggaatcaggagatcaagttcaaggtagagaccttggagtgtcgggaaatgtggaaaggcttcatcttaacggtggtggagctccgtgtcccgaccgacttgaccctgcttcctgggcacctatacatgatgtctgaagtcttggccaaagaggaggcgcgccgtgcactggagacaccctcgtgcttcctgaaggtgagccggctggaggcacaactgctcctggagcgctaccccgagtgcgggaacctgctgctgcggcccagcggggacggcgccgacggcgtgtcggtcaccacgcggcagatgcacaacgggacgcacgtggtccggcattacaaggtgaagcgggagggccccaagtacgtgatcgatgtggaacagccgttctcttgcacctccctggacgccgtggtcaactatttcgtgtcgcataccaaaaaggcgctggtgccattcctgttagacgaggactacgagaaggtgctaggctacgtggaagccgataaggagaatggcgagaatgtgtgggtggcgccctccgctccgggcccaggtcctgcaccctgcacaggtggccccaagccgctgtcacctgcgtctagccaggacaagctgcccccactgcccccactaccgaaccaggaagagaactacgtgacccccattggagatggcccagctgttgactatgagaaccaagatgtggcttcctctagttggccagtcatcctgaagccaaagaagttgccaaagcctcctgccaagcttccaaagccacccgttggacccaagccccacagccgggctggcagacatgacggcagagctacagaagaagctggagagaagaggcgggcactggagcactgattcggacaccccagggaccagcgggctagtcccagggcatggccaacggccagattcttnttcccangatnaaaactctgancccaggaaa

SEQ ID NO: 527924 - DNA, 463 bp, Homo sapiens
aactagaggatccccttataatcccacgatcacagctcactgcagccttgagtctcctggactcaaatgatcctcccacctcagcctcctgagtagctgggcctattggcacaggccaacatgcctggctaatttttaaatttagtttttgtagacaggaggtcttactatgttaccctggctggtctggaactcctaggctcacgcgatcctcccaccttggactcccaaagtgccgggattacaagtgtgagccaccaatgcctgaacctttgcacatttataaattgagtagtaaaatatgacatcttttgagttgttcaccagacatccacatggagatgtcacaggaagcaagccttgggttctgaggagaggctgggaatggagttttaccctttggaagttgtcagcaggcagcgctacaaagttccgagtctgagtgaaatctcccagggagtgg

SEQ ID NO: 527925 - DNA, 479 bp, Homo sapiens
cttattggctggacgaacgactgcatcttgcacgatttacttataagactactcatggccgttgattcatatatttacacactgttttcacactgtgtaacgcagtttgttgaattaaacaagcaacgccagggctccggctcaacttttgaatactgattaccggccatcactatccacacaggaaaccctgcgagagatatgtcaggcattgctccctccgggactctgcgcacggctacagacgaaggactacactgatatgtactgacatccacagacaattcagtgtataaagacagcatgaaaccctgggagtagtgaaactatatctactgggccctaaataatgccactgacaccgccaaaaggtagatgtagcacaaccgctataaatcttgccagattgattataaacatgtgcatactaatgcgtgcttaggaatgtctgtctaatcagactggtaaagtaaaccttt

SEQ ID NO: 527926 - DNA, 1441 bp, Homo sapiens
  misc_feature (1410)..(1410): n is a, c, g, or t
  misc_feature (1417)..(1417): n is a, c, g, or t
  misc_feature (1421)..(1421): n is a, c, g, or t
  misc_feature (1432)..(1432): n is a, c, g, or t
tcacgaaactctccttagactgttcctcagcttcccgtgcccagctggtggcgatccactgtaaggagagtgcctggcgggagatcctggctccgtcatggcctctgccctgagtgccaccccgatggcccaagccgtatgggtgtcctgccttcacactactatgagagccttgctagggtaacgaatggggcgccatgttgaccgcgtattacagagtaagttctcgggctaggctctgctagtggtcatctacctagtgtagttgtctacgatattatgctactcatgcgtactatcctatgctactgtgggatgaagctcaacttgggagcatttgagaaactcacagatgagattccctggggaagctcacgtgaccctggcacccacttcagcctgattctccggaatcaggagatcaagttcaaggtagagaccttggagtgtcgggaaatgtggaaaggcttcatcttaacggtggtggagctccgtgtcccgaccgacttgaccctgcttcctgggcacctatacatgatgtctgaagtcttggccaaagaggaggcgcgccgtgcactggagacaccctcgtgcttcctgaaggtgagccggctggaggcacaactgctcctggagcgctaccccgagtgcgggaacctgctgctgcggcccagcggggacggcgccgacggcgtgtcggtcaccacgcggcagatgcacaacgggacgcacgtggtccggcattacaaggtgaagcgggagggccccaagtacgtgatcgatgtggaacagccgttctcttgcacctccctggacgccgtggtcaactatttcgtgtcgcataccaaaaaggcgctggtgccattcctgttagacgaggactacgagaaggtgctaggctacgtggaagccgataaggagaatggcgagaatgtgtgggtggcgccctccgctccgggcccaggtcctgcaccctgcacaggtggccccaagccgctgtcacctgcgtctagccaggacaagctgcccccactgcccccactaccgaaccaggaagagaactacgtgacccccattggagatggcccagctgttgactatgagaaccaagatgtggcttcctctagttggccagtcatcctgaagccaaagaagttgccaaagcctcctgccaagcttccaaagccacccgttggacccaagccagagcccaaagtctttaatggtggcttgggcaggaagctgccagtcagttcagcccagcctcttcttccccacagccgggctggcagacatgacggcagagctacagaagaagctggagagaagaggcgggcactggagcactgattcggacaccccagggaccagcgggctagtcccagggcatggccaacggccagattcttnttcccangatnaaaactctgancccaggaaa

SEQ ID NO: 527927 - DNA, 630 bp, Homo sapiens
  misc_feature (599)..(599): n is a, c, g, or t
  misc_feature (606)..(606): n is a, c, g, or t
  misc_feature (610)..(610): n is a, c, g, or t
  misc_feature (621)..(621): n is a, c, g, or t
gcgcccggcccagacacagacttatacatgggcacacacacagacacacagggacacatgcctatctccaggcatgcacacagacccccccgccaacctgcaaggtgtccctgtatgacatgggtcttgacagtgaccacgtttccccatcaggtcctgcaccctgcacaggtggccccaagccgctgtcacctgcgtctagccaggacaagctgcccccactgcccccactaccgaaccaggaagagaactacgtgacccccattggagatggcccagctgttgactatgagaaccaagatgtggcttcctctagttggccagtcatcctgaagccaaagaagttgccaaagcctcctgccaagcttccaaagccacccgttggacccaagccagagcccaaagtctttaatggtggcttgggcaggaagctgccagtcagttcagcccagcctcttcttccccacagccgggctggcagacatgacggcagagctacagaagaagctggagagaagaggcgggcactggagcactgattcggacaccccagggaccagcgggctagtcccagggcatggccaacggccagattcttnttcccangatnaaaactctgancccaggaaa

SEQ ID NO: 527928 - DNA, 422 bp, Homo sapiens
  misc_feature (254)..(254): n is a, c, g, or t
tgatgttggagtgggccctggtgggaggtgttcgggtcgtgggagcagatccctcatgaatggcttgggccatcctcttggtgatgagggaacactcactctgagtgttcacaagatctggtggtttaaacgtgtgtggcacctctccccacccccactctttcttgttcctgcttttgccatgggactcgcatgatccctttgccttctgccaggactaaaagctccctggagcctcctcagaagctgagcantgttggcgccatgcttctggtacagcctgcagaaccatgagccaattcaacctcctttctttataaattacccagcctcaggtatttctttatggcaatacaagaacagcctaatacaccaggggtttgcaggtaacccgggcccctgtccttgaggacacagcagca

SEQ ID NO: 527929 - DNA, 119 bp, Homo sapiens
caacaggtcaaaaagagcctttattacatatgatgaatgacacttatgctttcttgccagaagcctttggagcaggtgctttgtgggctgaagctttttgacccttctgtcgtcttctc

SEQ ID NO: 527930 - DNA, 105 bp, Homo sapiens
ggtaattggtattgtgcagcagttgctatctgaggctgagtctgcattcctgcttgtggtgaacgtctgggagtttgacggctgcctacacggggaagttgcact

SEQ ID NO: 527931 - DNA, 180 bp, Homo sapiens
agaggaccccgcttgggctttcgagttgctataatgaacagcgatagtcttataccttgcttaggcatagtaaggaggatatgcggtgtgtgcgatatactagtattcctagaagtgagatggtagatgctagtataatattgatgttaatgaagggcaactcgaaagccccaagcgggt

SEQ ID NO: 527932 - DNA, 248 bp, Homo sapiens
ggataagatgagttgtaatcgagctacacgacggccaggtgcggatgggtcattcctgtaatcccagcacttacgggaggccgaggcgagcggatcacgagctcacggagatgaagactgtcctggctaacgtggtgaacacctgtctctactaaaatacaaaaaacaaaattagctgggcatggtggcgggcaccctgtagtcccaggtaactccggaggctgaggcaggagaatggtgtgaaccca

SEQ ID NO: 527933 - DNA, 484 bp, Homo sapiens
gttgccaactcgaaaagactgagctgtttccacgcaggatgcccccgcccgccttgctgggggcgctttcccggttgttggccccggccaggctcccaatcggcctttaatcgcaatcaaagttctacgtccagagagccgccgaatgccaaacctgactgtctgaaagttgttttcaccttagcaccactgtgtttttgtgggtttctatcatataacacaacacagggaaaattttttagggcccaaaagaagaaagggcctgaaataaattttaaaaccacataatggatcctctccttatagatatagaagttgcctctgagaaaccacaatgtgtggagttggaacggcgaaaaaaaatgttttttgcaaatatatataaccccagatttggtttttggcctctttacttacaaaaaacaccataaagagaggaaaaaaaaaattggggcccgcttggcccaaaccgttttaaacttgg

SEQ ID NO: 527934 - DNA, 347 bp, Homo sapiens
ttttagaacttttcgggggggggtggtaacccagtaataagaacggtatttaaacccagggttccccttttcaatgggacccggggaagatatgaagttaccctccaaaaaagcagaaaccttgactggcgggcctacatgtaaattcctggccggtaaggcaaagcaatggggcccggacagaaatcgccttttgttatggatcagaggggtcccaggggttatttggggggggttggtatcatccccaatttcctttgggattattaacccccccccctcccaaggttcttggccgtagccagggggctcccccctatttccccttttatactaatatttttata

SEQ ID NO: 527935 - DNA, 123 bp, Homo sapiens
accccgctatggtggcgaacacccgtgtacggtgatcccaaccccaacaccaccggtaacagaccccaacatcgacacccatcaccaccaccactatggtgagcccaaacccaacacccaccc

SEQ ID NO: 527936 - DNA, 452 bp, Homo sapiens
cacgaggggttcgataccgtgatggcgccctgcaacggctgctatcacaacctgaagaaagccgaatacgagctggccacctccgaggaagccctcaagaccgtgcaggatctggcgcggcaggccgacgatccggtgtacaagggggacgtgcgtaccctccacttgctggaatggctcatggaggagctgggcccggagggcatcaaggcgcgcctcaagaagagcctgaacggcatcagggtggccaactactacggctgcatgtacacgcgcccgcggcagatctttccggagaaggaccgggggccgggctccgagtccacccataagccccacttcatggacgatctgctggcggcggccggagcggtgaacgtggacttccctctgaagaccgcctgttgcggcggcgcccataccctgtccggaaacccgggccccgggggggg

SEQ ID NO: 527937 - DNA, 402 bp, Homo sapiens
tgattagaggatccggtatagagtggcatgtgatctgtcgaaacgaaggtaaaggccatgaacagatggccaagtgctttcgctcgtaagcaatgtgagagtggtgaaggcgtggaggaatggaggattgctctagtgcatagagcccagtgggggcccagtgggagaggctggaaaaaggagagacctagaatccagtgggagaggctgaaagaatggaaaccagttgggataccattgctctaattgagcttgggaaacaacttcgcataggaggtgggcgacaatgcagaaacaagggcataagagagattttgaaagaaggcatgtgagataagaaatcattgtggaaaacagtgtgacaattcttcaaagaactaaaaagtgaactaccactcaata

SEQ ID NO: 527938 - DNA, 462 bp, Homo sapiens
gaaagccatcgcagaccacatcagagacatctggtttggaaccccagagggagagttcgtgtcgatgggtgttatctctgatggcaactcctatggtgtccctgatgacctgctctactcattccctgtcgtgatcaagaataagacctggaagtttgttgaaggcctccccattaatgacttctcccgtgaaaagatggacctgacagcaaaggagctgaccgaggaaaaggagaccgcttttgagtttctctcctctgcgtgactagacactcgttttgacatcagcagtacaccgaaggctgaggaatcaaaatgtcgtctttgagcctagtaccaaacagtaataatgctacattcaaattgtgaacagcaaaatattttaaatagtgtgtgctttatgatttgtgaaagtctatcatgttgttagtgctgcaatctaaataaaagtatattcaagtg

SEQ ID NO: 527939 - DNA, 328 bp, Homo sapiens
caatactaaattataactttaaatactacatacacacatttacacacactctcacacgctacttcttacatgaattgtgcttggggagactccatttgttgaatgccacttaaggcatattttgctaagctgctgctccatgtatttttgtttggaacatctatcacagtaaggcacagctgtttattggatgagcagaaaagaaagcatatgcttgtggcaaccagaatgttttacggtctttcacgcttgtatcaaatggacctgcagaaacgtttaagtgttctcaggtatcttagttggagctgaaatgtgacatctaaccatt

SEQ ID NO: 527940 - DNA, 172 bp, Homo sapiens
caatcttgtgaaaataggcagcatctataccaatgggagataccatgtgatccgaaagttcaggctggggacacttttcaacagtatggttatccatgggatatacaggggcaagcaatttgtggcaatgacagtagttaaaagtgctgaacattacactgcaccagcacta

SEQ ID NO: 527941 - DNA, 309 bp, Homo sapiens
ttttccccaaaattaagtttgggcccccccttagttttgtgttccgggcgggcaagggtggggggcccccttctttggcggggtttgggcccctggccggggggttcccctttaagttggaaagggggggggggccccctggggcaattaaggggttgggcttttccttacccccctttcccggggccctgggggttctttaccgggcccttttttcccccccggggctttttgctgggggcccttttcccccctttcggtttgttttttcccccggccccgatttaaaagggggggtttgggctttta

SEQ ID NO: 527942 - DNA, 253 bp, Homo sapiens
aagcgagtcccctactggaggtatgtggggaccagaagatctgtaccctgactgaaggcaattcaatcaccaagtttcatatgacactgagtgggctaaccagaagatttttttttttttttttttttggagacagagtcttgctctgtcgcccaggctggagtgcagtggtgcgatctcggctcactgcacgctccacgtcctgggttcacgccattctcctgcctcagcctcccgagtagctggaactaca

SEQ ID NO: 527943 - DNA, 952 bp, Homo sapiens
gctcctgcctggcctagcctgactctcattgtgggaagttatgtgggttatactttctcctcctccaagcttgagcggaggccacgactcattgccacgtcgacccagactggcccgggcactgtagtgacaacagacgctaggagtccccccaggagctgtccttccgtccgaggggatgtcctactggtgtcctgcagagagagggcgctggtggactggacggctggtgcctctgctccctacacggtcagcagggcattgtgcgccagcaagcagggtgaagctcttgcctgctgtgccaggacccaagtcgcagctctctctccatgcgtccccagtccagactggctcaccatagtccagacccagatcactaggcaatgaggaccaggaggtgtatgtggtgccgcacccaggctcggcacctgtacaaagctcagggagctccaggctggaacttgtccaagcttctcctgagactcatcgtacaaaatccccagagctagtgggaaccagcttggatgatcccagagattgcccttgggacgggtcctaacgaattggttggcccagaaaacagggacacatacagagattaggcacaatacacaaggcgtgacccataatagaacttggcacttgagctaacatatatatagcaaacgatgatggaacatatgggatatgacacaagaaagcacacactagggcagacaggaatcgatggaaaccacaaaatgaaagagcagacccacatagaaaaaccaaaaaaacaaaagagacaaaaaactagagaaaacaagaaacacgggaacagtggaaaaaggacgaccagagaaaacaagagaaaaaacaaaaaaaaacacgcgagacacacaaaacgcgaagaaaaagcaaacaagagaaacgacaaaaaggagacaacacaaagcagaaaaggaaggagaac

SEQ ID NO: 527944 - DNA, 226 bp, Homo sapiens
acaaataattcaagcactgctctattacaaattttactggcgtctctattcttagcccgtcctacaagccttcagagtacttcgagtctcccttcaccatttccgacggcatctactgctcaacattttttgtaaccacaggcttccacggacttcacgtcgtttttggcctctgacctttccttcatctgttatacctttcgtggtaccgagctctccttcgtag

SEQ ID NO: 527945 - DNA, 278 bp, Homo sapiens
  misc_feature (6)..(6): n is a, c, g, or t
atgganccccgaaggcgtgggctgggtccaggccagatcagacagccccagcccggctacaagccgactcccagggactcaggcttcaggcccaccccagttctcttgaagatccagactccaggtgcatctccatggacccagttgctaggaccacctcagtggatgctgatgccagaccagcaccagccccactggacccagggtccaggcctacacctatagattcagttttcaggcctgcccccatggacccacacaccaggcctgtccacaca

SEQ ID NO: 527946 - DNA, 199 bp, Homo sapiens
cgaatcgacggtttctccgtgttttacaggctggtcttggatcctgatctcagtgatctgcccgcttggctgcacagtgctgggattacagtcgtgagccaccacagctggctgggaaagtccattctttttttttttttaaacaattttcccctttaaaaattggaagaattaaagttaattttggtgaaaagggcaa

SEQ ID NO: 527947 - DNA, 158 bp, Homo sapiens
tgagtggagagagaatgcgatagagagagagagagagacagaaaaggggggaggagagagagaggggggaagagagagcagcatagtagatgcgagaggtggagtggggaagtagagtaaagggagaggtgtgaggagagttgtggacgcgacgagcg

SEQ ID NO: 527948 - DNA, 254 bp, Homo sapiens
gagttcccgttgtggcgcagtggaaatgaatctgactaggaactgtgaggttgcgggttcgatccctggcctcactcagtgggttggggatctggcattgctgtgagctgtggtgtaggccgcagatgtggcttggatttggtgttgctgtggctgtggcgtaggccggcagctacagctccgattcgacccctagcctgggatgttcaatgccgcgggtgtggccctaaaaagccaaaaaaataaaaaataaa

SEQ ID NO: 527949 - DNA, 162 bp, Homo sapiens
gaagcattggtgctcagtgttatagatatggatgtttgctagggatggcgctaatgaacccaaccaatttgcgacttgagaccactcgaaccccacagtgccactgggggaagccagcccgggtgccgagagagcccacaaaatgaaactccgggggaataa

SEQ ID NO: 527950 - DNA, 165 bp, Homo sapiens
tatattctgtatagggagtgagggatcacaggaatgaagggatgcacaggaatggcaggatgaaggattgttccttttgtagtctgtttattatttgatatttggttcattttcataaacttcaaacactcagctctcaaacatgacctacctaggcctcttctc

SEQ ID NO: 527951 - DNA, 405 bp, Homo sapiens
agcactgttactgagggggaggcctgtcacatgtcactgtccagccctgagttggggtcctctcactaaaggtattagagagtgcttttacagaaaaagtgagtactttccacctggggagagcctaccaatggcagtactcctgaggaaggcacggggagccttgcaggatgtttttctggagggaggagccagagaagatcattttacctgtccaggggccttagccagcagcagaaattccagaggtgaaacctgagatgaggtggattttagagcaggttcaatttcttaagagtgctttaggcagcatagctgctacactgagatgagcaaggcccattccagcgataaccagaaactggttacaatagaccatcccttatcagcatttttttgcttcca

SEQ ID NO: 527952 - DNA, 118 bp, Homo sapiens
agcggagtggagcgctacctgggcgcggcggcccacggctgtggcggcgccaccgtgcgcgacgctctcttccggctaagggccgcgcggccgactgcgagagcccgcgcgagtttcg

SEQ ID NO: 527953 - DNA, 879 bp, Homo sapiens
  misc_feature (1)..(1): n is a, c, g, or t
  misc_feature (14)..(14): n is a, c, g, or t
  misc_feature (18)..(18): n is a, c, g, or t
  misc_feature (32)..(32): n is a, c, g, or t
  misc_feature (77)..(77): n is a, c, g, or t
  misc_feature (495)..(495): n is a, c, g, or t
  misc_feature (557)..(557): n is a, c, g, or t
  misc_feature (691)..(691): n is a, c, g, or t
  misc_feature (834)..(834): n is a, c, g, or t
natctcggattttncttncctgtgttaagaanagaagcttgctattacttcaagttttttggaagaaacacctgggnaaattcatcgcaaaaggatcatcacctaggcacatcgtcgtcaggttatccaaagttaagatgaaggaaagaatcttaagagctgtgagacagaagcaccacgtaacctataaaggaaaacctatcatattaacagcagatttctcagcagaaaccctacatgccagaagggattggagccctatcttcagcctccgtaaacaaaacaattatcagccaagaattttgtatccagcaaaactaaacctcatatatggtgcttagctatttattttgttatctattgttgttgctcaaactgttcaagctttggccattgggagctctttcacattggctcttgtgtacttttggcatgccctcatccactttgtttggagcacttcctctttctggcaccacaggatgctccaggctncatcttgtgttttcttctctgcattggccctagacttagtcatttctcctaggagccctggntcttttttttttttttttttttttttttgatgaatggccttaaaaccaagatcttggtgaaggggtgtgctcattgctactgtgatgacactgcttctacacattctaaatgaacagaactaggaaatattggntatgtgtactaccacatgtatatacatatccataaattatggttcctatatgcatatatattaaactaaacattagttcactgacattaaaaatgtatgaggttttttggaggtaaaaaaattaaaatcatgcctttatcttnccaatcttctataattgggtttaatttataacaaaaaccaaggta

SEQ ID NO: 527954 - DNA, 791 bp, Homo sapiens
aagataaaaataaatacaacacacccaaattaagcaggatgatagttcgtgtgacaaacagagaatatcattcgtcagagtgcttatgcccgtatagagggggctatgatagtctgcgcagctgtatgtgcaggaatggctaaaatatggtgtgaaggttgggcaatgactaaattatgcttgcagtcatgaatgggtacatggtcctgctgatggatcaccgaaagagtctgtctcgaactaggtgtgggcgatgttgaccaagtatctattgaatggccgaagtgtggcacggtgactgtgtgatgaatactcaatgtggaatagctaatatgagggtcagacagggtgctttcgaatgttatatggatgcaggagtggcagagaagtaatgatgtggcaatgagaagttgtagagtggcctggagagggaacctgaggatgggaggcggttgtctatccctcgagtagtaaaaatgattaccatggatgtaggaattctggaatagcaaggatatgtagaggcagatggtaccatcggaagcagatgcaatgggtgcaagaatgttgcagagttaaatgcgattatcttaatggcatggaagatggacgaatggtttagcaaggaaacagttgctctcaatgaattaaagaacagggtaactccagagatgaatggaggagatgtttagaaagctcatgatgatattacgagagaatccagtcgttgaaagaagccagaaggaagtaaaggagaggtgggaactgtccaaaagtccttgggtagaaag

SEQ ID NO: 527955 - DNA, 668 bp, Homo sapiens
ggttttaattgcatttccctgatgattagtgatggtgaacattttttcatatgttgtggccagtgtatatcttctttggaaatgcctattcatgccctttgcccactttttgatgggataatttggtttttttttccttgctgatttgagttccctgtagattctggatattagtccttacattcattcttaattctattttctgtcttcattcttgttttatggtccttatttgataaaatgctatactgcgctgagcatggtggctcacacctgtaatcccagcactttggggaggctgaagtgggccgatcacctgaggttgggagtttgataccagcctggcaacatggtgaaaccctgtctctaccaaaaaaaaaaaaaaaaaaaaaaaaaatttgggggcggcctgggcccgaaaaaaagttttctcaagaccatttccgtggggggcgcgggcgggccccgtgggttcatgtgacacctgggctcaaagacgttgttcccagaggagaaacctgggccctgagcacaggggctggggttcttcccacccattaaaaaaagacggcgggcgagacaccggagcgctctctgaacaactccgagagggtccggaggccacacgggggtctatcacaagggatcccaggaaccgaataattaca

SEQ ID NO: 527956 - DNA, 84 bp, Homo sapiens
  misc_feature (40)..(40): n is a, c, g, or t
gtgtaatgcgccgaatgcaggcccttgcgggtgtcccagncgctgatccgctccttcagctccaccgcccggaaccgctttcag

SEQ ID NO: 527957 - DNA, 301 bp, Homo sapiens
actgtaactatgtacttatgggataaaaagactgggatgtgattaagttaatcttgagatggagagattatcttgggttatctggataggcccagtataatcacaaggattctttaaaggaggctcagaatcagagacgatctgatgacagaattagaggtcatagtgatgcatggccacaagccaaggaatgtgagcaggctttggaagctgaaaaagacaaggaaatgtgttttcccctagaggctccgaaggaacacatccctgctcatccattttagacttatgacctccagaactg

SEQ ID NO: 527958 - DNA, 395 bp, Homo sapiens
gccgggggcctatggcagtgatgctgtgttggtttcctagggatgctttaacgaattaccccaaacctggtggattgaaacagcagaacttgattcccttacagttttggaggctggaaatttgggatggaggtgttggcagggctgtggtccctttgaaggctttggggaagaatccttccttggctctttttagcttgtggcggcagtgggcagtccgtggcattccccagcttattggtgcatccctccagtttttgttttttttgttttttccttttttaacaacagtcattggatttagggccccccctaatcctgggtggtttttttttgatccttattaattaaacctgcaaatactttagttccaaataaagtcccattttcaggta

SEQ ID NO: 527959 - DNA, 262 bp, Homo sapiens
tatcgccgcatagaaggcatctactaactcatgcacataggaaggcagagtttttttgtttttttgagacagggtctagctctgtctccaggctggaatgcaatggtgcaatcactgctcgctgaagcttcaaactcctgggctcaagcaatcttcctgcctcagccttctgagtagctgggaccacaggcgtgaaccaccacacccagctaatttcttcttaatttttagtaaagacaagatctcactgtgttgcccaagc

SEQ ID NO: 527960 - DNA, 383 bp, Homo sapiens
ggacgggtcgagtcactgcgtcgcgcgaatagaaatcgaagcctcttaaaatggcagatgacttgaacttcgagacaggagatgcaggagcctcagccaccttcccaatgcagtgctcagcattacgatagaatggacttgtggtgctcaaaggccggacatgttagatcgtcgagatgtctacttcgaagactggcaagacaaggacagaccaagggtccatctggttggtattgacatctaataatggggacgacatctgcagatatctgcccgtcaactcatacatatggatgtccccgacatcaaaaaaggaaatgacttccagctgatttggcatcccaggatgggtacctaatcactgctccaggacaagcggggaa

SEQ ID NO: 527961 - DNA, 355 bp, Homo sapiens
  misc_feature (84)..(85): n is a, c, g, or t
  misc_feature (99)..(99): n is a, c, g, or t
  misc_feature (275)..(275): n is a, c, g, or t
  misc_feature (301)..(301): n is a, c, g, or t
  misc_feature (305)..(305): n is a, c, g, or t
atcagccagctccagaatccctttcttaatgccctgaagctggtcaccagttccagcaaccgagagcataaggaaggtatcgannattccagccaccgncacttcagactggccaacgcccacggtctcaacgaggacgacgttgtagccagccgcctccatgacgatcatggactcgcgagtcgcacgggcaacgccaccaaggtggccccccgagggtgagggacgcacaaacgcctcgtcacgattagccagatcgcccatccgggtgcggncaccaagaatcgaaccaccggctcgngtcnaagagggatcgacggcaaaaccgcgaccttgtagccaaactcatcgatga

SEQ ID NO: 527962 - DNA, 102 bp, Homo sapiens
cgtccatagaacgtgtgcttactgttctgaaggaaaactgaacacgtccacttggtgcctcattccctctaagcccattgtatatatacatcctggtgctgt

SEQ ID NO: 527963 - DNA, 150 bp, Homo sapiens
acacacaacacagtctgttgctgagagatacctctggacgccggcagccttaagatggtttcaattggccactccagcacaaaccacccagtctgtggtggggggtaacctctttgggccgaggcaactcacaacggtcttctttgtctc

SEQ ID NO: 527964 - DNA, 278 bp, Homo sapiens
tagactgtgacttatacctaccaacgcactgtaccacggtttacgggacgacaagattgagcacctctgggacacctgccgggaggctttgtgctagaggtaggcctgagccttgacgtagaggtcgaatttcagccaggcgaaggcattctaagcagaagaaaccaggtacgcagacgacgacggtaccggacgggcaggcggttccgcggcagttcagtgaaatacgtggaacggttcggtgtggctggaaccagcggacggaggacggcacttcg

SEQ ID NO: 527965 - DNA, 239 bp, Homo sapiens
ttttttttttgggccccccccccttgggggggggggggggttaaaaaaaattcccgggcgggggggttttttttcccccaaaaaaaaagggggtttggggggggtttttaaaattttttttttggggtttccccccccccctctccccccccggcttggggggggtttttttttgggggggggttttccccaggggtttttttccccccgccaaaataaaatgccctttttttttttta

SEQ ID NO: 527966 - DNA, 178 bp, Homo sapiens
  misc_feature (6)..(6): n is a, c, g, or t
gggtantttcccgaagtgttaactgaaacaggtgacacagagtcaccagttttccgagaaccaaagggaggggtgtgtgatgccatctcacaggcagggtgaaatgtctttatccagctgtcctccttggatgtgccatatgacaagcctcgtttctatagggttgttttgtttgggg

SEQ ID NO: 527967 - DNA, 505 bp, Homo sapiens
attaagacagctatgatgtcactgcagttacagtgtcactaggtgatagaaattgtccagctccattacaaccttatggaaccactggtgcatacgtggttcattgtggtccattattgactgaaacaatgttatgaggtgcgtaactatatatccaaagcaaaagctaaatgaaataaatgaaactaattgtgttggtgtcctaaacacacagaggagaattacttcaagtatttttaaaacacagtcacttgtctatgcatttttagtggatatgccctaaagtatgaaactaaattaaaaataaataaaaaattaaaaataaaattaatttacaaatagtattaatatagaataataatatatgttaatattgttactctgaatctattatatacattttggaggataaataacatgcaattttgttaatattaggaatcaagaaactatatatataaaatcaaagctgctaaataaaattataaattgtgtttataattac

SEQ ID NO: 527968 - DNA, 1793 bp, Homo sapiens
  misc_feature (819)..(819): n is a, c, g, or t
  misc_feature (997)..(997): n is a, c, g, or t
  misc_feature (1388)..(1388): n is a, c, g, or t
ggcacccagttccccgggagatgcatggaaggggatggcggcggcagcgatggaggagggatgtcggacgtggtgcccaatccgctttcggctctcccttcccgtggtccgcgcagcggtggtcccgttctcctgtcccattggctgcggagcagcgcagctatggagtaggcggcagctctgtggagctgctcgagacttgagcctggctggatgctcagtggactgattggagactaggcagactcgtccgagtacgtcattcacccgagtaaacagtacttgcgataggaaagggtacgcgtgggagaacgaacatgtttctgcctagcatggagacggtgctacgcaagacgacaaaggcactgctgtgcaattgggaagggaatagcgcttgtctgagacatgcctacattcgccctctagttaattgcaatgccacgcgcatcgttaactgtgttcacacatgccaagtgggttgcctgagtgtctccccccgagctctctctgcggcgtgaatataggcggcattggcgatgtgcgagtgcacaaacaatcttaaaaggtaagcccgtaggcttactttgaaatatccccttgtaaccccctgtgcaaaaaagtcacaataatgcggtgcattaaaatgcccaaacggaatatcccctacgccgccccaagaaaaaccttttgtgccctgtgggaatgtaattttccaccaccccggttgttccataggtccatattgcgaatggcggggtaaagaccgggttgttgaactccaaacccccacgggggaggctccacgtggtgatacttctnaacacggcggagttacccttccctccgtgtttcggacttgttggggaatgttcgcccgttcctcttttaactggagttcgcgcttttgagggaccccttttttaaccccttatcaaacccccatttgtgtgcggcgcgtttcccggttggttcttgtttttcccacatttggaggcgnttgttgagatttccttaaaccgcgatttgtggtgtgttggtgttaccctaacaaaattggcttgtagtgtgtggaaaactcacccatgtgttggtggtccgccatttttgcgcctcccccagccgttgggaacctattgagggggcgacgtatattcaccgagagttgccgccgattcacgaacaattagcgacagaacttaagccacccccgtaagagggtttggtaccaaatttggtacctctgaatatgaagaacttccgggcgcccatatatgggcggaaaaggagacacgaggccctataaggctcatataaaacacggggctagaggcgagaaaggggccgaacaacaggataaacgacttgccacgccagaagggatttgagcnccccccctgatggtggtgcagcgcgcacacaagcattgttatatctacaagccacagcccaaaggttgtgcgcaatctaaagaagagatgccccctaaaacggttaaaaccatcagagaagcctcctcttttgggtgggtggaccaccaaatagggcttcaatgggaaaagggcccgaagttagtctaaactcaggctcgggagccttccgcccggaggataattttccgacggcggcccctttgtgtggaaaatctatggtttccacaagggctgctccttctagggataccagcacggcaaaacactagcacacaggcacgagaggacgcttttatggtgtactcccgggagaaggccagcagatggggaaacgcagaaccttttgggacacaggatctgtgg

SEQ ID NO: 527969 - DNA, 381 bp, Homo sapiens
cgccagctcgccagcgcgtttcgcgggaatatacgttgcacatatatggcgagactgagagtgagggcagacatttgtcacgctcaacacagcattttcgctgtacaagtgagcttggagggtctatgtgccataattaacattgcgcttgaagacattctggacaccgagactggccttagaaataggtggctttttttttttttttttaattgcaagcatatttcttttaatgacttcacgtcactagtgcctaaatgtagtaaaggctgcttaaggtttgtatgtagttggaatttttggagtccgaaggtatccatttgccgaaattgaggcccaaattgaatttggattcaagtggattcttactttgcgtatttg

SEQ ID NO: 527970 - DNA, 574 bp, Homo sapiens
  misc_feature (254)..(254): n is a, c, g, or t
  misc_feature (286)..(286): n is a, c, g, or t
  misc_feature (334)..(334): n is a, c, g, or t
  misc_feature (336)..(337): n is a, c, g, or t
  misc_feature (342)..(342): n is a, c, g, or t
  misc_feature (346)..(346): n is a, c, g, or t
  misc_feature (449)..(449): n is a, c, g, or t
  misc_feature (480)..(480): n is a, c, g, or t
  misc_feature (550)..(551): n is a, c, g, or t
cagatgaacgacgccagctgaccatggtaccgtacccaatccccggtcgtcttccatatctccatgtgacgtaatcccatctgcacacttctctacggcatggactacgcgcaatccttcagctgcggtggctcaggaaccgaggcgtgccgctgctgctgcagtcacttgaacggcaacgctcctccgcgacctgtgttgtccccgcccccgcgtgggtcgggatggagaaagcgacgagcccggggttgtgnggagcaactccaaacgcagaagagtgtccttnggtcttcgccggcgccaagctcccgggcttcacgcgtaccccaggctncnngaggnatgncatgacgccgcgggctgccctcggatttggggaacgagaggaagaaaggactcaggcttgcgttgcctccaccaaactttgctcgcgagttgcgaaggctcanagcagcaggcaagctgctgcctcgggccccncgggctcgcgccgcccccgccagcccggagagcagtcccgcgccgggccaggtagccgcatgcagccccnngcgcccgagctttgtggcggccc

SEQ ID NO: 527971 - DNA, 151 bp, Homo sapiens
tgcgcgtcttgcctgctctgcgcagctggctgcggcgttgtgcaccggctgggagatcatctgtcgccgattacggcagcaccgattgcacctgagtgcgctgattgccgaattgtcccagtacgacggcttccgctacgtgcagctgtcg

SEQ ID NO: 527972 - DNA, 186 bp, Homo sapiens
aagcgattttctgcctcagcctccctagtagctgggatgcaggcatgtgacaccacgcctagctattctgtatttttagtagaggcggggtttcttcatgctggtcaggctggtctcgaactcccgacctcaggtgatccgcaccatctggatggtttggggaacgtcaatatcgcagtcaacacc

SEQ ID NO: 527973 - DNA, 219 bp, Homo sapiens
aattcgcggccgcgtcgacaaacaccttgttgtcgagcacggactgcatcacggccttcttctcgtcgcgcgtgagcacgcgcttcttggcggtctgctcctcgtcgatgcgcgtctcgatagccgagcgcaattccccgatcttggccttgtctccttccttggtggagaacgggtcgaagcgttgcgacttcaccgccagcgtgttgaagtcgtcgg

SEQ ID NO: 527974 - DNA, 547 bp, Homo sapiens
tcaagcattcaagatctttgcgcgggagcatgtactcggcaattgaaactcatccgtctcgttagtaatcatagacttacacttattggctggtttcagatctcttactgggacatcttgcagaaccgtgaagaacaagctcagtgtctgatttgacaccttatcaaggtaaatcaagacatggttgctgctgacttctgtccggctcacatggttagatctttcaagcattttcactgttggcttcaggggaatgaagccagagaccatcttcacatcaacgatcgccatgttggaggcagagcggctccctgtgtaactgacacttagggagatttggaagctggtgtgggctttgggttcatcacaagtttgaggcagagtctgcactcctaaagcaaaggggaactcttccttttctgggagaatatcgtatttcaaggatgtctggaggtagacacatccttctcctctcactttcatgctgtattccccaggcagctctggcaatgagacctgctgcagtaacaggcggttgttgttgtcc

SEQ ID NO: 527975 - DNA, 240 bp, Homo sapiens
tgctgataaactcgccacaatagctttttcctactgtcagataggatagcataaaccaagatttccaaaggcagcactggttggttcccaggtgccctagagtaggatttttattttattttactttattattttttttttgagatgaggtcttattatgttgcccaggctggtcttgaactcctggtctcatgtcatctgcctgcctctgcctctcgaagtgcaggaaacaagaccggt

SEQ ID NO: 527976 - DNA, 287 bp, Homo sapiens
  misc_feature (28)..(28): n is a, c, g, or t
  misc_feature (49)..(49): n is a, c, g, or t
  misc_feature (257)..(257): n is a, c, g, or t
  misc_feature (274)..(274): n is a, c, g, or t
tgggcaacatttttggcccaagtttggnaacatttggcccaagtttggnattttggcagtagctgtatgggagaaaaagagtaagaggaaatattcccacagccatgaagggtgaaagggcaccttgtctcaggactagggctgcctgggtcagtcccagggtgaggccaagggttttctggccatcttcagggaggggccaccaggttcctcccctcaccccatattccatcaccttcctcctctgctctggggtnggtaaggggaagccctnccggtttcccaca

SEQ ID NO: 527977 - DNA, 1666 bp, Homo sapiens
  misc_feature (1321)..(1321): n is a, c, g, or t
gcaatattgagtgtacattgcagagacggtaacccgtcaagcgtgaaatcgatcgatgggtatacagagttcctagcaggctacgccagaacatgtggcagcttagctgagaagagtgaaggaggaacgccgtgctggagggacttagttctcaggtctgacaccctggtacatggaatcattggagcccagtgtatcagcaagtagaggcacattacgttctggagtcacggctaccgccagggcacaaccatcgagcgagtgcactcggaggcaaagaaagagcaacgagtaaacgagctagcatggtgcgagagagagtcatccgaatctaagaagagacgagtatgatgaagagttagatcgaagatcggtggacctccctgccaccgttcacaaagcctagagtagcagggacgtcggacacctatcgttctgaaatctcgagggacgagatgctaagctgaagagatggactgcatcctaagagtagaaaccataattaagaacatatgggggagacggagaggatgcagcatgacgattgtggcgatcaagggcaggaggccgcatggcaggaggtgttaggcaacgctaggggtacattcgctcggataagcaaggctcgaatagcatgggcacacgaattttcactccgccaaatcacacggctatggacacgagccagacataggacggaaattccgaggttaactacacacggggtgacacacacattggtcaacttttgggcatagagggggtacgaacataactggcagagggcccagagacgcagaaaggtcatggagactcccaagggcatttgcactgaccgaggacacctgtggtggagttccagacaaagaaattgtttcccccttgaaaaccaggaaaaaagtggcacacgcttcatgtttacacgaatgcgagcaccatgagtcttcttgggcccctcggtatagtggcataaggagaagaccctaaatggaagctataccactatgatatcacgaattgaaacgccagcgagaggttcccatgcgggcagaggcgacaacacctggtagcacggccacaaaaaacgtgccttgcatggcagaagggaacggggcgtaaaacaagggaaaccatacatgggatatgtggcgcgccattttacacccttagaagggattatgtgttgcaccgcaaaaagagtggcgatacaggtcaaaacgcacaaagtgggctttaaccacacttgggatcccacgcgtccatgtgcccccaactcaggcgcttacaacgcgggcgtcaacacgacattaatatttctacnaccgaacgtcgtattaataatcacggaaagaggtaaaacggagtgtgttataccagcgaaacgtgaaaaggttccccacattgagacgacgggaaaccgccggttcaccgaggacgcaagcaacggccggaggtactgtttgaaaacgcgacgaaagcgatcactgtagtcagctcgcgaagaagaaccagaatatagcgacacaactccgagatcagtcactacgatacatgaatacgcatacgatcgatcatgacgacaccacctcgcacttatatggtccatgatcttcgacgtgactgtccttacctgactatcgtcacagtcagtgcgcgacgaccagcc

SEQ ID NO: 527978 - DNA, 1126 bp, Homo sapiens
ggaagaacacttgatggatctggtgctacctgagatgcctccttcattatggctgtgataggtgcttcgctggctgtggggggctactaaacgtacccagcaatagcaggagctggcgttggtgtcatcgatggctaactcatgaaccagaacgtcgcgtggacacaggcatggctgtatccagagtggacagaagcccagacgcatttgactgctggcatcaggtcggtcacagtgtccctcaaggctcaagtcaatgattggtgcctgactactgacttgcgtgcaaagttgcctcccttctcgtattgaccttagtaacttgccctgagtaagtccagagaacggtcattggccatggatagtggctaagtgttgatctaggagtcatacaagtaccgaatcagtcacaatgtggcagtccaatgggtcgatgagtggacggactaggccttcaggtgtcatctccgccagagaagagcatcgacccggatggctccttgccaattctttcctcatgaagtgggttgggaaccttttggcaccaatcgtgggacgttcttgggatcctcgagaacaaggaaagcatttttgttatcattgtccttgggcaaggactcttggaagagcccaagttaccttgtgccacagttccttagagaggagccccaggtgtgcctgaggcttagaggcatttgggcgacaagcgcaaggggacaatgtcttggggacaacacaacaaccaatggtacagttggactggtcgtaacccattcagccgtggggggattccccgggacgcctacttggtggcccttccatggacgtcccatctgcacaagagatccaaggcctttccaagcgatgtaaccttggaccccagggtggacctagatcctccctgatggacgcagtggttgcccaaggttttggccggtggccttcgggactaggaaagcggacacaaaagcactttacccttgaggaactatccagggcgttcatgagcattatggcccttccaaggttccattgacgcccaatgttggattttcttggcctgacggcgtgaacatacttccttaaaacctggggacgtattgggaggacagtcagtgggaaaccc

SEQ ID NO: 527979 - DNA, 189 bp, Homo sapiens
  misc_feature (3)..(3): n is a, c, g, or t
atntgaaggaggatgacagcttctcttcagattctagtcaagcctggtctctctgggaagatggctctggagagctccacctataccttctctccagcacagaaagtagatgtgtgtcatcatccaaggaatgtagcttcaggtgatggcaacttctttgagcaaccactactttttcttttctttatc

SEQ ID NO: 527980 - DNA, 669 bp, Homo sapiens
atcgcgagccgccgctgatactgacatttgtagatgtggttgactatttctgtatgtctccatctatgatgagggtcttaaaaaaaaaaaaaaaaaaaaaaaaaaaaaaaaaaaaaaaaaaaaaaaaaaaaaaaaaaaaaaaaagaggggggcgcgccgcgcccaagaaataatactccagccggggggccgcaacaactgacgacgctgccccagatgttttgtggtaacagcagggcgtgcccaccaaagagagagcagcatgctatattaagcacgaacgaacagcggcgcggcgttacacacacacgcgcgtcgcgggcggagacacgcgcgtcccgggcgacgctatgcgggagaagaaggaagacccaattatatgcgtggtgggggggagagcagcacaatctgaggggccgccaccacacccccccccgacgagaatctatatcatacgcccccccaccagggggacacaacacctaccaacaccactcacaccaggtggactcacgacggggctaccaacaaacagccgcgcagcgccaattagctacgcgctgcgatgatacaacaaaattgccgccacaacgaggggtgtatactacgattgatatgaaaacactatttctactcacgcgagggacctctccatcacacataagcggg

SEQ ID NO: 527981 - DNA, 297 bp, Homo sapiens
cacgctctctctgtggcgggcagagaggtcactgggcttggaaccagtgtaagggactgcttggctagaagaacacagcatgactgcgcatgacctgggctgaggagacagctctgcatctcttcccccatgtgcccatcgtggagctctgccctgaggcgccatgctcagatgcaccagctggcctctgtggaagagccaggctcggaaactgaggcttgcggcactgggcccttcacagttcctcctccagagggctggcctgccatttcccacattcctgccccgagagagcgt

SEQ ID NO: 527982 - DNA, 667 bp, Homo sapiens
ccgcgtctctcgcctcgcgtcctccccactgtcctgttcgccctggcgtcctgcccgctcctgggctctcctcctgcactgtcgcccttctctctttcttttttccgtctgttctgtctgtctcttgctgcctgcccccccgcctccgcctctccctgcttcctatgcctcgcttcgtccctcgctcgccccatacgcctctttcgcgtgcgctgtgctcctcctccctcctccggcggcccgcctctccctccctgtccctgcctctccgccccctctcggtgcggcctcctctcccccttcgctctcccgctccccgtcgttgtcggtgccatcgcgccaccttcgctccggtcgcgcccgtccgcacctccgtgccctcctcctcttccttccgcctcccctgcgctccctcggctcctctgtcatgtggctgcagcctgcttcctccagcttgttctagtgatttcgcgcgtgcattacacaagctccacactgcatcatgaacgcgtcttatgtggctccctctccgcgggtgatcagatcctctcggaaccagtttttctctcgcatgttcgcccttatgtcgttatcatcgtcctccacttcctctcagccgggcctgggatgcccacgttggcgttccacctcatcccatcttgtttgg

SEQ ID NO: 527983 - DNA, 413 bp, Homo sapiens
cgctacaaatggtctcacacaggacagggtgcggctctctcagtggacacagtagtgagatacaagtctcactttctaggataagggttggatgaaccctcatacaattacaagactcaagcctattgaccaatggaaaccgaagtacccgtttaatttaattggatgccactacctgaagtctaccagatgattactataccgtttcacacacttaaggctaggacccgaactttttgcttgagaaatacctgttctcccaccccaggaattcactattttccagtttgttccctatttattaaatgactcaagttagccaagtctaaatatttacagtgataacgggcaaacagctcaacatcaccgattagaccaatggcgatcaaaagcacgatgagacaggatattag

SEQ ID NO: 527984 - DNA, 738 bp, Homo sapiens
  misc_feature (13)..(13): n is a, c, g, or t
  misc_feature (15)..(15): n is a, c, g, or t
  misc_feature (350)..(350): n is a, c, g, or t
  misc_feature (352)..(352): n is a, c, g, or t
  misc_feature (362)..(362): n is a, c, g, or t
  misc_feature (364)..(364): n is a, c, g, or t
  misc_feature (368)..(369): n is a, c, g, or t
  misc_feature (377)..(379): n is a, c, g, or t
  misc_feature (385)..(385): n is a, c, g, or t
  misc_feature (387)..(387): n is a, c, g, or t
  misc_feature (395)..(395): n is a, c, g, or t
  misc_feature (399)..(399): n is a, c, g, or t
  misc_feature (401)..(401): n is a, c, g, or t
  misc_feature (405)..(405): n is a, c, g, or t
  misc_feature (410)..(410): n is a, c, g, or t
  misc_feature (420)..(420): n is a, c, g, or t
  misc_feature (424)..(424): n is a, c, g, or t
  misc_feature (431)..(431): n is a, c, g, or t
  misc_feature (435)..(435): n is a, c, g, or t
  misc_feature (437)..(437): n is a, c, g, or t
gacaaagaaagangnagggatgaaagagaacgatcaacaagcaagaagaagaagagtaaagataaggaaaaggaccgggaaagaaaatcagagagtgataaagatgtaaaacaggttacacgggattatgatgaagaggaacaggggtatgacagtgagaaagagaaaaaagaagagaagaaaccaatagaaacaggttcccctaaaacaaaggaatgttctgtggaaaagggaactggtgattcactaagagaatccaaagtgaatggggatgatcatcatgaagaagacatggatatgagtgactgaatattgcctctgagggagtccaactgtatacctgcatcagngncattccttgngngatnncttatgcnnnattggncntctcaaanctanangttncagtntgagtttaanggtnataaagntccngntactatattaggtttttacataaaaaggttttaaaaaaggggcccggggacccaattttggcatgggggaaattgtttgggaacccaaccgtttctttttcgggggggttttaacaaaaagaaaatgtttgcttttcaggggctggttggttttgcgtgattccttttaaagggggaccttatgtttctttatttgggtatttcccgaaaaaacctttgaaaacccctttgtgttttttgggggaaatcctaagggttaaaacccccagaggggggttctctgggggtgggggaggaaaaa

SEQ ID NO: 527985 - DNA, 460 bp, Homo sapiens
  misc_feature (354)..(354): n is a, c, g, or t
agtttgggctctgtgtacccccacaagtctcatctcaagttgtgatcctaagcgttggaggtggggcctggtaagaggtggctggatcatgggggcagaataatggccaccccaccaaagctttctacagcctaatccctggatcctgttacactacctggcaaaaggctttgtggagatggatgccgacgcgccacgtagcctcccatccctgtccccggcacggatccggggatggagcatgtggtaggcagacttcccccttgctgttcttgtgatagtgagtgagttctcacgagatctggttaaaagtgtgcggcacttcccccttgctctctctctctcctgctccgntatggtaagatgtgtttgcttcccctttgccttcactatgattgtgcgtttcctgaggcctcccagctatgcttcctgtacagcttgcagaactatgagtcaattt

SEQ ID NO: 527986 - DNA, 639 bp, Homo sapiens
  misc_feature (13)..(13): n is a, c, g, or t
  misc_feature (15)..(15): n is a, c, g, or t
  misc_feature (350)..(350): n is a, c, g, or t
  misc_feature (352)..(352): n is a, c, g, or t
  misc_feature (362)..(362): n is a, c, g, or t
  misc_feature (364)..(364): n is a, c, g, or t
  misc_feature (368)..(369): n is a, c, g, or t
  misc_feature (377)..(379): n is a, c, g, or t
  misc_feature (385)..(385): n is a, c, g, or t
  misc_feature (387)..(387): n is a, c, g, or t
  misc_feature (395)..(395): n is a, c, g, or t
  misc_feature (399)..(399): n is a, c, g, or t
  misc_feature (401)..(401): n is a, c, g, or t
  misc_feature (405)..(405): n is a, c, g, or t
  misc_feature (410)..(410): n is a, c, g, or t
  misc_feature (420)..(420): n is a, c, g, or t
  misc_feature (424)..(424): n is a, c, g, or t
  misc_feature (431)..(431): n is a, c, g, or t
  misc_feature (435)..(435): n is a, c, g, or t
  misc_feature (437)..(437): n is a, c, g, or t
gacaaagaaagangnagggatgaaagagaacgatcaacaagcaagaagaagaagagtaaagataaggaaaaggaccgggaaagaaaatcagagagtgataaagatgtaaaacaggttacacgggattatgatgaagaggaacaggggtatgacagtgagaaagagaaaaaagaagagaagaaaccaatagaaacaggttcccctaaaacaaaggaatgttctgtggaaaagggaactggtgattcactaagagaatccaaagtgaatggggatgatcatcatgaagaagacatggatatgagtgactgaatattgcctctgagggagtccaactgtatacctgcatcagngncattccttgngngatnncttatgcnnnattggncntctcaaanctanangttncagtntgagtttaanggtnataaagntccngntactatattagtgagtgctacatcaaaaagcgtttgtagaaagaatggtgacgaggtagaccaattctgtgtcatggtgaaatcttgattgagtaaccaagcagttgtactattctggtgctgcttcataacataaatgaagggctgcatgcatctatcagctaggcatggagttgtgtatgtcgtatgatatccttaatta

SEQ ID NO: 527987 - DNA, 159 bp, Homo sapiens
gcctcctgttcccagccgctaccctgcatagcggcctccttcccaggctctggggcagcgcaggaggtggagtctggaagggtctgcctgagctgttcacttgggcaggacgtcagaggactcagacaccagcttcccatcacgtgtctcgaacttctt

SEQ ID NO: 527988 - DNA, 994 bp, Homo sapiens
gcggtttttgcgactctggggtcgcctgtctcacttctcggcgttgccggggcgcctcatggtaatcgcgagagggcgcggaggggtggcctgaaagggcggcgtgtccggagggcgactggcgcggagcctgaagaccaaggtgactgattccgattggcaggagagttcatcatggatgcagtgtgtcaagctagggatgcgggccatatccaccacttgtcatgtgctcgcgaactagttatatgcaaataatagcttcaattaatggtcgagaaagcagagccgtggacgccatatgtagcgcatttacaacctttgcattgccatgtgttctcatatacttggtccggggaaagatggtagaagatgcccggacctggcggactcgatgagatcatcttattgtgtccagcaggtgacttataagcccaacgtcggtgagccccgtggaaatggactcccgcgttctgggaactccgggacagcactcgtgcagggtgagcttctcatgctgagagttctgcgcattccaggtctccttccagctatccacacaagtacctgctccactaccgtggtttcccctcgcagaactggctgaatcgcacagctggcagcggacccctgttgccgtcaccgcgtgggccctgctgcgggacagctaccatgggggcgctgtgcctcgcgttcaggccagcacatcgccgtggggtgctctacctggccctgcagggtctacggagttgagtgcccgcgagtcgagtgagaagccgtggtgcaaggtggttaatgacgacctttccaagccatcattgatatatggtctgagctccttcagattttccatggacaagaattcctagtctggccaggctgcaagaaccaggtggcgtgcgggacttgccacgtgcggcggggcccagactgagacgtgttgaagcggaagaagtgcgttcaaacaagggagtgagagccagggtgacagcattgt

SEQ ID NO: 527989 - DNA, 239 bp, Homo sapiens
gccaaggctagtctcaaactcctaggctcaagtgatcctcccacattggcctcctaaaggtgctggagattacaaggggtagccaacacggcttgccttaactttcaacaattgttcttggtcaagaggttcctaaaacaaagcttattatacattgaggaaacttaggtttatcactctcaaggtgcatattgtgattcgcacacattttttttaaagtataaaggtatagggtcttc

SEQ ID NO: 527990 - DNA, 276 bp, Homo sapiens
ttcttgatttgttataaaaaggagagatcctctagatatcatgggtaagagggaaagctaacaatcccacaatgatttcctttctttcttggccatccgaatatatccttcttcaccaaagttggtggcccagctgtttttcacaagccagtattctttcccattaagatcaccatagccaaccattcagcctactcattcaacccaatagccctggccgtacgcctaaccgctaacattactgcatgacacctactcatgcacctaattggaagc

SEQ ID NO: 527991 - DNA, 374 bp, Homo sapiens
catcagcaagggtctccaaaagttcgcacagcaatggatgcacatgccttgcagggcaccccagcaggcttcctttccacgcagcagtccccaccctctgagtccgcccattcaagagctgacgacatatgagcaaactcacttctctccctcccttgtcatcagcacactggggttgataacagaagtgacagctccagcaaaatggtctggcaagttcctaaaaagttaaaaacatcgagtcacccatcaggcactccagcaattcccactcctgggtgttatacacaggcagcacatagcacaatcccagttatgtcccacacaaaacattcatgcaaggatgttccatcagttccagcatcagtcaatca

SEQ ID NO: 527992 - DNA, 344 bp, Homo sapiens
ttgtcgtctctagcaggatcccccatttgagcccctggatgccctagaatgccctgagagaagcacgcttgtggtgtagagcaggagactgaggacacggacttggctgatttagttatgcatgcaatattctaagatgacgccagatttaagaggttgtatgtgctcttttcaattggaaaagacctttgaaatttttttttcttttcttttaggaggccatatgctccagtgcctgatggccatcgtgagaaatccgtagaacaaagttcagatagcgaagtcttcttttagtgattaagcttaattttgatgagaattacatatgcttccaggggctcaag

SEQ ID NO: 527993 - DNA, 945 bp, Homo sapiens
  misc_feature (1)..(1): n is a, c, g, or t
nctgttttgtatggataagaagtgaaacacgagaagtaaggaaaggaggaggagaaggaaaggaccgaccattcgcgtatgagagtctccttcgtacacagtgttgtccatgtggttttttcactcttcttcacgtgaggtacgtttccgccttgttatccgctccaatgttgccgcaaatgtgtggttggccccgatattttcagacaagtttttgtcaaggtctctctcctccccattctgggggcccgcccccctgactcagttccctgcgtttcggagccagagacctgttcccttgcaagcctctgaagtaccgggaatccatgtccaactgcaccgttcatcctggcgcgttctgagtggccttgattttttgtcgggcggcaagggagccacccagaatcccccctaggaggcgtcttcgacatttgtgcccccccgccgcggtgcttccgtccccagtgccgctgtcccaaaactcttgtccgagttaaataggcttgacccccggctttattattcccccttggtaaaccacaggggcctgtcttcagttaccatttattttcttatacagcggacgtttctccacccttattgggccacgcaaggaaggggataaccactgggcgcatccattggtatcccgacgaagcccccactaccgcgaggcaaattggcggaccgaccacccgccgatatagtcagagtatccggccccccccgcccccgaccggggaaaagaggtggagaatggatcatgataggaaagcgcgtgtcaacccagctggacgcccaggggtctcgaaaagccacgaaggaccagcctagtccgcaccccaccgatccactcccccaagccacggcgatctccggcagagcccccccggctgggccaacttcaacacatttttacacccctcccaacccagaaaaaaaaca

SEQ ID NO: 527994 - DNA, 255 bp, Homo sapiens
  misc_feature (235)..(235): n is a, c, g, or t
gcagtctgtactgagggatagagatgagagctttagttgaggaggcagcactgtgtgtgagggtcgagaagctccagtgctgctacttcctgagctcatatatttgtagtccctttcagactcctgaggaagaagacgatttaaacaaacaacgatctaagaaaattcagaagacatatgatgaaaggaagaagaatggcacaatcagcagtctcctggtttagcagtttctggncgtccacagagtactgggca

SEQ ID NO: 527995 - DNA, 88 bp, Homo sapiens
aaaaatgcgcaagactaatcaattattattaaaaagcatgcaaactaaaatgaaggatctccccgaatctcaataaaccagtgaacag

SEQ ID NO: 527996 - DNA, 974 bp, Homo sapiens
ggggtgaactggtgtcggccaggcttctcgatgctccgtggcccgctgtgcaacctcgggctgctgttctgcagtgcctgagacctggcatgtacgagcaactcaatgggcgattggaacctgtaaaatgccccaatcttagcaatgtgcggggaagagctgggtcgactcaagctagttcttcgtggagctcaacttcttgccaaccacagtggaccaagctgaccaaacatgcatgctaattcttggccctgtgacatacatggagatctggggcccaatggagcatcctacgcaaggacatcccctccttcgagctgctacatggcccagctcaaattgctactacttttgattacaatggagcagctccccgagtcagcctatatgcaccagctcttgggcctcaagctcctcttccttgctgtaccagaacctgggtggcctgagttccacacggcatgttggagcggctgccttgccaaggacatacagaccaaatgtctacatcaacgcacccaagtgtaccctggagcaataccttggatggagggcaagctacaacaaagtgttccttggccaagggtacacattccccagccggagagcttacagccttctttcatttgacattcctgctccgacgtattcaggggattgagatccgctgggtgcattcgagaagggcctaagagaaaaatcctttcactgaggccaaccggattctcttcttcaagaacacccaaaaagattgacagactacgcgagaagcgagggtcggtcctgggcccgagcattataaagtttggcaggcagagctaagctgaagaaacaacaattcccttccgaaacttgccaaccggtctcgagtatgcccggaagttgagatgatcggtctagccccggcactggttggcaaggcccgagtcttcaacgtaatgcgggtcgccatacggtgctacaaaccaatcacc

SEQ ID NO: 527997 - DNA, 124 bp, Homo sapiens
tttaggcagcaacagagtgaccctgggggtgctcttgaccgacagccgcacccccggcgtcttaggaccttcgagcaggggattgcatcttggagggtctaggggaagcaactttccaaccccc

SEQ ID NO: 527998 - DNA, 287 bp, Homo sapiens
tgttgaggcccaagtccagtcgatttgatcgagtactcacggtcaaatcgactggacttcgacatggtggtggggatagcgcgccgccagttgaatagagacgggtgggtttgcccgactatgttaagacgaaggagtagtatccctcttcatccttctctagtggtggctcggggatctcttcaaacatgatcgctgacaagggccggctgagggtgcgaatgacggctctggggacgtcgtccggtccgctttcccagtactttcctaaattaatcataccacta

SEQ ID NO: 527999 - DNA, 88 bp, Homo sapiens
gcaatttcatgtggttctaaagtgaaaactacaataaaagaaataggcaagtttagtttccatacttgttcccttctgtcgtcttctc

SEQ ID NO: 528000 - DNA, 442 bp, Homo sapiens
gaccaggagggataactggagtcttagatgattcccgattagtgtttgtataccttcctctaggtctctccagaaggtgatagtcatcgctatccgaggtgtcatacaccaggtagttgacgaacatactcctgagtaaccgaacgggctctatccacgcactcgatgagcagcagggagcatgcggagacactctagatgggatttctgtagcgtttcctccatgtaggagaggtgtcggaatagactctgagcaaacagaaggaggtctgggcagtcatgcaggaatgaatactatctggtcctttgggatataggtatcttcaaactcctggtaggtgtcaatggccagatggtgcgcgcgatgagcttggagcatagcgtggtcaaaaagcctggatcacggaccggtttggacggcaccagcctcttgaagccaggc

SEQ ID NO: 528001 - DNA, 766 bp, Homo sapiens
  misc_feature (223)..(224): n is a, c, g, or t
gcaggcaccagcattctcaaccccttcaggctctaagtgcagtaaattcctgggaagtgtgactgaaaatctcttcagtcatccccactcagagggcagaggctttacccaggcatgggaggccaagcatacggagccccaatttccatcaacccacatgcccatagggtggggtgtccatgcagtgagaggctgctgccccccacacagaacccggctatgnncagaattccctctgatagactcaggcactgttcctgcctctaggtctatagtaggggctcagacattcagcccaaaagagagagaggcgtaagaacagagagctccaaagcccctcccaaaggaactgacttgatttgaaacagtatggggatgttcaagcctaaaagtgccctggaaaagaatggacatttgatggtaagcagttaagaggaggcagcagttccattagagcaagaaataaactgtaggtcagcaggtttacagagagggaggaaagcacaggaagaaccatctgggaaacgacttcaaggatcggaagctctcagtaaaagaaggccctaaatttaatggggtcagacaggggagcagtgtgtgcccaggcatgtgaaaggaatgcagcaaggcgcgggccagaagtgatcggacactggacaacaccaacagggtacagacaatccaggagggccaaagcaaaatcacagcacccacagggaggacccaccggcgaccccagggacacaccggggcggccagaaacggc

SEQ ID NO: 528002 - DNA, 182 bp, Homo sapiens
cgtacagatttaatataaagtcatctcaattagatatcccttttgaaagctgttgcttgcctacttcaagtgaaataaggatatggtcactaaaggtacaaagttcgggtaatggtatctgacaatgtcatgctccaataatactgaacttactttctgtcttcatagccgatagggttagt

SEQ ID NO: 528003 - DNA, 1533 bp, Homo sapiens
taggctgccgtctatcctgtttgccgcggctgtactgtatttcggttggtgtgtggtcggctcgatgcttgactcgttgttgtgttgctaggcttggcgcgcggtgggtggctgcccgtactttttgtgtgctatgagccgtcgtgggtgtcgccccccccggctgtgttgtgccgtccgccctcctaatttgcgtggcggcgaccagaggttgtgtgttgtgtgtgcctacgtttgttgggcgcgccgccgctgtgtccgtctggtgttctcctccccccccccgccccctgtgtggttgcaatgttatgcgccacccagttggggggggtgtctctccaagacgtgtgggacacgcctggttgtcgttcggggggggtttcttcttgtcgtgcgtttggtgcggtgccccaccaatatagtgggggcttgtttgctacccctctgtgtattgatgatattttccctggtcgcgtgtgggcaccacagtatcaacgcacacacccacatggtttgtttgtgtgccgcgcgcgtgacaatgaggtgtgtttgccccctgcgcgtgatcccccccacattttagcgggaatatcacctggcggtcttttcgcgttgtaaatagtagattcgagttgtgcgtctgaaacgtgttgtgctcgctcccccgtgcttttttaggcgaactatataacgcgacgctatatggcctaagtttagtcgtggagaagtgagaattgttccccgtgtttgctggaaaggtgaatccacttgagtgcctttgaaatggagtatgaaattttatgtaccgtgtaaaccacgggctctttagtgcctgtaaatgttgaggagagaccttatgaaaaaaattgctctaagagggtggagctatcttaaatgtgtgccccctctaaagtgagatgtttggccacgctaaacgtgtgtagtcttctctggcgtcttgtccgctacgctctagaataccccccacgctataattccacgagacactctgtatatttctatttaatcgaggtgttacgcccacgttctctttggggagagtggacccacgccacacactcttagagattggtttgcgcacctaaagagtgtgttatattttggaaaatgccccacgagagaggggttgaaaaagaggggagtttccacgtatcgtaccaccactaccacacgctaaatttaatttgagaactaatatgtttgtaaagacacttctagccacgcttttctccacaatgcctttgtttataaaactcactcaccacgaaagaattgggtgaaaaatgctcgaggtattgaccacctcttttcttccttgcactgcactgtcacgctacactaaaccacgttttgtaccacatgaaaattactaaatttgtttgacacttccactgttaaactaccggtcacatgttcacgcttccttgcacatgtaaatgtagaccctagtccacatcagatcatgtgtttctggagagtgttctttattccataaagttttaatttagtata

SEQ ID NO: 528004 - DNA, 740 bp, Homo sapiens
gtccctccattgtctccacggcggcgtaggagcgccggcgagcgcagcccgggaccgagcggggtcgtgcgcggctggtcggggccggcggcggctgaagcgagagcgcgacgcggacgcgaccgtgggttcccgagctgcgcctggccgacccagtctggccgtggcccggccgaggccctggacggggtcctgtggctcgccgttcccattgggtcgccggcgtcccttgaagcgcgtggggaacagctgcccgggggggcccccttgggcccatcgctcccggccttccctgcccccggctggttgcccgatctgggccttccttcccgggggagaccataccacacttggtcagcacacaggaaccatgatgagagaaaacagacacagacaaggaattagagagtagcccaaatcattttacccacattggaaggattacatcactcggtgcttatttcaggaaaagcccccaggacgagcgccagggacacacttgagttggacaaagcacacgtgggtagacccccccaggtccgtcactcgcgaacactattggtccagccactattacatcttcaggccacaccccctcatagtaacgagtgcgggtgaaaacacaactgtgccgcatttcgggccccctgcggtgcaaactccccgtacgtgcggacacatttctcgtggaaagttttcgagaagagattgcgaccgacgtactcgtcggcgctacgcgc

SEQ ID NO: 528005 - DNA, 160 bp, Homo sapiens
caaaaattagccaggtgtagttgtgtgcacctgtagtcctagcaactggggagacatcggtgggaggatttcttggcaggagttcaaggtttcaattaaccatgattgcaccaccgccctccagattgggtaacagccagactttgtctctaaaaaaatg

SEQ ID NO: 528006 - DNA, 431 bp, Homo sapiens
gggccagccaggcaccttctaggtaacgacacatctacaacgtttatcgtcacagccacgcatttgttataatcttcttcatagtatacccattataatcggaggctttgcaactgactagtcccctaataatcggtgcccccgatatggcgttcccccgcataaacaacataaagcttctgactctaaacctccctctctctaactcctgctcgcttctgctatagtggaggccgagcaggaacaggttgaacagtctaccctcccttagcagggaactactcccaaccctggaagcctcctgtagaacctaaaccaatcattcttcctatacagccgtaagcaagagtgttctccgtctaatctaaaggggccatcaatttcatcacaacaattatcaatataaaaccccctgccataacccagcccgg

SEQ ID NO: 528007 - DNA, 141 bp, Homo sapiens
gtagctttggacgatggaccttgcactcagtgaggagacaggccatgcctttcaagtgcatgcagcgcactgatttcattctcaagtttccgcacagtgcccaccaggtagtatgtccgacaagcctggcagaaggcagac

SEQ ID NO: 528008 - DNA, 592 bp, Homo sapiens
  misc_feature (111)..(111): n is a, c, g, or t
  misc_feature (172)..(172): n is a, c, g, or t
atgctgcacagagggtcaaacaattcccctgcctcagcctcctgagtagctgggattacagacgtgtgccaccatgcctggctaagtttttggtattttagcagagacggngttccaccatgttggccaggatgctctcaatctccttacctcatgatccgccagccttggnctcccaaagtgctgagattacaggcatgagccactgggcccagccaatcaacttttcaaagcaaaaaggaatgttttacaaaatagcttattaaaacatctggttcctggaatatttcttggtttaaaaataccttcctggttttaatactgtctttaccttctctccatgaatccatatgccatccatccatgaatttatgcatgcattcagcaaatacttatcaagtgcctccagtgtttcagacttttttttatgcactcgaggtagaaatgtaataggataagcgaagtctctgcccttactgagtttaaaatgtagtgggagaagtgagccagacaaacatgttaacacataatataattcagatagtgaacagtgccctcaggataaggtaagagtggttgacggagggagggg

SEQ ID NO: 528009 - DNA, 115 bp, Homo sapiens
ctggcattacagagccggacagaggctgggaaagggagaggctgggaactgggccccagcaggtgaccctccctggaagcagaagcagaaagcctcggtatctgcaaacaccaac

SEQ ID NO: 528010 - DNA, 421 bp, Homo sapiens
tgttagtatgcttcccttcacctctcactgggccttgctttcctttttgaattggagggtattgattagggagatgctgaaagaagaagacagaaattaataataaaatactgcactgagctcttcatgttgttaaatagagaattacttttttacctccactgtaattcagtttggaatgctttggatacttatgagtcctccttatgtattcctttgctggttgggacacatttaggtcaatcacagctaagtcaggtacttaaactgtccccagtagcaaatggtaattaatggaagcagattttctggtatgtcttaaaatgcatgattgccacttgttaatagttgactgttttctaagcataactagtttgcagatctttttgcaatctgaagagagtaagtagaccaggtagca

SEQ ID NO: 528011 - DNA, 730 bp, Homo sapiens
ttttttttttttggaaacggagtcttgctcctgtcccccaggtgggagtgcaggggcaaaatccccgctccactgcaagtctcctgcctcccggggttcaccccatttctcctctggcctccagcctcccccacagtagctggggactggcggggcgcgccttgccaccaccgcctgggctaattttttggtatttttatagtaaaagacgggggtcccagcacttggggatgtgttgatgtgcgtgagactgagactcactctagatggctcagagacgtttagaaaccacgccgtggccggcatgtggcaaaacccccttctctctcttaccataaaaattaaaaaaacaacacaaacaaaatttcccatgtgtggttcccacaattgagagaaaacaagattctcttataaaaaaagaacaaacatatcttctctccacaggtgtcaccggctcgaggagacgacaaagaaccgtgtgagagaacacctcgtgattctccacacgttttctctgtgacccccctgtgtgtgtcaatttttctatatctcaaagagtggcccaaaaagaggcactatacgaggaaaataaacacttatatatacgagaactcttagagagcggggtggtttttacgcccggtggtgtggggtgtgtttgtggcacccgtgtttagctcccccaaactatacttgtgggggggcgcaaaaacaaacggcaaaaactggc

SEQ ID NO: 528012 - DNA, 249 bp, Homo sapiens
ttaggcgcgcgtagattcgggctagtccacactgacttggccatcttgctctataaatgctggtgtgcatcgacccacagaacccttgcaacatttgagaaggacgctgctgagatgtgaaagggctccttcaagtatgcctgggtcttggattaactgaatgctgagcgtgaacgtggtatcatcattgatatctccttgtggaaatttgagaccagcgagtactatgtcactatctccgccccactg

SEQ ID NO: 528013 - DNA, 525 bp, Homo sapiens
catattctggcaaatatgctaaatttagttcattccaagatcactctgtcactgccggctggttacaccattattctgttgtctccatcccattttcctctttaagatgttgatttagttcagctctgttatgaacagagttcaaacgtccagcaaattcctgatgtttcctggaattggccgtcttgattctattactccacaaggataataacgacactagcccttgtgatacagccacttgtgaagtaacatccattacaacaaggggtaacaagaaaggagattctggggactcaggcgaatctttgataatctcagcttcagccaattctatctttaccacgcactaagattccttttaaatctctctgagtcttgccaagacttttccctgtacataatcttacactgatattctctgacttgtactctttgtctttccctctttcttcctcgttactttcgtacttcctcttctggggattagctcctgaatgcaatcagacattccaagatgacttc

SEQ ID NO: 528014 - DNA, 122 bp, Homo sapiens
tcgctattcatcggcaccgacagagacagagacacagccatcctgccaccaccgctgccgcagcctggctggggagtggggccagccccccaggccccctacccctctgaggtggccagtga

SEQ ID NO: 528015 - DNA, 177 bp, Homo sapiens
gcaagatcccaaataaacaatctaactttatatctcaagacattagagaagagaaagaacaaaccaagcccaaagttagttgaaggaagtcataatgaagttaaagcataactacacacattagagatagaccacctcagatgatcatgacaccgagttagtttttcagcgagaaga

SEQ ID NO: 528016 - DNA, 470 bp, Homo sapiens
ggatctaataggttcaggcagtactgtactactacatagatcttacaacaatggccaaaacttctatccaataatgaacacttctccctatgtattctagttgaccataaaaagaattaagaccgctgcccgttttcttgaaggtattttgcccaatgtacaagcagagcaggttgaaggacatgtatatcctgggctcttagagtgtttatttcatgctgaactagaagtctcaattttgccaagtctccaggtactgctcatctgtgactcagagtacaaaccgcatcccaccaagatttttgtctttctagtacacagctgtttcacacacacggaacaggcgcaggccatcaacggctgataggcactatggtgagaattacatttctcctttacttgtacgtgcctggcatatcctcatccaaggagacatacttcaagatctaaaatacatattgattcaggcg

SEQ ID NO: 528017 - DNA, 330 bp, Homo sapiens
cttattgtgttgcacaaggaaacaattaacagatagacatagacacttaggtactgggagataaaattagcaagccatatatccaagaaggagttaatatccaaaatacataagctctaacaactcaatagcaagaaaacaaaaaacccaattaaaagaatgggcaggccgggcgtggtggctcacccctgtaatcccagcactttgggaggccgaagtgggtggatcacctgaggtcaggagttcgagaccagcgtggccaacatggcgaaacccagtctctactaaaaatacaaaaatcaattggatgtggtggtgcaacacgaataa

SEQ ID NO: 528018 - DNA, 1003 bp, Homo sapiens
  misc_feature (302)..(302): n is a, c, g, or t
gtttgccgtcagaacacacggtgtcgtgacaagtaccccgtaaaagcctacatacatgggaagagtgaaaagactcatatcaacattgtcgtcattggacacgtagataacgggcaagtccaccactacgggaccatctgatctataaatgcgggtgtgcagtcagactgacaagacacgcaattagaaacaatttgagaaaggaggcatgctgagaatggcgaaagggctccttcaatgtatgcacttgggtccttggatcaacactgcaagagctgcaggcgtgacacgtggtatcaccnatctgatcatctccttggtggaaatcttgagaccaggcatagtactatggtgagctatcgaattgatgcacccagagacagcagagatctttatcaaaagacatgagttacagaggaacatcggtcatggctgactgtgctagtcctgactggtaagctgactggtgtatggtcgacattctgaccgcctggtaatcatccgaagcaatgagtgcatgaatccctgagaagcatgcccttctggtcttacatcagctggtgtgtgacacagctaatggtcggtgttaatcaatgattggattccacttgaaggcgcacccgtacgatgccatgcaaggaggatctcgagggacacataggtgtagggcgaaaggtacagtcgactataccatgtgcacgactcacattcgggctgacacatccaccgatgacacgtaacgcacttgggtcggcccaatttgcctggtcaggaactggtgacaagcaatggctggcacgccaaagtagctgaacgatgcccctcgggtttcaaacgggcatgggccaaagtaaaacgccgtaaaggcattggacaatcgcctagagggaaacccatgcttgacttgaggggctcatggactgcattccttaacaaccaacgtccattacccaattgacaaagacccgttgcagccttggactctccaagggatgtctacata

SEQ ID NO: 528019 - DNA, 382 bp, Homo sapiens
ctctcgctctcgagaatccccaaactcctgaccgtgcaggaagacttccgggcaatccgtagacgtccgtgagatcaaggttattgacgcgtaaggactccagaatggctattccagaggctattccacagcagccctcgggtctgctgcttggctatttttatggtcacttcttgattatacgccgaacaaggggtggattattcgtgagttttccaggaagagggtgagcaaggtctcagaactgaggctacctactttattccgaccatataggtaacttcccaacattgccatggcatctgtaaactgtcatggtgctggtgggagtgttacttagcatgccaatttctcaaagttcgcatataatgagcagaacgga

SEQ ID NO: 528020 - DNA, 100 bp, Homo sapiens
taggcaacggatgcaggcatgttatgggatctcaacgaaggcaaacacctttacactgctagatggtggggacatcatcaaacgcgctgtgcttcagtcc

SEQ ID NO: 528021 - DNA, 1286 bp, Homo sapiens
gcctggcagcagggcccacgccacggggccatgggcagctcgagccaggcaggctgctgcccacgcttactgccagtggtgaccccatgccctgtggtgcccagccacaaccaccctggcttcatgccgagggtgctgctctggttgccagtctggcatgcctcgtgggtgtgcagcctggtgctgggactgctgctggtgtgtgcaggtgacggcaagttgtgcctggtgccctcagggccccatgtggcatggcaagtgcttgcatggtgtgatgccaaatgtccatccaattgtgctgtgcccaagccgggggacaggctgaagcacggaccatgggtgcctcttgctgggcccatggggcccacggaacatggcctggggttgaaggtgctgggggccctgttgcttgccatctcccatggccttctgttgggcccatgtgacgggtccttgttcccttggtggctgcctgagcgttgcttgccctgacgtacaatgcttgcaaggtgcaaccagaaggacaatcccagacggcaatggaaccattccttgcgattacatgccccctttcaatgggccggttgttggggaccttgggctcaatccttgcttggatagggtcatcctaacaactggcatgtcttcaaaacaccataaactcagagactggccctttcacttggcttcgaacgcggacgacccggacaggacagggcccctgccttggctaaacctgcagttgttggcatactggcacttggaccatacctgcatggggctagaagagtggggaccctccaatccggtggaaccatccattgtccattcggttggaggagcattccttccattcaaaatttaccggagaccacccgtaaacggtcagaattggcccaaacagcaagggacgcgtcggtccaaggccaccacacgggcgccggaattaaggccggatcacagcgtaactatcacaagcgggactgggtttccatcatctgaacattggttggtccgcgacataccccatttcgaccttgcgtacacagcctgtcagggaggccagacgcctgaaaaacacctggaccggccctccgcagaacactttcgcccgccatcaacggcgtttgatgcaacgattaagcgccgcaacctaggatctcgaacaaaaagacacgcgcccagcctcgaatgtctatgcctgtcacattaggcgcatagcccgacgggacccgactatgcgtcacactggcactatgacagcacgggactcaccattgtagccc

SEQ ID NO: 528022 - DNA, 399 bp, Homo sapiens
gcggaaaccaggactccctccactgagtggtagagcccaatttgaagcctaatggagcatgtccacctctaggggctctcgtgccaaggccaccttgcactcagccttccaggtggcagcacggctctcacggggagtggttcccgcctggtcactccccaccctgccaccgctctgcctctgagtaaacggtcggcacatgtgttgggttgaccgtggcattggggcaagggtctgacagtcagaggtgacggtcgtgcaggaggagacaatcccagctgcagctatcgggcagggcagggcgcagcacctgtgtgtgctggaagggacagagtgtttttgtttgtttcttttttccccctgagacagagcaaaaccctatctcaaaaaaaagtggtc

SEQ ID NO: 528023 - DNA, 670 bp, Homo sapiens
gcggaaaccaggactccctccactgagtggtagagcccaatttgaagcctaatggagcatgtccacctctaggggctctcgtgccaaggccaccttgcactcagccttccaggtggcagcacggctctcacggggagtggttcccgcctggtcactccccaccctgccaccgctctgcctctgagtaaacggtcggcacatgtgttgggttgaccgtggcattggggcaagggtctgacagtcagaggtgacggtcgtgcaggaggagacaatcccagctgcagctatcgggcagggcagggcgcagcacctgtgtgtgctggaagggacagagtgtttttgtttgtttcttttttccccctgagacagggtctcactctgtcacccaggctggagtgcagtggcacaatcacagttcactgcagcctccaccttcccagactcaagtgttcctcctgcctcagcctcctgagtggctggaactacaggctcatgccaccacgcccggctaatttttgtatttttaatggagatgggggtttcaccattttggccaggctgccccaaactcctgacctcaggtgatcccctgccttgcctcccaaagtgctgggattacaggcgtgagccaccgtgcccggccataagaggcagttttaattgaagagat

SEQ ID NO: 528024 - DNA, 186 bp, Homo sapiens
cttttccaaagagcttaatttggtgtcataaagtgaagcgtaacgcgcgagtggtgagatcgtcctgtcctgcgcttaacagtacaggtggaccaaaggggctcccggccaaatacttctggttggagggtggggagggagtgctctctcaaaaccactcctggaatggcttaactcgcccagcac

SEQ ID NO: 528025 - DNA, 247 bp, Homo sapiens
gacgatcctggctcagtgatctttgggctcagtgatctcccactcggctacaagtgttgggattacaggtgtgaacacttattcttattggttttggaattggccaacagaatttttctggccactggaccggataaatccattcactgagaacacggcattgcagtacagaaagagttaaattgaccggaggctggccacacaaaatgggaagaccaagtttttactccaaattttccccttaaag

SEQ ID NO: 528026 - DNA, 196 bp, Homo sapiens
gtgactacggctactacggtatacaagagtcaggttcgtccttaagggttgtgtatggctatcattgtgtttatgcggttagcttggattagtcatggtggggtggtgataagtcggttgttgatagagatatttggaggtggggatcaatagagggggaaatagaatgatcagtactgcacaacttgtcgagatt

SEQ ID NO: 528027 - DNA, 494 bp, Homo sapiens
cctgaaccttgccactttttgtaaaaagcgttgcttagactcattccctcaggtcttctgaaaatgagtattctatgtttatcggtgttgaaccccaggggcaggagccacggggcctacagatgcacccaagggcagcagccagtaggacgtgaggtcttgcctgcctgggaacatttgcagcctgcagcctcgagccttagcctacattctgggcctgacaggaaatgttctgtctttctttaccccacaccaggactcctggagtggtgggcaaatacctgtgagcttgttttttgggggaaaggcctatctttgaggccattcagatcttaaccatcactgtccgtccttcttgtttcttccggtgaaatctgtgctaccaagtgcctatgaattgactctactaaaatgaaatcttttaatttgtaaacattggaatcggaataaataaacttatataacttaaaagcataaaatccttaagtaattat

SEQ ID NO: 528028 - DNA, 408 bp, Homo sapiens
gagagagagtagagagagagagagagagagagagagagagagagagagagagagagagagagagagagtgagctagagagaggtctcgccgagctctctccttgtcgtcgccccgcttatatgcttcggttaccctcagtctttcctctctttataccgctgtcctttgttctctcttcttatctcactctggcttatgcctccgatctttcttcttgtgcatatgcccgagcctttgcttcatggtgtacaccttttagccgttgctgtcgccgtttctctgttgcctctcggatttactgtgattattgatctcatttgcttgcgtctccttgtttcacttgatgttgttactgttgcctagtcacttgacttatatgatttttacctttcctttgtgcttttctc

SEQ ID NO: 528029 - DNA, 81 bp, Homo sapiens
tacttctgtgcatcaagcatggccgggtatgcactcaacttcggcaaaggcacctcgttggtcacaccccatatccagaac

SEQ ID NO: 528030 - DNA, 162 bp, Homo sapiens
ggtcggtacctctcgggccgttcttcgtgccaagggtgggccaacgtgacaaagcgcggtgtctgcatccgccgcttagcccgaccggtcttcttcttcttcttctcctgttggccaccttaggagtctgacctctcacttttccagcagggcccgagagta

SEQ ID NO: 528031 - DNA, 743 bp, Homo sapiens
  misc_feature (5)..(5): n is a, c, g, or t
  misc_feature (63)..(63): n is a, c, g, or t
  misc_feature (87)..(87): n is a, c, g, or t
  misc_feature (124)..(124): n is a, c, g, or t
  misc_feature (144)..(144): n is a, c, g, or t
  misc_feature (153)..(153): n is a, c, g, or t
  misc_feature (157)..(157): n is a, c, g, or t
  misc_feature (207)..(207): n is a, c, g, or t
  misc_feature (225)..(225): n is a, c, g, or t
  misc_feature (241)..(241): n is a, c, g, or t
  misc_feature (285)..(285): n is a, c, g, or t
  misc_feature (290)..(290): n is a, c, g, or t
  misc_feature (292)..(292): n is a, c, g, or t
  misc_feature (302)..(302): n is a, c, g, or t
  misc_feature (396)..(396): n is a, c, g, or t
  misc_feature (407)..(407): n is a, c, g, or t
  misc_feature (501)..(501): n is a, c, g, or t
  misc_feature (528)..(528): n is a, c, g, or t
  misc_feature (548)..(548): n is a, c, g, or t
  misc_feature (558)..(558): n is a, c, g, or t
  misc_feature (724)..(724): n is a, c, g, or t
aaaancaccagaaaaggaactgacactactgagacctggaaggagccgacccccaacccctancccaggacacagctggcacctcangcccctttccttctgaaaggagggctgtgtctctctnacattcacacatacacaganacatgcatntgtncacactcatggcacatgggacctcaggggtagcctgtttgccgatccccncaagaggtaccaggaggnagaccgctagaagganataagaggctaccctggtctccatccaacccaagggaggtaagnaaagntncaacgccctncttaggataagtggactgttctttctagttcaatggagcgttgacttagggggcgtttttgaaggttttttttcctcctttttgtagtttttanaaaaatagaanttctcttggtatttataaatttacggctatggctctatgtgtctatgttacaggtagaaaagccatatggggcactccttttgtgtttgctcangccttgattgcctgtcatccaaggtcncttggtctgagaagtctatncggtcacctnagcagccgcttaagcaccttcagtgggcccatcccattgagcggcgtactcctgctgggagccgggcacggtaatagaagaggtaggaaggcaacaggaatcccaggagtgagaatagcaggaggcccagattcacccagaagggctctcctttcaaggggaccancatgcgcatgaaaatttgg

SEQ ID NO: 528032 - DNA, 133 bp, Homo sapiens
cgtcggaatgaaatgagggtgggcaggcctgagctccaaaaccttctgatggcccaagccctcctggtctggctgggattatctccacacaaagggagaaacgggacaaggtggtcatggaggtccctgaaag

SEQ ID NO: 528033 - DNA, 506 bp, Homo sapiens
aattttttttcttattcttttttcttttttatagactatttttacctttattattttggactcttggggaacaaaatttttactttggagtcacattgaccagccctattttttatttttgggacatttaaaaatttctttgacatgtattttggataattggaaaaccataatgctaactgttgccaaagggaggtcaccatataactggggccctattttctttaacaaaggggtttaatttaaaattttttactgggcgttttaaaaacatgtttttaaaaatcaattctggcaagggatcctggggaaaaaaatttgtgtttactctttagggattaagggatttagggatctttcgtgatgtcccataacatgcatgaacactttaaagttctctaatttaggcgctgggtgtcttgttattggattttaaaacgttatacaccgcttgccaggcttgttaaaacttcaatacactcttgccagggctatttttacttgag

SEQ ID NO: 528034 - DNA, 106 bp, Homo sapiens
  misc_feature (7)..(7): n is a, c, g, or t
atctatnacttcttcccggaccaaagtgatagttaagggagccacagccatttctgctcttccatagagcagctctccaagcatgccattccagggcaagttgtat

SEQ ID NO: 528035 - DNA, 185 bp, Homo sapiens
tcttttctgctgctgctccccggcagccagttctgatggcccagatggcaaccactgcagctggcgtggctgtgtgctctgctgtggggcacacattgtgtcacgccattactggcgtcttcagtggaggaagtaatgctgagcctgcgatgcctgacatcacttaccatgagcctcagggaacc

SEQ ID NO: 528036 - DNA, 228 bp, Homo sapiens
tggtatggggcaatgagtgcatcagctgcaagcatactccacactctccttcattcactggaggacacagagctaaaggcctacagaaggccttacagtcatataacagtaaatagcagagtaacatctttatacacataaactgttagaaatgataagtgtaaagttgtgcgtctcctgcggctcctgaactcgccgattcattatgaatagcatcggaccagccat

SEQ ID NO: 528037 - DNA, 300 bp, Homo sapiens
atgtttaggcagtctcttgggagaaatgcacagtttgacatcgttcatgaagagcctctccacggctcctgcgcctgagacagctggcctgacctccaaatcatccatccacccctgctgtcatctgttttcatagtgtgagatcaacccacaggaatatccatggcttttgtgctcattttggttctcagtttctacgagctggtgtcaggacagtggcaagtcactggaccgggcaagtttgtccaggccttggtgggggaggacgccgtgttctcctgctccctctttcctgagacc

SEQ ID NO: 528038 - DNA, 199 bp, Homo sapiens
cgtcaggccactaagtcgtcgttccggtgcggatgcgttctgcaccgagtgcgcggggtcgatcagcccttcgcgcacggcctttgtagaacatcgtgccgtggttgagcgagtctggcgcgtcgtcccggccaagtgtcgcagtgggcgtcgaagtggaccagcgccagggttgcccgaaagcgcccgggttgggcct

SEQ ID NO: 528039 - DNA, 1596 bp, Homo sapiens
  misc_feature (721)..(721): n is a, c, g, or t
  misc_feature (1067)..(1067): n is a, c, g, or t
  misc_feature (1254)..(1254): n is a, c, g, or t
ctgcggtggatgattttcttcgtcgcggtgcccctcacccgaccctgcgttcctctgcggtggtaatcatctcgccgggggatagcatgacggggccctctctggtttgtggggcaacaacatgtgagggagggccgcgtgaggtagaagcggcctctcttcctccgtgttgtgtagactcgtttcgctgccccgccgctcccgtatggaggaggtttgtttcctcccccttttcgtatgcgcccctctgttgagtggctcccccaccagggccgcaaagggggccgcgggggctctcttctcgttgctctcctcggggacatatgtggggtgtgggatagaattatcacccccacggggggggcacacacaacccacagcttgtttgtggggcccccctcacggaagatatgttgttgccgctgtttggtggttttgtttttgttgttgtcgcgcaccaacaaccctgtggggaggactgctgtgtggtgcgcccccttcctctaagagtagggcgccccatctgtagtggtccctccccccctcttcttctcctctgcggtcctccctcaccgtggttattggtgcctctcctcgcgcgcttattattttggtgggcgccccaactatctccgcggggagtcccccctcttggtgtcctccctgcgcccccctttattggtagctcgccccctctgtgccccgcgccgcgcggacgaanagagaggcgcgcgctctcttggagtacagcgccgctccgccgctcgtctggtggtctgtgggagagagctctattattaatgggcgcgtccccacgagtagtgggtagaccgcccccgcgacttatgtgcgcgtcggaagagggcgcctcctcccgtcggcgggggtctttcttcacacgagagcttctgtcgtctgcgtgttatttgttcacgcgccctcacacggtggcgccacaccacactcccgtgagagagtttggagcgcccccccccctcggataagatagagagcgcccacacacagaggtgtctctcacacaggcgcgctctcctcgtctctcacanatgtggagagagagctcacacagagcccacactctctgtgtacacacagactcctctcatgtatagagagagttttatgagagtgtacacacactttcctctttatgagcgctgtctctccccgcgacaccctcgtgataaccacacttctcccccctctcccatctctggggggtgtgtgtgtgtnaagagcggtgtttgtgtgtgttgagagtgcgcacggcagagcctctcttccacgcgagactcttctctgtgttgtgcacagagagaacacccctcgcgagagtgttgtgtgtctctgtgtccctctggctgtggtgcccacagagagtgttgtgaagcctgtttgttgagaaggtgtgaggagccacctcacgagatatggccacaagagcccccttctggttttttgagtgagaaatgttcttcttcttttcacgagaagaagaagagagaagagaggggcacacttttgagaaaataaggccaaaaattgtaaatgggtgttccaaattttttagaagga

SEQ ID NO: 528040 - DNA, 715 bp, Homo sapiens
agctcgctgcagcctcaaacttttaggctcaggtgatcctcccaccttagcctcctgaggagctgggtgcacacgccaccatgcctggctaattatttatttatgaggcggggtcttgctttgtcacccaggctggagtgcagtggcgcaatcttggctccctgcaacctctgccttctgggctcaagtgatcttcccacctcggcctccggagtagctgggaccacaggtgcatgctgacacacccagctaattttggtattttttgtagagtcggggtttcgtcatgttaccgaggttggtctcgaactcctgagctcaagcaattcacccacctttggctcccaaagtgctggacatgcaggtgtaagccaacatgctgggtgtgtttttaaaccatttttttgtagagacaggttttgctaatctgtccaggctggttctcaaaattcctgggctccaggtgatggtcccgcctgggcctcccaaagtggctgggtaccggattaaaggtcaccaggttcagccaaaattcctaaaactggataggatattccaaatttccaaattgggatcccctttccggtccgggttacatttttccccccagaattgaattactggggggaccccggaggaatttctactgggtgccagtgaccggtagggctatgacccaaagcttgggaaatttggcgcaggcaaactttctatc

SEQ ID NO: 528041 - DNA, 260 bp, Homo sapiens
  misc_feature (3)..(3): n is a, c, g, or t
  misc_feature (115)..(115): n is a, c, g, or t
  misc_feature (134)..(134): n is a, c, g, or t
  misc_feature (211)..(211): n is a, c, g, or t
  misc_feature (234)..(234): n is a, c, g, or t
  misc_feature (245)..(245): n is a, c, g, or t
tcnactcggtacccgggaggggactggtggtggcggcaggatagttcagacgtctctatttcctgagcgtctgagatgttagtattagttagttttgttgtgagtgttagaaaanggcctacaactaggaagcnataaggaaaatgattatgagggcgtgatcatgaaaggtgataagctcctctatgaaaggggaagtagcgtctgtaanacctacttcccctatcatagganaacacaccaanaccagaagagcacac

SEQ ID NO: 528042 - DNA, 940 bp, Homo sapiens
  misc_feature (2)..(2): n is a, c, g, or t
  misc_feature (67)..(67): n is a, c, g, or t
  misc_feature (254)..(254): n is a, c, g, or t
  misc_feature (280)..(281): n is a, c, g, or t
  misc_feature (286)..(286): n is a, c, g, or t
  misc_feature (333)..(333): n is a, c, g, or t
  misc_feature (347)..(347): n is a, c, g, or t
  misc_feature (531)..(531): n is a, c, g, or t
  misc_feature (545)..(545): n is a, c, g, or t
  misc_feature (563)..(563): n is a, c, g, or t
  misc_feature (570)..(570): n is a, c, g, or t
  misc_feature (576)..(576): n is a, c, g, or t
  misc_feature (581)..(581): n is a, c, g, or t
  misc_feature (591)..(591): n is a, c, g, or t
  misc_feature (601)..(602): n is a, c, g, or t
  misc_feature (608)..(608): n is a, c, g, or t
  misc_feature (641)..(641): n is a, c, g, or t
  misc_feature (650)..(650): n is a, c, g, or t
  misc_feature (702)..(702): n is a, c, g, or t
  misc_feature (721)..(721): n is a, c, g, or t
  misc_feature (734)..(735): n is a, c, g, or t
  misc_feature (759)..(759): n is a, c, g, or t
  misc_feature (778)..(778): n is a, c, g, or t
  misc_feature (782)..(782): n is a, c, g, or t
  misc_feature (812)..(812): n is a, c, g, or t
  misc_feature (826)..(826): n is a, c, g, or t
  misc_feature (829)..(830): n is a, c, g, or t
  misc_feature (845)..(845): n is a, c, g, or t
  misc_feature (857)..(857): n is a, c, g, or t
  misc_feature (924)..(924): n is a, c, g, or t
cnttacattccatccaaagaaggtaatccggacgtggtgagggatgcgtccaggtgggagctccgancgctggtcctgagtgggctctgatgggtgggagggcccaggtcctgcctgcccacccaggccccacatgccagggcgcgtgtctgcatggccacccacagctgaaaacaggcgtgggcgatctgaagccctgtctgtgttctactgtggcagaaagtgccccagtccttccagcggttttgggagcngggcctccaggagcgcagggctgagnnggggngggggggggggtgacagggggggcctttgtgaagggggagggagggngcggcgcgaaaggnagggagggagcgggggaggggtcttgactcatcttaacaaggctttggggcaattctgtgctatggaggccctgccagcccctcctagtagtccaatagggaggccaccggggacaggcacggggtggccgcagggggtgctgctggcccgggcttggcggctggggtggggggtccctggggntcccgccgccccgnaccgtccctttctggtgnccaaccngctgcnaggcncctgctggcngttctggggnntggggnaggggcgctggctgcctcaagtgtcccctcccnaaggctggngccccccgcatgtggctccgcactccctggtctttggtgctttcttgcaaanctcctggtggtggcaaaancccatgggggaannaagggggtcttgccgtgcaatccnagcccgtctgtccccagcnggangtgtggtgctggctcaatgctgcctccctngcctgtctgtcccnccnntctgcctctggctcnaggctggctccnagcccccgtctccctgtgtgtcggcttgttctggggtgggtgttgctctgtctccaaatcccttccngcctgggccgcgccta

SEQ ID NO: 528043 - DNA, 1014 bp, Homo sapiens
gctacgtatgctactatcatttaccatctcgacttctaggaatactacctatatcgttcacatctcatatcctccctacgatgcctagaatgactactaatatcggtgtgcattctagctactctaacataaacctcaacaccgatctctctaagccagtattgtgccctatagccatagtagtcgtcgccgggctgcgaagcatggtggcccgtagtcctaactagcgccaatctccgagaagatattggactatgacggactgtaacataaacgtaaacctacgtccaatagatacagactgaatgagtcccaagcaatatatatcacgtgactcgacttggaacatgacttatccaaggaatcacatgaattcgaattcaagcacgaagtcaaaccaacgagacttgaatgtgattcagcatcatccaccgcttgacatatttatgaaaccagaattgcaagaaagcaaccctattgtagttgttcgcccgaacctgtatccctccgatcccccctgaacagacacgcaccctgcactaatagtaactaacggagaccgaccacatcacagatccatggcgaagggaacgccactatatatccgagagccagttatcacagacacaagagctactggcatatagtaatctacccatagagaagggtcgctgatcataacgatttgcagacgcagaaaataatcagtattaagatctatcgtaagaaaaaatgtatccggtactgggagtatactagccgaggaggagaccaagcgaaggaacggaagcatagggatacgccaataaactaaagagtcataccgtagtaggggaaaatataccaaacacctagggagaaaagtgagaaaggccagggcgaaatggacggccaaggaagcagcacaggagagaaaaccagggccagtacaagggccaggggcagagggataggggaaactcgaaccagcaggccagaccacaaaaaaaagagaccggcgcccaccaccacgag

SEQ ID NO: 528044 - DNA, 383 bp, Homo sapiens
  misc_feature (18)..(18): n is a, c, g, or t
  misc_feature (158)..(158): n is a, c, g, or t
  misc_feature (179)..(179): n is a, c, g, or t
  misc_feature (191)..(191): n is a, c, g, or t
  misc_feature (196)..(197): n is a, c, g, or t
  misc_feature (199)..(200): n is a, c, g, or t
  misc_feature (207)..(207): n is a, c, g, or t
  misc_feature (210)..(210): n is a, c, g, or t
  misc_feature (218)..(218): n is a, c, g, or t
  misc_feature (220)..(220): n is a, c, g, or t
  misc_feature (225)..(226): n is a, c, g, or t
  misc_feature (228)..(228): n is a, c, g, or t
  misc_feature (231)..(231): n is a, c, g, or t
  misc_feature (234)..(235): n is a, c, g, or t
  misc_feature (241)..(241): n is a, c, g, or t
  misc_feature (252)..(252): n is a, c, g, or t
  misc_feature (261)..(261): n is a, c, g, or t
  misc_feature (273)..(273): n is a, c, g, or t
  misc_feature (282)..(282): n is a, c, g, or t
  misc_feature (285)..(285): n is a, c, g, or t
  misc_feature (288)..(288): n is a, c, g, or t
  misc_feature (294)..(294): n is a, c, g, or t
  misc_feature (300)..(300): n is a, c, g, or t
  misc_feature (311)..(311): n is a, c, g, or t
  misc_feature (319)..(319): n is a, c, g, or t
  misc_feature (327)..(327): n is a, c, g, or t
  misc_feature (332)..(333): n is a, c, g, or t
  misc_feature (336)..(336): n is a, c, g, or t
  misc_feature (340)..(340): n is a, c, g, or t
tcggtagtgcactggctngaggattgagctatggaaagaatggtaggagacggaatcagaggagagcaggcgacaggtcaggctgggccccataagccttgagggtttcagctgggtagtgacactgttaaaaaatattctggccggagtgcaatggntcacgcctgtaatcccagcantttgggaggccnaggcnngnngatcacnagntcaggagntngagannanccnggnnaacacngtgaaaccccntctctactnaaaatacaaaanagccgggcntgntgncgtgcnctgtantccagctactngggaggcngaggcagnagaanngcntgancccgggaggcagaggttgcagccagctgaaatcatgccactgc

SEQ ID NO: 528045 - DNA, 415 bp, Homo sapiens
cacactgggaatgagcatatctgtcttagataccgaacacgaaggctgtggactacctatggagatattcaccctttgactttggtggcctgatcaagaattgggtgtggacgttggccctgtttgcttttaataacccaaactctctcggaaaccccaacaaaaaaaatttaaccccattggtgttcctcttgttctaatcttgccaaccggggcaggggaccgacaaaattccagttttttatttccaaaaggttgggaaacagtataattggacaaagaaaaatgtttcttctttttttttgctgcccaccaaaaacaaacaaaatgctttttgttttttttttttaccaatcccaatttcaaaatgtcccaggggggctaaaaaaaataaactccacccctctttttgata

SEQ ID NO: 528046 - DNA, 448 bp, Homo sapiens
gtaggcatcaagcaatggatcaggccagtcgatcccgacctgtcgtagatgtggtacaaacatttggcggtagtaatatccttcaatggtgaaaggagtattgaagggaaatttctgggctgcatttgccatcattgcatcatcaacctgatgttcaacgtattcctgtaaaatcttaaaccaggaattcttacctgcagtaataccatcactgaaggctcctttaggtcgccagagaatctctttgggtatcagatcggaatcctcaaacgtctctctcaggagatgtttctctatcccattctttggaattctcatttctggtggcagagacaaggtaataggcagacactccgcatgatctagaaatgggactctcagttcaagaccatggccagcagtagttcgatctgcgcggagaacatcaaaccactagaagtccctcaga

SEQ ID NO: 528047 - DNA, 148 bp, Homo sapiens
cgcttttcccccccccccctttgccttgttccaagctctttcttttcaaaatacttttctggttttcatagggggggtttttatttttctaattagccccccgtggggatgttttaaagaagcccccgtgtttttgtgttgttggcca

SEQ ID NO: 528048 - DNA, 197 bp, Homo sapiens
caccccagtgtacctccaccaccacctggtcgtccaaattcccaacatttttcttctgtgtgtattctgaaacagaagttcctctcgtagaagcactgaattctcccacccttatgccttttctttaatggcccttcttgacatggtttataggtaaaaaacatgattccaggaactttttacacaagacatcccag

SEQ ID NO: 528049 - DNA, 481 bp, Homo sapiens
  misc_feature (158)..(158): n is a, c, g, or t
tctcatgtgatttctacaaagagtcatatagggtctttgaatttagaccaaaatattaaaaataatcgatctataaggcagaatggggtcaggatgaggcaaggtggaggttggagctgtgtgcatgaaggtccactccactagttgctggaggtggnagactcctggactggtgatgggctctgccagacaaaggacgctcattcattatctcaactatcactagtggttactatgtacgcctattttcagcacctactatgctctgatacttagtatttaactggccttataaggtagagagctgctcaataaggagaaatccccagaccgaacaggtcccatctgacccctgaacgcctgggtttatgtggcaataagtctgttggaatcagagtaagggacaacagcagacagagtaaaggagtatataggttcttagtcagtcctgtcagtcctccaggaatcaggaattacctaa

SEQ ID NO: 528050 - DNA, 846 bp, Homo sapiens
tatcggtggtggcacatgcctgtaatcccgagtaggggatacaaggcatccgcaccactcccagctaatttttgtatttttagtaagacggggttcaccatattgtcaggtggctcgaactccctgacctcaggtgatgcactcaccttgggctcccaaagtgctgggattacaggcgtgagccacgcacgccgtggcctagggatgtcttgacttcttcacttgaggtcttctgctggggtcatcttgccgccaagatatctctagcagtctggtaaggcaaaaaagccatataagttaaaaagcacatcatcattattggtcataggaagatgaatcattttccacaattctgtgtgtgatctattttgcaggccagacgaggtatcagagattacggtcgcggcgttcctagggtaacttgagattgggtcatattctgaccaagggcaaacggcaggttgctgaagcgccggagaatcatttgaacctgtgaggcgaaggatgcggtgaggttgcgatttgctccaaggatgggaaacttccggttctccagacataatggcactacacatagcctaatactagctatgttggcgcgtgcaggtcccacgaaaaatacttagcacacaattgtttgaggctaggcgcaccccaaactagcatgggcaaaagacaacagaggtgtacctaagtaccgtcggtctgactaggtgtgttctctccacaataacaagccgggccaccgcgcatttcaacaacccagggcctgcgcatagtgggctcacaagcgacgagggagtaataacaccgcgcggtaacagcggacgcacccactaatcggca

SEQ ID NO: 528051 - DNA, 204 bp, Homo sapiens
  misc_feature (174)..(174): n is a, c, g, or t
gtttgaccttttgcagaaaagaacaagagggaagacagaccttcaggctgggtgcagtggctcatgcctgtgatcccagcactttgggaggccaaggtaggaggatcgcttgagcccagggattcaagaccagcttgggtaacatggtaaaaccccatctctacaaaaaacagnaaaaattagctgggcatggtgtgtgtgcct

SEQ ID NO: 528052 - DNA, 453 bp, Homo sapiens
gctactcgggaagctgaggcaggagaatcacttgaacccgggcagcagaggttgcagtgagctgagatcgtgctactgtactccagcctgggtgacagagcaagacgccatctcaaaaaaaaaaaaaaaaaaattcaaacagcatggaatagataaaaatgcaagactgggcgcagtggctcacgcctgtgatcccagcactttgggagggtgaggtgggtggatcacttgaggtgaggagttcaagaccagcctggccaacatggtgaaaccctgtctctactaaaaaaatacaaaaattagcagggcgtggtggtgagtgcctataattccagccacttgggaggttaaggcaggagaatcacttgaacccgtgaggtggaggtttgcagtgagccgagatcgcgccactgcactccagcctgggtgacaagagtgaaactcggcctcagg

SEQ ID NO: 528053 - DNA, 1233 bp, Homo sapiens
  misc_feature (282)..(283): n is a, c, g, or t
  misc_feature (291)..(291): n is a, c, g, or t
  misc_feature (678)..(678): n is a, c, g, or t
  misc_feature (696)..(696): n is a, c, g, or t
  misc_feature (699)..(700): n is a, c, g, or t
  misc_feature (705)..(705): n is a, c, g, or t
  misc_feature (709)..(709): n is a, c, g, or t
  misc_feature (715)..(716): n is a, c, g, or t
  misc_feature (718)..(719): n is a, c, g, or t
  misc_feature (736)..(737): n is a, c, g, or t
  misc_feature (746)..(746): n is a, c, g, or t
  misc_feature (748)..(748): n is a, c, g, or t
  misc_feature (758)..(758): n is a, c, g, or t
  misc_feature (762)..(762): n is a, c, g, or t
  misc_feature (771)..(771): n is a, c, g, or t
  misc_feature (783)..(783): n is a, c, g, or t
cggcgcccaaagtgctgggatgacaggtgtgagccccgtgcctggcctggtcatttctcttgctgtgcccaacctgccattaatcccatccatcctgagcccgacgtggtcatttctctcaccacccagcctaccgcccgacgtggtcctttccctcaccacccagcctaccgcccgacgtggtcctttccctcaccacccagcctaccgcccgacgtggtcctttccgctcaccacccagcctaccgcccgacgtggtcctttccctcaccacccagcctnncgtcgggnccagtgttcatggaggcctctctgagtctgcattcgtactcttagcaagaccttggatacgaatatgagggccccatattcttcatagagtatattgtctcgtgtttcattactcttcgtgtcttctcggtttggacgagcacaaagcactacgcatccgatgtgagactatgtcccagcagtcgtcgacgaactacagcctattcaccattgtggaaattctgtctagtaggtcgaggacggaggtctcgactctgtactgcccagagcgtggacgtgcaagataggtcgcagtcgtatgggcgtcactgacgaaggctctgaactcgccggagttgcacgccgattcgtccgtgccctcagtctcccaagtagctgggactacanggcgtcgtgccaccgggnccnntgctnacantattanngnntcgtcttagctagaganngcggatttnancctggattangccnaggatggtnctctgagtcgtnccttgacctcaattgatttccggtccctatgcgtttggtgttcttcccccataaaggtgctttgaggactattacattgaggtgttgaaggcccaatgaactatcccggtgggccttggggggcacttttcctttgatgattccattcctttgcttagatgtgccttacttaggaatggcaaaaaaggctgtgtatataatggaacacaacccgggggtgtactagtagaatcccctattgggtcagttggactcaagcgtgtttgaacacgcagacaactataggcgtgtagtgtagacacacaactactggatttacacattggtcatggcccctacaaaagcaccactccagttgggggtgtaggaacagggcactatgtactagttgccacaagattatacaagacacagtcgtcacaaaaaattatagcctgtagtgaacccgat

SEQ ID NO: 528054 - DNA, 282 bp, Homo sapiens
ctagctgctaggggcgctcaggacccactgatcagcgtcaacctcagaggcaggtgcacaaggaggccgatttcctgtcacgatgtgggacttcatctctttacagtttctctagtgaacctctctaagttcagaactctgtgcttactaatgtcatctgtacatatttcctaaacgtgattattttaatatgaaaacctattctcctgtgtacaaaatgcggattgatccttacagaggagatgaaaactcctcaaccatggtcaccatgatcagagttct

SEQ ID NO: 528055 - DNA, 399 bp, Homo sapiens
gatgcagtccctgtcaattgtggtgatcactccccctttcacagtggcatcatcttgagccacagtcactggattgactttgctgtctaaaactactgacagggagcagcccccgggtcgctggttggtgggcccccaatgacacccatgccagagaggtggggatcctgcctaaggttgtctacgggggcacttggaggacctggcgtgctcagacccaacagcaaaggaactagaaagaaggacccagaacggcttgctttcctgcatctctgtgaagcctctctccttggccacagactgaactcgcagggagtgcagcaggaaggaacaaagacaggcaaacggcaacgtagcctgggctcactgtgctggggcacggcgggatcctccacagag

SEQ ID NO: 528056 - DNA, 1210 bp, Homo sapiens
  misc_feature (259)..(260): n is a, c, g, or t
  misc_feature (268)..(268): n is a, c, g, or t
  misc_feature (655)..(655): n is a, c, g, or t
  misc_feature (673)..(673): n is a, c, g, or t
  misc_feature (676)..(677): n is a, c, g, or t
  misc_feature (682)..(682): n is a, c, g, or t
  misc_feature (686)..(686): n is a, c, g, or t
  misc_feature (692)..(693): n is a, c, g, or t
  misc_feature (695)..(696): n is a, c, g, or t
  misc_feature (713)..(714): n is a, c, g, or t
  misc_feature (723)..(723): n is a, c, g, or t
  misc_feature (725)..(725): n is a, c, g, or t
  misc_feature (735)..(735): n is a, c, g, or t
  misc_feature (739)..(739): n is a, c, g, or t
  misc_feature (748)..(748): n is a, c, g, or t
  misc_feature (760)..(760): n is a, c, g, or t
ccgactctagagcgatccccctcaccacccagcctaccgtccgacgtgtccctttccctcaccacccaccctaccgcccgacgtggtcatttctctcaccacccagcctaccgcccgacgtggtcctttccctcaccacccagcctaccgcccgacgtggtcctttccctcaccacccagcctaccgcccgacgtggtcctttccgctcaccacccagcctaccgcccgacgtggtcctttccctcaccacccagcctnncgtcgggnccagtgttcatggaggcctctctgagtctgcattcgtactcttagcaagaccttggatacgaatatgagggccccatattcttcatagagtatattgtctcgtgtttcattactcttcgtgtcttctcggtttggacgagcacaaagcactacgcatccgatgtgagactatgtcccagcagtcgtcgacgaactacagcctattcaccattgtggaaattctgtctagtaggtcgaggacggaggtctcgactctgtactgcccagagcgtggacgtgcaagataggtcgcagtcgtatgggcgtcactgacgaaggctctgaactcgccggagttgcacgccgattcgtccgtgccctcagtctcccaagtagctgggactacanggcgtcgtgccaccgggnccnntgctnacantattanngnntcgtcttagctagaganngcggatttnancctggattangccnaggatggtnctctgagtcgtnccttgacctcaattgatttccggtccctatgcgtttggtgttcttcccccataaaggtgctttgaggactattacattgaggtgttgaaggcccaatgaactatcccggtgggccttggggggcacttttcctttgatgattccattcctttgcttagatgtgccttacttaggaatggcaaaaaaggctgtgtatataatggaacacaacccgggggtgtactagtagaatcccctattgggtcagttggactcaagcgtgtttgaacacgcagacaactataggcgtgtagtgtagacacacaactactggatttacacattggtcatggcccctacaaaagcaccactccagttgggggtgtaggaacagggcactatgtactagttgccacaagattatacaagacacagtcgtcacaaaaaattatagcctgtagtgaacccgat

SEQ ID NO: 528057 - DNA, 462 bp, Homo sapiens
gatgcattaaaatgtagatagcacctgatgacgtgagaaatgcacctgatgatgtgagaaagttttcacgtaacttccagataggtgaccgtgaggacatgtgtaaagaagttcctatatgttaatgggggtgtttgtcgcctcctcttatagacaaaacaagccttgaaacaatttttcactggttatatttagtaagtgcatgtgcgtgcctgtgtagattttttacttaacgtagaatgaattactgtccctttttctttactctggagcacatttacgtaaagcacttgccagttcagacttatttagtggttcagccacaatggaaaggatgcctcttgagtttatcttaccagccttcctttccttgtacccctggtgaaagcccagtctgttctcaacctccagaggcctgcttgaaaagacttcagctttagtcacaggggttttatactagct

SEQ ID NO: 528058 - DNA, 659 bp, Homo sapiens
tggcgctccggtgggctgctcgctgcatctctgtggctgttttgtgctctgccacgctgggcagtgctgcctgcgcctttctgcaacctcctcggacctgcgtggtctcgatgctgggtgagcgatgcgggcgtggctggtatgtgctggcctgggctgcgaccggctggctacgactattcttttggccgggtctgtgcgctgatgtgtgtctgtgcttggtgcacgatgtgcactgcttgctctgtgtctgcctgcatgtgctttgatccctgcctgtcacacttccctgtggatgcagttgattgttttgggcaaacttcttgctgcctgtgtggcccttgcggatcctgctgatggctgtggctccgagcctgcttgcctaggcaattttgcaggcactgacctggctgcatccaaaggatgtgaccaagggcagaactatacaaacgcgctgtgaaacacgggccacgactgcccagctggtacccaaaccgaaagcccggcggggaccccctgggtttgccctggctggcattgggcatgggtaacttggagatggtcccgtggggaagaccccacggcacgggagggatcttaagccggcaaagcagagccaaggagggcgcctgagaaggaatcggaaagaaccggcaggt

SEQ ID NO: 528059 - DNA, 255 bp, Homo sapiens
  misc_feature (50)..(50): n is a, c, g, or t
ggtggtgcatgcctcgctaatcccatctatactagcgcaggaggccgagnaggagaattgcttgaacccaggaggcggaggttgcagtgcagccagggattagtgccattgcaccagcctggcaagaagaacaaaactcatctcaaaaataaaatgccaatccaagtcgaatcacctcttgttttaactagatgaatcattactgtgtatgtaggtataaactgttcaccagtaagtaagtgttcacttacaaca

SEQ ID NO: 528060 - DNA, 840 bp, Homo sapiens
  misc_feature (28)..(28): n is a, c, g, or t
  misc_feature (66)..(66): n is a, c, g, or t
  misc_feature (137)..(137): n is a, c, g, or t
  misc_feature (220)..(220): n is a, c, g, or t
  misc_feature (361)..(361): n is a, c, g, or t
  misc_feature (380)..(380): n is a, c, g, or t
  misc_feature (444)..(444): n is a, c, g, or t
  misc_feature (451)..(451): n is a, c, g, or t
  misc_feature (462)..(462): n is a, c, g, or t
  misc_feature (467)..(467): n is a, c, g, or t
  misc_feature (487)..(487): n is a, c, g, or t
  misc_feature (526)..(526): n is a, c, g, or t
  misc_feature (532)..(532): n is a, c, g, or t
  misc_feature (559)..(559): n is a, c, g, or t
  misc_feature (564)..(564): n is a, c, g, or t
  misc_feature (573)..(573): n is a, c, g, or t
  misc_feature (576)..(576): n is a, c, g, or t
  misc_feature (581)..(581): n is a, c, g, or t
  misc_feature (586)..(586): n is a, c, g, or t
  misc_feature (596)..(596): n is a, c, g, or t
  misc_feature (608)..(608): n is a, c, g, or t
  misc_feature (631)..(631): n is a, c, g, or t
  misc_feature (737)..(737): n is a, c, g, or t
  misc_feature (776)..(776): n is a, c, g, or t
  misc_feature (828)..(828): n is a, c, g, or t
tatgattgatgagaaatcctaaatttgntttattccataaagtttaagaaataggtcaggtttggnatctgtttatctccaccaatccctttgttaatcaacacgttgtggatgtgcaaatgccagcaactgttttntttaggaaaacaggcatggcaaagcaatagtcttttccctgggtcacaaactgagcatgtgacagagctgaaaacagcgaaanagatttactgtctggagtcccattgggattctacttcctcaacagggcctcagggcatctgttttattttaaagtactctgggtcataatgacttaattgtgacttttatttaactagcatgttcatgtaactagaatgcncctgtccatgggttttaanatgtcatactgtgctatttttcttaattctgtaggggtaacaagtaactcagtaatgacttaanacttgcnatatattttcnatacnggggtaagggttttgacccnccttccgacgggcgcgttttggcggttggtgttgcgcancattgncaggccgtatgccgggggatgtttgcntccgnggccttggnggngatgnctgtncaggggcctncctcccgcctgntgcttcccccttccccctgattntttgacagttgacagctcatcagttttcttctcacactggcttttttgattgcccattggtaggaatttcttccattaacactgctgatagaagtgtcttactgtnggctcaccctttgctctgcccttctgaggtccttctgcngcttatcttttgtcacttctcctttgtcaactgatctctagtttgtccctcnggtataccaagg

SEQ ID NO: 528061 - DNA, 421 bp, Homo sapiens
  misc_feature (5)..(5): n is a, c, g, or t
  misc_feature (188)..(188): n is a, c, g, or t
  misc_feature (253)..(253): n is a, c, g, or t
  misc_feature (259)..(259): n is a, c, g, or t
cgtantgagttctcactaacctcaccccagtctcagccctggaccacagggtctcttcgcacaagttctaccagagccaccagaaaagaggccttgtctcctccaggagctgaggtcagcaaacaatgtgcctgggaagtcaaactttggcctccaaagctgtttttataaagcacggtgttcctggnaacgcagtccacacccattttgctcccatatgggtctgtggctgtagtttctagctccagtggcnagagcntgagtcactggcgataggagatcgcatgtgctcacataaccctattatatgacccgtataggagggagtgtgccggaccccgtttctagaaagtaggatctcttcattcatcctgggaaaccttcttctgggggattcttctagaagtcgacctgcgaggca

SEQ ID NO: 528062 - DNA, 167 bp, Homo sapiens
tagctgatctcaactctcctgggctcaatatttcccctctccgatgactcaagtgctgtaattataggtgtgagccacggtgcccagcctacggcgtgtttttaggaaccaggatacaattgagcttagtgtatggccattatgtctatttagtctcctttgtgtat

SEQ ID NO: 528063 - DNA, 1105 bp, Homo sapiens
tccaacctgggcaacagagcaagaccctgtctcaaacaataaagagaaaacaaacaaagaagaaagacactattaagtctgggagaatggccatccacatttatgggaaacacgtggctggtcatatctgggtggatttacggtgcgtcgtttacacgaataaatcttcatagagatggaggtaatcccggttatataggagcatggaaactggagggcccttggggagggtggacttggcaagagattctggttggaaggtagttcatcaaggttggctaccaagagtagactggtcttccattggtggtgggatggctggaaactggaaccccaagaaagggttatggtggaaggccggacatcgggcctgggctggcctgggggaccgcaagggccctgggacattggctggaagaacggagatggccggggcctggatggcgttatggcggggagcgggtactccgggcctccaaggccatctggacaggggcggcccggattgcggcttgggttggccttggcactttggaccggtgggaggacgggccggtcctcattggagaacccttcgtcaaccctggggtggctgaaggtagcagtggggtcccaagttggcaacaatcattctaccaccccaggaccatagcggagggttgccattgccaaaggctgggcaataccgggctgtatagcctgggaagaggcgaacacgggacacaagggagtacccggtgggtcgccattggagcagaccccgtggtacttccaaggaacgggtgcccttcaacatgacttctgggagagaggggggcgaccttaaaccaaacctaattcacaacccaagtatacccgaaggtcgggccaaggacactcgagggcagtctccgaaaggagacccacgcacagggggggtcaacaaaacgtatacacaagaatgatgggcacaggagatcacccacgggggggccgtcacaccaagtggcaggaagaccggcagcaagacacagttgtgcagccctaagtgagggcgggagcccaaagaaggcagaacaaggagccaagaggagaatgtgcgacaagcagagagaaagcgacagag

SEQ ID NO: 528064 - DNA, 103 bp, Homo sapiens
gcggcatctgttgacatgcatcacgtgtgtcatgatgtgcttctggaggctcatggcctgcacattgtggcatcatccacccaatccacaggccagagcctcc

SEQ ID NO: 528065 - DNA, 445 bp, Homo sapiens
aagaagaagaagtttctggcttaaaggaggaaggtgctggccattgaccacttgaatgaagatcagctgagggagaaggccaaggagctgtggcagagcatctataacttggaggcaaagaagttcgacctgcaggagaagttcaagcagcagaaatatgagatcaatgttctccgaaacaggatcaacgataaccagaaagtttccaagacccgcgggaaggctaaagtcaccgggcgctggaaatagagcctggcctccttcaccaaagatttgctcctcgcttgcacctgcctccggcctgcactcccccagttcccgggccctcctgggcaccccaggcagctcctgtttggaaatggggagctggcctaggtgggagcccccactcctgcctgcccccacaccccctcccccccagtaataaaaagcccccccaccctga

SEQ ID NO: 528066 - DNA, 133 bp, Homo sapiens
ttcgattgagagatactgaacgaaatgattaaaaagatgatgcaattgcaggcatggtggctcaccgtgtaatcccagcgctttgggaggttgaggaaggaggatggcttgagcccaggtgtttgagtgtcgc

SEQ ID NO: 528067 - DNA, 122 bp, Homo sapiens
tctcacagctactttcagagactgaggcatgacaatcttaaaccctgggcaggtggagagttgctgagagccgggatcgcaccactgcacttcagcctgggtgacagagtgagaccctgtct

SEQ ID NO: 528068 - DNA, 645 bp, Homo sapiens
taagcactgtggaaaactctgtaggctgattaatgaagatgtgagtgagcaggttatgcaggtattaggacctgaagacctccagaggtattgttttaaaagtttacaaagtatcatccagaatggctgggtgtggtggcacacgcctgtagtcccagctacttgggaggctgatgtgggaggatcatttgagcccaggagtttaagtccagtctgagcaaggcagtgagaccctgtctctaaacaataaaaattaaaataagtattatcgagagttcctggaggggtgaaccttttaaagactttcaaaaacttaaaaaaaataaaaaaaacacaaaagacaaaaaattgtgtggggcggcgcgccccgggcccccgaggaaaaggttttttgagaacccattcgcgtggggcggcgggggggcccacagatggggacaatgggcgaaatgtggggcctaaaggcgtggccccaaagaaaagcaccgcgggtcacggcacaacggggcggggatctccaccaaataaaaaaacaccgccgggggggaacacgagagggtttgggaacaactccacagagggggagtcccgggggccaacggggtcctttcaccagagggtgccaaaggagccaaaataaatacg

SEQ ID NO: 528069 - DNA, 859 bp, Homo sapiens
aaatcctccagtctggcaaagactggaatgggagcatgaattggaaacaggtcaagactcctggccataaatagtcttctcactttaaccaagatgtttgtctcatgcattctgacccaagaaggttactagtttccaggaggagaattggtgggacttttcagccctaaatgtgcttaaaggacaaaggaaggaaactcagtcacagaaacgagtggatggaaaaaaccattatgctattttctttttaatgtcatttcaaagcagtaatttggatagatgtcatgttgtttcctatgaatgccatggggttatatctggatgactaccttcctatgaccaaaaactaagagtgacatagtgataaattcacccaggtcagaagtagagtctgggacttttgtgtgtcagtctgctatttaacaccaaggcctttgtcctctaaaggtagaaaagtccaagaggagaaagcatgtgtcaatattattttaaatgacattaatttgatatccctaaatgaaaagaagatctttataaagacctttgtctctctcctgttacttccccatctatctacttttatctttcctctaaaagagctaagatgtgcagtagttgaatagctacctcacacaggatcttaagcagctgtcactgagctgagctctgagccagcagcttgacggcacacatatactctaacatgggttgttcgattttcgcccacgtggtggattgttgctgacacttttgccaatgcttggaaccctgttcaattgctccaaggggggcttcttgggaaactggagacgtgctggttgagccagtctcgtgacatctatggtggcattggcggcgg

SEQ ID NO: 528070 - DNA, 238 bp, Homo sapiens
cccttatattcaaaatgacattgaagaaactcatgtgtgacttaagacatatagataacaaaagtacatatcctggaatggaagaactcaataaatgaaataaaaagcacaactgagagcttcaacaatagactagatcaagcagaataaatgaatttgtaaacccgaaggtatcttaacccaggcagactaaacaaaaaaaaaggagaaagaaaccaagaaataagaaatattgaag

SEQ ID NO: 528071 - DNA, 195 bp, Homo sapiens
tgcagtaggtagtttcatcactcttaaagtattgatacagcaagcacacgatgcctgatgtactagcggtcagagcaggctgtactgctggtgctagagtctcatgtcagacagaaccaggcttttaatgaaggagcagggagagttaactcgttctctgtgttgaccccccttctctgagtctgctcagtccgc

SEQ ID NO: 528072 - DNA, 179 bp, Homo sapiens
ttttagtcttcagctatgtatccctggaaaagagcctgggggccaggtgtggtggcttatacctgtaatcccagcactttgggaggctgagacaggaggatcacttgagtctaggaggtcaaggcttcagtgagccatgatcacaccactgcagcctgggcagtggaagaccctgtctc

SEQ ID NO: 528073 - DNA, 327 bp, Homo sapiens
  misc_feature (42)..(42): n is a, c, g, or t
  misc_feature (107)..(107): n is a, c, g, or t
  misc_feature (116)..(116): n is a, c, g, or t
  misc_feature (186)..(186): n is a, c, g, or t
  misc_feature (211)..(211): n is a, c, g, or t
  misc_feature (240)..(240): n is a, c, g, or t
  misc_feature (256)..(256): n is a, c, g, or t
  misc_feature (318)..(318): n is a, c, g, or t
tgctgagcacccgtctccctgggcccacttttcttcctctanactttgtctctgtgtcttatttccttttctcagtctcttgtctccaccttgcgagaaataccaanaggtgtggnaggcaggcccccttcaatacgaaaaaaatctacatgggcctggactttttttctttaggaaaaaaaatcnccattatctggccaggcgcgaatgntggtgctgcggtcccagcactttgggaanccgaggcgggcggaangcttgagctcagaagttcaagaccagtctggacaaatatggcaaaaccccggtatctacaangtaaaaaaa

SEQ ID NO: 528074 - DNA, 350 bp, Homo sapiens
tactgtgcttcactttatcggtccctccagcagggtgagcaccttcttggaaggtctgcatacatcttagtgactgttcaccggtgggtgctctttgccatcgcggcatcccgctgcgtagggcgccggtcaggccactgaccttcgctatacaggtctctggctgtggagagatcccttgcgcaccactccccgcaagatggtcttcatctcagggatgccagagccgacagcctgaggggccaggatctgtgtgaatccggctgagaaagtgatgaggacaacagggtaggtgacccaggccaggtactggagcaagatgctggtgttcaagccccggtacatgcaag

SEQ ID NO: 528075 - DNA, 306 bp, Homo sapiens
aagagcgagatgggggtgaagctggaggtgtttcggatgtccctctacctcactttccccgtggttatgttctggatctccaatcaggctgagtggtttgaggactatgttgtccagcgtaagagggagctgtggccaagagagaaggagggtcagcgccaggagctagaagaatttaagcagaagatccggaagcagaaagaagagagacttcttcaagctgcccagcagagctcctgagaccttcagttcctcaagtcccagctcccttccccaccacagaaaataacacacactcaactctta

SEQ ID NO: 528076 - DNA, 179 bp, Homo sapiens
ttttcaagaacacttacgttttgaaaaaaaattttgaaagcaaattttaatgtttggtaaaatgctttccagggtaaaaaaagcaaaaatgatttttattttagggcattttaaactttcccccccccggttttaaagggttaaaaaatgttaaaaaaaaatgccatttataaaggaga

SEQ ID NO: 528077 - DNA, 435 bp, Homo sapiens
  misc_feature (2)..(2): n is a, c, g, or t
  misc_feature (5)..(5): n is a, c, g, or t
  misc_feature (25)..(25): n is a, c, g, or t
  misc_feature (27)..(27): n is a, c, g, or t
  misc_feature (187)..(187): n is a, c, g, or t
  misc_feature (283)..(283): n is a, c, g, or t
  misc_feature (294)..(294): n is a, c, g, or t
  misc_feature (300)..(300): n is a, c, g, or t
  misc_feature (306)..(306): n is a, c, g, or t
  misc_feature (331)..(331): n is a, c, g, or t
  misc_feature (400)..(400): n is a, c, g, or t
cngtnttatagacagtcaaacgacngngagccacaaatcaagcacacatatcaaaaaacaaatgagctcttattttgtaaactcattttgcggtcgctatccaaatggcccggactaccagttgcataattatggagatcatagttccgtgagcgagcaattcagggactcggcgagcatgcactcncggcaagtacggctacggctacaatggcatggatctcagcgtcggccgctcgggctccggccactttggctccggagagcgcgcccgagctacgcngcaagcgccangcggcngcaccncgaagccccaaggtacagccagccngggcacgtccacgcactctcctcagcccgatccgctgccctgctccgccgtggccccctcgcccggagngacagcaaccacggcggggaaaaaatccctaaggc

SEQ ID NO: 528078 - DNA, 969 bp, Homo sapiens
cgacccacgcgtccgacagatgttgatgaatgtgatgggaaccacaggtgccaacacggtctgccagaacatcctgggtggctacagatgtggctgcccccaaggctacgtccagcatcttaccagtggcatcagtgtgtcgtatgagaatagagatgctccaatcccaatgcctgtggctcggctctgtcgttcctgctacaatcaccctgcgggacgttcacaagtgcgtcctgcccctcggggttctccttcgactcagttctccatgtgcctgcacgacgtggtaactgagtgctcgtcctccaaagaacccctgcaattatcggctgctctaacacggacggggggctaccctctgtggttgcccccctgggtattaccatgagtgggacaaggccactgtgtctcagcgaatgggatttcaacaaggggcagtacctgtcactgtgatacacgcaggtcgatgagtgaaaatgctctgtccccagaagcatgctacgatgtgcaaaatcatacggctattctaacgaaagacagcaggcagaagacaagtattcatgaacctgatcccactgctgttgaacagcatcagcctagagagtgtcgacgatggacagccccgtcaacatgaagttcaaccctctccccaacttcgggttctaaagggaggcagcattcctggaacctaaggggcccgcgcatccaaggcccccttcagagaagcccacccattccggttgatggtcaatctcctccagggtaacggatgacacagccgtcttccggagttccaccacaggaatgggctcagctaatttgcacacgggcccaaaagaagtcatgcccgacatacacctgtgatcgagagtcctctttacgcaaaatagcttcgacacggcaaaagccagggggacacacaaggcagggggaggcaaaagagcgatccgtcaaaccgactggtcgaca

SEQ ID NO: 528079 - DNA, 427 bp, Homo sapiens
aaatagtgacgtaaagggggcgtgctgcgggctggggacatttgaaccggtcgcggcttgtaggagggggacgttggggaggtacattacacgggtttacaagttatggagataaccggcgacgctggttaaagggagcactactttgaggccgcatgttattagtacaacgaatggtatggtgcttaggtttaaacttcaagtcaaagttacgggaccggtttaagcacttagcgcatgggcggcaagggatactatgccgggtattacgggctatatacctaccggcattacgagtacggatattgcacaagcacggacgtagacggctgcggataccaggagaggcatggggcatacgacggcggcgaaaacaggggcaacggcgaaagttgtacgggtacgtggagagaatgcgcctgcgata

SEQ ID NO: 528080 - DNA, 218 bp, Homo sapiens
tgaacattcgtgtcctgcatacctgacacagcttgtgagtccctgcatgtacaccagtcattacaaagtgatcctgtaaagggtgagactttcaactaggcgcaagctagaagacgaggccagagcagctttcatagtaattagcagtgtgggaactgagggtccagtcaacacagcagaggacttcaggtgatgaggggccgtccccaggtggagtg

SEQ ID NO: 528081 - DNA, 561 bp, Homo sapiens
gttgcagactttgctgactgtgctccctgcactccactcaagatagagagttcaaatagtcttgaaggggagtcagcttcaggatggaagtgacccagggagaggccccgaatgtgggagggtactgtaaatacggactacggcgagtgtgcagagctctctgccatgatacttcctcgggactgacgtggctgagaacgtgttctgtcagaggattggttggaactctgccctgttgtctgaaactcaaggccaaggagaatgataggagacttgaggacagagctgacccttgcaccaggctgggaggctgcagcccttttagatgccacttactgtaagtggccagaataccagagaggtgggttccatggtcaaatgcacagtaggtgtttacccttacatttggatcaccttgtagtctttaaattcttggtccctgaggccaagtccacaacttgccttctagtcacttgcctgcccgcagtggtggtggatgtgttagctggtagatttggaatcagtcaccagtctttctgtactgtcttggttagctctata

SEQ ID NO: 528082 - DNA, 411 bp, Homo sapiens
  misc_feature (263)..(263): n is a, c, g, or t
  misc_feature (373)..(373): n is a, c, g, or t
gcggccgcctactactactaaaattcgcggccgcgtcgaccccccacccccaatccgtggaaaaactgtcttccacgaaaccagtccctggtgccaaaaaggttggggatggttttgggatgacactgttccacctcaaatcatcaggcgttagagtctcataaggagaccgtaacctagatcccttgcacgtgcagttcaccataggagttgtgctcctgtgagaatctaattctgctgctgatctgacaggaggagttcangaggtaatgagagcaatggagagtggctgcaaatacagatgaagctttgctcactcacccgccactcacctcctgctgtgtggcccagttcctaacatgccacagaccantaagtcttgggggcctgctgggggttgggggcccctgc

SEQ ID NO: 528083 - DNA, 889 bp, Homo sapiens
gtactctcaaaaaatcatcctggtaattattgacttatcctagatccatgtacaatccagactcttatctgtgagctctcaagaaaaattgtaaaaccatctcatttcagatataaacataaacgagaatccagttcatgcatgtagcatcggataagtgacgttcgtcgttgaataagatgccttttggtctaaccgaaatagggcatacagatgagtcttggatgggaaagtggtaagacttgagtttttaatactgtgcctattctccagacagaacgactttgatgtggctttttacattatgcttgtaagagatgttgcaagggcggatacagtagtcttagatagacaattggttgggagtaagtgttagtcggaaaaaggtgaagatattgatgctgagttatgtgaagcaaattatcttggagagctttgctggtagacaaaaagtgaggaaatgtttcactaaatatattatggtcaatgaaaaaaccggactttagagtacatgtgataaccaagtagatttgtgaacttatctcttgagtacctgattggatcttatgtgacatgattcaacctttaaattgtgggcctagattattagcatgttgggtttaacttaataggcatcttatgctggggagagacctagtggagcctacttcaggattctgcacggggatacagggctggggccttgggaatggccaacttctggtgaggaaaaggaacccaaaccgtgtgggccctggtctaagagggaaatggagagggccccggggacacatggtggggaagacaagtcccccgggaagaagaaccgtggggaaagacgggaccggtacagataggggcgcacacaaggcgggcaacaaaaacggaa

SEQ ID NO: 528084 - DNA, 1206 bp, Homo sapiens
  misc_feature (239)..(239): n is a, c, g, or t
  misc_feature (244)..(244): n is a, c, g, or t
  misc_feature (275)..(275): n is a, c, g, or t
actggtgggttctgagaatcacgagcagcgctcatataggccagcaaccagtatatagcgcaggacagctacaaaccatggactcactcaggaagccgcggtggtagcgccccttcctctgaccagccagcctctggtcaccacgcttcatatgaccagcagtcaggctatgctcaacatcacggctcatatgatgagcagtcaaattatgatcagcagcatgattcctatagtcaaancagcngtcctatcattcacaaagggaaaactacagncaccacacacaagatgaccgtcgtgatgtgagtaggtatggagaagataggtagaggatatggcgggtctacagggaggaggtaccgagggcgtggtggcgcatatgacaaggaggtggaagagtgtcctatgactaggatcaagtgggggtgaccgcggatggctgcaaagacatgatcggtggtcacagggaattatggagccagcaacagatgctgattcagaatcatgataattcagataacaagacaatctgggtgccaggacttggggagggtgtgtctacagatcaagttggggagttctttaagaccaacataggaattatcaagacaactaagaagaccggagataccatatgatagatcttgatacagacaaggacatcatggaagagccaaatgggggaggcaaacggtgtgtcattgtgatgacacctccttcagcctaagtgcaggccattgactggtttgatggaaaagaatggccatggcaacatcattaaagtgtcctttgtcactagaatgatcctgtagattcatgacgaggacggtggaagtggagtgtggggcggcgaggcgtgaaggatgtagaggtcgtggaggcttcagggagaggtggaggacccaatgagtggggattgggttggcctagagcccggtcatgggggacaatatgaactttgctcgaaggagtcctggtatcagtgctgtgagctagacagagtagtctcgtcctcaggaggagattcgggggagaggtcaggggggaaagggtacaggcgggggggatggggaccggggggttgtggacaaggggggttgttgggggaaaagggggtgggaaggagaaaagtggtttggggaaattgggtctttgggaaaggtttggaaagcgtttacaaggttaaaaataaacagatttaattaa

SEQ ID NO: 528085 - DNA, 430 bp, Homo sapiens
ggagagagagaactaggtctcgagtttatgtgtttgtattttttgaaatgttgtaataatttggtattttgatatatcccttgttgttgtgtgttcatgtgtatcccccgagggaacggcgggggccacaagggcgtggggcaaccagttgttgtgctgttgttgtgtgggtcatcagttttactacgccacgcgtgaggcgtcggtgagagtggccaagtgcagggttaagctaacccctaacggagacatggcaccacgatagtaccacgagagtgtccacgaggcgtggccggcgcgtgtgcggagcggccggacccacccatagcgcgcgcgtgtgtctcctctggggtggcgaatggcgctctggcgtggtgcgggttctcgcgaagagagggcgaggcgaggggaactcgcccggggcgagctc

SEQ ID NO: 528086 - DNA, 519 bp, Homo sapiens
ttcaacattctaggagtgtcacttgctacatccccttcatctctacaaatccaaagtatctagtgagtcacgtcagctacatatacaatacatgcgataattcattctccatagtccttaccatgacttaagggcccgtctcagggaccatctctggcctcgtgtacacctcgttctgctgttctcctttgctgtgccagccacgctgggctctgttcacatcaagcagctaagctctgcccatttcagacatttaacttcttggcctcaatctctgaaatgcctgtttgaatttgttaccggaaagctcattaacactcatcaggtacccagctcggtgtcagacaaggctatctaaaatagacctacccttaatggattaaaaatctgagaatatgaaataacaaatatcggatgacattttaggagaccctttatatacctcatttgtgtgtgtgtagtgtgtgtgtgtgtgtatggacatggcgatgggagggtgtcattgcaaagtgaggagga

SEQ ID NO: 528087 - DNA, 163 bp, Homo sapiens
gaggatcccgtatatgctgtctcagtatccaacggggactggttgcaggaatgctgcagacgccaaaatctgcaggtgctcaagtccctgatataaaatggcatagtatttgcatataacctatgcatatcctcccttatacttttttattttaatttttttt

SEQ ID NO: 528088 - DNA, 286 bp, Homo sapiens
catagacacattctccccttgaaggcatccacagaaatgtctcccccttctatattaggagtgcttacaatttccccatctgtttcttagctatatgttcgaatacaccaaaacgttactctcccaatattattgacccacataatagtgaatcatcattgattttctttacgctccaccacatgtggtgaatacttttcatattgtgtgcaaatactaattcgttcatactcaaaaaacttcccatgttgtataaaaacaaaggtaaacaaacacacaagacgca

SEQ ID NO: 528089 - DNA, 135 bp, Homo sapiens
tcggtccgacatggggacacgtgttgtagtcgttaactattcaggaactgaggtaggaggattgcgttgagcctgggaggtcgaggctgcagtgagccatgatctagcctgggtgactgagctagactccatctc

SEQ ID NO: 528090 - DNA, 138 bp, Homo sapiens
agcagctagctggcatagtataatatctagggaatatctaaagtggactcagacaaacttgggacttactttccttccagtcaattcaacagagtagcaactgcatcaatactgcattcataccattcaattgggcag

SEQ ID NO: 528091 - DNA, 177 bp, Homo sapiens
  misc_feature (13)..(13): n is a, c, g, or t
cccggaactgctntggatggagctgggggaggaggaggtggaggaagaaagcataaacaggggcaggggggccgaggagaccagcaccatggaggaggacagggtcccagtgatctgtatttgatgaggaggagccgaggccccagcttcatccgaagcaggcatccaaagcagttg

SEQ ID NO: 528092 - DNA, 386 bp, Homo sapiens
  misc_feature (191)..(191): n is a, c, g, or t
  misc_feature (213)..(213): n is a, c, g, or t
  misc_feature (237)..(237): n is a, c, g, or t
  misc_feature (251)..(251): n is a, c, g, or t
  misc_feature (265)..(266): n is a, c, g, or t
  misc_feature (288)..(289): n is a, c, g, or t
  misc_feature (311)..(311): n is a, c, g, or t
  misc_feature (324)..(325): n is a, c, g, or t
catatgtgtgtgctcgagcaggatcagcggattgacagcgctgcacccagcacggtcggattcaggacgccagtgacaaaaccagtgcatggacaagcagcttccatgcgtgtgcatttgatttttaaaaacaatagcatatttcagtgttaacttacccccctcaaacctggcttgaaacattttccccnattttccaagggaaacaaactnctaccaaaacggtgccgcctgcanggaccccgggcccnagcccctatctggnnaggtggtgctgtgtggactccnntctggggccgacccgggggccnagcacagtggccnnccttcccaggccggcccttcagaaatgcagctttggccactgaccgggtatctgctgctca

SEQ ID NO: 528093 - DNA, 858 bp, Homo sapiens
  misc_feature (7)..(7): n is a, c, g, or t
  misc_feature (409)..(409): n is a, c, g, or t
actgtcngaacgtgactctccgaactacaaccagacaggcgtggaagcgccgtgataaggtcctttctgcgcattcttcctgtaccgaattctcaaggcggtggtgcacctgatttctccgtgaggaatcccctccgtttttctacgcggcaatttaataacgggccagaccaggaactaagtaggctccccacctaattcggtaagcgggaactttcctcttttattagcgaaaatcgccagggtccaaccataaattcgggggtacacagacaccccgatgtgcccttctcccccatattttagcggcggtactttccgccccaaacagtttaagggtccccttatctagaaccccgtcattgcccattattataaccctcttttgggcagaaaatttttcaatcancgccctttctccctccctcaccattatacagggaaaatgctgtccggagaaacctccctccccgagttatttatcctaatcaagatgttctcactaccacgtcggattataatctaaacaactggccccccattatgggtctttcagcccaaacattctcttgcagaccaaaatggtttccaaacacccagattcgtacgcaactgtccccccctaactacgcctctcctaacaactgtgactcccttatgcctcctccccatctacttccttcttaaggcaatgagaatgatatcacccgcccccgtatttacaagatcttctcgggctagtaaatttttttattcaacttgctaactccacgattatccccataaaggtgggcaccccgggaaataatccccccagaaacggaggggaaaaaaaatcaacaagcggcccacataaca

SEQ ID NO: 528094 - DNA, 218 bp, Homo sapiens
  misc_feature (97)..(97): n is a, c, g, or t
  misc_feature (141)..(142): n is a, c, g, or t
  misc_feature (171)..(171): n is a, c, g, or t
  misc_feature (200)..(200): n is a, c, g, or t
gagcggtcatgttacttgcttttactcaaagagctttagaaaggaaaaaaaaatattcaagggaagttcatgggactatttactagtagatacattntatctggctaattgggaaaagtggccacttggtggatggaactnnatctcgatacctctcgtgcctttctccangcctttcaagagacttccacagagtgagnagagagaccgctcttacc

SEQ ID NO: 528095 - DNA, 908 bp, Homo sapiens
  misc_feature (907)..(908): n is a, c, g, or t
tccccgctccttcctccccggaccatggcgttcacgttttcgcgtactttactagctaggtgcctgacgctgtgtgtgccactgtcgcgccatcatcattcattgcgcggatggggaacgttatattgcttatgatgtgctgatgacggacttggcagggaatcctaggtaaaccaggcggtaagtacaccttgaatcgccttggtacttccagatgaactcatccatgctttcttctgtgtcatgtttctttgtgcagcagagtggcttacactgggtctcaatatgcccctcttggcatatcatattggaggtatatgagtagaccagtgatgaggtggccaggatctatgaccctacaacatcatgaatgcagatattctagaccatatagtcagaaggaaggatggtgcaaattagtttttatcttctagcattttggactacctatatggatgatctatgtttggtgagctcttagaaacaaaacagaagaattggtccagttaagtgcatgcaaaaaggcagcaaatgaagggattctatccagaagatctgtcaagagtagctgtggaatctgatcagttactttaaaaatgactccttatttctaaaagctatccacatttgcggggaagacgagtcatatgtcatgtccagaatacgattaaatgggatagtaataataatttaaaggtacccgtagtagaagagtgtaattacatcttaggacaaatacctgtagtgtataatatgaagctatcaaggagaatgttaagaacagaagggactgtaagaaaaataaaacatggagactggagaacaaaagattgagtgaaagatgcaaagtagaaaaataaaagaagagagcatgagactatgttaggcatgtgcgttatttttgttnn

SEQ ID NO: 528096 - DNA, 416 bp, Homo sapiens
ttaaagtgggcaatcagaatacactgactgttcggatgccaacatgtccgtgttctctttccgggaattttaggaggataatactcttcccttgaaggttaagctgaggtacatgaccagattctagcaaagaaatgtgggccaattgggtacaccttccttctaggcctgcgcataaaatcttctccaccctcttctctccctcacccaggaagccagaaacaaaggtctctgaggagatgggagaaccagacatagatccgagtcaccacttggattcaagtcacccatccctcatcagagtatgatgtgagcaaaaagtaaacgattattgtgttaatccactgagatataggggtttatatgttgccagagcatagtgtattctatactgccactcccgtaccagggtaccg

SEQ ID NO: 528097 - DNA, 161 bp, Homo sapiens
  misc_feature (139)..(139): n is a, c, g, or t
tcaccatattggccaggatgatctcaatctcccaacctcatgatccgcctgcttgcgctcccaaagcgctgggattacaggcctgagaaacttctagaacctcaggaagctgcagctggagggctggggcacctgcccncctgctccccacacatcatatc

SEQ ID NO: 528098 - DNA, 1063 bp, Homo sapiens
gcccgcttaaagctcagcttgccactgtcatgataacagggatgggtggtgtgcacatgcagaggctcacacattgtcaccattcacgcctctagaatgctccccgtggggcacgaaggcctggggacatgagtgtccttgaggtttatgttacaagggcatagacttataaaacatacctattcaaagatttcatcccgtcctcaatgtcgacatgagactgcgtgatgcttatgtgaagagcgcgtatgtttccacaagacaagctaccgatgtagtacgccagcggagtgccgtggacccaggagctggcctgtggagccagcgttgtccccgagctgctcgcctgtggaccagtggctccttttctgaggctcctgactccattcttgcagataactggtggatcaggagcttacattctaaatgctacatagaggtgttgaagaacatgacataaggtactgtaatagtggatgggatgaaaagataaaaaggtaaagtaatcatatatattataaggcagaacggaagaggatgcatacgagaaaaacacaaatagacagagcactcggagaagccgaagagaaaggaaagaagagaaaagacagacacacacaggcaacaccaagaagcgggcgctacaagccagagaccaaccaaggcgcaaagtcgatgcaacgcaggcaggacggaacacactacagaaacacaaaaaccacacgacccaggaggggggcacgacacaacaacaacccacaccagagggagacgacagaggagagaaaggaagaagcagcggccgagacagaagaaggagggagcagcacagaagcacgcaaccagaggcgaaagcaaacacgggaggaaggcagagagaaagcgagcgggagccacagcacgcacgccagagccccaggcggggagaaccacacgagaccacgacaaggaccacgagacacaaccagcaaggcccgcacagacgcagaagggaagaaacaggacagaacaaaagcgagagagcacggcaaacacgcaggacggccaaagagaggagagaaag

SEQ ID NO: 528099 - DNA, 202 bp, Homo sapiens
gtctcggctcactctaattccgcctcctgggttcaggcaattcttctgcctcagcctccccagtagttgggatgacaggcgcacgccaccacacccagttaattttttttgggtattgttagtagagactgggtctcactgtgttggccaggatggccttgatctcctgaccttgcgatccaccttggccttggcctattat

SEQ ID NO: 528100 - DNA, 860 bp, Homo sapiens
gaacgccggggcagagtcttaaaaccgagggcccgcaggggtccccgggcgccggatgcagaaatacgagaaatgaaaagatggggaaggcactacggaactgtgttcaaggccaaaaaccgggagactcatgagatcgtggctctgaacgcgggtgaggctggatgacgatgatgagggtggtgcgagttccgccctcgggagatctgccttactcaggagctgagcacaagaacatcgtcagggcttcatgacgtccttgcaacaggggaaaggaagctgatttgtgggtttggaattcgtgtgaacccagggacctgaacgaagttatttgaccagttgctaatggtgacctcgatccctgagatttgtaacagtcatccctcttccagctactacaaggggctggggattctgtcaataagccgcaatttgttgttaccacaggggaccttgaagccccagaagctggttaataacaccagggatggggaaggctgaaactgggttgattggacctggctcgacgcttggtgattcccgtccgtgttcactcagttgcaggtggtcacacttggtggtacccggcccacgcggattgtcctctttggggagccacgggtggtacttccaacgtgcaatcgaaattgtggtcacggcggatggcatctttggagaagttggacaatgctgagcagggctatttataccggcattgatggcgatgacagtggagaggactccacatgtggggaagcccacgagggatggcctcttggcacaggtgcagattaagctacgattgtccggccaaatccgggaaggtgccaaacatggaaggggatgtgtgaattgagtag

SEQ ID NO: 528101 - DNA, 364 bp, Homo sapiens
tagagatcccctctctgtcctccatcagtcgctgaggattctccatccttggtttacagaattccttttatcacactatataattcattatgaatagctggtaagatgtccaaggaaggtacagaatgagcatataggaggccagcttaacaaggcaggaatgagaggacaagagaataagacaaagaggagatgagagaagaatatacacgtttagcacaacagatgtgcagaagctcacctacccatatgtcattatagcctcgctgtgtaatcgtgtcagaaaacaaggcatactgacacatagtgctctacttcccatccacttaagttctaggaggtcagtttaaaagctccctgggaa

SEQ ID NO: 528102 - DNA, 109 bp, Homo sapiens
cggctcatgtctacgatactcaaagttatactactttaaccttcatttcatgacacatcaatttcatgtattatataatcatttaattaaaatcttagattatcctcat

SEQ ID NO: 528103 - DNA, 450 bp, Homo sapiens
atagggtgtgagagtcagtatatgtttgggattttttagagtcgtgggtgttcgagcttgaacgctttctttattagtgcgctgcttctacggcctactatgggtgttagattttttactctctctacaatgtttattcctagtgttcaaagatctgttcctcttgtggactaacagtttaatttacaacgtgatttagaggtgttctgtgttgcttttcatcaagaactaagattctatcttggacaaccagctatcaccaggctcggtaggtttgtcgcctctacctataaatcttcccactattttgctacatagacgggtgtgctcttttagctgttcttaggtagctcgtctggtttcgagggtcttagctttggctctccttgcaaagttatttctagttaattcattatgcagaaggtataggggttagtccttgctatatta

SEQ ID NO: 528104 - DNA, 864 bp, Homo sapiens
tcgccctccctgtcaactgaactcattagccggcacaacgagagactaagaggcaaccactgcgcgaattaatcacttaatggagatttggcatcagcaaccattcctgaagaaagcagacttatggccaaaaaacaatctgaatcagaagatactcttccatccttctcttcctgaagaaactgaagtgtccaacttcctctaagtattgctacgcaaaagctgctgcaattaaactattgttatacggagtagtcttttcccttcagactctgcactttatggaatgttgcaaaacagacgaacaagaaaacaacacccacttactttcgcaagggtattttatctttatatagcgttgtttgcacaagtatttaccctataaacctcaccaccaagaacgggcatactctctttttagacacctagacggcgaaacatactagccatccttacggacaaattgtagatccttctgcttgacaactgttgatgggactagcaccctgagcacagggggctatcagccccaataaccccgtattcttctaaagataacccgtcgacgaaacttgctatctccgtaacttcgtcgtaccgaacacaatgacaattacattcccagatcaataatggcttcatgatagagtatagacagcaacccgaagtgtactacatatcaatccagaggcatgctcgcactcatatggcgagccatgccctccataaccatgagtaccgcaccatcatttgacgacgtgcggcatgccctccgacattcatacaccgcccccccacgtgcagtctcatccgagcaatcgccgctcggcagatcggatagacccacaagcgtccgcataacgg

SEQ ID NO: 528105 - DNA, 375 bp, Homo sapiens
cacaaggtaggaggtgaagctggcctccatcgaggcgcattccacagatgacatctggtctctgggccatgatgggtcattactgccattgcgtttatagacgcctactttgctttcagcccccttctggtggcatcccagggtttaaagtgaccaggcagctagtgtggggagacgggacacagctgtctgaggtcagggggtctgtatgtgcctctccggcagggaacagcctcggccgtcagaagccaggtttcagcatttaggatgcagccaacagccaaattgctttcttggttttatatataagggctttttttggtaccataagggcgggtggacagggctgcctttgcttcctggagggtctggttc

SEQ ID NO: 528106 - DNA, 858 bp, Homo sapiens
gcgcgtcaggggtgcgaggtacaccgggataaccggtaggacccattgatggagacgccacccgggcgcgtttgccccagcccaggacgttggacaggaccggcacttccgtagcttttaaagcgcctcgcgattagggcccaagtgtggccacgagagaaggctgtcgatggcgcggtaagacacgaacgcgccgtcggagggcagtactctacataaggtccgccgctatgacgacgggggtacaacctccgaatggtggcgccgagatttacccacagagggatctcagaatgcgcggcaaataagggcgcaaaaattcaaccgtgggagcatatagggccttcccaagagggtacgaaccgttggtagagagaggtagtataacaatagattatggagaaccccggagaaatgtgaattgtgtgctccttgggggaaagaggcaacttttgtgggccgaaaaaaatgaagttatttccttaacgagcgccgaaaatgtgtgtcgagttggaaggtgaaagcaggggggacacaccaattgtggtcgtggacaggaaaaacacgtttggaaatttgaagacgggtctgtgggcaggagacagaaggcgcaaaagaggccgggacttgggagatggggggccccatagaaaaagtttcatataccctgatatccacaagggaggaatattcagttgccgagaagggaaaataccatctcgcgaaaggaaggactgttgggatagaaaaagttaggaagttgaggggggacagaaagataagggggtgaagggacaattggacaactatgtggcacaaaactgtagagaaaatggtttgggatgggcaatcgtatca

SEQ ID NO: 528107 - DNA, 132 bp, Homo sapiens
aatttgaaacaagaaatattaataccatggggagaaccccaacaaagaaatctgaaatgtatgtaaatgcttttttttccgtttttgttcattttggatgctggtgctaaccttccaagtgtccatgatttt

SEQ ID NO: 528108 - DNA, 145 bp, Homo sapiens
cacaggcatcatccaatctcaaccccagtctcaccatccatgttgtctctccatcttgctcgtccatcagcacacattccagtgctccacatccagcacacccagcatcatgcccagcactggcacacacagtgggcagcacaca

SEQ ID NO: 528109 - DNA, 155 bp, Homo sapiens
cccggatgtctcggtacaatgactttccgatccaaagaatcatcatctttaccttgacttttcaggcaattactgcaatctttcttctcagaagattgggctacagcccttgccttggcctcacttttagggtctgcattttggtcctctggctc

SEQ ID NO: 528110 - DNA, 500 bp, Homo sapiens
  misc_feature (56)..(56): n is a, c, g, or t
  misc_feature (72)..(73): n is a, c, g, or t
aggtcgattctagaggatccccatggcgctgatgacacggtgttgtccgctcgcanatcatcaacgacctgnnactgggccgtaacatggacgagctgctgcgtctggtcgacgctctgcaattccacgaagagcacggcgaagtttgccctgccaactggaaaaaaggcgacaaaggcatgaacgcttcgccagaaggcgttgctgcctacctgagcgagaacgctggcaagctgtaattgccactcgcataaaaaaaccggccttcgtggccggtttttttatgcctggacttcaaggcttccagtgcctgtcctggctctttgctgctcctacaggagtgtgcattcccctgtaggagcggcttgtgtcgcgaaagggccgcaaagcggccctggatttcagatcaatcgttgaaatcacgccagccgccatttccttccagcggttgacgatgccgcagaacagctcggccgtcttctcggtgtcatcagcgccat

SEQ ID NO: 528111 - DNA, 157 bp, Homo sapiens
actcgcgtgcacatcatggacactggcttcgcggctgcgtgacatttcctacaaatgcatctgtgtgagatccgcgtgcatatctctcctgtactcttcagagaagaaaatcttcattgggctcatcccccataacctgggcaagtttgtcaacggc

SEQ ID NO: 528112 - DNA, 113 bp, Homo sapiens
aaaattttttttttgggttttaaacccttggggccttttaaaagcccatgggtttggtcttttttgtgtaaaggggaaaaatttttttttttaaaccccaggttggggtgcca

SEQ ID NO: 528113 - DNA, 232 bp, Homo sapiens
gattagaggatggtgtagtgatctcctctgggatgttgaatttgagtgttagggttggtcttggccagatgtagacagttggtccactccctgtgtgcccatagggttctggtcccccagtgagctccccatcaaggctgagcttggcaggagacagacgcctaaggagagggatttccaacgcaggattaacggttgaggattaagcccggggcatgaaacaagggtcggg

SEQ ID NO: 528114 - DNA, 670 bp, Homo sapiens
tatggataatttcacttaactttaaagacatatttggcacaaaaccttggtttaaagatctgcaatattatttatatctaaactactattactaagataacgagaaacgtgtagtgtgcgagggcaggagtattttggtattagaagaggcctattacaaacaaacaacgtctgttttctgacactacaacgaggacccaaaacagtggcacacttttggagtgccaagctcacgacaagtgctgtccttcacctctgtaacagcaaaaaatttcaccaacagcagcgggttacacgtccactttatcctacacatgtccgagattttcggcccctattcttccaactactaaatatcgttcacgtcgcatcgctcgcaccggaccacctctcctcctcgcgtcctcgtccgacgcactcttaacgcgacgcacaactgtcccgccatttccccgaagctcgcccgtgaacggcagcacgtggtgacgccccccgtgcgatcctctgcacgcagcctgcgccttctggcccacgcgcacgccggccggcgctttctcccagaggcggcccacgtgctcccctgccacactctggcgtcccttctggccctactgacccggttatccaccacgtcctctattccctaccgcacgccgacacctttccccct

SEQ ID NO: 528115 - DNA, 247 bp, Homo sapiens
ggcagacattcataaatgcagaaaaagcatagcatgcataataaaaaatatatgtgtacctacaattaatcaatgttcatcacagttttttttttattttaaaaggcagggtctggctcttgtcacccaggcggaagtgcagggctgtgatcagggttcattgcagccttgaactccggggctcgggcaatcctccggcctgagccttcggagtagctgagactatcgattttgtattagggtaagg

SEQ ID NO: 528116 - DNA, 191 bp, Homo sapiens
gatccttcatacccagtcgcagattgacacgtgcatggggaatgcccgtcgtggtgttgaatgccggcaacaatcggtagcctagctcgcgtgccatctcaagcatttcacccttgtaccagtgcatcacatccgcctgtttctgcaggtactccctcggatagcacagttgcctaatcactagtgaattc

SEQ ID NO: 528117 - DNA, 741 bp, Homo sapiens
ggggcccgcgttagtgcctcctgacgcggcccccggatgaacgagatctgggaacccgggagccgaggataacgaagcagctcggtgcgcaaggggcctgactgctgcttgaggcctcttgctaatattcgattttacacacgagcatgactatctgcagttatagacccgggctgctggtgcatacagtggaccccctgagatcccagactttagtggcgtgccgtcatcaccaatccaccttcaataccagctctactgtcaatgttggtttggcacgactgaggaacgacaaagaccctgcaagctcgagcagggccttgcggatccccctgacctggcctgctagctctctagaggtcctcaccatcctgctcctgaagcttcctgcttgctcgcagctgcttcacgcaggccatgctgagccagcccaggatggagagcctggacacccccgcggcctacagcctgggcctcgcgctcctgggtagtgggcgtcgtgctcgtgctctccagctgtctcttgcactggggttcgctggaatctttacctaggttgattacttcgggatcctcaaggaggcgagagtgaccgtgtaccccttcaacatcctggacaacccatgtactggggaagcacagccaactacctgggctggccatcaagcacgccagcccacggtcctgctcctgacggagctgtggcctcactacataatggtctctattcgagagcctacc

SEQ ID NO: 528118 - DNA, 300 bp, Homo sapiens
gtcgcttccccacagtgagaaagcagcacaagatctgggctcggggactctatttccctctatccgaaacataactagttatgtatgtctctgagttcctagttataatgtcttggctgagaaccacagaaaggactagatattcatacatgcgagagagactgagactgcatgttaattgggcatattgctagacaaaggtccgcaaagaactgccagaaccaggcctgtagccaagttaacgggccatctagtacctctcacgaattgcaagattgtcggtatcagaggaatcttggg

SEQ ID NO: 528119 - DNA, 559 bp, Homo sapiens
  misc_feature (171)..(171): n is a, c, g, or t
  misc_feature (559)..(559): n is a, c, g, or t
ggctgttccgcccctctctgtcttctctgcagtgggagcagcttctcctgtgccacagttccttcaccccctgtgaaaattgttcgccttgcttccaagtttggtcttccacttcccttccttgtggttcaaggaagcaccttcaacagcttgctgtgagccggttccgcntattctgcagtgtggtcgctgaaacggaccgggaggattacttgacaggattagaagagccttcaggcagcttgtggcaggctcttcatgttgttccccttataccttacacttgtgtcttcttaggccggcaggctttccacaaaccagggcgccatttttcaagggggacattcggaaccacaagcaagcccaaatgttctattggcgacgtctgggggctggccaacaagttggcgggtgcgcttgggatctcctggggcgcttgggagatttgcgagaaccttggcgtgtctcggcgagaacgcctttcattccatttgcgcgtatatttgcccaaggagaaacccccttttcctccgtgaagcgccaaaacaagcttcttccn

SEQ ID NO: 528120 - DNA, 808 bp, Homo sapiens
ctggtgcttattcttttttatgtgcagcgggagagagcgggagtgtgctgccgtgcgagagtgggagtgcgaagggggcaggccagggagaggctgcaggagcctttgcagccacgcgctgcgccttccctgtcttgtgtgcttcgctgagtgtagacgctgggctgcgctgtgcagctgtgctgtggtgattacttttgcttgctatgtttcgcgttcgcgtgcagcgggcgggtgtagtcctcgtgcggccagcgggcgtgaggacactagcactactgtctgtgagtgatgcaggtatcgtgcaggtgaaggactgcgaggctgcgctgtgaagactgagcaccctgtgcggtgccgtgtacgcgctgggcatacgcgcagcggctgagcagcgctggggacgccattgtgttggagcagggctgacaccacgggtgcgccacgcctgagctgagcaggtcagggcgaatcctggaccccctgggcgaacccggttggggtagctgggactaccccgccttgcttctgggcacttgccaaccccgacaaggggtgggcgccatgttgctctcgactttcccgcgactccgtttcggccggaacccacacttcgtacccgcccctggcttacgcagaagctgacgcacacgctgacttcgaatgtggcgaacatacttggtttacaatcgcgggcactggccccttactccttggtgcacctcattaccatattcgaccctcgacttcctcgtcctgcgactttcgctcttttccctacctacttctggcgtgcacagttggatcc

SEQ ID NO: 528121 - DNA, 1126 bp, Homo sapiens
cgtgccggaacccaactaagctgcttcgcctcggacgtcttgatatgcccgtaactctaacgcatgtggcggtctccgtgtgctgggcgtggtccagtgactagaaggcgaggtgccgcgggacccatggcggcggcgtgcgccgtacgacgtcgaggagctccagaggaccgcgtatgaagacgacgaagaggaggagcagtcggtgctgggtggaatcatcaggaattacttgattcacgcacttcctctcaacatgtgtgaccatagataacattgcagatggttctctggtgcacttgacactgatgcaggcccattctgcaaggtgtgcacatgcctgtgttctttgctggggaggtattgataggatcatctctagaggacgctgtgttagtactttgagacgaacacactgttcgacaccagtgcttgatacagtacaggcaactatattaaaaacacgatgctaaataatactaagaatgccattaccacattgacagaaagctcagcagtgattccatgaagctctcctgaaacgggagataataaaggtaaaggcagaagaaaaacaccagtatgggtgcgcgcgctgcgcacattgggcctgtctacacattgcacgagggactaagtgcactatgtgctgcctaattcgatctcccacaccatgcaattctcgttcacaaccttttacctaaccacctggtagaaagttgcaacgtaccgataggcacagctgcgttcatggcctcttcgaggtcgcccgctaggcatttaaagaattcctgttcgggaatacttggggtacatgcaaggcgccacatgaagccaatttccagattagttgtaaagccggagcaagcttgttcaaccaactgcgtggaagtttagctggagaccgcgggggaaggagaagccaccaaattgtgccagcgttgggcaataaaagttaggaacaggaacttatcttggtgtgcccttcctgtacttttgacgttattaacccctttctttgaaggaaccaaggcaacaggggggttcctggatcctatttactcgggaaaaaccttcctaaacctggccttggcccttttaccaaaaaacttcaactctcccttta

SEQ ID NO: 528122 - DNA, 425 bp, Homo sapiens
ccaaggcggaggcagagagattccctagcccagagacagacggttcgtgtgggtggaggatcaaggagctcagggatccgagatgaaaggaggtttcgcgagtcagggtctccaggggtagaggggtcagagatgaaagcggggtcaggggccccaaggaggagggtccgttgcctggggaatgaggatccgaggtggaagggcgctccagggtcggtgtctggcgcaccgagacgcctgttgtcaggccgggagcctcgcgtcggagtaggaaaacttttcgtcaagttccgtaaaggagcgtgacacagcgtgcgccgccgcgagggccaccgagtcccgagagtctcccccgccccggaggccccgtaacggcaccccgggcgccacgcacgcgattccatggcgtgcaggagccgcggccg

SEQ ID NO: 528123 - DNA, 247 bp, Homo sapiens
actggcggcagtgtgtggtctattcttccagtggggtcctccatggtggcacagggtcttctgtttttcttgtgggcagtgcattccctttgtgctgtcccaggcagccttccttcacaccctgggctttggcacctgcttggtcgtccgggccaccattggctttgccctgcacctgcagctccagtggcactcaagccactttgtccctatcactggctgcataggtcacatccttgtgggtcaa

SEQ ID NO: 528124 - DNA, 910 bp, Homo sapiens
  misc_feature (14)..(14): n is a, c, g, or t
  misc_feature (16)..(16): n is a, c, g, or t
  misc_feature (36)..(36): n is a, c, g, or t
  misc_feature (45)..(45): n is a, c, g, or t
  misc_feature (48)..(48): n is a, c, g, or t
  misc_feature (51)..(51): n is a, c, g, or t
  misc_feature (62)..(62): n is a, c, g, or t
  misc_feature (73)..(73): n is a, c, g, or t
  misc_feature (81)..(81): n is a, c, g, or t
  misc_feature (91)..(91): n is a, c, g, or t
  misc_feature (101)..(101): n is a, c, g, or t
  misc_feature (107)..(107): n is a, c, g, or t
  misc_feature (162)..(162): n is a, c, g, or t
  misc_feature (206)..(206): n is a, c, g, or t
  misc_feature (217)..(217): n is a, c, g, or t
  misc_feature (219)..(219): n is a, c, g, or t
  misc_feature (246)..(246): n is a, c, g, or t
  misc_feature (260)..(260): n is a, c, g, or t
  misc_feature (268)..(268): n is a, c, g, or t
  misc_feature (271)..(271): n is a, c, g, or t
  misc_feature (313)..(313): n is a, c, g, or t
  misc_feature (315)..(315): n is a, c, g, or t
  misc_feature (338)..(338): n is a, c, g, or t
  misc_feature (340)..(340): n is a, c, g, or t
  misc_feature (344)..(344): n is a, c, g, or t
  misc_feature (352)..(352): n is a, c, g, or t
  misc_feature (367)..(367): n is a, c, g, or t
  misc_feature (391)..(391): n is a, c, g, or t
  misc_feature (393)..(393): n is a, c, g, or t
  misc_feature (396)..(396): n is a, c, g, or t
  misc_feature (404)..(404): n is a, c, g, or t
  misc_feature (421)..(421): n is a, c, g, or t
  misc_feature (423)..(423): n is a, c, g, or t
  misc_feature (437)..(437): n is a, c, g, or t
  misc_feature (439)..(439): n is a, c, g, or t
  misc_feature (444)..(444): n is a, c, g, or t
  misc_feature (453)..(453): n is a, c, g, or t
  misc_feature (467)..(467): n is a, c, g, or t
  misc_feature (478)..(478): n is a, c, g, or t
  misc_feature (499)..(499): n is a, c, g, or t
  misc_feature (504)..(504): n is a, c, g, or t
  misc_feature (508)..(508): n is a, c, g, or t
  misc_feature (563)..(563): n is a, c, g, or t
  misc_feature (602)..(602): n is a, c, g, or t
  misc_feature (615)..(615): n is a, c, g, or t
  misc_feature (654)..(654): n is a, c, g, or t
  misc_feature (671)..(671): n is a, c, g, or t
  misc_feature (673)..(673): n is a, c, g, or t
  misc_feature (685)..(685): n is a, c, g, or t
  misc_feature (688)..(688): n is a, c, g, or t
  misc_feature (726)..(726): n is a, c, g, or t
  misc_feature (741)..(741): n is a, c, g, or t
  misc_feature (743)..(743): n is a, c, g, or t
  misc_feature (799)..(799): n is a, c, g, or t
  misc_feature (815)..(815): n is a, c, g, or t
  misc_feature (846)..(846): n is a, c, g, or t
  misc_feature (888)..(888): n is a, c, g, or t
tgcaagtaaaaaananttattgctattccaggcttnaaatgagcncanaantcagggctggngtgtgtttcanaagttgtnatgatgtaanagggtggtanaaaaanccaggcagtttgatgtcgaggccaccctctcttccttggacccctgctccaaaancagctgctggtgaggctctttcccatctgcctcattcacccaanaggactccaanantgaggcaggcagccttgtgatccccanagctcaaaggtganaggctgcncanacctctcctagcactggaagagccttgtccttgggaccgganantatggctttggccctgtggagananaaanggtgccanaggagttgtcttaanaggacaaggcatgcacggtctganancanaggttgtnacgtggccacccatgancnagttcgtttgggananatcanactgcacanctttttaaaaaaanaattagctgcnaatcttttaaaatggtaaaanttcanatanaaatctggatttttggcttctctaggagtaaacattgaaactttttttttgaganagagtctcactctgtcaccaggctggagttttgccagtntctggcagttgtnttcacagactggctatgcactctccaactgactccagtncttgccacccttaattntntttccaactggngancaggcctcagcagccttgtatcaatgggcacatgtgcngtgactttctgtgtnanaaatatttacattgtaatagcatctttaatcaaaaaggaaaaatcggctgggtgtngtggctcatgcctgtnatccagcgctttgcaaggccaaggtggacanatcatgaggtcaagagatcgagaccatcctggccaacatggngaaaccccatctctactaaaaa

SEQ ID NO: 528125 - DNA, 198 bp, Homo sapiens
ctgagaaaggtggatctgtctacccaggagtttgagaccagcctgggcaacactgtgagaccccatctctacaaaacatgcaaaagttggccggccatggtggcatgaacctgtggtcccagctactccggagtctgaggcaggactgctcgagcctggggaggcaaaggctgcagtaagccaagatcacgccactcc

SEQ ID NO: 528126 - DNA, 641 bp, Homo sapiens
aaaaaaaaaaaaaaaaaaaaaaaaaaaaaaaaaagggggggggggtttaaaattttccctgggggggcccaatttagggttaccccgtttttttgttaaaggggggcccttatgggggggggtttttaaagaaaggggggggggggtttaacaaaaaggcgtggtgaggggtggggaaaacagtgaggctagacgtgtgggagacttcttggggagaagagaacccttactcgtgtggggggggggacacacatagtggggaaacacctctccctaagcagaagattattaaaggcctctctagcgggggaacctattttactactttctacaggggggtctatataggtggtgttacaccacacggtggaaaaatatgtctggcgggcgcgagagaaagagagtttgtgggcacgcagcgggggagactgaattgacaatttgtgagaaacaaaatttttttatatacgccgagggagccaagtgtaataataaaaaagcgaaccacacagaccaactccacacctacgacaacatcacccgctacgatgcaccatcaacactcctgacccaccatcctcaacccccaccagcccacccccccaccgcaccaccgccaccacacaaccagacagccacca

SEQ ID NO: 528127 - DNA, 300 bp, Homo sapiens
gccacatttctcttaccaaccatctgcatctcccactgtcttttctttctgatgctaattccttccacgggatgcttcttttttgttttcagacagggtctcgctctgttgcccaggctggagtgcagtggtgtgaacatggttcactatagcctcaacctccctggctcagtcaatcctcccacctcacctcctacaggcgtgggccaccatgccaggctgattttttaattttttgtggagatggggtctcactatgttgcccaggctgatcgtgaactcctgcgttcaagcagttct

SEQ ID NO: 528128 - DNA, 168 bp, Homo sapiens
agctctgtacccctctaaagcgcccatttaaccttttttaaaacaacagcttaaaagctttttggataaaaagcttttattactacatctctgcatcttctctccggggtctaagaaaagggctcaaattcgcggagttgagaaacgagaaaatccaaataaagcgaa

SEQ ID NO: 528129 - DNA, 417 bp, Homo sapiens
cctggaattggagctgcaggcaactaaattttttacttcacagacctcatcagaaactcattttacttaaccctttatcattaaaatgtaatcctctatttaacctatatcattcaaaaatatatggaacccggccgggcgtggtggctcgcgcctgtggtcccggcactttgggaggccgagagggacggatcacttggggtcaggagttcaagacccggcttggccggcgtaatgaagcccggtctctactagaaatgcaaaagattgggcgggcatggtggtgtgctcctgtaatcccagctactcgggaggctgaagtgggagaaccgatggagcccaggcggtggaggttgcagtgggccgggatcgtgccgctgcactccggcctgggcaacggagcgagactccatgtca

SEQ ID NO: 528130 - DNA, 271 bp, Homo sapiens
gcttgctgtgcggttggtgcgcgtaagcgggctggcagcgcctgcagcatggcgacagcgttgtctggcgctatgtgttcgacccgaaggacgcacccgcactgcatcgacaggcgatgatcgatgcgaccacgcgggcgttggcctccagtacatcggcgaatgcgtcggtgatgcaacccgtggcaggctcacgctggccgtggtggctggcgttcgtgttgtgcgcatcgctgctgtggtggctggaacggcggcgctgaccgcatcg

SEQ ID NO: 528131 - DNA, 174 bp, Homo sapiens
cctaaaaaaaaaaccaaaaaaattagccgggcgtcatggcacacgcctttgatcccaggtactctttaggctgaggcagagaattgcctggaccggggaagcgaggttgcagtgagccaggatggcgccactgtactccagcctgggggacagagcaaaactctgtctcaaaaa

SEQ ID NO: 528132 - DNA, 190 bp, Homo sapiens
cgagagcagtttattagagatgaatgcattttaaggccttgcatttgatatgtcatccagttcatcatcaagttgcctgttactggctaacaaataatgcttatgtattcttctcatttggtcctgcaagcgtgctgatcctttgtacctccactgtgggaatcagatctagagcaaggtgaggctggtg

SEQ ID NO: 528133 - DNA, 164 bp, Homo sapiens
tcagatcgaatcgagctgtgtaccttctccgggacgtctacggtgacttcattctgcggacttactctgctgaaagctcagctggggtgtgcaagctagggacccattcctgtgtaatacaatgtctgcaccaatgctaataaagtcctattctcttttatgag

SEQ ID NO: 528134 - DNA, 1183 bp, Homo sapiens
atcagtgattatctttttctaaataaaatatcaccagaattcatcagttaaaaaaaaaaaaaaaaaaaaaaaaaaaaaaaaaaaaaaaaaaaaaaaaaaaaaaaaaaaaaaaaaaaaaaaaaaaaaaaaaaaaaaaaaaaaaaaaaaaaaaaaaaaaaaaaaaaagaaaaaaaaaaaaaaaaaaaaaaaaaaaaaaaagaagggacgcgcgggacgcacgataggcggacggggagagaaaggcagggacaacgagagaaggagcggaccagggacgaaaaatacaagagcgaggcgcgccgcaggcacgaacagcaacaagacagcaaggaacgaagaacgacagaagagcgagggcggacgcacggagcagacaacgaaaaaaacaaacacaagagaagagaagagcaaaacgagaagaagagagaacagagaggaacaacaggaaacaaacaagaagaagaacaagagcagagacaaaagaaagaaaaggaaagagaggagcagaagaaacggcgagcggacgcgagacaaagaggcagcacagggggggggggacgggagagagcgagaaaagaaacgagagaggccgccccacgggagaggaggagcgacagagagaaagacgcgacagaaagagagagaggcagaggaggagagggcggacaccaaacgaacacgcagagcgagaggaaaccgaacgcaagagcgcagaagcaagcgaggaacagaaagagagaaagaaaagaaagaaaaagagaggagaagaagagaaaggagaaaagaagagaagggaaaagagaaagagagaagagagagaggaaagacaaacgaggaagcagagaagagagagaaaagagagagagaaaaagaagaaggaggagggacggaaggagaagacgggagaaggaggaggaagggagagacgacgagagggagagaagagaggaagagaagggaaggagagaggggaagacgagaggacgaggcgggacgaggagaaggaagagaagacggagccaggaggcgacagagacgaggggacgcagaagaaggagcgagagacgaagaggggagaggacaggagcagataggaggaagacgacagagaagaaaggaagagagaggagacgaggaaaaggaggaacggacgaagagagagaacgaagagaagaagagaaga

SEQ ID NO: 528135 - DNA, 903 bp, Homo sapiens
accaggacagtgccatctgcagtgacccagttccaggacgaagtttacaaacacctcctggaacgaagctcccgcctgcatgtcaccttgatgggggctgatgagctgggcgtcagtagtgatacccagtgactagacgcactctgcgtcttcccgtgtatggggctgaggcctgctggacagatggctggccaagtgggagccagaccctagggagtttgcacctcggactgggacgaattcggaccggctctgtgttcactacgactcagaatagcctggctagcgttctctgtcgtccgagagctggaggtagtgggaaccaagcagctggagctggagagttggtgctggtaaaacagtccattcccctggggcccggttcttacccaggtccagagaaaccaacgcgggcatgtccgacttcaccaaaaggacttcctggttgcccctggactggcttcctggaggcgttcgcctctagtttctcagggatggagcgagagcccgagctcagagaacagtaacgaggagctgctctccatatcttgcaactcagccaggtgcttcacccggacgtttaccacggagtgcggctgagtgccaggtacatgctaggtccgcgtccctcaagtcgttatccatcgttctgcaccgtactatccgtgagacctgggaagggactcccgggtcatcagcttaggaacaccggttgtacacgagaacttttccctagggaaaccggttcaatggtgtccacttttcaaggaatgtgagacaactatttggagccattacaaccctcgcactggctttgcgtgcatgggagttagcagcgttggctgccacttggggcaccttggcacggaacctggaggtctgcgagaccaacgtgtatgccca

SEQ ID NO: 528136 - DNA, 862 bp, Homo sapiens
agcgggccgtctttcttttactgacacatgaccaatcatatggtattcttcaagggcacactctctaagcattcatcttctctcagctcttgcactagctagaactaggttaacggaacgaacctccttctcattacttgcccctcgctgctaaacatcactctcctgctcacgaacaatgctgctctccactacttcaactgacaacaacaactactcccctctcctccaaacccaccttggttagccaaggaaacaattccatctctccacttctccgctccaactggaattcaagctgcacacttaactgctgcaattcgtggccctccccacgcacttccgcctccacacacaggggacacaccacgcttcaacgccacttcctccccaccgctaccaaatttcccatacaacacccagttggcttaaatgtaacaaacccccaggctctaagaacacaccactccaaatttgcctttaacacccgtttaaacccaacccagcttgccgcatgcgccctaactaactccgcacacacacccccttcacaccggcccaagacaaccgcaccaacagacaccagcacgcaccacttggttggcaaccagctctaccacacccctttacccctccccaccaaccaaccaaccccttcagccgtcctcgacctcttccacccggccgggtttctcaccacaaagttaggccaacgcaacccacgttatttcgccccataggctagaaaaagccccccttgggcccattcccttcctaccaaacatgacgcacgcattggaggcacaaacaggacttctccaaccccccaacggggacccccccaatcttcccaccgggtagt

SEQ ID NO: 528137 - DNA, 1136 bp, Homo sapiens
gggactctctttatctggactcagccctgcctgcacccagtgtgaaataaacagccttgttgctcacacaaatgcctgatatggtaggtctcttcacacaaacgctgcatgaaatattggtagccatgactcggatcggggtacctccacttggagagatcaatcccacagatcctcctgctcttttgctccgtgagaaagatctacctagtgacctcaggtcctcacgactgaccagcccaaggaacatctcaccaatttcaaatctggaccccactgaacaatcggactgattcaactcatctaggcagccactacccagagcccctggaaactctggaccaagcactctctgacttgacataccttaccagatctaactcgagctatagcagctagaagactgaccactgcccaaattcgccttggaagccccctagaacatctcgcggatgccgaagcttcgagtaactctcaccagtgggacggggaacgcgcaatgacaacatacccaaaacaaacgaaacacatatcttaggggaacgccgacataccacaaaacaacaaacacaggaccttaacctctcctgggcacttgaacctcactaatttaaactctcacaacgcgctggaaccattctcaacaaaccctgtacttacaagacaaggttactggttgtagaaacctccacacgtggcggcataggaacactagaacgaacaacgtatctttcaaaagtactgcgtcagacacatcctggactctgtcaatctaagtacttggcatacgatgagcacgataccttaataggatatgtatccccgtaaaacgactaggttaacgcgatctcatctggggcggcaaacaatttatgagacatatcaactcgctgtgggataaatcccctccagcatctaaacaattccaatgttgcaacatcaccgtttagaaactgctcacatagtagttgtcaccgaggatctggattcaaaccacacaaatcctgagcggcctgtagaagaccaaatggcgcgacagagaatgtggccaacacatattctcgaacagccccagcacaatcaaacaactattatctggacagctaagaatatcgaccacaaacatttgacgagcg

SEQ ID NO: 528138 - DNA, 217 bp, Homo sapiens
gtattgggatttcgtatcgtgtatgaatagtacatacacacggacgtgaggtcacacattccccctccctgcctcccatgggacgtgtggtaagaactgccgaggacagactgttatcactgactttatgcgtaggtccagctatggtgtctgaaaaacaaacgatctcaaaaggcactggttttgaaacgaccaggtttatgcgtaattcgggttt

SEQ ID NO: 528139 - DNA, 424 bp, Homo sapiens
  misc_feature (406)..(406): n is a, c, g, or t
cacgaggggcgtcggcttgtcatgactcatccctatcatttgtcaatgagattcggcccgccccatcgtgaatttcagccatgacagcggtgaacaccttgtcggggccgagccgacgaagctcctcaccgatgagcatctgtacctcacgacggtccagggctactccgcgcgctggttctcccgggatccggtagacggcgtatctgccgctgcgacggcgtatctcgatgtcaccacctgaggtcgacatgacgatcgcggagatgccgggcgcgtcggttgtcacccgctcgaccgggacgccgagacgcaatcctagccaggctgccagcagcatcgccggcgcattaccggcggctgactctactcgagcggactcgacggtcgctggatgttgatccanagctgctgcggctagggc

SEQ ID NO: 528140 - DNA, 552 bp, Homo sapiens
  misc_feature (21)..(21): n is a, c, g, or t
  misc_feature (91)..(91): n is a, c, g, or t
  misc_feature (130)..(130): n is a, c, g, or t
  misc_feature (156)..(156): n is a, c, g, or t
  misc_feature (186)..(186): n is a, c, g, or t
  misc_feature (189)..(189): n is a, c, g, or t
  misc_feature (218)..(218): n is a, c, g, or t
  misc_feature (222)..(222): n is a, c, g, or t
  misc_feature (230)..(230): n is a, c, g, or t
  misc_feature (247)..(247): n is a, c, g, or t
  misc_feature (291)..(291): n is a, c, g, or t
  misc_feature (300)..(300): n is a, c, g, or t
  misc_feature (303)..(303): n is a, c, g, or t
  misc_feature (306)..(306): n is a, c, g, or t
  misc_feature (317)..(317): n is a, c, g, or t
  misc_feature (319)..(319): n is a, c, g, or t
  misc_feature (330)..(330): n is a, c, g, or t
  misc_feature (344)..(344): n is a, c, g, or t
  misc_feature (356)..(357): n is a, c, g, or t
  misc_feature (378)..(378): n is a, c, g, or t
  misc_feature (434)..(434): n is a, c, g, or t
  misc_feature (447)..(447): n is a, c, g, or t
  misc_feature (478)..(478): n is a, c, g, or t
  misc_feature (485)..(485): n is a, c, g, or t
  misc_feature (497)..(497): n is a, c, g, or t
  misc_feature (500)..(500): n is a, c, g, or t
  misc_feature (503)..(503): n is a, c, g, or t
  misc_feature (548)..(548): n is a, c, g, or t
gaatccatacaaaagtcagcnagttcttttataataacaattattctttcatttcaatttttattatgttttttatatagaacacagcacnaagtgcttttgaattaaagtttagaaaatatcgaaagcngccaggcgcggtggctcatgcctgtnatcgcagcacttcgggaggccgaggcgggnggntcacgaggtcaggggatccagaccatccnggcnaacatggngaaaccccgtctctacnaaaaatacaaaaaaattagccgggcgtgtgggcaggcgcctgtngtcccatcnacnggnagtcccaactncncaggaggctgnggcaggaaaatggngtcaacccgggnngcggggcctgccgtgagccgngattacgccactgcactccagcctgggagacagagccagactccatctcaaaaaanaggaagatatcgnaatcttattttccaaatatttctcttcagtngtcttanccactcttcccntgntcntttcatgcctttctagtaaattaatttttctccctagagaaagtnaaaa

SEQ ID NO: 528141 - DNA, 386 bp, Homo sapiens
ctgggtgatctagcaggactaacgggagccttaacctgtagtcaaataaatgttataccaaaaagacacttgcgcttgcatgtatatagcagcactattcacaatagcacagacgtggaatcaacttaggtgccagcaacagtgaattggataaggaacatgtggtacacctacacccataaaaaaagaatgaaataatgtcctttgcagcaacatgggtgcagctggagtccattatcctaagtgaataaatcacttggaacagaaatccaaataacacatgttctcacttgtaagtgggaactaaacatagggtacacatagacataaagaagggaacagtagaccctgaggactccaaaaagggaaagggaaggagggaggca

SEQ ID NO: 528142 - DNA, 206 bp, Homo sapiens
ctcgcgctgccggaacaagaagggcgcgatggtgtatcatcgagaaggagaagaaactgtggactctaattgaggccacaagaatgctgagagcctaggattaaaatatgaaatggtggtctgctgtgtgaatcaatcattcctgaagaatgaagaagattaattttgggagttctttgacgaactttgatatgcggtaaaagctt

SEQ ID NO: 528143 - DNA, 240 bp, Homo sapiens
  misc_feature (30)..(30): n is a, c, g, or t
  misc_feature (113)..(113): n is a, c, g, or t
  misc_feature (146)..(146): n is a, c, g, or t
  misc_feature (154)..(154): n is a, c, g, or t
tgaacatgagggcacagtctaccagatctnatctcctagctcaaagaaatccactgatttcctctgtagcatcttcaggttccatcttgacaacttcctctaaatccccaggngatgagttgtttagagactcctggatgccctgngggagcgnctccagagcttgccttccctcctctgttttcacaacggtccagcgataggcactgttctctgacaatccttcttggcactgtttat

SEQ ID NO: 528144 - DNA, 205 bp, Homo sapiens
  misc_feature (63)..(63): n is a, c, g, or t
  misc_feature (112)..(112): n is a, c, g, or t
actacagtgctgtcatacgcgtatcagtcgtcatcacgggcgatgcgcactagattttgactncgagaatacagcctatcatctgctcatccccatgctggattatctgctntcacatcgttcctagcttgtttccggtcctctgttttcacaacggtccagcgataggcactgttctctgacaatccttcttggcactgtttat

SEQ ID NO: 528145 - DNA, 247 bp, Homo sapiens
atagttgtagatatgtggcattatttctgagggctctgttctgttccattagtacgatatctctgcttttcgtaccagtaccacgctgtttttattactagtagcctatgtagtatagtttgaagtcacgtagcgtcatgcctcagctttgctctcatagcttacgatttacttcgcaattcgggctctttattggctcatatgacatcaaggagctcttccaatctttaagaagtatttggagctt

SEQ ID NO: 528146 - DNA, 353 bp, Homo sapiens
  misc_feature (16)..(16): n is a, c, g, or t
  misc_feature (96)..(96): n is a, c, g, or t
  misc_feature (111)..(111): n is a, c, g, or t
  misc_feature (173)..(173): n is a, c, g, or t
  misc_feature (245)..(245): n is a, c, g, or t
  misc_feature (250)..(250): n is a, c, g, or t
  misc_feature (279)..(279): n is a, c, g, or t
  misc_feature (283)..(283): n is a, c, g, or t
  misc_feature (342)..(342): n is a, c, g, or t
  misc_feature (352)..(352): n is a, c, g, or t
tgccaccaaagtatgnccctgggtgaagtatttattcaaatgaatccattggaaaaaacaaaggaaaatgggcatggtgacctcacgccctgtatnccccagcactttganaggctgaggttgaaggattacttgagccccggaatttgagaccagcccgggcaacaagtganaccctgtctcctacaaaagatacaaaaaattaggcaggcacaatggcatgcacctgtagttccagatatacnggaanctgagctgggaggatcacttgttccccanaaantcaaggctgcagtgagccatgatcctgtcactgcactccagcctgggtagcagggtaanaccctttctna

SEQ ID NO: 528147 - DNA, 132 bp, Homo sapiens
tattactccgggtactcgatcaccaggtgatgcacaaaattaaagaggataataaatagcttgtacaaggccatgaagccaagaaattattcgaattatgaattactgaatgcatattatgaactgtattat

SEQ ID NO: 528148 - DNA, 281 bp, Homo sapiens
ccccccctttggggggggggggggggagccggtttttttcccccccgtgatgggaaaaagggggggggttttccgggggtttttttttacccccccggggccggggggtttttcccgggaacccggggaggttcccccccccgggggggggggtggggggcgaaaaaggccccgcccccggggggattgtttttgggccggggccccccccccctgggggggggcccccccccgggcctttttttgtttttgggggaaaaaattttggtttttggttttta

SEQ ID NO: 528149 - DNA, 111 bp, Homo sapiens
  misc_feature (38)..(38): n is a, c, g, or t
gctcatgcaagaagtgctcggtcctttagtatggcctnctcactggacacccaagggcaccttgccacctgagtgagctgcactggacaagctgcacgtggtcctgagaac

SEQ ID NO: 528150 - DNA, 256 bp, Homo sapiens
tgggacgtgctggattgtggtcatgctcactacatgtggcctgtggcattgatgtcagagattggcaaaggataaggctgtggtgtgcctctgcccagcttctaactccatgtggcctgcctcaagaggaacttccatgtgaatggcggtcagaccgagcagcaggtgggtggatgagtgtgctccttgtgccttggtttggaaaatgatgatctgtgcttgtgctatgaccgcatgggtgttacctgatggctct

SEQ ID NO: 528151 - DNA, 1269 bp, Homo sapiens
  misc_feature (301)..(301): n is a, c, g, or t
tgcagtggctcacgcctgtaatcccagcactttgggaggctgaggcaggcggatcacgaggtcaggagatcgagaccatcctggctaacacggtgaaaccctgtctctactgaaaatacaaaaaaaattagccgggcatggtgctgcgcgcctgtggtcccaactactcaggaggctgaggcagaagagtggcgtgaacctgggaggcggagcttgcagtgagccgagaatgcgccactgcactccagcctgggcgacagagcgagactccgtctcaaaaaaaaaattggtgacttacggntgagctttaagcaactcttgtcaatgagatactgaaatatggggagtgaatatagaccctcaaaccattacttccttgcccttcgttttttatagaatacaacttttatagctgcgaacatttgtaagatttatagtcctttctggctttcatgcagagcagcactatcacatcctaacccctgcagctgtttatatcagcagcatttaatatttgatttactaatccctaattgttgcctttcaactactcattttcatttttgtagagccttaggcctgttccagctgaccattatgatggtaaacaactagctctctggcacaggggaagaggcccctaacaggatcttttggacaaaggcacatttgagccagaccagaatagatcagatgtaaaagcgcggcaacgaagggaagcccggaggtaactcagggtaatgcagaatccaaagaggctttagttgaagccgatcctccttttgctttcaacagaaaaatctcctggtccattttataggatactcttctaaatcagcttacccttttgctctcaaaccggccaacgctctctcttttgacggcctacacctcctttccacttgactcaactacgcaccattcatcgctccgatttcatcactcttttccatattgaaccgctccctagtcactattcacttctcctctcacctctcagcgactcactactatctcactccatcatctaacctctctcccttcgctcatactctccgtctccatcagctcgctcctatatctctcgagctgcactctctccacctacgctctctgctgctcgtacttaactacattctcatacttcctcctcttcacacctctctcgcaccgcttcgtacatctctactcacgtgcgctcacgctacattcctacttcatcctctctcatccccttttgagtctgctctcaactctctctctcgcctt

SEQ ID NO: 528152 - DNA, 297 bp, Homo sapiens
  misc_feature (246)..(246): n is a, c, g, or t
ggtcgatctagaggaccccgacatgtcgaggtctgtcataattttataaacgtaaaatcctttgtcatggtttatcattaaaaaattaatgataattacaataaatgcataatttacaaaagccctctattcatagggatttatacattacaaggcattacatgtacattctatttagaaagactaaatattagtgtatatagaactatgtatttgaaaggatatttatcagccgtggtatatacnatgaacaaagtacagtaacttatataacatgacagagtccattaagtttac

SEQ ID NO: 528153 - DNA, 229 bp, Homo sapiens
tcccatatcctcttggacctgcgagactcaccattgggtgacatttgtccctttggcgcgtggtgcctcttgccccacccccagtgaactgtgtgtgtgtgtgtttgtgtgtgtgtacgtgtgtgtatgtttagatggaccctcactctgtcgcccaggcggaggttgcagtgagctgaagttcgcgcccctccactccagcctgggcaacacagcgagacaatttttc

SEQ ID NO: 528154 - DNA, 162 bp, Homo sapiens
gcgctcggcccgaattcctaatacgcaatggaagataatataaggaaagaaggtgtgtgtgtatatatatgtgtgtgtgtgtgtatatatacttatatatacatatatatgtatatatgtgtgcatgtgtataactgtgttatatttctgtacagtagaaac

SEQ ID NO: 528155 - DNA, 408 bp, Homo sapiens
ccttggatggaaatatctggatacggtagaaatagaagaaccttgtattttctcacataaagggggtcacaggacaagctggaaaagaagccagactttgaggtggaagactcccactggaattgctggatcatttaactaaatacccaaccttggctatgcgccccaagctctctaaatctgtttcctaacctgggaagcagtgctgataaggcacgcatctcacagtggggctgtgagtaggaaatgatgtaattcagttggaagcgcttttttcaaatgctttattcaaatgcaaagcacatctgccgctaagtccaaaatgccccctccggttctctcagcccctccactcctatattcttcttccccagtctgtttctcatccggagacgcctttccacctat

SEQ ID NO: 528156 - DNA, 2055 bp, Homo sapiens
  misc_feature (331)..(331): n is a, c, g, or t
  misc_feature (866)..(866): n is a, c, g, or t
  misc_feature (934)..(934): n is a, c, g, or t
tgtgtatggcatgcagctctcggtctgttgtagtgttgtctgctgtctgtcgtatcagttggtctgtttctgctgtcgttatcgttctgatggtcttgtggtctgtgtatgatgctgatgttgtgctttggcgctcgcttgtgtactggtctcgttccttttgtcacgtatctgcgtcttgtgtcgagcttgatctctcgatgtgctctgctgcctgcttcgcttctgtataagtacaaccctgtgttgggggttgtgccgacgacgcatcgggcgcgcttttggggggtgatcacccctctgttatgattccttcctcgcgaggagagtntctcccacacgagcgtgtgtgtgtgccgcagaatatgtctgcgcgtcgcttgtgtgtggtagctctcccctcgcggcgctcgcttcttttctgcttttttgttcacctgtcggtcgctctctataggtgggtatgtctgcagatggctccctctcttgtgtgtggttgcagcagtgatttttccgtggcactctctaagagtggctcttaattgggggctccttgttaattgtccctggagaggtgggggtagatgtgcttgaggttgcctcacagttagttgtgttcagtccacccgagctcaacagtagttaggtgatgtgtttgtttcttctgtggtgggtaggagtctgtcggtgaagccaccagtgctggtgcctccgtctcggtcagctgcgtagttgtccatgtgtgagtcggcacacagtagcaggactggttttgttgtgtagcgtccaccagagcggagagaggtggggtcctctacggataggccttttttttctagtcggtgccgcatacgcctgatgttctnttgtgaatgattctccactccccgccttttggtggaaatggagagaaagagtgtatgttgtggacctnccgggtgtcgttcaggtgtactcactcctatgagtacctccccccagttggtgccgcccccagagaagagaaagaagagggggggtggaataccatctttgttgtgtggtaagagtggctctctctgtgttttgggaatgatcgcctactcgccacagatgagaacacaagcaccacagagagagtgggtgctctgtggtgattgatatgggagtgagctcgtcctcccctacttgtggggtgaaaagagataaggtgataggatatatgctacgcccaccacgtctcttggggtgtgtgaagagctctcccaccaagggatagatgatctgatataataaatatgttgttgcaagagaataggggtctcttttatatttcacttctatcttctctctcctcttcatgaggagagcgttttatacacactacgggtgattcgggggcctctttgataaagatattatgagatgatatgatacctccacatcatataagatatcaccctttaatattactttttttagatatatgacacccctctcattattcctctctcctcagctctcaatcctcataatctacacactcaagtctctacacctacactacacactttttcctctcctcccatactccacactcacacacacgctcaccttcacactcttcactcactccagacgctcacaccacacatactcagaccatactcagaccagaccaccagagtgtaaagagcgcacattacacatagttctcctgcgtttgtctccacccacagtgtgatacaccacctggaatgtgtcgtattgttgtttgtctcctgttgtgggcccagagagtagacctagagatgttcttgggtgtcgcccccaccagataggtggttgttctcacacataaagaatattagggtgccttgttgtgaaagaaatatagattgccagtggtttatatagagattaattgtggtaagaaattttagatgtttatatttgccatttggcttaattggtctgtgctgcatggttatatactcctggattatagatttaaagttctctgtagacaatctctgtgtaagagcccagactatcctgtaaccagtctggtttatc

SEQ ID NO: 528157 - DNA, 136 bp, Homo sapiens
gggactactcgcaaccgagctccgctagactaagcatcttctccttaagctagcaggtgtctccgtctactcttaggggccatcattttcatcacaacaattatcattataaaaccccctgggcataacccaatac

SEQ ID NO: 528158 - DNA, 414 bp, Homo sapiens
  misc_feature (5)..(5): n is a, c, g, or t
  misc_feature (22)..(22): n is a, c, g, or t
  misc_feature (31)..(31): n is a, c, g, or t
  misc_feature (55)..(55): n is a, c, g, or t
  misc_feature (100)..(100): n is a, c, g, or t
  misc_feature (145)..(146): n is a, c, g, or t
  misc_feature (336)..(336): n is a, c, g, or t
aagcnagttgctgataaatccncgtgccttntgccttcgcttcgatcttcccgtngctcagccgccgcacgacgcgccccggcatgcccgcgagcagcangccgcgcggcacgtcgtaaccggccttcacaaaacgcgcaggcgnnacgatcgtcgtcgcaccgatcgtcgcaccgtccatcaccaccgcattcatcccgatcatcgtgtcgggttcgagcgtcgcgccatgcacgatcgcgccgtggccgatgtggctgttgacaccgagccggcacgtctcgccgatcccgacatgcagcacgcagccgtcctgcacgttgctgccgtcctcgncgacgatcgcaccgaagtcgccgcgcaggttcgcatgcgggccgatgtagcagcgcgcgccgatcgtcacgtcgaccg

SEQ ID NO: 528159 - DNA, 436 bp, Homo sapiens
  misc_feature (419)..(419): n is a, c, g, or t
gctcgtatacacaggtttctggcacagcctgaatgtgaatttgttcgccactgtatccagaagtcccaggagcgggtagaagggaaggtgcaggtgtctgtcttcaagggccaagtgtacatcctcggtcgggagtctccactttcactctacaatgaagagctggtgagcatgaacgtgcagggcgactatgagcccatcgacgccactggcttcatcaatatcaactcgctcaggctgaaggagtaccatcgccttcagagcaaggtcactgccaaatagaccctgacaaagaggagcgggcctccccactctgcagctctcccaggcttcagcattaattgttgtgataaatttgtaattgtagcttgttctccaccacctgactggggctgctgtgtccccccccgtgtccccanagcctttgttccctggt

SEQ ID NO: 528160 - DNA, 470 bp, Homo sapiens
gataaaacgttagaacacattcgagcaggactctcgtagaacatggatcattcgatagatacttgcatatagtcaaggtgcatcgtgaaccagtgtcttactggctctaatgcaatccggaggtaaagagaggaaaaaactgtttacaatgattcacgctatcttaacgaaaacttcaactgctcataaatcacgcaaatgcatgcctgtaattacacggatcattaactaattttcattcttttcttctttctttatcatgatttagatatagaacctacggtgaaatttgctatccttattgctggctttaaaagtcaccaaagtcctcataactttgcctatcagaaaataattagtatgcctactttgcatattatcggcgataacgatcaagtcattcctagaggtaattaaaggagagatttactttttccttttatcaagtggccaattcattattatttact

SEQ ID NO: 528161 - DNA, 135 bp, Homo sapiens
ggacagcacagctgacaggcatgcccgagagtatcttggcatcctagagcttatctccacagaggagaacacacaaagcagcagagaccatgaggaacccatactacagcccctccctagcacacagccgcgtca

SEQ ID NO: 528162 - DNA, 808 bp, Homo sapiens
ccagacatgaggctacatcccacatggacatagcgaagaacgcttgggtccatatctctgcacgacctgcatgctctggtccttgtgcgtgtcacatcaggccacttcaattgctcattgatcacactccctgtgtgctttactgaggcctcgcatctcttcagttcagagttccacacctgaaccagataactaaagtccattgggagaagatcacgatgccgctccaggaaaagataaagtccaaaactggcagtcctaagcctcctgtctgtagccttcaagccccagttcgctctttcttgattgtcttggaaacggattgtcgcttggtgaccacacgggctgtgtgatgctgataaccgggccgcatagtgtctacgggactccactgtgcagatcgtcttctaaccgctccccgaacgtttcaagcacaatacttccgttcttacgcttccggtggctacccccaaagtatatcggttgacatacatcgagcgcacgtatgctacacgctggtgcccagcacataaacactgggggtaattacgaagggtattgtgcaccgaaggggttttcacctagtgtttgggcccacgtgtatagaatctcaaaattctctcgtgaacgcttcctgtagatgcggtgcccccgcatcaactaggttctccacagaagattgccgtgggctgtgttaccacggttgtattgaactaccagctgataccccagtggcggtatcctcaccctggctgttggactgtaatattgaccaagaggctcctaggaaccaggagttgacaatacg

SEQ ID NO: 528163 - DNA, 136 bp, Homo sapiens
ctgtatataaactgtagggttactaataatgttaacactggacactgatacttctttataatatctactattgagtgctgtctccatgtttgatgtatctagagcaggttgctccacaggtagctctagtgagggc

SEQ ID NO: 528164 - DNA, 704 bp, Homo sapiens
catacacccagatgacgagctggtcttggaagatgagctgcagcgtatcaaactataaggcgccattgacgtgtctaggctggttacggggactggtcctgtgctagtgtttggctccgttgagagacgacgggacgtttctggtggaggactattgctttgctgaccttgctccccataagcccgcaacccccacttgacacagataggttctgtgctagtgtctgattcggccctgggccatgaggtggacggtggtaggtcgagagcactgtctgggcatccgcagacttgtctggtgcgatgtggttgacggtggcagtcttggggtactgaaggggagtcggtgcggcagccgttccacgtcttcaccgggtttatcgctcgcatggtcaaacacctccctcagtccagcaagggacccatagtcagggagtatctatcgactaagggcagtgtacctcattcataggaaaatcccagtgccagtcagcgtggcacgcgctgattataggatgctgtgaattgagatcctacctgacgaagctgagtcgcctcacttagcccggtggtacgtgatgccaggcgagttttgatcccatccaatctacaacgctcccccgagtagtaccttctcaactcctttgcttgggcccggtggccgtctgactgactcctacgctccactggtcgcctttccctta

SEQ ID NO: 528165 - DNA, 420 bp, Homo sapiens
  misc_feature (194)..(194): n is a, c, g, or t
  misc_feature (209)..(209): n is a, c, g, or t
  misc_feature (212)..(212): n is a, c, g, or t
  misc_feature (223)..(224): n is a, c, g, or t
gtctcctctggtctcgtcctcgagacagcaccacccctggcctgcagaccctgacgttcaacgtaccatgttcaagtgagtgtgagccctgaggacgaggaggaagaagaggaggaggacgaggaggacgaggacgaagacctggaggagctggaggtgctggagaggaagcccgccgccgggctgtccgcggncccagtgcccaccgnccnctgccgccggnngcgcccctgatggacttcggaaatgacttcgtgcctgcctggctgcccctggggaccccttgcctggcctgctcccccctgtcgcccccggagctggcagcctgtctctgggaccctgagccctggtgtcgatcgacctgtgcaccgctgcgcatcccctgcttgtcttgctgcacgcaagtcctcgccactccga

SEQ ID NO: 528166 - DNA, 527 bp, Homo sapiens
cttgtttctcttagcccctgtttaaaattttagataatctataaaaattatacacggctagataattattgagatttagtttgtatatttctataagtgagattgcgtatgtccaataacactgtctgctgaaaattactgtgtgtgttataattttggtgcttaccagtggttctagggaacaataaatgtgttgagtagatagatgaagagatcaacacatgggaaaaactttgcaagtataggaaacataaaatattgaaaaacaaaacaattagggatttttaatttaaaaacagtattttaaaatatgagttttaaaaaatttattaaaatgagccattgtttgatctgttaatttggagaagttacatgtacttactttttacttcattaactatctggtattagggacataaaactagattcagactctagtgatagtaatgataattcctgtgatttaacttgcacttcgctattacttcatacttaattaatccattaaaattaactcaatcctaaaa

SEQ ID NO: 528167 - DNA, 204 bp, Homo sapiens
cgcagcacgggatacatcagaggcagcgaaggcattaactagtatgcacgaaatgaaccctcagtccttcaatatgaggttatctctgagtttaaagaacttctgcttcaaaatattatgcttccctcaaatcaaagagcataaaatataccttacaaactttatcacatccaaataataactatttgcaaaagacagttatct

SEQ ID NO: 528168 - DNA, 308 bp, Homo sapiens
ccagtgctgaggcagtggatgcttgaaggtgggaggaagatgttgcagtgagccgagatcgcgccactgcactccagcctgggtgacagagcaagactcagtctcaaaaaaaaaaaaaaaaaaaaggggagggggggaaaccatccgttggcttctgtaaggtcgatgtttcagggcctcttccctaaactagactagtgtcatccagtgcagcagccgttagccacgggtagctatggaaaactggagggctggggcgtggtgggctcagggctataatctcagcacttgggagagggctgaggcgg

SEQ ID NO: 528169 - DNA, 530 bp, Homo sapiens
  misc_feature (20)..(20): n is a, c, g, or t
  misc_feature (36)..(36): n is a, c, g, or t
  misc_feature (48)..(48): n is a, c, g, or t
  misc_feature (258)..(258): n is a, c, g, or t
aaaaggttaaccccttgaancaaacacggggttgangccaaattcaancccctcaaaccttttgaaaaattttgccgtgtaaactttttgaactcccccctaaaaccttaacctacctaataagccctgcctgttgacctagaaacccttaatgaatccatagtccaattaacacgtattttgccatgttatatgtataataaacccagattccttaaagtaaactagagaaaagaaatcgttaggcccgggtgcggntgtcacgcctgtaatcccagcactatgggaggccgaggcaggcggatcatgaggtcaggagatcgagaccatccctggctaacacggtgaaaccctgtctaaaaaaaaatacaaaaattagctgggcacagtggcggcctgtagtcccagctattcgggaggctgaggcaggagaatggcaggaacctgaggggcagagcttacagtgagccgagatcacgccactgcactccagcctgggcgatggagcaagactctgtctcaaaaaaaaa

SEQ ID NO: 528170 - DNA, 597 bp, Homo sapiens
tgttcgctgtggctcccagccctgtggaccccaccccgctggacagtgggggaaactgagtgcctgagctgggcccacacaggaccatgaaggtgcttctcctcacatgggctggggtgccctgttcttctgcctattatttggtgatgacaacttcgacccagcacagcctccagtggagcgcgatgtgctgctgacagtgggccaacgctggtgttggttgagtgagctggcctatcactacgcgcgtctgggctcccaactggtgctcactgcccacactgacggctctcctgcagaaggcactggtggctcacagcttgtagtcagcactttgggcaggccgaggacaagtggatcacctgaggtcaggagttcaagcaccagcctggccaacatggcgaaacctggtctctactaagaagacaaaaattaggccaggcatggtggctcatgccttgtaatcctagcactttggcaggccaccggcggatggctcacttgcggtcaggagtacaaaaccagcctggccaacatggtgcaaagcctggtctctacctcaaaaatacaaaacaataccaactacacatacaccac

SEQ ID NO: 528171 - DNA, 300 bp, Homo sapiens
  misc_feature (227)..(227): n is a, c, g, or t
ctctaatcccagctactcgggagactgaggcaggagaatggcttgaacccagttggtgagggttgcagtgtgctgagatcacaccattgcactttattctacttgggtgacagagcgaaactctgtctcaaaaaaaaaaattctatttaaaatagtggccttggccaggcatgtggtggctcacgcctgtaatctcaacactttgggaggctgaggcaggaggattncttgagcccgggagttcaagaccagcctgggcaacatgggggaaaccccgtcttttacaaaaaaatgcccaga

SEQ ID NO: 528172 - DNA, 130 bp, Homo sapiens
ctcatgttgtgatttattagagagatttgcacttcctataattctcccatattccctaaacgatattccctaaccgataatgaacacgatacgataaattttaggggttaaaataccgcgaaattttaaa

SEQ ID NO: 528173 - DNA, 345 bp, Homo sapiens
ggggttaaaatttttaattttttccccccgggaatttgttacccctgctgaagggggttaaacggggcccggacccggcctgattaaaaacccttggggtttaaacaaattcggttgttttttggggatccccccttttttaaaggggctgggccccgggttttttccccaagtcccaaaggcggggccaccccgtttgggccccccccccgtttttttttcccaaaaaaaaaaagaggggcccccgtttttaaagggggggcccaaaaaccaaaaaacccgggggttttttttggggaaatggcccggatttttttttgcccccttaaaaaaaaacttttgcca

SEQ ID NO: 528174 - DNA, 480 bp, Homo sapiens
  misc_feature (145)..(145): n is a, c, g, or t
  misc_feature (428)..(428): n is a, c, g, or t
  misc_feature (468)..(468): n is a, c, g, or t
ttttatgtgccctgggactctttatctaccagtcactggatgccattgatgggaaacaagccagaaggacaaactcttgctctcccttaggggaactatttgatcatggttgtgactctctttccacagtatttatggccatcgngcttccattgctgttcgcctaggaacacatcctgactggttgtttttctgctctttcgttgggatgttcatgttttactgtgctcattggcagacttaccgtctcaggagtgttaagatttggaagggtggatgtcactgagatccaggtagctttaagtgatcgtcttcatgttgtcaacattttggaggagcaacaatgtgggactatacgatacctattctagaaataaaactgaagattgttccggttcctggagttgtaggtggattaataatttccngttccaaataattccatgtgatcctccatgggtggtgttngcaagaatgggg

SEQ ID NO: 528175 - DNA, 603 bp, Homo sapiens
gtcgtggtggcgtggaacactgggccggaggaaggcagccaagaggaagtgggcggctgtgctggtccgacacctgggctacaagccagaagagtacaagatgggcaggaccaagatcttcatccgcttccccaagagcctgtttgccacagaggatgccctgagaggtccggcggcagagcctggtccacaaacgagtccaatgctgcctggacggggcttatcactggcggacagaaattcctccgggtgaagagatcagccatctgcatccggacgtgctcatccgaggcttcatcctgacgccaacgcacccccgctgcacccgagaacgccttcttcctggagccatgtgcgcacctcattttattcgctaaaagcctgaggcggcagctgccccggaatgtcctggacacctcgatggccctacgcgcacccaagactgccctgcggtgaggcctcagagcttctgcgggagttgtgcataacaggaacatggtgtggaaatactgccggagatatcagcgcctgagtggaagcaggaaagctgacatgcataaggccgtggctagttgagaatctttcaagggcaaggaaggataa

SEQ ID NO: 528176 - DNA, 645 bp, Homo sapiens
taatgtcttgactgcgaaaaaggaataggttaggaatatggatgtaactcatggatactgaatcacgtgtgggagtaggccttacctgtttcctaatcgataggggcggacctcatttacatttctcatcactcgaggcaaggcagtgatggctgtagccaaggcctgggtctaataagcatacccacctggcctggttgtgttggacttgtacagtgcatagtgtctcacatgtggggtaatatgtttgcatgtcgcacttcaacatgtgtccgatggctacgaccagtacgatgtctgatgacatggtgttcaacatgggtatagaagtctctattccaacgaaatagaccattgatgtcgaatgcaagaatagctaatcaacttgacgattgggcttctgcaggtcgatgtccagccacgtgtaatttcgtatggtctccactgatttggcccacgactgccatgattctatgccgtagtggacatccaaataacccatggtggcctaatggatagccgtgcactctgataagacttgtgaatcaaatcatagggatctgtacactgacgtgagcggtaactggaatttgcactcgggagccccgtctggctgcacaacatgaaaatcatacacaccaagcc

SEQ ID NO: 528177 - DNA, 408 bp, Homo sapiens
  misc_feature (359)..(359): n is a, c, g, or t
gatttagcattaattgacggtgaacaatataagcattacgcagaacagtcgattacagacaggcgcaacctaacgttgattgaggtagacgcatgagtgttaaaattgttggaggtgatcgatatatccaagccgttaaaaaaatggcggcaacagtaccgcaagctgctcgtgacacagtgaagagatacacagtagctacacaagcgcaggtttagattagagcctgttaaacaggttttcttaacgtaatacaacgattaaattcagacacgactacgcaacgactggtacggttacggctaacgctttcaaccgtggctacaattatggcgacgtcaggatttgcacaagttaanccacccaacggtgggcaagtaagtttatgtctactgcatttattcacaa

SEQ ID NO: 528178 - DNA, 970 bp, Homo sapiens
gcaaatgtaagagtatctgccaagttaggactatggattgaggccacagttttcccaggttgaccctgcccaggcaccattgcacttcagcctgggcacaagaacgaaactccctctcaaaaaaaaaaaaaaaaaaaaaaaacctttaaatattggagttcaatttaaaagttttccgggggattccccatatttttggctttggtacgttggggtagtgacaaagatgttttatattttttatgtctctcaaatcgtatatatagcaaaggggcgtaatatcctttaattaaccacctgatttagggcaccatttagggggtacatctctgaaagtttcctaaaacgatttacaaattccaggaaggtgtcaaatacctcggctactccgtgtgggccaccagtgcaggggttggcatcaggggggggttggtgtcccattcaaaaaacattcgggggagggggaccttatattgaaatagcttattggtgtgtttggaccccttaaaaatgtagctggttttctacttttatcattagcacttgggcttttgtaaattattcctcaaatggttggaggagggcatttccgtccatcaatggatcctaatataacctacattaagagtagggtaacaagggggttagagaatgttaattattttccttgaaggtatattaaaaattgtgtaaaggtttactaatttacttaaatgatttcttaaaagggggaactctttttttagttgctcctgatcatcaaattggagaaaaagaaaccctgtcgtgggtggaaacgaggtgagagaggggtaagggggggtggaaggaaaacgctcgagagaattacaagggattggcatgtgcaggaaaggaatggggacggaattgacaagaattaatccataaaaacgggagaagtaaatgagggggacaaggtgatcggacaaaaagtagaagggataattct

SEQ ID NO: 528179 - DNA, 593 bp, Homo sapiens
cggtgtgcgctacaggacctagtaatagtcaccaggaacttctggcctacaactgagaagttcctgcataaacgggaagtctggtttgctcatgaggataaagttgacagtctctatggcgacagctgtggctgaacagggccccggtcgtgcacagggaaaaccctagggggacaggtgttctgttacctcggactccagagtttggtcaccatggcaacagtggtggggtccaaaccgcctgggggtggagcatggagggtggtctggaactggagtgggcctgtttggtgacagttgggaaagggacgtcagaggacagggtgggtttgctctcccttcaaagaaatatctgaggggtgggacgtggcccccagtaagtgagccagctggctgtgtgtcagtctgaggtggcagatgggggtgctcgcccacgaaactagaggggtgtgccctgttacccagaaactgcaggggactctcagggagagggggagaatgggagtctccaggactcaggtcaccataagggacaataagcgcctcggcccacaaactccatgtgagcagggggagtgaccctgaagtacctt

SEQ ID NO: 528180 - DNA, 508 bp, Homo sapiens
cacagagcgagctactagagcggtggttcatctgcgttgctctaaaatgggacttgtttcattattggtgatggctgaaagaatattttcctagtgtatgtatatagagcagtactttgatctctttatctgtggatgaacagctactttgaaatatatgatacatttgtgtaaggctagtccgctgctgtggaatagaaggtcagaattgatcactatcatctgagagtaacttattgtacccatcactgatatcctatccgagactgcctccacttccccagcagcctctgaattacttcatgtggctgcagatggaaggatttacccaaaggtttataggctgcaacatattccgtggtgtatctaagtacaggcagtaacctcattcctgcagctgtgtatgaacaggtaatttaccatgcggtcctccaggttcaacagtatggctccaaatgatgaatttcattctgattttctggctgaagactattctgtaagagtataa

SEQ ID NO: 528181 - DNA, 428 bp, Homo sapiens
  misc_feature (6)..(6): n is a, c, g, or t
  misc_feature (39)..(39): n is a, c, g, or t
  misc_feature (95)..(95): n is a, c, g, or t
  misc_feature (117)..(117): n is a, c, g, or t
  misc_feature (148)..(148): n is a, c, g, or t
  misc_feature (195)..(195): n is a, c, g, or t
ccccgnttcaaccccgcaaggccagaaaggagccaaaanggaaaaaccatggaaccaagaggcctcctacctgtggaattccagtggccaaaagnaatgggaggggccagagtaaancaggttttaggaattatccgggtttgaatgnacttgaattgaagcctgtagggtgtaagagactgccctcctactgtnctggcacccaggggtaattagggcagtctggatagtggtctggagtgtgagagctccctaaaggaggtggttggaggtgtaggttttggattggttgatctgtatatgaaaggtgcacgtgcagggtgagtcctctactatcactagaaattggctggtcccaggagaagtagtctctctagagacagcaatgccccagatgtcaaagcatcagaaaatagcagaaaaaaaaa

SEQ ID NO: 528182 - DNA, 366 bp, Homo sapiens
  misc_feature (151)..(151): n is a, c, g, or t
  misc_feature (198)..(198): n is a, c, g, or t
  misc_feature (282)..(282): n is a, c, g, or t
  misc_feature (358)..(358): n is a, c, g, or t
agcagagttccagctcccagtgtgtgggggatgcggacatcttcctgtgcacagagggctctgctgaccctttcagtgacaggggaagggcgcctgcatttggaagaaggggcttgtagcggccgcctgctgggagggcgtcctccagaangggaggcatttgctcctgccctcgcagcttgtcctgaagtaaaattnctctcctgggaaaagtgggagaggaattaggagagccccagggtggcttgctgtgtggggtctgggcgtggcggtgcccttggnccgttaccagccataccctagcctaggttgcccaggtcggccacccagcttaggctactgttggggggctccggcnagccgccc

SEQ ID NO: 528183 - DNA, 178 bp, Homo sapiens
gcttacctgggggggtggggtgggctggaacacaggtgtgtcagcgtgctgtactggaagtttgtatcatagctcatcctgcattccactttgttatactctagccaagattgactgtattagatgaaatgtgaggatcttgttcaatcgcgaaacccccgcttacctcctctatttt

SEQ ID NO: 528184 - DNA, 327 bp, Homo sapiens
tccctagcgacccttagacagcggacccctccgaaactgtacacagttatgaaggttcatgtcaattattcacatcttgcaacacaagtgtatggacttgatttctcttacactacttcagtgtcaaacaaggaactgaaggccatcagatttgcagcttacaaattcacataaaggaaatataaaaatattctgtgcttctgagacaggctctgacatgtatactggtgaggattaccatacttctttattttgaggaagacagtgtaaaatattacataatagcacagatactattgtatgctcttggggttccctgctgtctga

SEQ ID NO: 528185 - DNA, 181 bp, Homo sapiens
ggtgcgctctatgcctaaggagctagtgtttctaggcgagctctctctacccaagtttgcacttgtagttagtgagtctttgtactctactggaatatgaacaggttcataaaaccgattccatggtgaaccaattctgtcggctgcatgatagtcctgagtgcaatcagatagcatttgg

SEQ ID NO: 528186 - DNA, 296 bp, Homo sapiens
actctcatacatattatacagagaacgagtgaatgaatgaatgaccgagcacatatgacatatagtaacacttataaaatgtgggcgaaggctatatgactattgtgagtactgtttttcaaacgtccacttatgctaccataaaaagttaaaaatttaagatacggcaggtgcagtggctcaacacctgtaatcccagcaactcacgaggctgaggcatgagaatcgcttgaacctcatgaggcataggttgaggagagctgaagttgcgccactgcactctagcctggttgaca

SEQ ID NO: 528187 - DNA, 1051 bp, Homo sapiens
  misc_feature (182)..(182): n is a, c, g, or t
  misc_feature (603)..(604): n is a, c, g, or t
  misc_feature (613)..(613): n is a, c, g, or t
  misc_feature (632)..(632): n is a, c, g, or t
  misc_feature (666)..(666): n is a, c, g, or t
  misc_feature (686)..(686): n is a, c, g, or t
  misc_feature (704)..(704): n is a, c, g, or t
  misc_feature (707)..(707): n is a, c, g, or t
tggggttgtcaaggaggatattaatgggggttccatgagtgcggggaaaagggcgggatgactggggagggggaaagaaaccccttcccctggggattccgtgcagcctccgggcctcccggtgggtggggggttagaagtgggagacacctattgaacatttcgtgtagggggcacacgtntctttcctccagcgggtgcctcccttacagtgcgttgaccgtgtgcagcgtgtaagctctcggggtggagactctccatgtggcctcgggcgtacaggctacaggtgatacgctggctgggccggcgatacttgtaggttgcgcctctggttagggaggggtgtttggggtggtgtcctccacttcccggctcttagaccgggggctggcacatcttgctcttcacagggcacacgtggtgcaccagctccccggggtaaagaatgctcactgagatcacaagaacacatctaatgtgtgtggggcccttggtatggcgctagtggaagctcctctacaaggagggagggcgccggggagaacacaagactgtgagacacacgtgggtgtggttagggggcctatgggggcgcttgagacnnccaagaganctgcggtagaacctgtggngctcccacagtgtctctcgagaaaagcacaatanacagcggcgcgacactacangagacgagcagtgtacanaangagacctggcgcagcgatcaatatacactccaggcgctaacataccatacaggctctgtggacgccccatgtggtatgtgcgcgcacgtgaatgcgcatagcagtggttgctcaagaccttgtgtagaccgccagaggaagacaacttcggcgctcaaggggtgactccccgtgaagggggccagatatgggcgggatcacgccataagatagagagaggtagagggggagcagagatcccctgagaaaacgcgtgggggggacaccacggtggacacatcaataacgcggcgcgccgaagtgttagagagcgtgccccaagtgcagggaaaatgggggacccc

SEQ ID NO: 528188 - DNA, 155 bp, Homo sapiens
gcgtatcgatgaaagggatgggtggagatggcgatgatatggaaatattcatggaagagatgagagaaatcgacgaagaaaacttagggagctagcagttgcaggaattgtctagcgtatccattatgggggagctctctcaatcaccatagacc

SEQ ID NO: 528189 - DNA, 130 bp, Homo sapiens
  misc_feature (44)..(44): n is a, c, g, or t
  misc_feature (70)..(70): n is a, c, g, or t
cgcggatgatggtcagaaaacatcttcagtactggacgcagtgntgcagcacagtagcacctatttgacncaacaccattccttcagcgaccacagctggatctgtgtcacacacgcaaggctccacaag

SEQ ID NO: 528190 - DNA, 193 bp, Homo sapiens
taatcacatgagataccccttcacatatcaattccacgcgcctgccaaatcggttgcgacaacatattgatattctaagttttgaatggccttcatcacccgacgacgttcacgaggttcgtcatcaccatgaatttcagcaaccttcaggccacggccacgcaaatttagaagcgatttcctttgggcacgg

SEQ ID NO: 528191 - DNA, 141 bp, Homo sapiens
acaatcctcaatgtaattgttgaccttatcagtgtctattccagacataaactcctgttccacggttaatttatcaagaaaagtcttcagaagtagtgacatctttgatacaattatgcaattgcaggtatggtttgcaag

SEQ ID NO: 528192 - DNA, 219 bp, Homo sapiens
  misc_feature (54)..(54): n is a, c, g, or t
aagttttttttttttggtttgttaaaccagtttctttgtcttaaacatttaaangccccttgaaaacaaaaacaaatgcgggggttccaaagtaaactgctaatattttatctttgggggatgaaaaaaacaaatattttgacttttttcctgggacaatgccccttgatttttttatgcccggcctttaaattgaaaataaacccaattaaattccca

SEQ ID NO: 528193 - DNA, 287 bp, Homo sapiens
  misc_feature (82)..(83): n is a, c, g, or t
  misc_feature (103)..(103): n is a, c, g, or t
agggggaacaaggtaacattaaacaaaaaatcaggatgagaaaggatatgggtacatatgaagattgttttgttttgttttnngagactgagtctcgctatancacccaagctggagtgcagtggcacaatctcggctcaatgcaacctctgcctcctgggttcaagcgattcttgtgcttcagcctcctgagttagctgggattataggtgcccgccaccacgcccagctcatttttctatttttactagagacggtgtttcaccatgttggccaggctggtctgg

SEQ ID NO: 528194 - DNA, 1037 bp, Homo sapiens
ccttttttatataaacacccttgggtaacactctatggcacgaaagcctctttggtggtgtcgaaaataggctttttttctgtggaggaatatagtgatctcttctcggggggtctattgtgtgttatattatttggggctaacagttttatgtgcgaagacacactgtggtaaataaatagacctctcctgtattgttttaatcacatgtttgggggggttttatctacgattattgttttcagcagcctttcgtcgaataattatgggggggggttttccaatcacaagggggcatctctgtccatgatgtgacttttcttggctttcttttttacgtgggggagaaaacaaatttttcaacgatgtgtttttctgccgaaaattaaaaatagggggggttttagagaagatatactttttttgagagcacacttttttgtgggggtaatttataaggtgagggataacccctcttaaaacccccctccaggagggggccaccctctctatgagattatcactagcgtggtcacaccaccttctctcgagctagctccgtcctcctcggtgttgttgttacaacaacactttggtggccatcaacaccgcgggtgggttttggtatagagagagagaaaaagatagtgtgtcccgtataatactggggtgtatagcggtcgctcatttttctacctcacacgttcgacacctccacaccctcgtgcctgtttttcacacagcgcgtgttctccacacaacacaggtgggagtaaaatacccatcgcttctaagattgctcccccgagagttccaccaaagacaacattggaacttttttgtgcggcagtatacaacaacggggggagccccccccgccgccgccgcaaaaagcaaaaaatcccacaaaagggccacacagggggggacggcggcagtcaaaaaaaacaaagaggagggaaaaaaccccccgtcccccccggggggggagagagttttgtttttccccccaaaaaaacaaggataggggctttaca

SEQ ID NO: 528195 - DNA, 293 bp, Homo sapiens
ctcatagtgtgtgcccacatgcccaaaggcagcaagaggcaaagaaaagtatcgatgaggcctactgctctgcagaggcgtgtatgcacaaactgccatatcgaatggtaatgcaggagcaacaggactccttgcgagaagccaacacagacaccctccgtatgctcagatgcacttgcacgtcctggtaaaggcaaggagaaagacagtatctgaggactgaggagggaaggcaatcagctctgccttcgtaaatattgcattgcactgttcccctcttgaacaaatgcatg

SEQ ID NO: 528196 - DNA, 478 bp, Homo sapiens
ctagacatgattctataattgatcactccctgagtctcaagacaccttccgagtgtgtgccctagtccccttccaccctcagcggatgataatctcaagacacctcccgatgtgtctgctcactccaccttccacccccgccgtaattttttgtatttttagtagccgacggggtttcaccggtatttagccatggatggtctcagatctctctgacctctgtgatccatcctgcctcgccctcccagatgtgctgggattacacggcgtcagccacctgtgaccgggcttcagagtgtactctttctagcccatctgaaaatacgtctacgtaggtcgaagataagattgtgtacagggtacatgttgtagaggctaacagaaaacatggcagattatttaacatcatcctgaaagtggtgctttatctgatgaaagtgcttgtactccatagggaaatgttccaacgtgcgcaagt

SEQ ID NO: 528197 - DNA, 620 bp, Homo sapiens
gcacagttggggtttgacaggtgcccagatgtgctcctgtctggggggcgcggaggttgctgtgtgtgtccatatgttggatgtcccgtggtttctttgtaagggtatcctctgttgtcaatttcgcgttggcccccacctcgggggttcccccttccgaggctgggtccttttggagctccttcgtggttgagagaaatccccttggtcacggtcccttcagttccggatggggtgtctgtgcgtagggccctgtcgcgagagatgtctgtgtagtgtcctggcggtcgggcatcgttgtattcccactatggttctggcactttatgacccttgtgaaaaagaagcccctgatgctatttgggcatctagacagacacgctacgggagatatattcacaaccacagagtgcgcagcacgcaccttgcggctcgctgccttcggccagctccacttaaagtcctaggcacgtggagccctctgccttccaagatgcccacagaaaccaaagaatgaaacccagtggatacaccgttcagattccaccaagcaccacctatgcccttacgcccatgaacgccccatggaggaggacggggaggagaaatcgccccagcca

SEQ ID NO: 528198 - DNA, 902 bp, Homo sapiens
gccccccccctgggggttctccggggtgccccacacctgtcctgggtggagaagtatccctccgccctaaccgtggggtgcccgccctctttttctttatcagggctctcctgggtggacgagcaacactgacgcttccttgggatagttccttctcccccggtgtcagtcccaatcgaaaccgtgctttgtccgcttatgaatcgagtagtccctctcgccctacatttgcccactcattcgggtgactgtcgcttctcgcctgctggtgtgcgcaccagcgtcgttttccacgcccgtcttaccaacttgctgcctggcaatcgtgtactgtaagacgcaggttctgggggaacaaccagcgccgtgcccaccggttggttagtattaacctcacgtccagcacctagcgtttcgttggttaggcccatagatccctggttcgctaagcgagaggccgtcgtaagcaaacatgacattcgcctgtagcgaccccaccacccccgccatggtctgggtcgaggcggcgaaccaccacgccctgccaggcagccacggggctctttcctcgtcgactttcttttgagtggcagcatgctgtggctggagcgagcccgactacgccagcgtcgcacctgattggccgtgcgcgcccgccctcatgccctccggagcctcttctctcctctctgtcagggttctactgaccatcgggcagcagacacgttagccctgcctcagttttcgttgacatctttgtgtattctcacaacataagatagactaacatcaccatatatgttacgccaataaaataaaaataatattacaaagaaaaaaagaaaagaggaagaaacaagaaaccatacacaaaatacaaaaaaacaaaaaacatgacgaac

SEQ ID NO: 528199 - DNA, 247 bp, Homo sapiens
catcttatcatagaaacataaggctttacatagggaccatttggggatatgtctttcactggctgtttaagataatatggtatcagagattaatgtttatattctacctcaaagtgtaagaaagaaaacaatgtttcaaattgtctatttgtggggagagatacatggctataggcacattggtaaaggtatacttaaatagcttcttgtcacctaaacaaaagcgaataaaaagtatccttgaaat

SEQ ID NO: 528200 - DNA, 1033 bp, Homo sapiens
cctccggcatctggggtcctgggtgatccaaagtttatcctccacgaaggaggtggaggagtagaaatggcgtgactcattgccgtatggtcctattcgcagtgagtgcattcggtatggtgtccctactcttaatgaccttcacgcggccggtccccttctatagtggaacttgtcgtgccatcgtcggggagtgcgttgccgtattggtggggcgtgccgacggccaccggcggtctgggacctcatggcactgtctgagctgctgccaaagtcctccctgaagtacctccatagagtgctagcacgagtaacattaccccatgagttgtgcagaacgctcacttctccaattgagctaaccacagtagaatgcgtcatctagtgagatattatcaataagacactcatcattcgcttggacaatctgagaggtcttgcccagacagacataggcattggataagatagtgaaagatccgaaatgatcaatcaccttacaccaacacgaagaacccatagagactatcataggcaagggcatcgcgatgctctcttgcgtgagttccacggcccttggattacccaattgagttgcaaacaaagacacaaaaccccttaggtgtatcatggcggtagatttgggcgccacaataggcactagtttttaccgtgcgcagcaagacgcacactttcacatctaggaagggttggacggcgttcatcgtatcgggacacattaggtattggacccttttgccccatagcccagtacgatttccccaatgcaacatatcaagtgccgctggggcctcacggaagcgattggcgcacgggacgccgttggatgttcccatatggactcgtggacaggcaccgagcaataacgcaaagtgacccccaacgcaacacacaatcggtggggtacccaattgggttagggattccaatttcgttgggttggggcattcccagatgggcaacgacatctttgggacaatgtggaagtaaacgaaacatgaccaacccaggg

SEQ ID NO: 528201 - DNA, 241 bp, Homo sapiens
gactttagaggatcccgactggatcgtgctgctcatcgtacgtgttcactgtgtgagacaggcgctggtctagctctcgtggcctgctggacctgctcgccagtgacggcagcaggcgggtagtgcccttggaaagctggcggttcccgatgataaccaggtcccctacagccccagtacgtgacaggtgcgtcccacagcatagctccacagaggtctgcagtgcggcgttggatgcagt

SEQ ID NO: 528202 - DNA, 964 bp, Homo sapiens
tggcgccgcgcagcccatggagccgtgactgacgacgaagtaatacggaagcgtctcctcattgatggagatggtgctgagatgatcggaaaataatctgctagtgagagagttccattaactggtgcacactctctgggccccgaggacagaggggaatatagcccagtaccaaggttatgctgaaggcgcgctggtctcaggtgtgcattttacaagtgcggcaaaacttttaccatagtatagtgcatattgacttctccaagagaacatgcacactctttcttgacaacacattttcccacgggacacatagaaatgtaccgcatagcttggaccacctatgaaaacaatttgggctgcaggtcgcaaaaaacggcaatttttttcaaggcaaaaggaataggaaaaaattcggcaaggaattatgattggtttgtgcaaaaggttgtttcaggcacctaattccagacgaggcattgagaactttacagggaactagaggcgtttcttgcgcaaaaaggaatgagggagcattttccacacttttaacgacggtgttgaaggatacggctgatttgagacgggaacaagtttcatggttcttctagtacccatccatgaatttcagcacacttgtggacattgatgcaaaacttctcagaggtagaaaggaaggtcagggaaggcaaggctggaaacagattctagcaatagacaagggtattgcccaaccaattccaggaatttgattggttactgaccattattgtgttaaatgtggtatgctcttgaaatattaaggtgggggaggaaaatactctgttcagttgaaggtttcctcatttttctccttaaaggaatgcttagataattgtgttaaagggctttcttaggggaggccacaaggttaatgtttgtcaaaaaaaaaaagatgggcgcgaataaatgtggcggaaaatgt

SEQ ID NO: 528203 - DNA, 389 bp, Homo sapiens
  misc_feature (5)..(5): n is a, c, g, or t
  misc_feature (23)..(23): n is a, c, g, or t
  misc_feature (365)..(365): n is a, c, g, or t
catcnttcatagatgagattagntgccttaccaaagagcttgaggggacaaattcagccctccacctcttctgccacgtgaagacacagcatttatctcttttgccgtctctccttccaccatgtgaaaatgcggcaacaaggcactgtcgtgaaaggagagccaaccttctgtagacgctgactttggcagtaccttgatcttggacttcccagacttccaagagctgtgagaaataaatttccatgatttaaattgcctagtttgtagtattttgttatagcagcacaaatggactaagctagcttccctagtgtgagtgcctggaccctgcctttccttgcaagtgactgagagcactgctngtgcatggccttgtgcattggaac

SEQ ID NO: 528204 - DNA, 376 bp, Homo sapiens
agccaaaagctgttattacagtttttctaacccttgccccctccgattcatcgcatccataatctccatcgcatgaaatagccggtctaggtgctcacttacgataacactatagtactttggttttctgattgcttgtgcatatctaggcgtaggattatagcctccagctggctccatggtgcatcacatgtcgtgactgagaaccctgtggcggcgtaatattccatgctctgtatgtaccacatgttcttcatctagtccacctttgatggagacgtattgattccatgtctttgctttgtgaatagggctgttgatgggcatgtctttttgctagaatgatttctgtgcctttgggtactacgctttggca

SEQ ID NO: 528205 - DNA, 165 bp, Homo sapiens
cctcgtggaagtagtttacctgttacaaacctgcacatgtacttctgaacctaaaataaaagtaaaaaaaaataatttgggcacgatgactcatgcctggaatactagcatgttggcgggaggatcgcttgaggccaggagtttgaggttacactgagctgtgat

SEQ ID NO: 528206 - DNA, 158 bp, Homo sapiens
cctgctgggccctggagagtcctgtttcacagcccaggggttgtccgctctggcccgccccggagcagggagggtggcttggacaacgcccgagggcccctgcaagcactttacttcctgttcctccaaagccttaaccccaaagccctcctgcaccc

SEQ ID NO: 528207 - DNA, 894 bp, Homo sapiens
cacggaaagcctcatttgtgtggaaagtcagaggaaaaatgatccatggtggacacttggcggattatctgtcatacaacgatccttcacttcatacacccaaggctcagtctcccatctcatttccagaaaggctcatacctggtcttgcaggataagcatctgtcttgtcattccaggtgccagtaatcctctcagaggtcattgaagggtgttcacccatcccagcccaaggcttggcaacactgccagatgtcttagacagggatcttgatgagggagctgaggcgtgcatccaggtcgacgtcagaacggctaaaggataccagcgcctatcccagtttcggacctcgtggcagtggtggcacgaacgaaagacacgtaaatgctacatcctatagttttacagaaggcatgttgcacattctggtcacttagctcatcatagagacgaacccagtggtgacttcgcttgactcagttgctagatagatctgactgcattctaccttgactgtcaagactgaattggttcaaccacgaggctagtatagaagcatgctgcccgaatgtgattgtggccaagtctgaagacttccatagcccgtaaagcgcatgcttgggaccggtggcccaggaagactgccagccaagcacgtcctgcttcgcccctttagttcaatattaatgccaaaaaattccaaggaacacgtgtattcgcaacagaaactccccgggggctttggtggaaagaggggaaagggctaatatccacgggaaacttgcaccaaccagcaatcccgaggttacactggttggcctccccagattacaacaattccttggccccattgggcaacatgagtgccaaagtactttcctttagaccattgg

SEQ ID NO: 528208 - DNA, 377 bp, Homo sapiens
  misc_feature (282)..(282): n is a, c, g, or t
ctggtctagaggatcccagagagtgtattacaaaagagtcaaaaagttttagaaatttataaagtaaaaatgttacagtaagatacagagaatttaatactgaagaaagaaaaatacattttttttctacaggcatgcatcaccagtgcccaggttaatgtgtttttttaattttggggtagggcatacgagtctcggctatgcgtgccgcaggttggtactttgagagcgtcctggtctcaagtaggttctcctggcctcagctctcccaagagggctaangattacagggtgagagatgtgagtcctcgtgtgccaggaccaataaatatatttttaagataagagttaagtgtaacgttaacgtggaacaggtg

SEQ ID NO: 528209 - DNA, 148 bp, Homo sapiens
ggggggggttttccccccccgggggcccccccccctttggggggccttttccccccccccggccccccccttttttccccccccccggggggggggggggggggggttttttttttttttccaatttttttttttttttttagggcca

SEQ ID NO: 528210 - DNA, 568 bp, Homo sapiens
atcatttaaaaaaaaaaagactttgatttgtagttagtttaaaaacaagtgttgcctaatctacctaaagagttaataaactctcttaggatctgctgtctgtcatgattcttgcctctgtgtgtgctttaaccttccgaaaatatgggatagaaaacatcactctgtttaaagtacagtgatgtgtttgctaggcagagtcattttgaaacttctgtttgggaagctatatcaaaaactgaagaatggcatggtcatctaaaaagtgatagctaatttgtactcaagagatagatgtgattttctcaaatctaattcttttaatcagaaggaacagataataccaggtaaaatggaacttaacagtttgttttgttaccatacttttaaaagttatatatgccaaaccattcttcttgttttagtgacccagtctattttggtaaacttattttgtaattttccccataaaaacatactagttacttccacattttattaataaaaaataccatccgttgggctatattggagcaaatgaccatattggtatgctttgtactttgac

SEQ ID NO: 528211 - DNA, 247 bp, Homo sapiens
  misc_feature (13)..(13): n is a, c, g, or t
catgaatggatgncctgagcttgaaaataaactgaaagagaataaaatatctttagagtcggaatatgagaaaatcaaagactccgagtgtggggactggaagaatattcgaggacccaggccttgggaagatcctaacctcctccaaggaagaaatccagaaagccctaagactaggacaacttgactctgctgattcttttttccttttttttttttttaagtaaaaatattattaactggaagg

SEQ ID NO: 528212 - DNA, 418 bp, Homo sapiens
caacctcagtccacctcccaggttcaagcgactcccccgcctcagtctcccgagcagttgaaaccacaggcacccatcaccacgcccggccaatcccctgtagtttccgtgtagagcaaggtgtttcgatatcgctcatcgttgttttaaaattccggacttcaatgtgatccacccgctcagcctcccaaagtgccgggaccacagacatgagccacctcgccgggcaagagatttaatttaaatctctttgaggagatttgaattaaaatactttaggaaaaaaaaatgtcctcagccaggcatggtggctcatgcctgtaatcccggcactttgggaggccgaggcaggtggatcacctaaggtcaggagttcgagaccagccttgccaacatggcgaaaccccgtctctactta

SEQ ID NO: 528213 - DNA, 961 bp, Homo sapiens
gcgcatccagatcccatcgcgctccgcatccgggaacaggggagagtgagatcctcgcgcaccgttcatcgcaaggcggctggaactgaccccaacatggtctgacaactggggacctggacctgggtgccagttggagacggagccgccctacgcctcacccaggattgcctccgcgttgtttcactctgactgtcactgacttttaccgcagctgtaactgtgctccaggcctttccatcttttcccccaggattccctttgaccctgtgtcgccctcagaggccacgattcttgggctcagggactggctttcggcctattggtggtggacgctgggggttctgggccggcgtttcaggcagtcgcttggagagcgagtgttccccgagagcagttcacggtggtgatgtgacttatgagcgggaggaagtgctctatgaagctctgttaatcgaggctgaatggtctccccttacctgaacaaggtcgtggtgagtgtggaattctcccaagctagtctatcacgagagaccttctgtggtctgacatagtggtccccatcatgtttggtccgtactgtgaacacccagtttgaacagacgattcttaccctggcaatgtattgaacagaggccatcctgtccatagaatgagatgccatcacctttcgccgtgacgaagcgtggttgggctcccggcgtgtggggagcatgcccgggaccccgatcgtgggcgttccatgtgcgggttcccaagcatattgacgggtccccttagtcggggttttaaaccccgagttctgtttgcgtttaggcgcctgtaggtggcctctacacggtgtcttccgccggtttgttgtgccggctctgcgagggggtgcacacgcgggggggcggacctgttcctctgtcccaggtgcgtgtctcacagctgctgtattccggaggagcggtgcccg

SEQ ID NO: 528214 - DNA, 333 bp, Homo sapiens
gatacaggccccacagatgtcgacacacatcacagcgacacaacacaccatgcgctaaatacatcacacatactacacacatgcaaatcacatcacagacaccacatacgcaccacaccacataccacacacacgacacatcacatgccacacatcacctgtcacacacatcaaacacacacacaatacaccacacacctcacacacatcaaacaaaccccacacacaccatatcacacacacatcacacacaccacacatgcaccatatgcctccacacacagagacacatacacatcacacaccctcacacacacacaccccacatgccat

SEQ ID NO: 528215 - DNA, 120 bp, Homo sapiens
cgttatagaggaccccggtgtttatccgatgccagtacacgtgagcactactttttttttaaatttattttttgtagagacgggggtctcactatgttgcccaggttgttctcaaacctc

SEQ ID NO: 528216 - DNA, 461 bp, Homo sapiens
ctaagacgaagataagaaactatctagctaagtggagacaaacatagtagagatacacgaggaaggaataggatgtacacatataacccatcaatatagcacccagagtaatttcagcaggacccttctgtaagcatctaaggtacaggtaaggacagacaagataaaaatacaggatgtaggccaggagcagtggttcaagcctgtaatacccagcacttaagggcaggctgagagaggcagatcatgaggtcaggagatacaagaccatcctaggtaacacagtagaaaccctatactactactaaaaataacaaaaaagtaaagttaggtaaagtaagtacgtaacgtaaagtaagccaggcttagtagtgagtagcctataagtaccaagccattcgggaggtagcggcaggagaatggtgtgaactaggaggcagagctagcagtgagatagcacc

SEQ ID NO: 528217 - DNA, 246 bp, Homo sapiens
ttttgtaattttagtagagaaggggtttcaccacgttggtcaggctggcctcaaacccctgacttcagatgatccacccacctcggcctcccaaagtgatgggattacaggtgtgagttaccacactgggccaggattagaattcttggtctcttaacctctcgttcagttttttcctcgtcgactcacatgccctccaaatgaataccgaagttagattttgcatattaaattgaaagaaagtta

SEQ ID NO: 528218 - DNA, 154 bp, Homo sapiens
tactttccacagggctgcagttggcagctcaggaatgccaagatttgaactgtagccaggactgaagggcacaaggaacctacatcttcagaacactgagagggaacatggctgcaactgtgagaaaacataggggaaacatataattgagcaa

SEQ ID NO: 528219 - DNA, 319 bp, Homo sapiens
ctgataccaccactcaagaatctgttttctttctttttctctttttttttgagacggagtcgcactctgttgcccaggctggagtgcagtggcatgatttcagctcactgcaacctctgccttccgctttcaagccattctcctgcttcagcctccagagtagcggggattaccggcgcccgccaccacgcctggctaattttggtatttttttagtagagatggggtttcaccatggtggccaggcttgtcctgacctcaggtgatccgcccaccttggcctcggtggtatagcctcagtggtataggggtggtataa

SEQ ID NO: 528220 - DNA, 453 bp, Homo sapiens
  misc_feature (12)..(12): n is a, c, g, or t
  misc_feature (36)..(36): n is a, c, g, or t
gaattaatgggnaccgtgaacgtcatcgccgcaagntgacgttgtccacaactgatgttggcctttaaaaccccgttctccccccacttatattacccctgatttttcgtttgctcacagcctgaagcgttgcactcccccctttttctggtgacgatggcatcgcaaaacgcaccgggtatcgcagcaatgaaagcagctggatattcggctcctgtttcgccattaattgtatttactggattgctggcactggttttttcccctttcggcgtttattccgtcggtattgcggcaatcaccgcggctatttgccaaagcccggaagcgcatccggataaagatcaacgttggctggccgctgccgttgcaggcattttctatttgctcgcaggtctgtttggtagtgccattaccgggatgatggctgccctgcccgtaagttggagtcgc

SEQ ID NO: 528221 - DNA, 360 bp, Homo sapiens
  misc_feature (1)..(1): n is a, c, g, or t
ngacacataaatgaaatttatgtttagacttgggtcccatcgaaatccaaaacacttctgatccaacctttttatgtaggaatactcaacttacaacagtcattcaccattcctccctacccccagccaccagtatatcaacttcccttaattatgaatttgcctattctgcacattatatataaataggattcataacctatatggtcatttgtgattggcttccttcatgttttcttcaagtttcaactatgttgtagcatggctcagtagctcatttcttttaagtgtcatataatactccggtgtgtacacaccccatattgtgtttatccatttctctatctattctcgtgccgt

SEQ ID NO: 528222 - DNA, 309 bp, Homo sapiens
cgcacggctgggggggcggtggagcccggggccggcctgctctccggggccgaggtgacaccgtgggctgcgggcgcggtggagcccggggccggcctgctctccggggccgaggtgacacgcacggctgggggggcggtggagcccggggccggcctggtgtccggggccgaggtgacacgcacggctgggggggcggtggagcccggggccggcctgctctccggggccgaggtgacacgcacggctgggggggcggtggagcccggggccggcctgctctccggggccgaggtgacacgcacggct

SEQ ID NO: 528223 - DNA, 120 bp, Homo sapiens
gggtgctctgtatgttgaggagagagctcagaaaaaaaggaggagctactctcaggctgcagcagtgacagtgccagggctctgatgtgtctctcgcgagttgtgaagtgtgagacagct

SEQ ID NO: 528224 - DNA, 273 bp, Homo sapiens
cctaggctgcagtgcaggtggtgcgatttcagctccctgcaactccgtctcgggctcgtgattcctcccgcctcatctcccaagtagctgggactaaaggcatgcaccaccacacctggctaatttttgtattttattttgtagagatgacctttcgccatgttgcccaggctggtcttgaactcctgggctcaagctgttttactgcctcagtttcacaaaatcctggaattacaggcctgacctctttgattttgaaatactgttttgtca

SEQ ID NO: 528225 - DNA, 469 bp, Homo sapiens
gagatttcttaatttcatggttctttaaatattataaacacagagtcaacatagaatgcaattgtatttgttaaaatacacacattggaggacaagagcagatgactacttttcgaagtaatgctgctccttcctaaaagtctgttttcaatcctggtaatattaggggctctccggcacctaagaagccttgaatgagagctaatccaatctagagagcgatggtgtcagcatttcggtttgcatatctgtgtgtccgtatctgcgtttgtgtgcgtgtatgtgtgcccctgtgtgtgggcccagttttcaggcatgtagaataagcatggagtcatattgaggacgggctcattgtcatgaagatcatgcttgttgctttaccctcgtatgtgagtatattttttagcattgatgcattcattcttcaatccaaatatgtttgcattattaagatattggagtttca

SEQ ID NO: 528226 - DNA, 861 bp, Homo sapiens
  misc_feature (35)..(35): n is a, c, g, or t
  misc_feature (61)..(61): n is a, c, g, or t
  misc_feature (63)..(63): n is a, c, g, or t
  misc_feature (68)..(68): n is a, c, g, or t
  misc_feature (86)..(86): n is a, c, g, or t
  misc_feature (91)..(91): n is a, c, g, or t
  misc_feature (93)..(93): n is a, c, g, or t
  misc_feature (111)..(111): n is a, c, g, or t
  misc_feature (120)..(120): n is a, c, g, or t
  misc_feature (125)..(127): n is a, c, g, or t
  misc_feature (151)..(151): n is a, c, g, or t
  misc_feature (175)..(175): n is a, c, g, or t
  misc_feature (177)..(178): n is a, c, g, or t
  misc_feature (181)..(181): n is a, c, g, or t
  misc_feature (186)..(186): n is a, c, g, or t
  misc_feature (196)..(196): n is a, c, g, or t
  misc_feature (200)..(200): n is a, c, g, or t
  misc_feature (211)..(211): n is a, c, g, or t
  misc_feature (218)..(218): n is a, c, g, or t
  misc_feature (229)..(230): n is a, c, g, or t
  misc_feature (233)..(233): n is a, c, g, or t
  misc_feature (247)..(249): n is a, c, g, or t
  misc_feature (251)..(252): n is a, c, g, or t
  misc_feature (266)..(266): n is a, c, g, or t
  misc_feature (275)..(275): n is a, c, g, or t
  misc_feature (280)..(280): n is a, c, g, or t
  misc_feature (287)..(287): n is a, c, g, or t
  misc_feature (289)..(289): n is a, c, g, or t
  misc_feature (292)..(292): n is a, c, g, or t
  misc_feature (310)..(310): n is a, c, g, or t
  misc_feature (312)..(312): n is a, c, g, or t
  misc_feature (316)..(316): n is a, c, g, or t
  misc_feature (318)..(318): n is a, c, g, or t
  misc_feature (322)..(322): n is a, c, g, or t
  misc_feature (325)..(325): n is a, c, g, or t
  misc_feature (327)..(327): n is a, c, g, or t
  misc_feature (329)..(329): n is a, c, g, or t
  misc_feature (344)..(344): n is a, c, g, or t
  misc_feature (352)..(352): n is a, c, g, or t
  misc_feature (363)..(363): n is a, c, g, or t
  misc_feature (368)..(368): n is a, c, g, or t
  misc_feature (372)..(372): n is a, c, g, or t
  misc_feature (378)..(378): n is a, c, g, or t
  misc_feature (403)..(403): n is a, c, g, or t
  misc_feature (413)..(414): n is a, c, g, or t
  misc_feature (434)..(434): n is a, c, g, or t
  misc_feature (436)..(436): n is a, c, g, or t
  misc_feature (469)..(469): n is a, c, g, or t
  misc_feature (517)..(517): n is a, c, g, or t
  misc_feature (550)..(550): n is a, c, g, or t
  misc_feature (600)..(600): n is a, c, g, or t
agagatacatgaacacatttgataaaataaaaggnttatgtgaataatagcactttttttntnaaaanaaagtgcctctcaaaganttttntnttttgacagtcgcttaantcttcagtntctgnnntgggcacagtggctcatgccagtnatcccagcactttgggaggctgangnnggngggtngcttggggtnaggngttcgggttcngcctggncaacatggtgnnacnggtctctactgtannntnnaattctagattttnctgggtgtngtggngcttgcntngtngtcccaactactcgggtngntggngngggnggntngnttgggcctggggggnggaggttncagtgtgccgngtttnagcnattgcnctccatcctgggcgacagagtgagnctttttctcnnaaaaaaagataaggaaagtntnagaaagaaaaaaacccactgtaaaacaaaagcnaaccaacttcagtatcttatggttctcacactttagcatgcataaganttcctgggagttcttgataaaacacagattgcngggtcccacctccagagtttctgatagagtaggtcaggggtgggccaatnatttgcatttgtaacaaattcccaggtgatgctgatgttgctattctgaggactaatagcaatgattgcaattcttggagtactaatggcctaggtcttgctctttagggaataggaatatatattctgttattctattattgctctacaggtgttataaaccgacaagtgatccacaggaagtacattttgtagatctttagcgcaaggaatattttctatctttaattttttacatctccattttatgaaagcatctaa

SEQ ID NO: 528227 - DNA, 391 bp, Homo sapiens
  misc_feature (4)..(4): n is a, c, g, or t
  misc_feature (35)..(35): n is a, c, g, or t
  misc_feature (42)..(42): n is a, c, g, or t
  misc_feature (57)..(57): n is a, c, g, or t
  misc_feature (120)..(120): n is a, c, g, or t
  misc_feature (220)..(220): n is a, c, g, or t
  misc_feature (340)..(340): n is a, c, g, or t
  misc_feature (343)..(343): n is a, c, g, or t
  misc_feature (376)..(376): n is a, c, g, or t
tttnatccctggctgaaatttagtattggattttncattttnacgctggtgtttttnctgatactgcgcaaagacttctcccacagtagcgccgcagccgggacaatttttgcatttatnagtttcacgacattactgttttactcaacctacggtgcgctttatttaagcgaaggttttaatccgcgaatagaaagtttgatgaccgcgttctattttncgatagaaaccatgtcaaccgtcggctatggcgatattgtccctgttttctgaaatcagcacgattgttcactatttcggtcattatttccggcattaccgttttttgccacatctatgnccncaatttttgggtccggttatccgcggggggggncccggtaccccaatt

SEQ ID NO: 528228 - DNA, 379 bp, Homo sapiens
gaatatatatatatagatatactcacaatatatatatttacagtactttatatatacaatatttatatatatataatttactatagtaaattatccttttccagtgaagaaaaccttgttttataaaaaggaagggaatgaggggagaaatgcatattgcaaagtacaaaaggctatttttaaacagtttatatagaaaggtcacagagaataactcaaaaatatttgaattgtagcactgatacgttaaaatggaacttcagattcatttgtatcctttccatttggaggtttaggttagcaaaccaaatgacccatccagtgaatttgtcaatatagatagatcattcagctcttcagggtttgtagacttaatatt

SEQ ID NO: 528229 - DNA, 481 bp, Homo sapiens
agcaaggttgaggcctagttccagagcatggggtctcggttgcctaaggctaactttttcgacgctatttagctaatctattatctatacctatcctaaacttcatcatctcctcttaattatctatgtcatgatattactctcgacctcatccactctctatcaccctatctttatcatgactagcatatagatccctctatactttgcatcacactcatcttatataatcaatcttctccctagcacttttttcaaactgtattttctcacataactatttcaatacattctctacatttcactctctcctcaacttcttagacatctataactcccttctcactaatcatatttttcatcaccatccttttactattctctctaataccatcttaactattacattcgctctactattcctgtctcccacttacatcatctttgactagtatgacctcagtccccattctattttcct

SEQ ID NO: 528230 - DNA, 595 bp, Homo sapiens
cgtaagtagcacagatgtgaggtagcaatgttgctgttggagttaacaggccaagcatgttgacagctatggaaacttgggtcaccaagccacagactgtgccacatattgaaagtaattcccagtttaagtctgcacacagctccaaaagagtaaggagatgaggggtggactccgtaattgctaaggtccttaagacagatgctgatgacattcaggaagaagttacctgactaaataccttctggatacatgacattggtctatcttggaataacatgcccagtagagcatatacctcagtgagggggtcggcagtactggctttaaagcttaaaaggaataactaaggtatctatttgagggaaatgaatttgaggactacaaatctatttgaggacaccccctcttgtaatttaggagttgctgggaaaaaagacaaaatacaatacacgtcctcacacatgtacacacagatgaatgcgtccgcaacttcgacggacgcattcaaaggcagtgtgtagagggcaatttatagcagtaaatgccccaagagcaagcggaagatcaagattgaacctgatacacattaaag

SEQ ID NO: 528231 - DNA, 690 bp, Homo sapiens
cagtccacacgaaactagacctgaactccagatcgatacagtcacataccctagagtcggaaacacaattacatacgtagaccattcatgaccaatgaatgcatacagaatactgaagtaagatgtaacaactctaagctggacattatatacaaaatacatacaatgggctcatggcctccgactgaatgatacaatgataccaatgcatacaaaaaggaactacactatacaagagcatccactatgttgtacaactccgatgtgtctgctaagaacttgacacaatgttaaactacgacgtcaagcgtcttataagcaagattcaaactatatcatacaatcaacctcaatctcctcgaatcctaacctctcattagggttggcttaggtcaaggacgagcaagtgggtacatgtggcaagtatagacaatgtataccagtcttgaggtagaaaagatatacagcgcaatatgtaggtcgcgcaagataatacggtgtcaagtcgggcattacaactcatataggtgtactacatcaaatacatgtccttttaaaaactcaaaagaaaagtagtgagggtaccacaaggagggttagtgtatgtcatgcgtatacacgaccctcgtgcacatctagtcaataacttgcgttggaatatatacacatcatcaagaaactcgcggaact

SEQ ID NO: 528232 - DNA, 830 bp, Homo sapiens
gaaacttacacacacctagacatagacatgaaattaggagacagataactgcggtgaacactctagaagaaaatatagggagaagcctagtaaacattgcttttggcagattttttccgaatatcacattgaaaagcaggaaccaacaagaagggaattagatcaacggtacatatatctagactgttcaaaaccttctgcatatccacacactctagggaaacactaagctggagtacaaatgccatccaccatgtgacttctgaaacatccaccaccaccaagggtgaataacttcatttttttaatggaccagtgtcttcaaagacatttccttacaacgacagctatgcaaataaccagagaggaattttgaaaagacaatcaaaatcacttatgagaagaatgcaaagcaaaatctcaatgaactctttaactctcacccattagcatggccactgttcatacaaatcaatagaagtaatcaatgtctgtcaagtatgtgaggatttcggaacctccatgcactagttggtggataaggatataatgcagcccatcaataaaagtaggatgcaggttttccaaaatattaaaaatgaactgtggctcatgcctgtaatttcaacattttaggagggctaattgatgggagaattatcttaggctcagaagtatgagttcagcctgagcaacatactgagaccccatctcttcaaaaaatacataaaattagtcagatatgctggcatgtgactgtagtcccagctacttgggtgactgaggtggacggatcatttgagcctgggaaataccggctgcagtgaaca

SEQ ID NO: 528233 - DNA, 403 bp, Homo sapiens
attggcgcagcactgctgtggaatctgtccatcaggagagatcgcacacagttgacaagcgctgtggtcgcactgtgaacttgaacttgatggggtcctcaagagtgcgcgcatatcatcgttcccgtggcagccggtatggcggctctgcttgatgccacgctgttgatgactttgttgtgtcctgtaatctcgcccattgaagaagcactatcgcagaggaagactgctccaaacttctcccttccttccccgaccaaggagaccatcttactgtcttccagtcaagcaattgtctttgatcttcccagcgaaacggtggtactcatacttcaacaggtgctccttctgcgtggtatcccagaacctcagattcccagacacatctccggaggaactgtac

SEQ ID NO: 528234 - DNA, 906 bp, Homo sapiens
ggctgtgtctccggagcagatgcctgtgcttttctgtcaggtcaagtgctacactgcttgcccacataacagacgagacattggggcttgagttgacatacacctgaaacctcgcgcctctgacctgcgcaggctctagagccccatggttaggttcgggtagctgtacctcctctagatcgtgcggttctctgctatgttgtgtcttggcctgtagggtactccgcacagggcgccacggacgaccaatagggcctacggacccattgggaggcagcgagccgtgatagcaaggctcactcgagccgtgccgatggattgaaactctcgatgctccgttgcgtgtgtacccgaacgtacataagctctagttgcgggccctggtcccagtattcgtccatgctggacgcggtgtactggacttcattgcgtggcgcagcctcacgactcgattgcagaggccgcgtgcatccacctgtgagacctcaattcgtacaataggtgagagtgataggttgggttggaaaaatgaccgtcacgacctggtcagaagacacaccaccagtgctccgcgggacgcgggggaccaacgaaaagtgctagaggactgccaagtcgcacgcagaacgggccactagccagatcttgccccgtgcgtcggccccccgactggctcggagcgccctggttgatgaatggggcgcaccagtagtgatggcacagcatagcaaagcaggcgcgtggggaacgcgtaatcacgcgaggcatggtcaccacaggcgctcataagcacgatccacgaggtgagacttgagaagaagctactttggtgacgcctacgcctgccaggcagttagaatctctccttcattgcaagcgtagaatgctaatgctgtacgctataag

SEQ ID NO: 528235 - DNA, 327 bp, Homo sapiens
agccggccctggtgtagcacataaggaagggtccccaggtagtggagagcccaagttgagaacaataatgaacaattattgtatgaacaactgttagagacagctaatcacaaacaacctgcgggcacaatgacctcattccacacgtagcacccttcagcaggaccctataaaactttcctccagcccttgcctctttgcaggtagccccttctctgctgagctgcccactgcaacatattttcacaatttctctaataaatctgcccttctttacctacaactatcttggtaaatggctttaccacctgcaaaactgaccctagg

SEQ ID NO: 528236 - DNA, 100 bp, Homo sapiens
cattgtttatggaattacggcgtcaggatgttttggtagtgaacaacaacgcgcaacaggaaacgcgcactgacagcctaggcaacttcagcctgaagat

SEQ ID NO: 528237 - DNA, 578 bp, Homo sapiens
  misc_feature (267)..(267): n is a, c, g, or t
ccctggggcaccaacttggttgggggggacaccccagaggattttgttccggttcccatgtgcaaggctttcatttccttgcgcgcccttttctgggtggggttccccttcctgccttgtttttaaggagattgggcaaagggcggcccttctctcccccccccacagtgattttccttatcctggtgggctttgaggggcggctcttcctcattttcaccccagtgatgtttggggcccaggtgccctccctctgccccaattagncggggatagccccattttaaaaggaagagagaagatgggcttaaaaaaccaaatgggtgaacctgaaagccgtttttggcccccccttctttttagggtggggcagccccttttccccgcccgaccaagggaaggcagacccgttcccgtttgtggttttaagggccccgcccggcatggcccctcagacccaagtcccccccccagccctaccgtcccctccgttttcttgaatgttttaatcgaaaaagccaaacccctcctttttaaactttttttttgtttccagtaaaatgggtgggccttgccga

SEQ ID NO: 528238 - DNA, 172 bp, Homo sapiens
tcagcttattggaccagtcactgccactgtccgctagaaggccttcctccactgttacacagtgcgagggcatggacgagatggagtcaccgaggctgagagcaaataacgacctcgtctctgagtatcagcagtaccaggatgccaccgaagaagaggaggaggatgtcga

SEQ ID NO: 528239 - DNA, 536 bp, Homo sapiens
tcggggggccactttgtttgtgtcggctgcctaatgcgggcccccttttttgggtcgttgctctcagttgggccactgcccgcctttgtccaccatgggtcgaataattggggtcgccctcctcgggttctttgcgcttcttggtagcgggcgcgtcctcctcccctctctcggtttgagggcgccctcccccctgttggcgcgccctctttgtccccccgttgcagcacagtcctgtggggccagttgtctgcccacacgccccctccctctttatgaggtgtattggcgtctccctattatagtattatggtgggccccaggcgtgtggctccaccaccccgccgtttctcttcgcagtcttcagttgcgacgcccccaggtgtggagaggagtcccgcggggccccaaggggtttgccccccactcctgggcacctatgtcgactagaccccccgtctttttatccaagtactggctccccgccgggtgcatagagatttctattttacacaaagaaaaacaatatcaaagaa

SEQ ID NO: 528240 - DNA, 492 bp, Homo sapiens
  misc_feature (25)..(25): n is a, c, g, or t
  misc_feature (265)..(265): n is a, c, g, or t
atgaactcactggttttttggcagntactgcttttcctttgtgccacccactttggggagccattaaaaaaggtggcctttgtggggaattttagacccacaggccagcaggtagaatccctgggccttctggcccccggggagcagagccttccgtgcaccgaaaggaagccagccgggcctgtccgccccccacaaccgccagatccccgcaccccagggggcggtgttggtgcaacgggagaaggacctgccgaactacaantggaactccttcggcctgcggttcggcaagcgggaggcggcaccagggaaccccggcaaaagcgctgggcggggctgagggggcaggtgcggggcagtgaacttcagaccccaaaggagtcaaagcatgtggggcgggggcgggggggggcaacgtagggctaagggagggggcgctggagcttccaacccgaggcaataaaaaaaatgttgggtaactccctgaaa

SEQ ID NO: 528241 - DNA, 105 bp, Homo sapiens
ccagttaccacacagatagcatcagtctgcaaatgcatgcacaggcaggcaacagcatggcatgctgtcctcatgccctatgcctctagtcccgggctcctctgg

SEQ ID NO: 528242 - DNA, 108 bp, Homo sapiens
tatacaactcagctcggtacctgcaacattcgtgatcctaccctaatctcatcttgaattgcagctcccataactcccgtcgctgtcatggcgaggtacccggtggcg

SEQ ID NO: 528243 - DNA, 123 bp, Homo sapiens
caacgatggtcctcagctgttgattaggcaggacaggtgcaggacagtcgcgactcccgggttcgagagcccgctactacctcggggctttcggggctcggacttcaacgcctcggaaatctt

SEQ ID NO: 528244 - DNA, 826 bp, Homo sapiens
cgtggcaacgttgctggtgacagccaaagtgacccaccactggaagcagcatggcttcactgctcaggttgattatcccgaaccatccaggccaagactaacgcgccgcgtatgcacctgtattggattgccagaacggctcacattgcatgcaacgtttgctgagctgaaggacaaccgcactcgctacgcacgtactggctacaacagctggctcgatggcccctaacactccttgaaagtcatggtgaatgctgcccatggaagaaatggttccctggccaaaccccatggtgatgaatcgtagaggcatttctacataacggttattacaagtgattattggggtacagcatatggattgtaactgtcgatacttgagcacaagtaataggttggacggatgggatgtaactctataaagtcatgatgggcacacagaaggggatgatggacgctcggacaaaccaggcaactcaaaggctcttggcccaaggaaaaggcttcaagacgacgcttcagaatcgaactctttaatacctcttacataccctggccaaacccccaacgtcctttacactccacgtggagtgagaaagagaccgcgcctcacagaaactgattgagtatgtcacacaatggagcctagacaaaagggattaaacgcaagttcaataggagtgtagataaactcgaataaccaagaatggacagtagtacaaaagccgttccaggatagtgaaatgggcacacatgatcaggggtgcgacccacattgaggtatatgcatagactattgcgtatgagagcaacgataaacgataaa

SEQ ID NO: 528245 - DNA, 788 bp, Homo sapiens
tacccattagatcactctgttccttcttcctcctagattaagaaatttgcaatggttgtacgctcatttgaggaatttccgcgttgctgttctgaagagcgcgttaatccacgagtaaaagcatggattgcatgggaagcccgttctgtgcatggtcaccgctaacagatcgcgccgaaatccttgtaaaaagccgcttcccagcaccctgcatactgaggcaccccatggtttccccatggtgtgtgatctctcttgtgtaaaagtgtgttgataaacccaactcgattcaaccgcgagatctgttcctcatgatctctgacgggtggacgttgacgataattttttgagcttagattataactccattttatattttagttgtagatctgcagtacttgatttgctaaaaaatgcaattaccagttaagtgagggaaggttgtagtctttgtgcagtacgtaaccaagagtattctatcattgtaaaaagtatcactagtggtaacattgctcatggcatttgagttccaggtcaaaatactgcagtagtctgcatttgtagtgggtacattaatggtaattatatgtacatattgcaagcatctaatgattgtgtcatcaggaagtttggccatctccaggattgaatttacacgttaccgtaagttgcttccttatacttctctgtacgttacagtgagatcttcaaggatcctttaatcatgatagatgatttacaacactttgcctcaggtaagttaaattggaaggcgtaaagactaatag

SEQ ID NO: 528246 - DNA, 411 bp, Homo sapiens
  misc_feature (2)..(2): n is a, c, g, or t
  misc_feature (14)..(14): n is a, c, g, or t
  misc_feature (44)..(44): n is a, c, g, or t
  misc_feature (59)..(59): n is a, c, g, or t
  misc_feature (74)..(74): n is a, c, g, or t
  misc_feature (92)..(92): n is a, c, g, or t
  misc_feature (205)..(205): n is a, c, g, or t
  misc_feature (324)..(324): n is a, c, g, or t
  misc_feature (330)..(330): n is a, c, g, or t
  misc_feature (342)..(342): n is a, c, g, or t
  misc_feature (376)..(376): n is a, c, g, or t
  misc_feature (387)..(387): n is a, c, g, or t
gnaacaatggcaanaagaacaaatgaagctcaaaaaaaaagggnaagtaactgcttttnaaaataaataaagtngaatacggaagctggggnattttcaaaatgcctttccttcaatttaaaatcttccttaatgtcttcaacatccttaaaaatgaaaggagctaattctttgttcacttatttcttttttcttttttgagacnggagtctcactctgttgccccaggctgaagtgcagtggcaggatctcggctcactgcaagctccactttgggttcacgccattctcctcctcaggctcccgaatagctgggggtacagntgcccnccactaggcccnggctaatttttttgtatttttagtacgatgacangggtttcaccngtgttagccaagggtggtcgttca

SEQ ID NO: 528247 - DNA, 734 bp, Homo sapiens
tctctgttatattttactttttaaaaagaaaaagcagctgggcgcggtggctcgcgcctgtagtcccagcacttgggaggccaaggtgggtggatcacctgatgtcaggagttcgggaccagcctggccaacatggagaagcctcgtctctactgaaagcacaaaaaattagccgggcgtggtggcgcatgcctgtggtcccagctgcttgggaggctgaggcaggggagtcgcttgagcctggggggcagaggttgcagtgggctgggatcgcaccactgcaccccagcctgggcaataagagtgaaactcccatcgtcggaaaaaaaaaacaaaaagagagggtcacctgtgaaacacctttttgaagagcaaaaagagtgtgaagagtctcccccagattcttttctcctttttctcccagagaggtgtgaatttttgggggtggcccaaactctgggggtttctcgaattctcgcgctttcccaaagaaccactttttgtcataggggcatctcctatatgtggtgcgcttccataattctcaccccatttatttataaccagaaatatgagggagagttttttcccctgtgggtggcttttcccctgtttaaaagtgtggggccatatatgtgggtacctcctttgtatccaaactcttcgtttgtttatgttcttcacccctttatgcggggggaaactctctgtctaaaatatcccccttttttaag

SEQ ID NO: 528248 - DNA, 871 bp, Homo sapiens
tgtagtggctcacgcctgtaatcccagcactttgggaggctgaggcgggtggacgacaacaaggtcaggagttcgagaccagcctggccaacatggtgaaactccatctctactaaaaatacaaaaattaggtgggcgtagtggcacatgcctgtagtcccagttactcaggaggctgaggcaggagaattgcccgaactcgggaggcagaggttgcagtgagctgagatgacgccactacactccagcctgggggatacagcgagtctctgtctcagaaaaaaaagaaagaaacaaaaaaggcaaagggagaagaaaatttacttttatagagtgactactaggtggctcatgcctgtaaccacagcacttgtgggagactaaggcggatggatcgcttgagcctaggagcttgagactagcctggttaacatggcaaaaccctgtctctacaaaaaataaaaaaattagctgggtgtggtagtatatgcctgtagtcccagctacttcggaggctgaggtgggaggattgcttgagcccaagagacggaggttgcaatgacctgagatcacaccatgtactctagccctgaagacagagcgtgatgctgtctcaaaaaaacaaaggactccctaggtcctaggtaccaggagcatcattattcatacgtagtgataccctattttccttttccgatagaaaacgttacccatggctttaggccgaccgggtcaatcggtcccctacggcgggggtttaaccaggcttaaacctcgatggttggctaacttacgggccaagaggcgaaaacaaggttcaaggggcgagggtgtgatggccaccgggccccaactggtctcaccgctaggg

SEQ ID NO: 528249 - DNA, 285 bp, Homo sapiens
cctttttgggaatttccccccccccccgggaaaaaaaaaacccttttaaatttggaacgttttgttaaatttttttcccccttccccccccccctttttaaattttttccttggccaccgggggggtttttttggggcaatttttaattttttcccccgtttttttaaacaaaaaaaaaggggggttttttgccccaggttttttttttttttttttaaaaaagaaaatttttggcccccccttccttttttttttttttaaaaaaaagttttttttttttccca

SEQ ID NO: 528250 - DNA, 375 bp, Homo sapiens
cgtctcatcctccttcagcacaacacaaggactttcctgtactttttcctacaagatttccttttaaacaagtgatactgtagtaagtttatttatttttgagagcagagtttcgctctggtagcccagcgctggacgtgcaatggcaacagagcgagactccatctcaaaaaaataaaaagaaaagaaaagaatatagagttacaaaacaaagctgtaacaatcaattttatatttgcccatatatttacctggactatgatctttacttcttcatgcagcttcaaattactgtctagtgccctttcatttcaacctgcaggactccatttagcatttcttacagggaagatctagtaaaggagggatgagcat

SEQ ID NO: 528251 - DNA, 290 bp, Homo sapiens
  misc_feature (277)..(277): n is a, c, g, or t
ccgagacgggctgatcatgaggtcaggagattgagatcaagaccatcctggcggctgggcgtggtggctcacgcctggaatcccagcactttgggaggtcgaggtgggtggatcacgaggttgggagatcaagaccatcctggctggcacggtgaaacctgtctctactaaaagtacagaaggttagctgggcgtggtggcgggcgcctgtagtcccagctactcgggaggctgaggcaggagaatggcgtgggcccgggaggcggaggttgcagtnagccgagatcgcg

SEQ ID NO: 528252 - DNA, 310 bp, Homo sapiens
gtttcttaaatcccgaagaaaaatataagtgttccacaagtttcacgattctcattcaagtccttactgctgtgaagtacaaataccaactgtgcaaattgcaaaactgactacaatttttggggtcttctcttcttccccttccgtctgaataatggggcttagcggggtctagtcttcttgcaattagctcgggcttggtcaccacacccttcccaaaagggaccctatctctctctctcacacaagtctctctcccactctttccaaaccccacactttcaactagagagggtgtccacataatgct

SEQ ID NO: 528253 - DNA, 319 bp, Homo sapiens
acctttgtacgtagctccatactctttaacttcagtgatctctctttcagattaagtcacaagtcctagaacaatatgtaaagaattggacgggcgaggtagctcaggcctagtatcccagcactttgggaggccgaggtgggcagatcacctgaggttgggagtttgagaccaggctggccagcatggtgaaatgccgtctctactaaaaatacaaaaattagccaggtgtggtggcgggtgcctgtgatcctagctactcaggaagctgagccaggagaatcacttgaacccgggaggcagaggttgcagtgagcca

SEQ ID NO: 528254 - DNA, 381 bp, Homo sapiens
ggggatggttttctctgagctggttgtcacttccgtgttttagcactagatggcgaccaggttcattcagctttgcctgttctcactgttgctgtttttagacacgaatcaacgcccagatttgtttcaatacatttcttggagtgttgtttaaaaggaaatttgagatcttgaaatgacctgcccccaagaaatgcttgactattagggttagatgcctcttccatagtctgtggttagagtctgctggattctaccctcttctgggcacagcaccatggatagattctctttcattgtgtggtctttttgctctgatgatgattttctttgttgtacataatgggttttttaaattaagttttggaataattccatttg

SEQ ID NO: 528255 - DNA, 256 bp, Homo sapiens
  misc_feature (101)..(101): n is a, c, g, or t
  misc_feature (106)..(106): n is a, c, g, or t
  misc_feature (117)..(117): n is a, c, g, or t
  misc_feature (121)..(121): n is a, c, g, or t
  misc_feature (128)..(128): n is a, c, g, or t
  misc_feature (135)..(135): n is a, c, g, or t
  misc_feature (144)..(144): n is a, c, g, or t
  misc_feature (151)..(151): n is a, c, g, or t
  misc_feature (157)..(158): n is a, c, g, or t
  misc_feature (197)..(197): n is a, c, g, or t
  misc_feature (201)..(201): n is a, c, g, or t
gagatggggtcttgctgtattgcccaggctggagtacagtagtgattcacaatgcagtcatagcacgttgtagcctcaaactcctgggctcaagggatccntctgnttaaggcctcngagntaacctngggctancaggcaccntgctctnggtttnntgtttttcctaaatggtgtcttttaaggagcagaaagtncgtnttgatggtgccaatttgtcaatttttaatgatagtgcttttccatacattttata

SEQ ID NO: 528256 - DNA, 621 bp, Homo sapiens
  misc_feature (57)..(57): n is a, c, g, or t
  misc_feature (70)..(70): n is a, c, g, or t
  misc_feature (87)..(87): n is a, c, g, or t
  misc_feature (600)..(600): n is a, c, g, or t
  misc_feature (604)..(604): n is a, c, g, or t
ctgtaagccttcctggtgtcctgggttatccctccttctgctgttctggaaaagaanacccagcccagtntatggagtataagaaanactgatgcacctcaaccggatgtgaaggaagaggaagaagagaaggaagaggaaaaggacaagggagatgaggaggaggaaggagaagagaaacttgaagagaaacagaaaagtgatgctgaagaagatggtggcactgtcagtcaagaggaggaagacagaaaacctaaagcagaggaggatgaaattttgaacagatcaccaagaaacagaaagccacgaagagagtgaaacaatcttaagagcttgatctgtgatttcttctccctcctcccctgcaagagtggtcctaggagaggacctggcacaccttaggttgacattcagaaaacttcaagacatcaccatcagcaggctccagttgaacactagtctgtgtaactttaaacatctagcagtaaatacttgcagttgtgatataaaggaccctgtggaaaagtaagtccctgtggaaaagtaagtccctgtggaaaagtaagtccctgtggaaaagtaagtccctgtggaaaagtnagtncctgtggaaaagtaagt

SEQ ID NO: 528257 - DNA, 3321 bp, Homo sapiens
  misc_feature (57)..(57): n is a, c, g, or t
  misc_feature (70)..(70): n is a, c, g, or t
  misc_feature (87)..(87): n is a, c, g, or t
  misc_feature (3312)..(3312): n is a, c, g, or t
ctgtaagccttcctggtgtcctgggttatccctccttctgctgttctggaaaagaanacccagcccagtntatggagtataagaaanactgatgcacctcaaccggatgtgaaggaagaggaagaagagaaggaagaggaaaaggacaagggagatgaggaggaggaaggagaagagaaacttgaagagaaacagaaaagtgatgctgaagaagatggtggcactgtcagtcaagaggaggaagacagaaaacctaaagcagaggaggatgaaattttgaacagatcaccaagaaacagaaagccacgaagagagtgaaacaatcttaagagcttgatctgtgatttcttctccctcctcccctgcaagagtggtcctaggagaggacctggcacaccttaggttgacattcagaaaacttcaagacatcaccatcagcaggctccagttgaacactagtctgtgtaactttaaacatctagcagtaaatacttgcagttgtgatataaaggaccctgtttctgtagaaaagaaaacatttaacataatggttgtgaaatgtaacatgaagcaaactaacttttttttttttaacatctttgtttttaaaatagaatgatagaactttgccagtctttaagatcttggcttaatttaatgtattaatctgtttgtgcaaacataataccaccatttaaaaatgttagggagatgagttgcagtttttataatagattttttttaaagtttggtattgtaaaacattcacacctctgtccctcaaaattgataattacgtttaaagtgcagtcatttgtggttagaatcttgttttgtttgcttccattattgagttcctcctaaggaaattgaggagagggactgaatagaagcccaaattcatataaaagttgcgtttaagttgtattaaaaatagatatataagaaaaaattctttcacttgatgtttgttagaccagaaagtgtgtgtgttctgtagctcagttcccagacagctttttaggtagtggaggaggtggcttcatgtggcacttgggcatttatattccacttgggagggtcaggctgtggccttctggagcaggtggcttgttaaggaacgctagcagggcatggcacgtgagctccggaatagatgtcttcatcacttcttccactgtgtgttgacactgttttccttacctatttcctcagatccccagctttctcctctgctatgcattttcttcacagtgcagcttgcagtccgttgctgaaaatgattataagccctgcataatgttaagctttattgtgattacgtgtatgtttcttctttcttttaagcagacccatacctttccagggtcaaagtacagaatagaatacattgatacaaagtacagaaaaatactttgatttttatccatttcttttactctgtgtaaagacttgagaagtctaattcacaggcaaaccaatacagaattgactgcagttgaacagactagaagtatttgtgggaggagtgacatgaagcatgagttatctgattttttttgtagctgctatatattttaagccttcatttgcaattcatgtaacagttgtgtcataaattacacaataaagcagtcctgttcaaatttttttttaacgtggcttgtagaatttttaaaaaagtgatcttaggtttgttttttcatgcgggatgcagatgggtgctatcagagcctctcccacaccactatagtgtaataatgttattattactctacactgaaacgtattcagagttagatattattttagcttcagttgttctttagaggctttcaaatgtaccgatgatactgtttcttgcactgaatatataaacactccacagtgtttatattgggaagatattgggaaggaaatatatttgtaaaagatgaaggctgtatctatttttttttctttttaaagtttgttcacttaaattcttttgaggatgggatgtatttttcttgctgttcagtgctttttccttttcatctgttgttctgtggtcacagtgaccttagctacatagcagactttcccaaatgtattgattacaaataaacagttgttacttagcaagacctgaaaatatgtctgcaggtttctccttgaagcaaatgtgtgggatcattgcatttccagaaatctgcctccttcaccctccgttgacagtatatgtcatgcctcactttcttctagctgagctttaaatcattagagcttaaattgtcagatcgttcattgcctttccagggttatttagtaaagtttgttgaaaacaaaaacgccttttcttggttcttttttcagttattttgaaggtccagcatcctgattaaatgtctgacacattaatgaatgaccagcagcagctttcagctcttaaaaagacacttatattttgattttacatgctggttacctgttccattgttgtcaaatgcccactctccatcagatgtgttcctccattttcttatccacaaagtactcctcacttttcaatttgtcatgttactaaatggtgttacattaaagccctgtgttaagtgtctgcttttgactgaatttcttcatagtaaccttcagtgtgtgtgtgtgactatgttcaattagtgggttgatcttcgtataattggccactatgtgagagttcactactaggcagaaactattatggaccagtgaaataatgacttttatctcaccacgtgagtttgatgcagtcttttctgtctagcccttgcctcttcctgcccatgtgattgcggtgcagtagtttctgttgtataatagtgtggacagcagctcagaaaaggagggaatgctactgataatttgtagataatattctttaagacttaggggaaccattgaactttgaaatttttattagaaaattatttgttcagaatcagactccattattttacatatacttaaatactttaggggtatttttgaaagttagcccagttttttatgtgctattaaatttttagattacatactaaagaaaagtatgtacacagaatgtagtgctcctagttactattttttctattaagaaatagtttagttctggtgtaaaatttgtttgaatgctaaaaaaaaaaaagcaggactgcattatggcacttttgccttggtggcccactttctccatttaaaacattaggatttgtatttttctgctgcgtttgtatgaagacatatttgattgttgttttctcttgattttaaaataaaacctcatgagccctaaanaaaaaaaaa

SEQ ID NO: 528258 - DNA, 156 bp, Homo sapiens
caatacatttattatttggctgggtcccttaaggttatttaatatgttgtgataacctttcattctccctctcctccctctgggacatttagaactttgtaacatacgtgcatcgccgttctctctctctaacctcttatttctttgggttctggg

SEQ ID NO: 528259 - DNA, 336 bp, Homo sapiens
ctccctccccggtaccaatttactgtattagtctgtttttatgctactaataaagacatacccaagactggggaatttacaaaagaaagaggcatattggatttacagttccacctggctggggaggcctcacaatcatggcgtaaggtgaaaggcacatctcacatggcagcagacaagagaagagagcttgtgcagtgaaactccctatttatatatttatttatttttgtgatggtgtttctctcttgttgcccaggctggagtgcaatgatccaatcttggctcaccgcaacctctgcctcccgggttcaagtaattctcctacccggggag

SEQ ID NO: 528260 - DNA, 3033 bp, Homo sapiens
  misc_feature (57)..(57): n is a, c, g, or t
  misc_feature (70)..(70): n is a, c, g, or t
  misc_feature (87)..(87): n is a, c, g, or t
ctgtaagccttcctggtgtcctgggttatccctccttctgctgttctggaaaagaanacccagcccagtntatggagtataagaaanactgatgcacctcaaccggatgtgaaggaagaggaagaagagaaggaagaggaaaaggacaagggagatgaggaggaggaaggagaagagaaacttgaagagaaacagaaaagtgatgctgaagaagatggtggcactgtcagtcaagaggaggaagacagaaaacctaaagcagaggaggatgaaattttgaacagatcaccaagaaacagaaagccacgaagagagtgaaacaatcttaagagcttgatctgtgatttcttctccctcctcccctgcaagagtggtcctaggagaggacctggcacaccttaggttgacattcagaaaacttcaagacatcaccatcagcaggctccagttgaacactagtctgtgtaactttaaacatctagcagtaaatacttgcagttgtgatataaaggaccctgtttctgtagaaaagaaaacatttaacataatggttgtgaaatgtaacatgaagcaaactaacttttttttttttaacatctttgtttttaaaatagaatgatagaactttgccagtctttaagatcttggcttaatttaatgtattaatctgtttgtgcaaacataataccaccatttaaaaatgttagggagatgagttgcagtttttataatagattttttttaaagtttggtattgtaaaacattcacacctctgtccctcaaaattgataattacgtttaaagtgcagtcatttgtggttagaatcttgttttgtttgcttccattattgagttcctcctaaggaaattgaggagagggactgaatagaagcccaaattcatataaaagttgcgtttaagttgtattaaaaatagatatataagaaaaaattctttcacttgatgtttgttagaccagaaagtgtgtgtgttctgtagctcagttcccagacagctttttaggtagtggaggaggtggcttcatgtggcacttgggcatttatattccacttgggagggtcaggctgtggccttctggagcaggtggcttgttaaggaacgctagcagggcatggcacgtgagctccggaatagatgtcttcatcacttcttccactgtgtgttgacactgttttccttacctatttcctcagatccccagctttctcctctgctatgcattttcttcacagtgcagcttgcagtccgttgctgaaaatgattataagccctgcataatgttaagctttattgtgattacgtgtatgtttcttctttcttttaagcagacccatacctttccagggtcaaagtacagaatagaatacattgatacaaagtacagaaaaatactttgatttttatccatttcttttactctgtgtaaagacttgagaagtctaattcacaggcaaaccaatacagaattgactgcagttgaacagactagaagtatttgtgggaggagtgacatgaagcatgagttatctgattttttttgtagctgctatatattttaagccttcatttgcaattcatgtaacagttgtgtcataaattacacaataaagcagtcctgttcaaatttttttttaacgtggcttgtagaatttttaaaaaagtgatcttaggtttgttttttcatgcgggatgcagatgggtgctatcagagcctctcccacaccactatagtgtaataatgttattattactctacactgaaacgtattcagagttagatattattttagcttcagttgttctttagaggctttcaaatgtaccgatgatactgtttcttgcactgaatatataaacactccacagtgtttatattgggaagatattgggaaggaaatatatttgtaaaagatgaaggctgtatctatttttttttctttttaaagtttgttcacttaaattcttttgaggatgggatgtatttttcttgctgttcagtgctttttccttttcatctgttgttctgtggtcacagtgaccttagctacatagcagactttcccaaatgtattgattacaaataaacagttgttacttagcaagacctgaaaatatgtctgcaggtttctccttgaagcaaatgtgtgggatcattgcatttccagaaatctgcctccttcaccctccgttgacagtatatgtcatgcctcactttcttctagctgagctttaaatcattagagcttaaattgtcagatcgttcattgcctttccagggttatttagtaaagtttgttgaaaacaaaaacgccttttcttggttcttttttcagttattttgaaggtccagcatcctgattaaatgtctgacacattaatgaatgaccagcagcagctttcagctcttaaaaagacacttatattttgattttacatgctggttacctgttccattgttgtcaaatgcccactctccatcagatgtgttcctccattttcttatccacaaagtactcctcacttttcaatttgtcatgttactaaatggtgttacattaaagccctgtgttaagtgtcaaaaaaaaaaaaaaaaaaaaaaaaaaaaaaaaaaaaaaaaaaaaaaaaaaaaaaaaaaaaaaaaaaaaaaaaaaaaaaaggggggggggggcgctcaaaaataccccgcggggagggcacgcctaactatcacggccagcccgccttgttgtgtgcaacagaggcggcgcccaacaaaaggagacggagtgtctaataaaacgacgcacgagagggcagcggcggcgcgcgtaaataaaaacacacacggcggatgaggaggagacaactacgatccccaccgggcgcaccattcgtgtggagaggacgcaccccaccactgctggagcgggggcggaacaacactaggggggcaaacacccccacacaagagaaagtaagcagcgccacggaggggagcagtaaaacaacactcatgagcggacgtcatagag

SEQ ID NO: 528261 - DNA, 3009 bp, Homo sapiens
  misc_feature (57)..(57): n is a, c, g, or t
  misc_feature (70)..(70): n is a, c, g, or t
  misc_feature (87)..(87): n is a, c, g, or t
ctgtaagccttcctggtgtcctgggttatccctccttctgctgttctggaaaagaanacccagcccagtntatggagtataagaaanactgatgcacctcaaccggatgtgaaggaagaggaagaagagaaggaagaggaaaaggacaagggagatgaggaggaggaaggagaagagaaacttgaagagaaacagaaaagtgatgctgaagaagatggtggcactgtcagtcaagaggaggaagacagaaaacctaaagcagaggaggatgaaattttgaacagatcaccaagaaacagaaagccacgaagagagtgaaacaatcttaagagcttgatctgtgatttcttctccctcctcccctgcaagagtggtcctaggagaggacctggcacaccttaggttgacattcagaaaacttcaagacatcaccatcagcaggctccagttgaacactagtctgtgtaactttaaacatctagcagtaaatacttgcagttgtgatataaaggaccctgtttctgtagaaaagaaaacatttaacataatggttgtgaaatgtaacatgaagcaaactaacttttttttttttaacatctttgtttttaaaatagaatgatagaactttgccagtctttaagatcttggcttaatttaatgtattaatctgtttgtgcaaacataataccaccatttaaaaatgttagggagatgagttgcagtttttataatagattttttttaaagtttggtattgtaaaacattcacacctctgtccctcaaaattgataattacgtttaaagtgcagtcatttgtggttagaatcttgttttgtttgcttccattattgagttcctcctaaggaaattgaggagagggactgaatagaagcccaaattcatataaaagttgcgtttaagttgtattaaaaatagatatataagaaaaaattctttcacttgatgtttgttagaccagaaagtgtgtgtgttctgtagctcagttcccagacagctttttaggtagtggaggaggtggcttcatgtggcacttgggcatttatattccacttgggagggtcaggctgtggccttctggagcaggtggcttgttaaggaacgctagcagggcatggcacgtgagctccggaatagatgtcttcatcacttcttccactgtgtgttgacactgttttccttacctatttcctcagatccccagctttctcctctgctatgcattttcttcacagtgcagcttgcagtccgttgctgaaaatgattataagccctgcataatgttaagctttattgtgattacgtgtatgtttcttctttcttttaagcagacccatacctttccagggtcaaagtacagaatagaatacattgatacaaagtacagaaaaatactttgatttttatccatttcttttactctgtgtaaagacttgagaagtctaattcacaggcaaaccaatacagaattgactgcagttgaacagactagaagtatttgtgggaggagtgacatgaagcatgagttatctgattttttttgtagctgctatatattttaagccttcatttgcaattcatgtaacagttgtgtcataaattacacaataaagcagtcctgttcaaatttttttttaacgtggcttgtagaatttttaaaaaagtgatcttaggtttgttttttcatgcgggatgcagatgggtgctatcagagcctctcccacaccactatagtgtaataatgttattattactctacactgaaacgtattcagagttagatattattttagcttcagttgttctttagaggctttcaaatgtaccgatgatactgtttcttgcactgaatatataaacactccacagtgtttatattgggaagatattgggaaggaaatatatttgtaaaagatgaaggctgtatctatttttttttctttttaaagtttgttcacttaaattcttttgaggatgggatgtatttttcttgctgttcagtgctttttccttttcatctgttgttctgtggtcacagtgaccttagctacatagcagactttcccaaatgtattgattacaaataaacagttgttacttagcaagacctgaaaatatgtctgcaggtttctccttgaagcaaatgtgtgggatcattgcatttccagaaatctgcctccttcaccctccgttgacagtatatgtcatgcctcactttcttctagctgagctttaaatcattagagcttaaattgtcagatcgttcattgcctttccagggttatttagtaaagtttgttgaaaacaaaaacgccttttcttggttcttttttcagttattttgaaggtccagcatcctgattaaatgtctgacacattaatgaatgaccagcagcagctttcagctcttaaaaagacacttatattttgattttacatgctggttacctgttccattgttgtcaaatgcccactctccatcagatgtgttcctccattttcttatccacaaagtactcctcacttttcaatttgtcatgttactaaatggtgttacattaaagccctgtgttaagtgtcaaaaaaaaaaaaaaaaaaaaaaaaaaaaaaaaaaaaaaaaaaaaaaaaaaaaaaaaaaaaaaaaaaaaaaaaaaacaatcaacacacaaaaaaaaaaaaaaagaaaaaaaaaacaaacaccagaaacaaagacaagggggtggcccgtatatagcgtcgcgagcgcaaagctagagagagggtagtaagaaggcgagcacgcgaggcggggagaaacaacggcagaaggagcgcggcgatactatagagaaacggagagaggaaaaagagaaagaaagcagaagcgagcacacacatgtaagggcaagagaagagacgcgcccccaagacacgaagagcaggagaaaaaaaacgaggagtggaatagacccacggaggagagagaggagaaggaaaaaaaacggggcgca

SEQ ID NO: 528262 - DNA, 3072 bp, Homo sapiens
  misc_feature (29)..(29): n is a, c, g, or t
  misc_feature (38)..(38): n is a, c, g, or t
  misc_feature (71)..(71): n is a, c, g, or t
  misc_feature (120)..(120): n is a, c, g, or t
  misc_feature (3063)..(3063): n is a, c, g, or t
cctcccggattcaggggattctcctgccncagcctccnaagtagctgggactataggcccgcaccaccatncctggctaatttttgtatttttagtagagatggggtttcaccatgttgnccaggctggtctggaactcctgagctcaagtgaacctcccaaagtgctgggattacaggcgtgagccactgcaccagtcaagtcaatgagtctgtgtaactttaaacatctagcagtaaatacttgcagttgtgatataaaggaccctgtttctgtagaaaagaaaacatttaacataatggttgtgaaatgtaacatgaagcaaactaacttttttttttttaacatctttgtttttaaaatagaatgatagaactttgccagtctttaagatcttggcttaatttaatgtattaatctgtttgtgcaaacataataccaccatttaaaaatgttagggagatgagttgcagtttttataatagattttttttaaagtttggtattgtaaaacattcacacctctgtccctcaaaattgataattacgtttaaagtgcagtcatttgtggttagaatcttgttttgtttgcttccattattgagttcctcctaaggaaattgaggagagggactgaatagaagcccaaattcatataaaagttgcgtttaagttgtattaaaaatagatatataagaaaaaattctttcacttgatgtttgttagaccagaaagtgtgtgtgttctgtagctcagttcccagacagctttttaggtagtggaggaggtggcttcatgtggcacttgggcatttatattccacttgggagggtcaggctgtggccttctggagcaggtggcttgttaaggaacgctagcagggcatggcacgtgagctccggaatagatgtcttcatcacttcttccactgtgtgttgacactgttttccttacctatttcctcagatccccagctttctcctctgctatgcattttcttcacagtgcagcttgcagtccgttgctgaaaatgattataagccctgcataatgttaagctttattgtgattacgtgtatgtttcttctttcttttaagcagacccatacctttccagggtcaaagtacagaatagaatacattgatacaaagtacagaaaaatactttgatttttatccatttcttttactctgtgtaaagacttgagaagtctaattcacaggcaaaccaatacagaattgactgcagttgaacagactagaagtatttgtgggaggagtgacatgaagcatgagttatctgattttttttgtagctgctatatattttaagccttcatttgcaattcatgtaacagttgtgtcataaattacacaataaagcagtcctgttcaaatttttttttaacgtggcttgtagaatttttaaaaaagtgatcttaggtttgttttttcatgcgggatgcagatgggtgctatcagagcctctcccacaccactatagtgtaataatgttattattactctacactgaaacgtattcagagttagatattattttagcttcagttgttctttagaggctttcaaatgtaccgatgatactgtttcttgcactgaatatataaacactccacagtgtttatattgggaagatattgggaaggaaatatatttgtaaaagatgaaggctgtatctatttttttttctttttaaagtttgttcacttaaattcttttgaggatgggatgtatttttcttgctgttcagtgctttttccttttcatctgttgttctgtggtcacagtgaccttagctacatagcagactttcccaaatgtattgattacaaataaacagttgttacttagcaagacctgaaaatatgtctgcaggtttctccttgaagcaaatgtgtgggatcattgcatttccagaaatctgcctccttcaccctccgttgacagtatatgtcatgcctcactttcttctagctgagctttaaatcattagagcttaaattgtcagatcgttcattgcctttccagggttatttagtaaagtttgttgaaaacaaaaacgccttttcttggttcttttttcagttattttgaaggtccagcatcctgattaaatgtctgacacattaatgaatgaccagcagcagctttcagctcttaaaaagacacttatattttgattttacatgctggttacctgttccattgttgtcaaatgcccactctccatcagatgtgttcctccattttcttatccacaaagtactcctcacttttcaatttgtcatgttactaaatggtgttacattaaagccctgtgttaagtgtctgcttttgactgaatttcttcatagtaaccttcagtgtgtgtgtgtgactatgttcaattagtgggttgatcttcgtataattggccactatgtgagagttcactactaggcagaaactattatggaccagtgaaataatgacttttatctcaccacgtgagtttgatgcagtcttttctgtctagcccttgcctcttcctgcccatgtgattgcggtgcagtagtttctgttgtataatagtgtggacagcagctcagaaaaggagggaatgctactgataatttgtagataatattctttaagacttaggggaaccattgaactttgaaatttttattagaaaattatttgttcagaatcagactccattattttacatatacttaaatactttaggggtatttttgaaagttagcccagttttttatgtgctattaaatttttagattacatactaaagaaaagtatgtacacagaatgtagtgctcctagttactattttttctattaagaaatagtttagttctggtgtaaaatttgtttgaatgctaaaaaaaaaaaagcaggactgcattatggcacttttgccttggtggcccactttctccatttaaaacattaggatttgtatttttctgctgcgtttgtatgaagacatatttgattgttgttttctcttgattttaaaataaaacctcatgagccctaaanaaaaaaaaa

SEQ ID NO: 528263 - DNA, 2330 bp, Homo sapiens
  misc_feature (57)..(57): n is a, c, g, or t
  misc_feature (70)..(70): n is a, c, g, or t
  misc_feature (87)..(87): n is a, c, g, or t
ctgtaagccttcctggtgtcctgggttatccctccttctgctgttctggaaaagaanacccagcccagtntatggagtataagaaanactgatgcacctcaaccggatgtgaaggaagaggaagaagagaaggaagaggaaaaggacaagggagatgaggaggaggaaggagaagagaaacttgaagagaaacagaaaagtgatgctgaagaagatggtggcactgtcagtcaagaggaggaagacagaaaacctaaagcagaggaggatgaaattttgaacagatcaccaagaaacagaaagccacgaagagagtgaaacaatcttaagagcttgatctgtgatttcttctccctcctcccctgcaagagtggtcctaggagaggacctggcacaccttaggttgacattcagaaaacttcaagacatcaccatcagcaggctccagttgaacactagtctgtgtaactttaaacatctagcagtaaatacttgcagttgtgatataaaggaccctgtttctgtagaaaagaaaacatttaacataatggttgtgaaatgtaacatgaagcaaactaacttttttttttttaacatctttgtttttaaaatagaatgatagaactttgccagtctttaagatcttggcttaatttaatgtattaatctgtttgtgcaaacataataccaccatttaaaaatgttagggagatgagttgcagtttttataatagattttttttaaagtttggtattgtaaaacattcacacctctgtccctcaaaattgataattacgtttaaagtgcagtcatttgtggttagaatcttgttttgtttgcttccattattgagttcctcctaaggaaattgaggagagggactgaatagaagcccaaattcatataaaagttgcgtttaagttgtattaaaaatagatatataagaaaaaattctttcacttgatgtttgttagaccagaaagtgtgtgtgttctgtagctcagttcccagacagctttttaggtagtggaggaggtggcttcatgtggcacttgggcatttatattccacttgggagggtcaggctgtggccttctggagcaggtggcttgttaaggaacgctagcagggcatggcacgtgagctccggaatagatgtcttcatcacttcttccactgtgtgttgacactgttttccttacctatttcctcagatccccagctttctcctctgctatgcattttcttcacagtgcagcttgcagtccgttgctgaaaatgattataagccctgcataatgttaagctttattgtgattacgtgtatgtttcttctttcttttaagcagacccatacctttccagggtcaaagtacagaatagaatacattgatacaaagtacagaaaaatactttgatttttatccatttcttttactctgtgtaaagacttgagaagtctaattcacaggcaaaccaatacagaattgactgcagttgaacagactagaagtatttgtgggaggagtgacatgaagcatgagttatctgattttttttgtagctgctatatattttaagccttcatttgcaattcatgtaacagttgtgtcataaattacacaataaagcagtcctgttcaaatttttttttaacgtggcttgtagaatttttaaaaaagtgatcttaggtttgttttttcatgcgggatgcagatgggtgctatcagagcctctcccacaccactatagtgtaataatgttattattactctacactgaaacgtattcagagttagatattattttagcttcagttgttctttagaggctttcaaatgtaccgatgatactgtttcttgcactgaatatataaacactccacagtgtttatattgggaagatattgggaaggaaatatatttgtaaaagatgaaggctgtatctatttttttttctttttaaagtttgttcacttaaattcttttgaggatgggatgtatttttcttgctgttcagtgctttttccttttcatctgttgttctgtggtcacagtgaccttagctacatagcagactttcccaaatgtattgattacaaataaacagttgttacttagcaagacctgaaaatatgtctgcaggtttctccttgaagcaaatgtgtgggatcattgcatttccagaaatctgcctccttcaccctccgttgacagtatatgtcatgcctcactttcttctagctgagctttaaatcattagagcttaaattgtcagatcgttcattgcctttccagggttatttagtaaagtttgttgaaaacaaaaa

SEQ ID NO: 528264 - DNA, 313 bp, Homo sapiens
acctgagtacttaattgtgtttattttcccagtgatcttaaataaaagtttacattgacatttcaatgaattaaagttgaaaataaaattcagtttcagccaggtgcggtggctcacgcctgtaatcccagcacttagggaggccaaggcggttggatgacccaaggtcaggagtttgagatcagcctggataacatggtgaaaccccgtctctactaaaaatacaaaacttagcggggtgggggaagtggcgcatgcctgtaatcccagctactagggaggctgaggtgggcagatcccgatgatttgcatt

SEQ ID NO: 528265 - DNA, 2668 bp, Homo sapiens
  misc_feature (57)..(57): n is a, c, g, or t
  misc_feature (70)..(70): n is a, c, g, or t
  misc_feature (87)..(87): n is a, c, g, or t
ctgtaagccttcctggtgtcctgggttatccctccttctgctgttctggaaaagaanacccagcccagtntatggagtataagaaanactgatgcacctcaaccggatgtgaaggaagaggaagaagagaaggaagaggaaaaggacaagggagatgaggaggaggaaggagaagagaaacttgaagagaaacagaaaagtgatgctgaagaagatggtggcactgtcagtcaagaggaggaagacagaaaacctaaagcagaggaggatgaaattttgaacagatcaccaagaaacagaaagccacgaagagagtgaaacaatcttaagagcttgatctgtgatttcttctccctcctcccctgcaagagtggtcctaggagaggacctggcacaccttaggttgacattcagaaaacttcaagacatcaccatcagcaggctccagttgaacactagtctgtgtaactttaaacatctagcagtaaatacttgcagttgtgatataaaggaccctgtttctgtagaaaagaaaacatttaacataatggttgtgaaatgtaacatgaagcaaactaacttttttttttttaacatctttgtttttaaaatagaatgatagaactttgccagtctttaagatcttggcttaatttaatgtattaatctgtttgtgcaaacataataccaccatttaaaaatgttagggagatgagttgcagtttttataatagattttttttaaagtttggtattgtaaaacattcacacctctgtccctcaaaattgataattacgtttaaagtgcagtcatttgtggttagaatcttgttttgtttgcttccattattgagttcctcctaaggaaattgaggagagggactgaatagaagcccaaattcatataaaagttgcgtttaagttgtattaaaaatagatatataagaaaaaattctttcacttgatgtttgttagaccagaaagtgtgtgtgttctgtagctcagttcccagacagctttttaggtagtggaggaggtggcttcatgtggcacttgggcatttatattccacttgggagggtcaggctgtggccttctggagcaggtggcttgttaaggaacgctagcagggcatggcacgtgagctccggaatagatgtcttcatcacttcttccactgtgtgttgacactgttttccttacctatttcctcagatccccagctttctcctctgctatgcattttcttcacagtgcagcttgcagtccgttgctgaaaatgattataagccctgcataatgttaagctttattgtgattacgtgtatgtttcttctttcttttaagcagacccatacctttccagggtcaaagtacagaatagaatacattgatacaaagtacagaaaaatactttgatttttatccatttcttttactctgtgtaaagacttgagaagtctaattcacaggcaaaccaatacagaattgactgcagttgaacagactagaagtatttgtgggaggagtgacatgaagcatgagttatctgattttttttgtagctgctatatattttaagccttcatttgcaattcatgtaacagttgtgtcataaattacacaataaagcagtcctgttcaaatttttttttaacgtggcttgtagaatttttaaaaaagtgatcttaggtttgttttttcatgcgggatgcagatgggtgctatcagagcctctcccacaccactatagtgtaataatgttattattactctacactgaaacgtattcagagttagatattattttagcttcagttgttctttagaggctttcaaatgtaccgatgatactgtttcttgcactgaatatataaacactccacagtgtttatattgggaagatattgggaaggaaatatatttgtaaaagatgaaggctgtatctatttttttttctttttaaagtttgttcacttaaattcttttgaggatgggatgtatttttcttgctgttcagtgctttttccttttcatctgttgttctgtggtcacagtgaccttagctacatagcagactttcccaaatgtattgattacaaataaacagttgttacttagcaagacctgaaaatatgtctgcaggtttctccttgaagcaaatgtgtgggatcattgcatttccagaaatctgcctccttcaccctccgttgacagtatatgtcatgcctcactttcttctagctgagctttaaatcattagagcttaaattgtcagatcgttcattgcctttccagggttatttagtaaagtttgttgaaaacaaaaacgccttttcttggttcttttttcagttattttgaaggtccagcatcctgattaaatgtctgacacattaatgaatgaccagcagcagctttcagctcttaaaaagacacttatattttgattttacatgctggttacctgttccattgttgtcaaatgcccactctccatcagatgtgttcctccattttcttatccacaaagtactcctcacttttcaatttgtcatgttactaaatggtgttacaataaagccctggcctcgttggcctcagcggtggagctctgcggctagacaacaaactctcaaataatatataatgaaaaatatgattctat

SEQ ID NO: 528266 - DNA, 3267 bp, Homo sapiens
  misc_feature (57)..(57): n is a, c, g, or t
  misc_feature (70)..(70): n is a, c, g, or t
  misc_feature (87)..(87): n is a, c, g, or t
  misc_feature (3258)..(3258): n is a, c, g, or t
ctgtaagccttcctggtgtcctgggttatccctccttctgctgttctggaaaagaanacccagcccagtntatggagtataagaaanactgatgcacctcaaccggatgtgaaggaagaggaagaagagaaggaagaggaaaaggacaagggagatgaggaggaggaaggagaagagaaacttgaagagaaacagaaaagtgatgctgaagaagatggtggcactgtcagtcaagaggaggaagacagaaaacctaaagcagaggaggatgaaattttgaacagatcaccaagaaacagaaagccacgaagagagtgaaacaatcttaagagcttgatctgtgatttcttctccctcctcccctgcaagagtggtcctaggagaggacctggcacaccttaggttgacattcagaaaacttcaagacatcaccatcagcaggctccagttgaacactagtctgtgtaactttaaacatctagcagtaaatacttgcagttgtgatataaaggaccctgtttctgtagaaaagaaaacatttaacataatggttgtgaaatgtaacatgaagcaaactaacttttttttttttaacatctttgtttttaaaatagaatgatagaactttgccagtctttaagatcttggcttaatttaatgtattaatctgtttgtgcaaacataataccaccatttaaaaatgttagggagatgagttgcagtttttataatagattttttttaaagtttggtattgtaaaacattcacacctctgtccctctttgcttccattattgagttcctcctaaggaaattgaggagagggactgaatagaagcccaaattcatataaaagttgcgtttaagttgtattaaaaatagatatataagaaaaaattctttcacttgatgtttgttagaccagaaagtgtgtgtgttctgtagctcagttcccagacagctttttaggtagtggaggaggtggcttcatgtggcacttgggcatttatattccacttgggagggtcaggctgtggccttctggagcaggtggcttgttaaggaacgctagcagggcatggcacgtgagctccggaatagatgtcttcatcacttcttccactgtgtgttgacactgttttccttacctatttcctcagatccccagctttctcctctgctatgcattttcttcacagtgcagcttgcagtccgttgctgaaaatgattataagccctgcataatgttaagctttattgtgattacgtgtatgtttcttctttcttttaagcagacccatacctttccagggtcaaagtacagaatagaatacattgatacaaagtacagaaaaatactttgatttttatccatttcttttactctgtgtaaagacttgagaagtctaattcacaggcaaaccaatacagaattgactgcagttgaacagactagaagtatttgtgggaggagtgacatgaagcatgagttatctgattttttttgtagctgctatatattttaagccttcatttgcaattcatgtaacagttgtgtcataaattacacaataaagcagtcctgttcaaatttttttttaacgtggcttgtagaatttttaaaaaagtgatcttaggtttgttttttcatgcgggatgcagatgggtgctatcagagcctctcccacaccactatagtgtaataatgttattattactctacactgaaacgtattcagagttagatattattttagcttcagttgttctttagaggctttcaaatgtaccgatgatactgtttcttgcactgaatatataaacactccacagtgtttatattgggaagatattgggaaggaaatatatttgtaaaagatgaaggctgtatctatttttttttctttttaaagtttgttcacttaaattcttttgaggatgggatgtatttttcttgctgttcagtgctttttccttttcatctgttgttctgtggtcacagtgaccttagctacatagcagactttcccaaatgtattgattacaaataaacagttgttacttagcaagacctgaaaatatgtctgcaggtttctccttgaagcaaatgtgtgggatcattgcatttccagaaatctgcctccttcaccctccgttgacagtatatgtcatgcctcactttcttctagctgagctttaaatcattagagcttaaattgtcagatcgttcattgcctttccagggttatttagtaaagtttgttgaaaacaaaaacgccttttcttggttcttttttcagttattttgaaggtccagcatcctgattaaatgtctgacacattaatgaatgaccagcagcagctttcagctcttaaaaagacacttatattttgattttacatgctggttacctgttccattgttgtcaaatgcccactctccatcagatgtgttcctccattttcttatccacaaagtactcctcacttttcaatttgtcatgttactaaatggtgttacattaaagccctgtgttaagtgtctgcttttgactgaatttcttcatagtaaccttcagtgtgtgtgtgtgactatgttcaattagtgggttgatcttcgtataattggccactatgtgagagttcactactaggcagaaactattatggaccagtgaaataatgacttttatctcaccacgtgagtttgatgcagtcttttctgtctagcccttgcctcttcctgcccatgtgattgcggtgcagtagtttctgttgtataatagtgtggacagcagctcagaaaaggagggaatgctactgataatttgtagataatattctttaagacttaggggaaccattgaactttgaaatttttattagaaaattatttgttcagaatcagactccattattttacatatacttaaatactttaggggtatttttgaaagttagcccagttttttatgtgctattaaatttttagattacatactaaagaaaagtatgtacacagaatgtagtgctcctagttactattttttctattaagaaatagtttagttctggtgtaaaatttgtttgaatgctaaaaaaaaaaaagcaggactgcattatggcacttttgccttggtggcccactttctccatttaaaacattaggatttgtatttttctgctgcgtttgtatgaagacatatttgattgttgttttctcttgattttaaaataaaacctcatgagccctaaanaaaaaaaaa

SEQ ID NO: 528267 - DNA, 1176 bp, Homo sapiens
  misc_feature (1176)..(1176): n is a, c, g, or t
ggagttagatgcatcagcagggcccctagggtctctttctcggataaggttaatctcacgctgggtagcatatgaggatcaagatcaaggaacctttatctctgaggcaaggatcgataacagacccaggctgagtggcggatgtggtgcccagcgctgaggaaactacccgagggcatggcggaccaagtccagagggagactcaggggaagtgcagagaaagatgagcgcaggaggcctgggaggagacattcaaaactcactctgacagcaagccgtatggacccatgtcgtgtgggtttggagcttctcgtcatgccaggcatggagcatgtctatgggatcccatgagcatgcagacgaaccatgacggcgtgaagcgtcacatgcaggcgtggagggacgaccgatatacgtcgcatcgtagcaattctggatagtagtaccaagtagtgagctagtacaaaccaatggccttagtatgggtctgtgcctgtgctcctggcacacaaacctcatcgcgagcttgggcatcttctggctcaagtgctgcagagacctgggttgatatatcttccaacactgccgggaagaccctgtatgggacagatgatggactacctgcagggctctggggagaccccacagacagatgttcgctcggatgtcagagactggccatcattgacgtctccctgcttgacttggtggccctccactctcatgattgtcatcactggcaatattgctagtattcacaggaacccatggcgttgacccaatacatctcccttcggctacaacagagcgttgaacttaccggacgacgctctacatgtcgctgaacttgatcaggccgtgagagaaaccaccgtgcactagaacgaataagcaagaacatgacacatcgaaggcagcgggctatcccgagaccccagaggtttccgaccgaagcggcactaacgtagagcgtgtatatctaagctgcaacgttcggtacaactgaaacacaatctcggtacacagcgacgggaccagagagtcaccgccgtgtgtaaacgcggatcgtcataagggaaaaggatggtaactaacaaccagcagtgactaactatgcatgagcgcgaatgacacgatgtccgtcacactaactcagatgctgtatacgtattttn

SEQ ID NO: 528268 - DNA, 3276 bp, Homo sapiens
  misc_feature (57)..(57): n is a, c, g, or t
  misc_feature (70)..(70): n is a, c, g, or t
  misc_feature (87)..(87): n is a, c, g, or t
  misc_feature (3267)..(3267): n is a, c, g, or t
ctgtaagccttcctggtgtcctgggttatccctccttctgctgttctggaaaagaanacccagcccagtntatggagtataagaaanactgatgcacctcaaccggatgtgaaggaagaggaagaagagaaggaagaggaaaaggacaagggagatgaggaggaggaaggagaagagaaacttgaagagaaacagaaaagtgatgctgaagaagatggtggcactgtcagtcaagaggaggaagacagaaaacctaaagcagaggaggatgaaattttgaacagatcaccaagaaacagaaagccacgaagagagtgaaacaatcttaagagcttgatctgtgatttcttctccctcctcccctgcaagagtggtcctaggagaggacctggcacaccttaggttgacattcagaaaacttcaagacatcaccatcagcaggctccagttgaacactagtctgtgtaactttaaacatctagcagtaaatacttgcagttgtgatataaaggaccctgtttctgtagaaaagaaaacatttaacataatggttgtgaaatgtaacatgaagcaaactaacttttttttttttaacatctttgtttttaaaatagaatgatagaactttgccagtctttaagatcttggcttaatttaatgtattaatctgtttgtgcaaacataataccaccatttaaaaatgttagggagatgagttgcagtttttataatagattttttttaaagtttggtattgtaaaacattcacacctctgtccctcaaaattgataattacgtttaaagtgcagtcatttgtggttagaatcttgttttgtttgcttccattattgagttcctcctaaggaaattgaggagagggactgaatagaagcccaaattcatataaaagttgcgtttaagttgtattaaaaatagatatataagaaaaaattcttcagttcccagacagctttttaggtagtggaggaggtggcttcatgtggcacttgggcatttatattccacttgggagggtcaggctgtggccttctggagcaggtggcttgttaaggaacgctagcagggcatggcacgtgagctccggaatagatgtcttcatcacttcttccactgtgtgttgacactgttttccttacctatttcctcagatccccagctttctcctctgctatgcattttcttcacagtgcagcttgcagtccgttgctgaaaatgattataagccctgcataatgttaagctttattgtgattacgtgtatgtttcttctttcttttaagcagacccatacctttccagggtcaaagtacagaatagaatacattgatacaaagtacagaaaaatactttgatttttatccatttcttttactctgtgtaaagacttgagaagtctaattcacaggcaaaccaatacagaattgactgcagttgaacagactagaagtatttgtgggaggagtgacatgaagcatgagttatctgattttttttgtagctgctatatattttaagccttcatttgcaattcatgtaacagttgtgtcataaattacacaataaagcagtcctgttcaaatttttttttaacgtggcttgtagaatttttaaaaaagtgatcttaggtttgttttttcatgcgggatgcagatgggtgctatcagagcctctcccacaccactatagtgtaataatgttattattactctacactgaaacgtattcagagttagatattattttagcttcagttgttctttagaggctttcaaatgtaccgatgatactgtttcttgcactgaatatataaacactccacagtgtttatattgggaagatattgggaaggaaatatatttgtaaaagatgaaggctgtatctatttttttttctttttaaagtttgttcacttaaattcttttgaggatgggatgtatttttcttgctgttcagtgctttttccttttcatctgttgttctgtggtcacagtgaccttagctacatagcagactttcccaaatgtattgattacaaataaacagttgttacttagcaagacctgaaaatatgtctgcaggtttctccttgaagcaaatgtgtgggatcattgcatttccagaaatctgcctccttcaccctccgttgacagtatatgtcatgcctcactttcttctagctgagctttaaatcattagagcttaaattgtcagatcgttcattgcctttccagggttatttagtaaagtttgttgaaaacaaaaacgccttttcttggttcttttttcagttattttgaaggtccagcatcctgattaaatgtctgacacattaatgaatgaccagcagcagctttcagctcttaaaaagacacttatattttgattttacatgctggttacctgttccattgttgtcaaatgcccactctccatcagatgtgttcctccattttcttatccacaaagtactcctcacttttcaatttgtcatgttactaaatggtgttacattaaagccctgtgttaagtgtctgcttttgactgaatttcttcatagtaaccttcagtgtgtgtgtgtgactatgttcaattagtgggttgatcttcgtataattggccactatgtgagagttcactactaggcagaaactattatggaccagtgaaataatgacttttatctcaccacgtgagtttgatgcagtcttttctgtctagcccttgcctcttcctgcccatgtgattgcggtgcagtagtttctgttgtataatagtgtggacagcagctcagaaaaggagggaatgctactgataatttgtagataatattctttaagacttaggggaaccattgaactttgaaatttttattagaaaattatttgttcagaatcagactccattattttacatatacttaaatactttaggggtatttttgaaagttagcccagttttttatgtgctattaaatttttagattacatactaaagaaaagtatgtacacagaatgtagtgctcctagttactattttttctattaagaaatagtttagttctggtgtaaaatttgtttgaatgctaaaaaaaaaaaagcaggactgcattatggcacttttgccttggtggcccactttctccatttaaaacattaggatttgtatttttctgctgcgtttgtatgaagacatatttgattgttgttttctcttgattttaaaataaaacctcatgagccctaaanaaaaaaaaa

SEQ ID NO: 528269 - DNA, 357 bp, Homo sapiens
cgggctggagtgtagaggcgggatctcggctcactgaaacctgtgcctccccggttcaggcggttctcctgccacagcctcctgagtggctgggattgcagcgtgcgccaccatgcccagctaatttttctatttttggtggagacatgatttcaccagtttgggtaacatgggaagagcttgtctctgcaaacaaaagtttaaaaacaatgagctgggcatggagtcgaccctctggccccagctactcaggctgaggtgggaggatggcttgagcccgggagttcagggatgcagtgtgctttgattgcactactgcgcttcaccctgggcaacagagtgagaccccatctcttt

SEQ ID NO: 528270 - DNA, 3264 bp, Homo sapiens
  misc_feature (57)..(57): n is a, c, g, or t
  misc_feature (70)..(70): n is a, c, g, or t
  misc_feature (87)..(87): n is a, c, g, or t
  misc_feature (3255)..(3255): n is a, c, g, or t
ctgtaagccttcctggtgtcctgggttatccctccttctgctgttctggaaaagaanacccagcccagtntatggagtataagaaanactgatgcacctcaaccggatgtgaaggaagaggaagaagagaaggaagaggaaaaggacaagggagatgaggaggaggaaggagaagagaaacttgaagagaaacagaaaagtgatgctgaagaagatggtggcactgtcagtcaagaggaggaagacagaaaacctaaagcagaggaggatgaaattttgaacagatcaccaagaaacagaaagccacgaagagagtgaaacaatcttaagagcttgatctgtgatttcttctccctcctcccctgcaagagtggtcctaggagaggacctggcacaccttaggttgacattcagaaaacttcaagacatcaccatcagcaggctccagttgaacactagtctgtgtaactttaaacatctagcagtaaatacttgcagttgtgatataaaggaccctgtttctgtagaaaagaaaacatttaacataatggttgtgaaatgtaacatgaagcaaactaacttttttttttttaacatctttgtttttaaaatagaatgatagaactttgccagtctttaagatcttggcttaatttaatgtattaatctgtttgtgcaaacataataccaccatttaaaaatgttagggagatgagttgcagtttttataatagattttttttaaagtttggtattgtaaaacattcacacctctgtccctcaaaattgataattacgtttaaagtgcagtcatttgtggttagaatcttgttttgtttgcttccattattgagttcctcctaaggaaattgaggagagggactgaatagaagcccaaattcatataaaagttgcgtttaagttgtattaaaaatagatatataagaaaaaattctttcacttgatgtttgttagaccagaaagtgtgtgtgttctgtagctcagttcccagacagctttttaggtagtggaggaggtggcttcatgtggcacttgggcatttatattccacttgggagggtcaggctgtggccttctggagcaggtggcttgttaaggaacgctagcagggcatggcacgtgagctccggaatagatgtcttcatcacttcttccactgtgtgttgacactgttttccttacctatttcctcagatccccagctttctcctctgctatgcattttcttcacagtgcagcttgcagtccgttgctgaaaatgattataagccctgcataatgttaagctttattgtgattacgtgtatgtttcttctttcttttaagcagacccatacctttccagggtcaaagtacagaatagaatacattgatacaaagtacagaaaaatactttgatttttatccatttcttttactctgtgtaaagacttgagaagtctaattcacaggcaaaccaatacagaattgactgcagttgaacagactagaagtatttgtgggaggagtgacatgaagcatgagttatctgattttttttgtagctgctatatattttaagccttcatttgcaattcatgtaacagttgtgtcataaattacacaataaagcagtcctgttcaaatttttttttaacgtggcttgtagaatttttaaaaaagtgatcttaggtttgttttttcatgcgggatgcagatgggtgctatcagagcctctcccacaccactatagtgtaataatgttattattactctacactgaaacgtattcagagttagatattattttagcttcagttgttctttagaggctttcaaatgtaccgatgatactgtttcttgcactgaatatataaacactccacagtgtttatattgggaagatattgggaaggaaatatatttgtaaaagatgaaggctgtatctatttttttttctttttaaagtttgttcacttaaattcttttgaggatgggatgtatttttcttgctgttcagtgctttttccttttcatctgttgttctgtggtcacagtgaccttagctacatagcagactttcccaaatgtattgattacaaataaacagttgttacttagcaagacctgaaaatatgtctgcaggtttctccttgaagcaaatgtgtgggatcattgcatttccagaaatctgcctccttcaccctccgttgacagtatatgtcatgcctcactttcttctagctgagctttaaatcattagagcttaaattgtcagatcgttcattgcctttccagggttatttagtaaagtttgttgaaaacaaaaacgccttttcttggttcttttttcagttattttgaaggtccagcatcctgattaaatgtctgacacattaatgaatgaccagcagcagctttcagctctttgcccactctccatcagatgtgttcctccattttcttatccacaaagtactcctcacttttcaatttgtcatgttactaaatggtgttacattaaagccctgtgttaagtgtctgcttttgactgaatttcttcatagtaaccttcagtgtgtgtgtgtgactatgttcaattagtgggttgatcttcgtataattggccactatgtgagagttcactactaggcagaaactattatggaccagtgaaataatgacttttatctcaccacgtgagtttgatgcagtcttttctgtctagcccttgcctcttcctgcccatgtgattgcggtgcagtagtttctgttgtataatagtgtggacagcagctcagaaaaggagggaatgctactgataatttgtagataatattctttaagacttaggggaaccattgaactttgaaatttttattagaaaattatttgttcagaatcagactccattattttacatatacttaaatactttaggggtatttttgaaagttagcccagttttttatgtgctattaaatttttagattacatactaaagaaaagtatgtacacagaatgtagtgctcctagttactattttttctattaagaaatagtttagttctggtgtaaaatttgtttgaatgctaaaaaaaaaaaagcaggactgcattatggcacttttgccttggtggcccactttctccatttaaaacattaggatttgtatttttctgctgcgtttgtatgaagacatatttgattgttgttttctcttgattttaaaataaaacctcatgagccctaaanaaaaaaaaa

SEQ ID NO: 528271 - DNA, 361 bp, Homo sapiens
ttttaagaccccattttaaaaaattattaatcggggggggacttttaattcctatttcaaaaggggtttccctgaagaattcaggaaacaactttttggggaagacagctttccttcccccccaatttttggggggggggaaaaatctgatttgggaagaatttaaaaaacccaaagctttttaatttgtttgaaacaaacttttcgcccggacactttttgcttttacccaataaaaaaagccaagggcattttagttttaaatggggttttccccaaggaaaacccgggggattgggtggggccttttattaaccgcccttttttaaaatttttttcaaaaaaaggaaggaagatggga

SEQ ID NO: 528272 - DNA, 601 bp, Homo sapiens
  misc_feature (591)..(591): n is a, c, g, or t
agaggatcccggtacatctatgtgtcgtgctagtaccagcaccatgcttttgtaccagtatcatgcagttttggttactgtagccctgtagtatagttatgaagttgggtaatgcgatgcctccagctttgttcttttggcttaggattgctttggcttttggggctctttttgggtttcaaataaattttaatgctttttttttctgattctgtgaagaatgttatgggtagttggataggaatagcattgaatctataaatggcttggggtagtatggccattttaacaatatggattcttcctatccataagtatggaatgtttttccattggtgtcatctctaatttctttcagcagtgtttggtaattttggtggtagagatctttcatctccctggttagctgtattcctaggtatttaattcttttggtggcaattgtgaataggatggcattcttgatttggctctcggcttggatgtcgttggtgtataaaaatgcttccatattgtgtatatggatttggtctcctgaaaggttagctgaagttgttatcagatctaggagcttgtgggccaagatcatgnggttgctaga

SEQ ID NO: 528273 - DNA, 579 bp, Homo sapiens
tggtcccctcccatgcctagctggattgcaaagttaagtttatgattatgaaataaaaactaaataacaaaaaaaaaaaaaaaaaaaaaaacaaaaaaaaaaaaaaataaaaaaaagaaaaaacaacaaaaagaaaaaaaaaaagaaaaaaaaaaaaagaaaagagcgggccggcgcgcgcgccgcccaatattccgcccgcgcggcggcggccccgacgcgcgcgccgccccccaccttgtgtaagagagacgccccctctcactgagagaagagatgcgtattatattatagaacagaagagcgagggcgcggcgccgcgttgcttgataatacaacaaaacggcggttgagagggtgagagtgaacaacatacgagcgtgagtagagcgagagggcgagtactatgtgttagcggggagaagaacgccactcttctcctttcttgggtggacgaggagctaaaacacgtaggggggagacacacctatcgctcctcaacaacgtaaagataatatcccgtgcacctctggaggagaggaaatacaataaataaaaataagtggtgatagataaaaa

SEQ ID NO: 528274 - DNA, 358 bp, Homo sapiens
  misc_feature (318)..(318): n is a, c, g, or t
cggccgaagatggtttacgtccgtatccattacttcgacccacaagtacttcggaatttgagtttgaggctttaagaagctggatctcctgccgggcgtggtggctcatgcctgtaatcccaccactttgggaggctgaggcgggcggatcacggggttaggagatggagaccatcctggctaacacggtgaagccctgtctgtactagggatacaaaaaactggccgggcgtggtggtgggtgcctgtagtcccagctacttgggaactcgggaggctgaggcgggagaatgacctgagcccgggaggcggagcttncggtgggcagagattgcgccattgcactccagcctgggcg

SEQ ID NO: 528275 - DNA, 878 bp, Homo sapiens
  misc_feature (1)..(1): n is a, c, g, or t
  misc_feature (132)..(132): n is a, c, g, or t
  misc_feature (163)..(165): n is a, c, g, or t
  misc_feature (167)..(167): n is a, c, g, or t
  misc_feature (170)..(172): n is a, c, g, or t
  misc_feature (174)..(174): n is a, c, g, or t
  misc_feature (177)..(178): n is a, c, g, or t
  misc_feature (192)..(192): n is a, c, g, or t
  misc_feature (195)..(195): n is a, c, g, or t
  misc_feature (202)..(203): n is a, c, g, or t
  misc_feature (206)..(206): n is a, c, g, or t
  misc_feature (210)..(210): n is a, c, g, or t
  misc_feature (215)..(215): n is a, c, g, or t
  misc_feature (218)..(218): n is a, c, g, or t
  misc_feature (222)..(222): n is a, c, g, or t
  misc_feature (228)..(228): n is a, c, g, or t
  misc_feature (232)..(232): n is a, c, g, or t
  misc_feature (234)..(234): n is a, c, g, or t
  misc_feature (237)..(237): n is a, c, g, or t
  misc_feature (244)..(245): n is a, c, g, or t
  misc_feature (248)..(249): n is a, c, g, or t
  misc_feature (252)..(252): n is a, c, g, or t
  misc_feature (265)..(265): n is a, c, g, or t
  misc_feature (271)..(271): n is a, c, g, or t
  misc_feature (275)..(275): n is a, c, g, or t
  misc_feature (278)..(278): n is a, c, g, or t
  misc_feature (296)..(296): n is a, c, g, or t
  misc_feature (299)..(299): n is a, c, g, or t
  misc_feature (302)..(303): n is a, c, g, or t
  misc_feature (308)..(308): n is a, c, g, or t
  misc_feature (311)..(311): n is a, c, g, or t
  misc_feature (315)..(315): n is a, c, g, or t
  misc_feature (319)..(320): n is a, c, g, or t
  misc_feature (325)..(327): n is a, c, g, or t
  misc_feature (332)..(332): n is a, c, g, or t
  misc_feature (334)..(334): n is a, c, g, or t
  misc_feature (339)..(339): n is a, c, g, or t
  misc_feature (360)..(360): n is a, c, g, or t
  misc_feature (363)..(364): n is a, c, g, or t
  misc_feature (370)..(371): n is a, c, g, or t
  misc_feature (374)..(374): n is a, c, g, or t
  misc_feature (376)..(377): n is a, c, g, or t
  misc_feature (382)..(382): n is a, c, g, or t
  misc_feature (384)..(384): n is a, c, g, or t
  misc_feature (387)..(387): n is a, c, g, or t
  misc_feature (393)..(393): n is a, c, g, or t
  misc_feature (402)..(402): n is a, c, g, or t
  misc_feature (407)..(407): n is a, c, g, or t
  misc_feature (409)..(409): n is a, c, g, or t
  misc_feature (419)..(419): n is a, c, g, or t
  misc_feature (434)..(434): n is a, c, g, or t
  misc_feature (463)..(463): n is a, c, g, or t
  misc_feature (491)..(491): n is a, c, g, or t
  misc_feature (494)..(494): n is a, c, g, or t
  misc_feature (501)..(501): n is a, c, g, or t
  misc_feature (508)..(508): n is a, c, g, or t
  misc_feature (510)..(510): n is a, c, g, or t
  misc_feature (515)..(515): n is a, c, g, or t
  misc_feature (520)..(520): n is a, c, g, or t
  misc_feature (525)..(525): n is a, c, g, or t
  misc_feature (529)..(529): n is a, c, g, or t
  misc_feature (531)..(532): n is a, c, g, or t
  misc_feature (540)..(540): n is a, c, g, or t
  misc_feature (545)..(545): n is a, c, g, or t
  misc_feature (557)..(557): n is a, c, g, or t
  misc_feature (569)..(569): n is a, c, g, or t
  misc_feature (572)..(572): n is a, c, g, or t
  misc_feature (611)..(611): n is a, c, g, or t
  misc_feature (646)..(646): n is a, c, g, or t
  misc_feature (657)..(657): n is a, c, g, or t
nacatgcaaaatacagtccatgcatctgccattttaaaaagtctctcatcctatagcagataaaaccaagtatatttcgtctatcaacattcagtaaatgtttcaaaatgctttagagtgtaaagataaganatttagcaaaatttcaacaaacctgtataannnanggnnngnggnnccattttatttcanggngacatgnngtnatgnaaatngtnagtnattgtnatcngngtntctttgnnaanngtnaacaatacaaggncttaanaganccnggcctcagggctacacangcnaannggatngtnaganagtnnagggnnnccaangngtgcnatttttaagtgtgtatatgtngtnngttttnnaangnncaggngnggngggggngttaggggngggangntggggggggnggggtttcggggggngggggggggggggggggggggcatggggngagggttctgggaggttcatacatttcngangaacatnttgggtnanttccnttgcnattgngatngnncacaactngggtnggggcttcagcnagcgcgcgcgtngcnagggcggcgggggaggcgtgtttgaggttcctgaagggnacgggctggacgatgtctcgggaacaggctctccnttgggtgaccncagaatcccatcatcaccgtccagcatctgcatgtcactgaagtcagcgttccctactcccacgatgatgactgacatggggaggtgggaggcatggacaatggcctcccgggtgtcggccatgtctgtgatacaccatctgtcaggatcagcaggatgaagtattgcgatgcctccttggtgttagtttcctctgacgctgacttggcaaccttctggat

SEQ ID NO: 528276 - DNA, 131 bp, Homo sapiens
cgccactaacgacgtgcacgatcgtggaagcctgtggctacaaacaaatgttgagccgtagactgccgtcggaacatggtgaagggagactcgaagtactctgcaggcttgtacggacgggtaaaactaga

SEQ ID NO: 528277 - DNA, 446 bp, Homo sapiens
  misc_feature (11)..(11): n is a, c, g, or t
  misc_feature (43)..(43): n is a, c, g, or t
taagggaattnaaatccccttggggccaattggggtcccttantttgcggatacgccaggtttatggacttttaaaccttatttttcccaacactaatttcccagtgcttcaacatcaactccctctcttttcaacataaaattgatgaagggatgtggcagagtttgatttttcaaaaatatgtaacaatatttttacagttttcagattgagggaagcagaaaatggaaataattaacttttcttatgtgtctataatagtatactaaaacaaaatataaggcaccgttaaagataatttttattttgcttatattaaacatgtgagttgtatgtttttaatttgggttgtttgactaatgggaacatcctaaaagcatcacagtggttttgaaccatttaaattcaaacactatgatctgaaaataaatgagttatttgaaca

SEQ ID NO: 528278 - DNA, 321 bp, Homo sapiens
  misc_feature (12)..(12): n is a, c, g, or t
  misc_feature (112)..(112): n is a, c, g, or t
  misc_feature (127)..(127): n is a, c, g, or t
  misc_feature (254)..(254): n is a, c, g, or t
  misc_feature (289)..(289): n is a, c, g, or t
  misc_feature (306)..(306): n is a, c, g, or t
atccgccagttncacgcgtaggacacagcactaaagcctgggtttgaaatagcgacctctttacactggcggaggatccactgcgggctaagcggaagtgtttcttgttcancggtgtagcgtgctnttcgcggataagtatcggccaggcatccgctcccggtgcaggtaagtgattatgtctggcggtaaatgtcacccagcgacaccactgggttactgactcctgcatcgacaatctgcagagtatcttnaaattcgctataaagtagccctgctcatgaaatgntctggctccaatctccntggaaagtcatccca

SEQ ID NO: 528279 - DNA, 878 bp, Homo sapiens
gggttccaattggggatggtcctgagaattggacttttttttctgttgttgttgtttttgagacggggtctctctctgtcaccaggctggagtgcagtggcacaatctcggctcactgcagcctctgcctcccgggttcgggcgattctcctgcctcagcttccctagtagctgggactacgggtgcccatcaccacgcccagctaattttgtatttttagtgaagacgggggtttcaccatgttggccaggatggtctcgatctcttggccttgtgatccacccgctcgactccccaaagtgttgggattacaggcgtgagccatgcgccggctgagaattggacactttcaatctgtggccctgagaggctggtggcagcaacaccagggtcaattcagtggggaaggttcccggagtagggacgaacgatggagatggggtggcttgggatcaggagtgagcgatggcaatgccgatggaatcagcaggggacaatgggacgatacagattggcaatggagggccaagtgcggtggtcacagtctgggaactccccagccatttggggaggtccaggtgggaggctcacttgaggggcaggagtccagaccagctgggcaacatggaggacccccatctctacgacaaaaatttcaacatcgcgggcttatgggcagtccgttgtccccacggtcaggagaccgaggtgcagaatgtgtgacccgaattgggctcgggggctgctgaaccgttacccgcggggagggaacaccccaaagaaaacaaaagttcggcgccccagaatatcaacatttgggggccaagaggactgatcagacggaccgttcccaagccgcgctcagagcgtggataag

SEQ ID NO: 528280 - DNA, 126 bp, Homo sapiens
gcgaccgatagtttgctcggttcggtcacgacatggacacgacttccctgcggtgcgcccgccctcgaagttcgcggacgtcaacagtccgcatctggtcacaccatggaggtggagcgtgaccat

SEQ ID NO: 528281 - DNA, 283 bp, Homo sapiens
ttgggagcataattgctcacaaagattcatagattttttttttattgttaagctgcaacgtacatggtttaatacaacaacaaaaaaaatttaatcaagtgaaacgtaataaactgaacaataaacactcaaaacattttccattagaacatgtaaagacatatgaggtttgttacatctactgcatttctatgtattactagtctactaccatgttctgtatcatgcagatgtgatgagtgatgataatatgaagtcgtactgcaggatcatcaagcgcacg

SEQ ID NO: 528282 - DNA, 268 bp, Homo sapiens
  misc_feature (203)..(203): n is a, c, g, or t
ggaccgcctcgctgtcgctgggattacaggccctgtcactatgcagctattttttgtatttttagtagagatggcgtttcaccattgtccaggctggtctcgaactcctgacctcgtgattcgcccgctcggctcctgaagtgccaggattatggctggagccactgcgtctcccccatcttcaccattttaagtgtacagcntttcaagtggcgttaagtacatttcaccttattctgcaaccaccaccactgtccagcgacagcga

SEQ ID NO: 528283 - DNA, 107 bp, Homo sapiens
tctagaggatcccggatccttattaaaaatggttacctcaggatgacgtgcagaacaatgggtaatggataaaccgttgagacgtggccccacgtgttaggatgtgt

SEQ ID NO: 528284 - DNA, 794 bp, Homo sapiens
cctgacgtcaggctcgggtgtcaacctctgacttattctgcagatgctctggtgtgtgtgtgtgtgtgtgtgtgtgtgtgtgtgtgtgtgtgtgtgtgtgtgtgtgtgtgtggggggagaggggggggcaggggggcgggggagagagggaggaggagggaggaagagaagacatcacctcaccctcaatcatgctgcagagcagcagcagcatgatgtgtgtgtgcagagaggagagagcagcgtgcgcgcgcagcgagggggggggaagaagaagaagcagcagcagtagtgataaatatgtagacgcgcgaccaccatcacacagcagctagagtgcccggccgaagacagaagaagaaagaagagcgagcggaggcgggccgcagcagcagcgggggtgggtgggcagcagcagagaggacagcacaaagagagaggagagaacacgagagagagcgagcggaggagcgaggaagaagaaagtagtagtagctgcgcggcagctcctacttaccgacagaggaagacgcagcatgtgtcgctctagtattacaacaagagaccgacgagggcgtgcggtgatagtgagtggagcggggaagacgcactcacgtaatagtgaggggaggaggtgacgaggaggagcgacgtgctggccgcaggcgccgcagaggggcgacgccagatgcaagagccgaggacgagcaacaacccacagaggcgcgcggaaccaacagtaggtggctgcatcacgcacccgtggtgaccgaggcgaaagtcgccgcagagga

SEQ ID NO: 528285 - DNA, 258 bp, Homo sapiens
agcaatcccaggggcctcacagtgcacgtgagctgcgacgcagtcaccgtggagttggagctgacgcggtgtgtccacgtgccatgagctcgtgaacgcagagcgggtatatggcttgagcttactgtcaagtggagacaggcagtgacacatgaaactacaaacgagttgataaggcggagcttgtactgatgagcatagccggccgtgagcctacgagcacccctgctcgtggagttattgttgtcatggcggggg

SEQ ID NO: 528286 - DNA, 332 bp, Homo sapiens
tcgaagatggcggttgggcacctaggtgcagcatcggggaagaatctatggtcctagaacctttggtatggttccctccaagggctgagtgtgcctgccactgggcttggacagtctgggtgccttgacccaagcaggttctttctagggagacctgaggccggcacctggcccaggtgctcttggcatatgggaggcagggcggagggggagctcaggctcttgcctatgtggcgctgtctcctgtcagagtttcaggagtaagcaggacgtgatccgccactacaagatgcacagagaagcgcgacaactccctgcatgcgatgcctcag

SEQ ID NO: 528287 - DNA, 961 bp, Homo sapiens
gagaaccaactcatctttattaaatgcatcgtgtgtgtgtgtgtgtagtagtgttgtgtgtgtgtgtgtgtataccacatactacgggcctgcgggaccggaccccatagagctggtgaggaaatcaacttgtggttcatcattgcaagctgtagaatcccggggggacgaaagattgccgacgggaggggttgtggtccatcagggcctcctcaaaggtgggtatcccatggcctgtgctgtgatcacaaagtgaacccgggtcactcatatagtcctcgagctccccatgagaggggctgtgacgtatgcgggatgagttccgccgcgcgccccgcagggaactccccgtatatgaccagaagtgctccgcccgtgaaagaaatctgggcgcctcatgggatcgtggcaagctcagggagggcctccgtggtgtccccatcaacgtgtcgcgtgttcttcactcgggtggagccctgaatgcggggtcttccccattctccctcctggcccggggtggcagtcgtgtgtcccttcgtgtctgacaccctggatcaagctcatccctcctgtgtccccaaggttttcttcccggccccattgtccgtggtccctttcgtgggttgttcccccctcaagtgtactattatcttcccgtggaagcaactgggtgacggccgcttggctctcaatccaggggggttagggggggcccccgggggcatgaggcgtgccccccagctgccctgagatggagccttggggaaccgacctgggggtcgcctcaagaaggaacgccgggggggcacacaaataccccggtgccaccgttgtagaagggcacaaccctcaccaatgggggaatctgcgccgcacatagggcacccctgggagggaccccacaccacgtgggaaagccagaaccacctcttaaaatgggcccggcaaacaggccacaggc

SEQ ID NO: 528288 - DNA, 325 bp, Homo sapiens
  misc_feature (78)..(79): n is a, c, g, or t
  misc_feature (82)..(82): n is a, c, g, or t
  misc_feature (87)..(88): n is a, c, g, or t
  misc_feature (94)..(94): n is a, c, g, or t
  misc_feature (104)..(104): n is a, c, g, or t
  misc_feature (109)..(109): n is a, c, g, or t
  misc_feature (112)..(113): n is a, c, g, or t
  misc_feature (115)..(115): n is a, c, g, or t
  misc_feature (118)..(118): n is a, c, g, or t
  misc_feature (122)..(122): n is a, c, g, or t
  misc_feature (126)..(126): n is a, c, g, or t
  misc_feature (130)..(130): n is a, c, g, or t
  misc_feature (134)..(134): n is a, c, g, or t
  misc_feature (139)..(139): n is a, c, g, or t
  misc_feature (141)..(141): n is a, c, g, or t
  misc_feature (143)..(143): n is a, c, g, or t
  misc_feature (147)..(147): n is a, c, g, or t
  misc_feature (156)..(156): n is a, c, g, or t
  misc_feature (160)..(160): n is a, c, g, or t
  misc_feature (162)..(162): n is a, c, g, or t
  misc_feature (164)..(164): n is a, c, g, or t
  misc_feature (167)..(167): n is a, c, g, or t
  misc_feature (172)..(172): n is a, c, g, or t
  misc_feature (188)..(188): n is a, c, g, or t
  misc_feature (214)..(214): n is a, c, g, or t
  misc_feature (263)..(263): n is a, c, g, or t
  misc_feature (267)..(267): n is a, c, g, or t
acatgtgatgtgtgtatacacattcttgctcgaaaccaacatagtcctcaaacagttggccactgaacgcgagaatanngcncagannatgacntccatgtatntgggnacnntngtnttgnctcnagtntcancctancncntagnatatcattnggcntncnttncgcangcccctgtgaacttcngtttcctaaagtaattattccaaatnatcactactttactcagcttcctccttttctcttaatagatgatctttntccngtggcacagttggtcgacgatgggggaccatcatgatagtcgagcggcaggcaggcaa

SEQ ID NO: 528289 - DNA, 352 bp, Homo sapiens
  misc_feature (105)..(106): n is a, c, g, or t
  misc_feature (109)..(109): n is a, c, g, or t
  misc_feature (114)..(115): n is a, c, g, or t
  misc_feature (121)..(121): n is a, c, g, or t
  misc_feature (131)..(131): n is a, c, g, or t
  misc_feature (136)..(136): n is a, c, g, or t
  misc_feature (139)..(140): n is a, c, g, or t
  misc_feature (142)..(142): n is a, c, g, or t
  misc_feature (145)..(145): n is a, c, g, or t
  misc_feature (149)..(149): n is a, c, g, or t
  misc_feature (153)..(153): n is a, c, g, or t
  misc_feature (157)..(157): n is a, c, g, or t
  misc_feature (161)..(161): n is a, c, g, or t
  misc_feature (166)..(166): n is a, c, g, or t
  misc_feature (168)..(168): n is a, c, g, or t
  misc_feature (170)..(170): n is a, c, g, or t
  misc_feature (174)..(174): n is a, c, g, or t
  misc_feature (183)..(183): n is a, c, g, or t
  misc_feature (187)..(187): n is a, c, g, or t
  misc_feature (189)..(189): n is a, c, g, or t
  misc_feature (191)..(191): n is a, c, g, or t
  misc_feature (194)..(194): n is a, c, g, or t
  misc_feature (199)..(199): n is a, c, g, or t
  misc_feature (215)..(215): n is a, c, g, or t
  misc_feature (241)..(241): n is a, c, g, or t
  misc_feature (290)..(290): n is a, c, g, or t
  misc_feature (294)..(294): n is a, c, g, or t
ggtcacatttcaggcccagataatcgtatgtgggacagtgcatgtatataccatttatgctgtagaaaattcttctcaaccacttagcctctaaatgctgaatanngcncagannatgacntccatgtatntgggnacnntngtnttgnctcnagtntcancctancncntagnatatcattnggcntncnttncgcangcccctgtgaacttcngtttcctaaagtaattattccaaatnatcactactttactcagcttcctccttttctcttaatagatgatctttntccngtggcacagttggtcgacgatgggggaccatcatgatagtcgagcggcaggcaggcaa

SEQ ID NO: 528290 - DNA, 821 bp, Homo sapiens
  misc_feature (442)..(442): n is a, c, g, or t
gcgggcggctgagacgcctgcctgcctggcacctaggagcgcagtggagccccgagcaccgccgtccgccgctcattggacgtcctgatgatccgacagcccgatggcccgtcacgctcctgtgtgtaaagacgccccaaccagtccgctcaccgcgacttggagtctagagtaggctgagccgtcgtgtcatggagctgttgaggccatcctcagaaggacccacctgcagtccgactggtacataccccggaatgcgatccagcgataccagatgtggaccaagagtggtattaacttgtattcatgggtaggacgtcatgttgtctaggatcaccaactgtctcagcggtacttttgctatccacacaacgtcaggaaataaatcgggcaactgtttatgtgcactcatggctgtgccagattgtgacacgagttcccnttcaagacatagttgccaagaacaatctaaacggcgctatatggctgcgactggaactccacagcaggaagtcctgcgtggcttctaactcggggacagtatcctgaggattcctcaagtgattggtttaaaggcggactgggtacgtctcttcgcgacacgctttcttcccctgggattggggaaaaacgtctccaaggccttgaagctgcccaggcaggcattccaaaggcctgtgcgtcctgggttctccggttacactaccctatgggtggatttcagcttcctggtgccaggcgatattgccgatgtacttctgcatatttgcagcactgtcgtcagggctttgtcccaccatgggcgggattcgggttcgccg

SEQ ID NO: 528291 - DNA, 217 bp, Homo sapiens
ctaattggttcttcgatgacgctctgctccaggcgtcctgcttacagcactgtgcctttgtcgcgctctaggatgcccttctcttgcctttgaaatattacctcactcgctgatgaggatatactatatcccatgtgttattcgactatgaatcagcttgtggaggacttgaagccttccttgcatcctctccgttcgtcatcgaagaaccaattag

SEQ ID NO: 528292 - DNA, 174 bp, Homo sapiens
gagttacgcaatcctgctcatacatgtgccaaattactcaaagtggcatcaaagagcgaaacttcagagctaaaactatagaacttatagaagacaaacgggcacatcttcatgaacctggatttggcgaaggacacaaagtaaaccagaatattaaccaaaatacatacttag

SEQ ID NO: 528293 - DNA, 187 bp, Homo sapiens
  misc_feature (2)..(2): n is a, c, g, or t
  misc_feature (14)..(14): n is a, c, g, or t
  misc_feature (33)..(33): n is a, c, g, or t
  misc_feature (51)..(51): n is a, c, g, or t
  misc_feature (87)..(87): n is a, c, g, or t
  misc_feature (90)..(90): n is a, c, g, or t
  misc_feature (175)..(175): n is a, c, g, or t
tnaaattatttaanagatgtatggtaccatttnaaagtggttgtatctgantttactgtggggattacatacactgtaatggggganaantacctaaaaccaattttaaaatggctttctttgtatttcagtttaaaaacccagtgcatgtacgcccttttagatgcaataaacnccttgaccaaag

SEQ ID NO: 528294 - DNA, 327 bp, Homo sapiens
catctcaatactgtactttttgcacggattatataatttaatctacccaacaatcctatgggtaggcactattgttaactctgaagtttagagaacttgatcagagtcacacaactagtgagtggaggtggcagcattcagacttccctgagtctgaccccagactttacactattgttaatatcctgcagtcttacattcgcctgtagttgcatgttaattttctttctcaattgcagcatcagtttcttcaggagttctgcttttatcagatactttgcagactcatcaaatactcaatgttcacatagagaaggaaaaaaaatt

SEQ ID NO: 528295 - DNA, 1239 bp, Homo sapiens
ctgtgggctgactgtgcagactccggtccctgctgagccaccctgaggggtcccgtggcctccgctggaccctggaatcttggtgccctcgcagtgaccctgctgcccctgcccgagtcgccaccaagtggcttcccctacacaccgactgtgatgtgaagtcgagccgttgtgagccatgcacgtggagagtgaactttagccgtactacctgcggcaacacggtggccatcgcagatgtcgtcgcggccatggctgagacgggtgcaggcgacgactggccctgattcgcccatgggaccccctgagaatgcttgcgcgagtgatcaccacccggccgtgtgcctatagacgtcatgggcacatcccctggcatatcacctgctgcggcagccccgtgccatcctgacacatccacccgaatacccatcacacctgacgcgctcgtcgcggaccagagccaagatcattgcatagacactggcactccgtggccctctggctcagtgcccagtgcccagcgtgaggcgcaacccccagacagactcgtgacgtcggaaacacccactccccaggtcaccagacacttacttacctgccatcgcagacacctgcgattctcccgtcacagatgcccagggaggctcagccaggaagccttccccaccctcacgaccccctgacaagggtccacacattcccattaagccagcctcattcccttccctcggacccactaggctggacaccgagcatggcagcccccgccggctgttggtcacatcacgcgctcctgagtggcctcaagaatgacctctgtcagagccacctggcgattgactcaaagccccgtaccatgaagcccttcctacagcacgagcattccacgacgcactcagcgcggcaccgtcgaccaacgggcatccatacgcccagacgggaccaacaccgctgcacccccaacgacacgaaccgcccgcaccccacatggcccgccccaacaccgtctacccaatgatccacaaattacggggggcacccagacaacaccgatccccccgactatcgacccagagacgccctaccccacacaactgatgtgtacgcaacaccaacaagctgattgacaactgccaactcgaggcgataatggatacgatcgctacaccaatgacatacatgcctcaaccttaccaacgaacgtgagagcagccgtccacaatcacactagcaacttcc

SEQ ID NO: 528296 - DNA, 2768 bp, Homo sapiens
  misc_feature (12)..(13): n is a, c, g, or t
  misc_feature (18)..(18): n is a, c, g, or t
agcgggagtatnncgctngcgagatcttctctgtggcggagacagccaggttggcagctgacgggacagccggggtctattttgttgcgggttttcagcaaatccagggctggtctggaggcgcgaaaacttaaggcatacagaacgatggagtatatggcagaatccaccgaccgcagccctggacacatcttgtgctgtgagtgtggtgttccgataagtccaaatcctgccaatatttgtgtggcctgtttgcgaagtaaagtggacatcagccaaggtattccgaaacaagtctcgatttcgttctgcaaacaatgtcaaaggtattttcaaccaccaggaacttggatacagtgtgctttagaatccagggaacttcttgctttgtgcttgaaaaaaatcaaagcccctctgagtaaggtacggcttgtagatgcaggctttgtttggactgagcctcattctaagagacttaaagttaaactgactattcagaaagaggtgatgaatggtgctatccttcaacaagtgtttgtggtggattatgttgttcagtcccaaatgtgtggagattgccatagagtagaagctaaggatttctggaaggctgtgattcaagtgaggcaaaagactttgcataaaaaaactttctactatctggaacagttaattctgaaatatggaatgcatcagaatacacttcgtatcaaagagattcatgatggtctggatttttattattcctcaaaacaacatgctcagaagatggtcgaatttcttcagtgtacagttccctgtagatacaaagcatcacaaagactgatctctcaagatatccatagtaacacatacaattacaaaagcactttttctgtggaaattgttccaatatgcaaggataatgttgtctgtctgtctccaaaactggcacaaagcctgggaaatatgaaccagatttgtgtgtgtattcgagtaaccagtgccattcacctcattgatccaaacaccctacaagtggcagatattgatgggagcactttctggagtcaccctttcaatagtttatgtcatcccaaacagctagaggagtttattgtgatggaatgcagcatagtccaagatataaaacgtgctgcaggtgctggaatgatatcaaaaaagcataccctcggggaagtctgggtacagaagacatctgaaatgaatacagataaacagtatttttgtcgtactcatttgggacatcttctaaatcccggagacctggtgttagggtttgatttggccaactgtaacttaaatgatgagcatgtcaacaaaatgaactcagatagagttccagatgtggtattaatcaagaagagctatgaccggaccaaacgtcagcgtcgtagaaactggaaattgaaagagcttgcaagagagagagaaaacatggatacagatgatgaaaggcaataccaagattttcttgaagatcttgaagaagatgaggcaattcgaaaaaatgtcaacatttacagagattcagccatccctgtggaaagtgacaccgatgatgaaggagcacctcgaattagtctggctgagatgcttgaagaccttcatatttcccaagatgccactggtgaagaaggtgcatcaatgctgacataatgagatgttgtagactgtttccatacatgggcttaagaagttggacagagttaccttaagtgtctctactatctttgcctccagatttcaagaggagaaatttagttttaaacctgaataaacatgtttgttttcagtgctcactcaaaccactaaaacagatggatagctttgaggttttagataaggaaagattatggagaatgtagttgttattgatttttgggcaattttacatttggaattttatcactgtgcttttttatatgaggcactgtagtattttcacatagtatagtactctggatgttaaaagctcaaaaattgtggattccttgaacgtcactaaatcttcaagcaaaaacacatttttacattcattttacgtggatattttagtgaagagaccatatgaagaagcatttttaatattaacttgtgacatacttagatccactttacatcatttctctgtgttgaggtagggaaattagggttcagtttatcactggacattcaggaggctagtcaatcttgtttgtatttccttataaaattgatcttcaaaagccgtttaaacagagagttatcttaatttttattggcagtaggaggaaatatatttaaaatatttgtcagatttatagcaagaatagagactcgttatttaaaggttagataacaattgtgctttgtagttttgccagtttagggcagtagctgctttgtcataaatatcttcctaccacatgcaaaaatgctgcttttaaaattttgtgtataaattgagaaggaatgttgctctctataagttctgtcattgaacagatcaccattaaaaagaatattagaatccagtatgaagattatggtaataaaaatgaggtacatactttataaaacattatcagatttgaatgaggaatggttccacattctgaagaaaactgttggttaagtttgagaatctgggaagaagtttagatccattctatagcagaaagatgttagttgcgcaataaagaatatgcatcgttgctaataagggatagcaaaaagaaaaaaattggggcggcgaaagttaaaatggggggccggaaaagtattcg

SEQ ID NO: 528297 - DNA, 439 bp, Homo sapiens
ccccagtcggtagccctttttttgcggaatcaccatggcggctgggaccctgtacacgtaccctgaaaactggagggccttcacaggtctctcgatcgtctgctcatgtacagcgtgggctcatggtccgacgtgctctaccgcaccaccccgacttccatttctggccaaaccaaccgtcaccccctggatttctccgcaacatttcctggccggcaagcgtcccagacatttgagcggtgatgattggattctgtgctgtttgagagcaacgcctcttgcctactgatgttagcaactgaggagctgcgggagaagtactccaatagtgcagcagccctagctcgcgcagtgggtgagctttgctgattccgatattgtgcccccagccagtacctgggtgttccccatcttgggcatcatgcaccacaacaaactg

SEQ ID NO: 528298 - DNA, 417 bp, Homo sapiens
  misc_feature (15)..(15): n is a, c, g, or t
  misc_feature (110)..(110): n is a, c, g, or t
  misc_feature (113)..(113): n is a, c, g, or t
  misc_feature (181)..(181): n is a, c, g, or t
  misc_feature (188)..(188): n is a, c, g, or t
  misc_feature (192)..(192): n is a, c, g, or t
  misc_feature (232)..(232): n is a, c, g, or t
  misc_feature (264)..(264): n is a, c, g, or t
  misc_feature (269)..(269): n is a, c, g, or t
  misc_feature (278)..(278): n is a, c, g, or t
  misc_feature (332)..(332): n is a, c, g, or t
  misc_feature (334)..(334): n is a, c, g, or t
  misc_feature (354)..(355): n is a, c, g, or t
  misc_feature (395)..(395): n is a, c, g, or t
gtcacaatgtgagangagaaataaaaaaaaaaattaaaaaaaaaaaaaaggaaaaaaagaggaaaaaaacaactaaaaaataaaaaaaaaaaaaaaaaaaaaaaaaattnttnataaaaaaaaaaaaaaaagaaaaataaaaaatacaaaataaatagattacccacttttaacataaacnaaaacanacanacaacccaaaacaaaaaaagcaagaaacaccaccaaaaancacttcattacaaatcatttgacaacatgctnctacntttcctacnccgaagcaacaaaccccccagaaaagtaaaccttcccctccgttaccatcaccntnatcacctctatgaaagaagnnaaagacccccacataacattcccgttacaacccaaggggntatttcttttagctgctggagc

SEQ ID NO: 528299 - DNA, 2690 bp, Homo sapiens
  misc_feature (12)..(13): n is a, c, g, or t
  misc_feature (18)..(18): n is a, c, g, or t
agcgggagtatnncgctngcgagatcttctctgtggcggagacagccagaacttaaggcatacagaacgatggagtatatggcagaatccaccgaccgcagccctggacacatcttgtgctgtgagtgtggtgttccgataagtccaaatcctgccaatatttgtgtggcctgtttgcgaagtaaagtggacatcagccaaggtattccgaaacaagtctcgatttcgttctgcaaacaatgtcaaaggtattttcaaccaccaggaacttggatacagtgtgctttagaatccagggaacttcttgctttgtgcttgaaaaaaatcaaagcccctctgagtaaggtacggcttgtagatgcaggctttgtttggactgagcctcattctaagagacttaaagttaaactgactattcagaaagaggtgatgaatggtgctatccttcaacaagtgtttgtggtggattatgttgttcagtcccaaatgtgtggagattgccatagagtagaagctaaggatttctggaaggctgtgattcaagtgaggcaaaagactttgcataaaaaaactttctactatctggaacagttaattctgaaatatggaatgcatcagaatacacttcgtatcaaagagattcatgatggtctggatttttattattcctcaaaacaacatgctcagaagatggtcgaatttcttcagtgtacagttccctgtagatacaaagcatcacaaagactgatctctcaagatatccatagtaacacatacaattacaaaagcactttttctgtggaaattgttccaatatgcaaggataatgttgtctgtctgtctccaaaactggcacaaagcctgggaaatatgaaccagatttgtgtgtgtattcgagtaaccagtgccattcacctcattgatccaaacaccctacaagtggcagatattgatgggagcactttctggagtcaccctttcaatagtttatgtcatcccaaacagctagaggagtttattgtgatggaatgcagcatagtccaagatataaaacgtgctgcaggtgctggaatgatatcaaaaaagcataccctcggggaagtctgggtacagaagacatctgaaatgaatacagataaacagtatttttgtcgtactcatttgggacatcttctaaatcccggagacctggtgttagggtttgatttggccaactgtaacttaaatgatgagcatgtcaacaaaatgaactcagatagagttccagatgtggtattaatcaagaagagctatgaccggaccaaacgtcagcgtcgtagaaactggaaattgaaagagcttgcaagagagagagaaaacatggatacagatgatgaaaggcaataccaagattttcttgaagatcttgaagaagatgaggcaattcgaaaaaatgtcaacatttacagagattcagccatccctgtggaaagtgacaccgatgatgaaggagcacctcgaattagtctggctgagatgcttgaagaccttcatatttcccaagatgccactggtgaagaaggtgcatcaatgctgacataatgagatgttgtagactgtttccatacatgggcttaagaagttggacagagttaccttaagtgtctctactatctttgcctccagatttcaagaggagaaatttagttttaaacctgaataaacatgtttgttttcagtgctcactcaaaccactaaaacagatggatagctttgaggttttagataaggaaagattatggagaatgtagttgttattgatttttgggcaattttacatttggaattttatcactgtgcttttttatatgaggcactgtagtattttcacatagtatagtactctggatgttaaaagctcaaaaattgtggattccttgaacgtcactaaatcttcaagcaaaaacacatttttacattcattttacgtggatattttagtgaagagaccatatgaagaagcatttttaatattaacttgtgacatacttagatccactttacatcatttctctgtgttgaggtagggaaattagggttcagtttatcactggacattcaggaggctagtcaatcttgtttgtatttccttataaaattgatcttcaaaagccgtttaaacagagagttatcttaatttttattggcagtaggaggaaatatatttaaaatatttgtcagatttatagcaagaatagagactcgttatttaaaggttagataacaattgtgctttgtagttttgccagtttagggcagtagctgctttgtcataaatatcttcctaccacatgcaaaaatgctgcttttaaaattttgtgtataaattgagaaggaatgttgctctctataagttctgtcattgaacagatcaccattaaaaagaatattagaatccagtatgaagattatggtaataaaaatgaggtacatactttataaaacattatcagatttgaatgaggaatggttccacattctgaagaaaactgttggttaagtttgagaatctgggaagaagtttagatccattctatagcagaaagatgttagttgcgcaataaagaatatgcatcgttgctaataagggatagcaaaaagaaaaaaattggggcggcgaaagttaaaatggggggccggaaaagtattcg

SEQ ID NO: 528300 - DNA, 2809 bp, Homo sapiens
ggccctcgggcgccgggacgccgtccggagactcctgtggcgtgggtctgaggcgcggtggtccggtgcggtccctgggctggtggagagcgggagggcccgggcgtccacaatcccgagctgacctcgcccttggtcgtccagggttggagcccaggtgagatggagaacttaaggcatacagaacgatggagtatatggcagaatccaccgaccgcagccctggacacatcttgtgctgtgagtgtggtgttccgataagtccaaatcctgccaatatttgtgtggcctgtttgcgaagtaaagtggacatcagccaaggtattccgaaacaagtctcgatttcgttctgcaaacaatgtcaaaggtattttcaaccaccaggaacttggatacagtgtgctttagaatccagggaacttcttgctttgtgcttgaaaaaaatcaaagcccctctgagtaaggtacggcttgtagatgcaggctttgtttggactgagcctcattctaagagacttaaagttaaactgactattcagaaagaggtgatgaatggtgctatccttcaacaagtgtttgtggtggattatgttgttcagtcccaaatgtgtggagattgccatagagtagaagctaaggatttctggaaggctgtgattcaagtgaggcaaaagactttgcataaaaaaactttctactatctggaacagttaattctgaaatatggaatgcatcagaatacacttcgtatcaaagagattcatgatggtctggatttttattattcctcaaaacaacatgctcagaagatggtcgaatttcttcagtgtacagttccctgtagatacaaagcatcacaaagactgatctctcaagatatccatagtaacacatacaattacaaaagcactttttctgtggaaattgttccaatatgcaaggataatgttgtctgtctgtctccaaaactggcacaaagcctgggaaatatgaaccagatttgtgtgtgtattcgagtaaccagtgccattcacctcattgatccaaacaccctacaagtggcagatattgatgggagcactttctggagtcaccctttcaatagtttatgtcatcccaaacagctagaggagtttattgtgatggaatgcagcatagtccaagatataaaacgtgctgcaggtgctggaatgatatcaaaaaagcataccctcggggaagtctgggtacagaagacatctgaaatgaatacagataaacagtatttttgtcgtactcatttgggacatcttctaaatcccggagacctggtgttagggtttgatttggccaactgtaacttaaatgatgagcatgtcaacaaaatgaactcagatagagttccagatgtggtattaatcaagaagagctatgaccggaccaaacgtcagcgtcgtagaaactggaaattgaaagagcttgcaagagagagagaaaacatggatacagatgatgaaaggcaataccaagattttcttgaagatcttgaagaagatgaggcaattcgaaaaaatgtcaacatttacagagattcagccatccctgtggaaagtgacaccgatgatgaaggagcacctcgaattagtctggctgagatgcttgaagaccttcatatttcccaagatgccactggtgaagaaggtgcatcaatgctgacataatgagatgttgtagactgtttccatacatgggcttaagaagttggacagagttaccttaagtgtctctactatctttgcctccagatttcaagaggagaaatttagttttaaacctgaataaacatgtttgttttcagtgctcactcaaaccactaaaacagatggatagctttgaggttttagataaggaaagattatggagaatgtagttgttattgatttttgggcaattttacatttggaattttatcactgtgcttttttatatgaggcactgtagtattttcacatagtatagtactctggatgttaaaagctcaaaaattgtggattccttgaacgtcactaaatcttcaagcaaaaacacatttttacattcattttacgtggatattttagtgaagagaccatatgaagaagcatttttaatattaacttgtgacatacttagatccactttacatcatttctctgtgttgaggtagggaaattagggttcagtttatcactggacattcaggaggctagtcaatcttgtttgtatttccttataaaattgatcttcaaaagccgtttaaacagagagttatcttaatttttattggcagtaggaggaaatatatttaaaatatttgtcagatttatagcaagaatagagactcgttatttaaaggttagataacaattgtgctttgtagttttgccagtttagggcagtagctgctttgtcataaatatcttcctaccacatgcaaaaatgctgcttttaaaattttgtgtataaattgagaaggaatgttgctctctataagttctgtcattgaacagatcaccattaaaaagaatattagaatccagtatgaagattatggtaataaaaatgaggtacatactttataaaacattatcagatttgaatgaggaatggttccacattctgaagaaaactgttggttaagtttgagaatctgggaagaagtttagatccattctatagcagaaagatgttagttgcgcaataaagaatatgcatcgttgctaataagggatagcaaaaagaaaaaaattggggcggcgaaagttaaaatggggggccggaaaagtattcg

SEQ ID NO: 528301 - DNA, 427 bp, Homo sapiens
aatcgggcaggccgacaaacgtccgcgcacgtccactgtgtagcctttgagccccaggtagtcggccaggttggcgaggatatcgcggttgtcttcaacgcaatagaattcgcatgggcagtgtctccggtacgcggtaacggccgtgtggctcgcgcagcttaaggccaagcggggctcagggatagaggtgagaggcccgccgataaaggttttcaactgtttgtaaagccaaacaagtttttcactatagcttcacaatctaactacagtgtcaggacgaagatcgccccccattgatataaggaacgtagacatgggttgtttcaaaacagcgccaatgcgctattgctgttgatcaccggtgcctggttagtggttttcctgctcacccgcagtgtgctgctcattacccacctcagtgagg

SEQ ID NO: 528302 - DNA, 3032 bp, Homo sapiens
  misc_feature (12)..(13): n is a, c, g, or t
  misc_feature (18)..(18): n is a, c, g, or t
  misc_feature (784)..(784): n is a, c, g, or t
agcgggagtatnncgctngcgagatcttctctgtggcggagacagccaggttggcagctgacgggacagccggggtctattttgttgcgggttttcagcaaatccagggctggtctggaggcgcgaaaacttaaggcatacagaacgatggagtatatggcagaatccaccgaccgcagccctggacacatcttgtgctgtgagtgtggtgttccgataagtccaaatcctgccaatatttgtgtggcctgtttgcgaagtaaagtggacatcagccaaggtattccgaaacaagtctcgatttcgttctgcaaacaatgtcaaaggtattttcaaccaccaggaacttggatacagtgtgctttagaatccagggaacttcttgctttgtgcttgaaaaaaatcaaagcccctctgagtaaggtacggcttgtagatgcaggctttgtttggactgagcctcattctaagagacttaaagttaaactgactattcagaaagaggtgatgaatggtgctatccttcaacaagtgtttgtggtggattatgttgttcagtcccaaatgtgtggagattgccatagagtagaagctaaggatttctggaaggctgtgattcaagtgaggcaaaaggtaatgagagaagatgatgagtgagtcctacatcttatatttcgtctttgttaattataacttttccttctttctaaatccagggatagtctgggtccctgaagcattcacctttggaaatagatcattatacattttagataatctttanagattgttattgtttgaaaatcagtatgctctatctgtagatagtatgtgtgtcctatacctataagtggcttttttgtggggcatttattgatcaaataatttatattttagactttgcataaaaaaactttctactatctggaacagttaattctgaaatatggaatgcatcagaatacacttcgtatcaaagagattcatgatggtctggatttttattattcctcaaaacaacatgctcagaagatggtcgaatttcttcagtgtacagttccctgtagatacaaagcatcacaaagactgatctctcaagatatccatagtaacacatacaattacaaaagcactttttctgtggaaattgttccaatatgcaaggataatgttgtctgtctgtctccaaaactggcacaaagcctgggaaatatgaaccagatttgtgtgtgtattcgagtaaccagtgccattcacctcattgatccaaacaccctacaagtggcagatattgatgggagcactttctggagtcaccctttcaatagtttatgtcatcccaaacagctagaggagtttattgtgatggaatgcagcatagtccaagatataaaacgtgctgcaggtgctggaatgatatcaaaaaagcataccctcggggaagtctgggtacagaagacatctgaaatgaatacagataaacagtatttttgtcgtactcatttgggacatcttctaaatcccggagacctggtgttagggtttgatttggccaactgtaacttaaatgatgagcatgtcaacaaaatgaactcagatagagttccagatgtggtattaatcaagaagagctatgaccggaccaaacgtcagcgtcgtagaaactggaaattgaaagagcttgcaagagagagagaaaacatggatacagatgatgaaaggcaataccaagattttcttgaagatcttgaagaagatgaggcaattcgaaaaaatgtcaacatttacagagattcagccatccctgtggaaagtgacaccgatgatgaaggagcacctcgaattagtctggctgagatgcttgaagaccttcatatttcccaagatgccactggtgaagaaggtgcatcaatgctgacataatgagatgttgtagactgtttccatacatgggcttaagaagttggacagagttaccttaagtgtctctactatctttgcctccagatttcaagaggagaaatttagttttaaacctgaataaacatgtttgttttcagtgctcactcaaaccactaaaacagatggatagctttgaggttttagataaggaaagattatggagaatgtagttgttattgatttttgggcaattttacatttggaattttatcactgtgcttttttatatgaggcactgtagtattttcacatagtatagtactctggatgttaaaagctcaaaaattgtggattccttgaacgtcactaaatcttcaagcaaaaacacatttttacattcattttacgtggatattttagtgaagagaccatatgaagaagcatttttaatattaacttgtgacatacttagatccactttacatcatttctctgtgttgaggtagggaaattagggttcagtttatcactggacattcaggaggctagtcaatcttgtttgtatttccttataaaattgatcttcaaaagccgtttaaacagagagttatcttaatttttattggcagtaggaggaaatatatttaaaatatttgtcagatttatagcaagaatagagactcgttatttaaaggttagataacaattgtgctttgtagttttgccagtttagggcagtagctgctttgtcataaatatcttcctaccacatgcaaaaatgctgcttttaaaattttgtgtataaattgagaaggaatgttgctctctataagttctgtcattgaacagatcaccattaaaaagaatattagaatccagtatgaagattatggtaataaaaatgaggtacatactttataaaacattatcagatttgaatgaggaatggttccacattctgaagaaaactgttggttaagtttgagaatctgggaagaagtttagatccattctatagcagaaagatgttagttgcgcaataaagaatatgcatcgttgctaataagggatagcaaaaagaaaaaaattggggcggcgaaagttaaaatggggggccggaaaagtattcg

SEQ ID NO: 528303 - DNA, 490 bp, Homo sapiens
  misc_feature (50)..(50): n is a, c, g, or t
  misc_feature (118)..(118): n is a, c, g, or t
  misc_feature (291)..(291): n is a, c, g, or t
  misc_feature (297)..(297): n is a, c, g, or t
  misc_feature (312)..(312): n is a, c, g, or t
  misc_feature (368)..(368): n is a, c, g, or t
  misc_feature (378)..(378): n is a, c, g, or t
  misc_feature (397)..(397): n is a, c, g, or t
ctgctgggggcattttaaaactgttttcctcctggaaatcaaaagcccanccttccctcctctgtccctctgggaatttggttttcctgagggcacttaattaggtgaatagccatgncctgaactgccctcactgacccacttcccagatgagggttactctccctcacagcacggccttgaaggccaggctcatgccccgggatgcctgccctgtgttcccaactgtggatcctgcattctggggaacagcccaattgatctgatggtgccagggttactttttatttnttaaanttgaaaattgggggnaatatatccttagtggtgattaaaacttcagaactgtttttgaatactaatttggnttttggaaanagcccaactccattcgggnaaatctggggaagagggaatcaaatctgggcaagctgggtgacagtattttagtttaaaaaacaaaacaacaaccttcctctctcccccacct

SEQ ID NO: 528304 - DNA, 127 bp, Homo sapiens
cctgggtcttctaccagagaaacatttagcattcactgcctcgaccagtccctcggaatcttgaaggcgctgaccaagttttttcttggcctacctaccagctcttctagtgtcgctaggataggcg

SEQ ID NO: 528305 - DNA, 1829 bp, Homo sapiens
  misc_feature (12)..(13): n is a, c, g, or t
  misc_feature (18)..(18): n is a, c, g, or t
agcgggagtatnncgctngcgagatcttctctgtggcggagacagccaggttggcagctgacgggacagccggggtctattttgttgcgggttttcagcaaatccagggctggtctggaggcgcgaaaacttaaggcatacagaacgatggagtatatggcagaatccaccgaccgcagccctggacacatcttgtgctgtgagtgtggtgttccgataagtccaaatcctgccaatatttgtgtggcctgtttgcgaagtaaagtggacatcagccaaggtattccgaaacaagtctcgatttcgttctgcaaacaatgtcaaaggtattttcaaccaccaggaacttggatacagtgtgctttagaatccagggaacttcttgctttgtgcttgaaaaaaatcaaagcccctctgagtaaggtacggcttgtagatgcaggctttgtttggactgagcctcattctaagagacttaaagttaaactgactattcagaaagaggtgatgaatggtgctatccttcaacaagtgtttgtggtggattatgttgttcagtcccaaatgtgtggagattgccatagagtagaagctaaggatttctggaaggctgtgattcaagtgaggcaaaagactttgcataaaaaaactttctactatctggaacagttaattctgaaatatggaatgcatcagaatacacttcgtatcaaagagattcatgatggtctggatttttattattcctcaaaacaacatgctcagaagatggtcgaatttcttcagtgtacagttccctgtagatacaaagcatcacaaagactgatctctcaagatatccatagtaacacatacaattacaaaagcactttttctgtggaaattgttccaatatgcaaggataatgttgtctgtctgtctccaaaactggcacaaagcctgggaaatatgaaccagatttgtgtgtgtattcgagtaaccagtgccattcacctcattgatccaaacaccctacaagtggcagatattgatgggagcactttctggagtcaccctttcaatagtttatgtcatcccaaacagctagaggagtttattgtgatggaatgcagcatagtccaagatataaaacgtgctgcaggtgctggaatgatatcaaaaaagcataccctcggggaagtctgggtacagaagacatctgaaatgaatacagataaacagtatttttgtcgtactcatttgggacatcttctaaatcccggagacctggtgttagggtttgatttggccaactgtaacttaaatgatgagcatgtcaacaaaatgaactcagatagagttccagatgtggtattaatcaagaagagctatgaccggaccaaacgtcagcgtcgtagaaactggaaattgaaagagcttgcaagagagagagaaaacatggatacagatgatgaaaggcaataccaagattttcttgaagatcttgaagaagatgaggcaattcgaaaaaatgtcaacatttacagagattcagccatccctgtggaaagtgacaccgatgatgaaggagcacctcgaattagtctggctgagatgcttgaagaccttcatatttcccaagatgccactggtgaagaaggtgcatcaatgctgacataatgagatgttgtagactgtttccatacatgggcttaagaagttggacagagttaccttaagtgtctctactatctttgcctccagattctaaaagggccatagcctatccttatagaattcagaatgcccatggatgtaagagaatttgggagtgctttgttttaattttg

SEQ ID NO: 528306 - DNA, 1158 bp, Homo sapiens
ggggggctgcggagagggtgcttaactgaggggtcactgatgggggaggcggtcagtgagccgcgtgggccttgtccgttgcgctgaggacagtcttcaccgcgcttctcgtctgctagatgcaatgtgtagcgggtctggccggcggtggctcgggtcgggcgtcggggagcctgcttggtccgccagccttacaggcaagggtgctcgggttccgctacctagagaactccggacagataaattccggcgcagtggccgaaggcagctgcgaggttcaactacattcccgctggcatgcggagcattgtctccatcgacactgtttgaacaagtcaccccccaagcggggtctggtggtggggatcgacgttcatcgaaggattcaggggcacgaagggccagccccttcctggaacatttactggcgactacgagcccggctctgagtacaaccttgaactctgttggcccagagctgcctgaacctggagctccagttcactccgttccagctgtgccatgcggaggtccaggtcggggcatcaacttgagactgtgtttctcttgagtgggaacgacccggccattcatctctacaaggagaacgaggggctgcatcagtgttgaggaacagccgtggaaaactcttcccagagctgacgaacctgagcagtagcgtctctggctggacgtccacaatttccccgggcacgtcccggcgccctctcagctctgggctgtcagagtgggtatgtccagtgtcgccacgtggaccagcggagtcgagaggtctgcgattgtggcccgtcctgcggacggtcccatctcccgagtgatgtgtgtcagcctctggacggccaagggacccaagggcagggccctaacaggatgagtacaagggctgcccgtgggcagcaattttggagccccaggggtgtattggcgaccggctgaaccggggggtgtaacaacacacgctccggcgggagagagacatgtcaccgccctagcctggaacccacgtattgatgggagcaaaaccaggggcaccagcgcagaaggtgacatacgcgcagcaaatgtcttagccagaagagtggagaggcacaccttcgctacgacagagaggagtgcgcaggcggcatcatcagcagg

SEQ ID NO: 528307 - DNA, 1433 bp, Homo sapiens
  misc_feature (24)..(24): n is a, c, g, or t
  misc_feature (36)..(36): n is a, c, g, or t
tagccgtctctagagtatcccccnggaaacacgctntaacggaccaaacgtcagcgtcgtagaaactggaaattgaaagagcttgcaagagagagagaaaacatggatacagatgatgaaaggcaataccaagattttcttgaagatcttgaagaagatgaggcaattcgaaaaaatgtcaacatttacagagattcagccatccctgtggaaagtgacaccgatgatgaaggagcacctcgaattagtctggctgagatgcttgaagaccttcatatttcccaagatgccactggtgaagaaggtgcatcaatgctgacataatgagatgttgtagactgtttccatacatgggcttaagaagttggacagagttaccttaagtgtctctactatctttgcctccagatttcaagaggagaaatttagttttaaacctgaataaacatgtttgttttcagtgctcactcaaaccactaaaacagatggatagctttgaggttttagataaggaaagattatggagaatgtagttgttattgatttttgggcaattttacatttggaattttatcactgtgcttttttatatgaggcactgtagtattttcacatagtatagtactctggatgttaaaagctcaaaaattgtggattccttgaacgtcactaaatcttcaagcaaaaacacatttttacattcattttacgtggatattttagtgaagagaccatatgaagaagcatttttaatattaacttgtgacatacttagatccactttacatcatttctctgtgttgaggtagggaaattagggttcagtttatcactggacattcaggaggctagtcaatcttgtttgtatttccttataaaattgatcttcaaaagccgtttaaacagagagttatcttaatttttattggcagtaggaggaaatatatttaaaatatttgtcagatttatagcaagaatagagactcgttatttaaaggttagataacaattgtgctttgtagttttgccagtttagggcagtagctgctttgtcataaatatcttcctaccacatgcaaaaatgctgcttttaaaattttgtgtataaattgagaaggaatgttgctctctataagttctgtcattgaacagatcaccattaaaaagaatattagaatccagtatgaagattatggtaataaaaatgaggtacatactttataaaacattatcagatttgaatgaggaatggttccacattctgaagaaaactgttggttaagtttgagaatctgggaagaagtttagatccattctatagcagaaagatgttagttgcgcaataaagaatatgcatcgttgctaataagggatagcaaaaagaaaaaaattggggcggcgaaagttaaaatggggggccggaaaagtattcg

SEQ ID NO: 528308 - DNA, 404 bp, Homo sapiens
ccctacaacttccttacaacctttctgtcattggttgctatgtacaagatatgctatacaccagtacaacagcatgcaattaatcaattaagaaaacatagtacatgttatgtgtaattaaattaaatctaacaaagtgcttttccactcgctggatttgattccttatttggaggaaggagtaatcctggagcaaccacttgcccgtctcagactctacactataacatttctggttgctcggttggatttgccagtgggccagtgaggtcagcgggaatgagggaacagcgggtgacactgcctcagatgataccattaggggggccacagatgggccctaagtcaacaccgttcttcatgtagtacttctccagcttggccagaatgtgcttgccataggt

SEQ ID NO: 528309 - DNA, 1108 bp, Homo sapiens
  misc_feature (12)..(13): n is a, c, g, or t
  misc_feature (18)..(18): n is a, c, g, or t
  misc_feature (784)..(784): n is a, c, g, or t
agcgggagtatnncgctngcgagatcttctctgtggcggagacagccaggttggcagctgacgggacagccggggtctattttgttgcgggttttcagcaaatccagggctggtctggaggcgcgaaaacttaaggcatacagaacgatggagtatatggcagaatccaccgaccgcagccctggacacatcttgtgctgtgagtgtggtgttccgataagtccaaatcctgccaatatttgtgtggcctgtttgcgaagtaaagtggacatcagccaaggtattccgaaacaagtctcgatttcgttctgcaaacaatgtcaaaggtattttcaaccaccaggaacttggatacagtgtgctttagaatccagggaacttcttgctttgtgcttgaaaaaaatcaaagcccctctgagtaaggtacggcttgtagatgcaggctttgtttggactgagcctcattctaagagacttaaagttaaactgactattcagaaagaggtgatgaatggtgctatccttcaacaagtgtttgtggtggattatgttgttcagtcccaaatgtgtggagattgccatagagtagaagctaaggatttctggaaggctgtgattcaagtgaggcaaaaggtaatgagagaagatgatgagtgagtcctacatcttatatttcgtctttgttaattataacttttccttctttctaaatccagggatagtctgggtccctgaagcattcacctttggaaatagatcattatacattttagataatctttanagattgttattgtttgaaaatcagtatgctctatctgtagatagtatgtgtgtcctatacctataagtggcttttttgtggggcatttattgatcaaataatttatattttagactttgcataaaaaaactttctactatctggaacagttaattctgaaatatggaatgcatcagaatacacttcgtatcaaagagattcatggtgagttaaaactcaaaagcatttgaaattatgtcagatttttatttcaacatacctaagtaatcttatatttactgataatatctggattagtactgtccaaaagaactttctgttagg

SEQ ID NO: 528310 - DNA, 654 bp, Homo sapiens
  misc_feature (12)..(13): n is a, c, g, or t
  misc_feature (18)..(18): n is a, c, g, or t
agcgggagtatnncgctngcgagatcttctctgtggcggagacagccaggttggcagctgacgggacagccggggtctattttgttgcgggttttcagcaaatccagggctggtctggaggcgcgaaaacttaaggcatacagaacgatggagtatatggcagaatccaccgaccgcagccctggacacatcttgtgctgtgagtgtggtgttccgataagtccaaatcctgccaatatttgtgtggcctgtttgcgaagtaaagtggacatcagccaaggtattccgaaacaagtctcgatttcgttctgcaaacaatgtcaaaggtattttcaaccaccaggaacttggatacagtgtgctttagaatccagggaacttcttgctttgtgcttgaaaaaaatcaaagcccctctgagtaaggtacggcttgtagatgcaggctttgtttggactgagcctcattctaagagacttaaagttaaactgactattcagaaagaggtgatgaatggtgctatccttcaacaagtgtttgtggtggattatgttgttcagtcttaacgtgtggggtttcccctgtgtacatctccctggttttatggtccccgtctaaactttgtttgcctatacatttctctctgcctttcctgt

SEQ ID NO: 528311 - DNA, 113 bp, Homo sapiens
gctcacttctagcatggtcttcaggcccctggcactggttcgtaattgtccagggtcccccctgaacaactctcctttccggccgcatgcgattggttctgcctggtaggccc

SEQ ID NO: 528312 - DNA, 147 bp, Homo sapiens
agggttctcagagttacccgtcttgagccgaacctaaaataaaagtaagcaggaaactttttgggcttgcgggccagcttccagaggtggaagttacacgaagaggtggtatcaaggggtaccgttgctcgagattcgctaactcat

SEQ ID NO: 528313 - DNA, 382 bp, Homo sapiens
  misc_feature (324)..(324): n is a, c, g, or t
  misc_feature (352)..(352): n is a, c, g, or t
gaaagatttgatcccagaagtttgagaccaacctgggcaacataggggagaccccatctttaaaaaaactaaaaaaattagctgagtgtagtggtgcttgcctgtagtcctagctacctgggaggctgacatgggtagatcccttaagtccagggaggtcaaggctgcagtgagtcatgatggggccactgcacttccagcttgggtgacagagcgagatattctgtcttcaaaaacaagcaaaactatggaaaaaaaagttcaacattttctttgaaatactttcttcattattttgggtaggagggaggggagatatatttnggggattaaagggacattaggggaaggntagggttttttatttattaattatttaatt

SEQ ID NO: 528314 - DNA, 118 bp, Homo sapiens
ctaacagctataaccatgcacttggccgtcgttgttacactaacagctatagaccatgcactgggccgtcgttgtacagcataacagctataaccatgcatgggccgtcgttgaacac

SEQ ID NO: 528315 - DNA, 910 bp, Homo sapiens
tcaaaaaatttatctcattagagactgctgagcaatacccctgatgtcctcgtgcttaatcccaactcaaattcctcccaataacctctttctactaaaattctaactcccgtgcataaaagaccccgtgcccctacggcctttagaccccggtaattaaggccaacagggtaggccaattacaagaactactttttgccaaaaatctggtccggtcccaagacccccacttcattcttcctctcacagacaacccgtctgtttccctaggggcacactccatccagcacccgtataaaagggaccccaccttattccagacattcaaacttggcccctgtattccccctcgtctcctagaagcccgattttgccgagtgcccccctattaaataaaaagtgttaaagtcatatcatacggctcacgatataccctccccgacctttcccaattacccactttaacctccccatcaaatgtggagtaccacctctgctacaagcatctattggtaatcctgccctcacacacaccgcgattattgcgctcccaataaccagttaagttatactcaacccttttcgcaatagtagtccaagtatccaatttcctccccaggccatttctcttccaatcgccactattatacacactccattcctttgatgactcccctgtttcttccaaaataccctcttccaacatattcctaagtatgtcttccattcaacaaattaatctagtgctattacctcgacatcacactcctatttttctctatctagtatgtcgaagaatgtgaatatgccctgaaccctggagagtgcaaaaagttgctaatgtatgctcatgaaccggagtcccgcccctcgcctcccccccgctgtgtaaaagcgccaaacatggccc

SEQ ID NO: 528316 - DNA, 816 bp, Homo sapiens
  misc_feature (690)..(690): n is a, c, g, or t
gaactccggaaacggcggcggcgagctacaggaccgaggtgccttagttggtgcggcaagtcggggatcccagaatgataatcgtgacccggaatgctggagacgtggtgtcctgtcccagctccgtggctgctagtgagcttctaccatcatggacctattgttcgtgcgcccgagtagagtacgccataggcacgctacttgcggcagaatccagcacgggaccttgaactcgtgtccatgctgggagcttggtacccgggcagcgagagaaaactagtagcacccacggagcaagaatacatcattgtccgcacattgaagcatcatgtgccagagctattgccagagttgatgcttgtttcgccacttcatggtcgaacacgccttgagttgcgcctacccttcgggacgcgtcactgttgctgcaccagttctgtactgtggaatagtctgcggccagagcatccccaagtgcctagtttgattccgctctaaacgaatgccaagtaccaatcttccgaaaagttcctataataaacttcggaatggaggcaggcaaaaggcctaattgaagagtgggttgtacaccgaaagggtccatcgtggtcaaccttatgacacaagagcacgtctagaagttgtccccgtgattccagaaggatcactgatggcgagtttgagtgcgcncatgcgcagagactcatcggatgttgacctggacggaggatgattgacatgatggccattagatgagtgccatggtgttgcttgaggaagatgaacgaggaggagtgatgctgggggttgtgccag

SEQ ID NO: 528317 - DNA, 80 bp, Homo sapiens
aaaacttcagtggtacagtgacccaataaacccatcttagcatgaaagtccattaaaggagggcagtcatctctaaaaaa

SEQ ID NO: 528318 - DNA, 183 bp, Homo sapiens
agaaaattgagacggagctaagagatatctgcaatgatgtactgtctcttttggaaagttcttgatcccactgctcacagcagagagcaaagtctctatttgaaatgaaggagattactaccgttacttggctgaggttgccgctggtatgacaagaaagggatttcgatcagtacaacaagg

SEQ ID NO: 528319 - DNA, 143 bp, Homo sapiens
cccgcagcaatggactcgtgatctgctggactggattctggatgacacgcacagtcaccaccatctgtgacctgaacctgcccctggctgacttatatctcacggccacattaccacttctaattgactgcatggccatgtga

SEQ ID NO: 528320 - DNA, 109 bp, Homo sapiens
cagggatgatgagaatgacagtgtgactctgaagtgccatcgaagcctactcccctgtaggacaatattcactacagttgtgtttcacaatgtagagcctcgatctcaa

SEQ ID NO: 528321 - DNA, 840 bp, Homo sapiens
gaatgctgctgagtccgtatgattccttagcgaatgattgtcgcgggagccgtggactaacaagaagagtccaatatgtagtgatgtgcgaagaagccgtggaacatagagcctatatgccgagaggttttccttgtgtctgagatcctatcgatcgggtgtgcatcactatcgtctgggttctgacatgcctgggcctcctctgtgtgctggtgcatcctggtggagcaccactgtctttgcatcttgttacaggccgtccaataagcccctgatggtcattcattctgctttgcatggataacaactgcttgggttgtctatggtctatgctctagatcctgtattcccgtggtgcatccaaagccatatgatcttagtgctcatcgaatatagtaatcatggagtaagtccgtgcaagaccgttttttagacgtctgagtcgtcgacccctcacgcgtgtctaatagtatgctatattcctccgcatcctgtgcttatcgtattacgcaccagggaaatgtctcgattgacgtcctggatgtgcttgccatcctgtagggatgattgtcatatcttcactatgtatattgcatgattcgattcgtcttgacgctggggcgaggaatgggtttgttggtaagagtgcaagttcgcggtcgtctctatttagcccgacatttacttggcgttgatcgcgaattagcgtttgggttgtacaaggcatgctgaacccagtgtcgttgttgtacttcctaggttctcaggccgaatgttttatccgtttgttcttacccacgcttgtcccttcgttcgagtcttggattctggttgggaacc

SEQ ID NO: 528322 - DNA, 220 bp, Homo sapiens
caaaagggtagtgagagagcatgtagcacgagtaataccagctctgagaatggatctacaggcacagttgctggggcatccgagaggcaggaggcacagcagcatcagcactgccatggcattctgaaagcactgatgcaggcacacatggatattctcttagcctgtggcttggggagcaggtagaaggctcaggaggtagagaggctgtggccaggag

SEQ ID NO: 528323 - DNA, 457 bp, Homo sapiens
attcagaaagcactgtacactcatgggtccaatgccgaggtgatgtgtgtcttcagcctggaccctgccacagggggcattgtaacatatcacttggctcatcagatgtttgatgttatcccctcccctctcctaccctgtgtttgcctataagagacattgtcacaaagtttctgggcccagcacctaggtgatatcttcctgggacctgccatatggggatcgtgatatatcgcatggcccagtacttacttgatgtgactctcctctcatgcctgggccctgcttacaggtgtgattgtgacacatagcttggcctagcccctaggctatgttactctcctcttatccttcagttatttacacaaggggcattgtgacatattgctggactgggaacccaggtgatgtgactctcctctactggctgaaatacaacacaaagaacgttgaccta

SEQ ID NO: 528324 - DNA, 326 bp, Homo sapiens
attcctgattttaatttaaataggggctttaattttacagctttcaaaagtagttactgtaaattttactcctgttaatgctggattggtttaaaggatttataagggctgtgtttgctttttacaaggcaaaatgccaaacagtgttcaataataaaaggttttgaaacaaccgacattttaaatattttttaaacatgaggactgggtttttttccctgcccctatgatttccctgtgagtagggtgaactggactgcaaattagtttatttgttgccaaaatcacatttttgaaaaataaatttaaaagtttttttttaagta

SEQ ID NO: 528325 - DNA, 661 bp, Homo sapiens
gccattatggccggaagcgtggaataaattggttccttaaggggggtgaccaatccggtttttccaatgctctgggtgaataaagcctgagggaatactacggttttgcggaatggcttacaactgggcattacaaagttaatatggaaattatggcctggggtaaaatggagtttcaaattaaaattaggaccagtaaaatccaaggaactatgtaaccaaaaaagctttggtttggcttacaaggtatatttaaggataattctgctgaaaattcaatttaaaagttttccttggaagaactaagtaggaaccacattgccaacagttggccagtatttagggttgggcacttcatgtcattaatcaatttctcaatagttcttaaaattagggagattaaaaatttaaaaattttgcatttaatgctatcagaaccagaatttctttcccaaatcaaattaaaggaattatgatcagagcttgaccacaggcttatttttaaaataaaaatatttttaccatgggtttccttcttgaaaaatcagggaattaagcttaaaccaccatcattaggattaatggaccattaaagttggctttcagatgcagttttcaaattaaaacccatttcaatttataccgttctcagtccttggta

SEQ ID NO: 528326 - DNA, 276 bp, Homo sapiens
gagatcccagaagtttgagccgacgtgacccccgaagactccagctctgcagagaggggcctgggcatgtccccgtcaggacgtggccctgcaggctccggcaagcatcatcgccaggccccaggctccgtgtgggacgccagtacgcagcaggagcagccaaccagcagcagccatcatggaggcgctggggctgtggagatccggagtcgccacagctcctaccccgcgggactggaggacgacgaagggatgggggaggagccagcccctttc

SEQ ID NO: 528327 - DNA, 5061 bp, Homo sapiens
acgcagagcgctgctgggctgccgggtctcccgcttcctcctcctgctccaagggcctcctgcatgagggcgcggtagagacccggacccgcgccgtgctcctgccgtttcgctgcgctccgcccgggcccggctcagccaggccccgcggtgagccatgattcgcctcggggctccccagtcgctggtgctgctgacgctgctcgtcgccgctgtccttcggtgtcagggccaggatgtccaggaggctggcagctgtgtgcaggatgggcagaggtataatgataaggatgtgtggaagccggagccctgccggatctgtgtctgtgacactgggactgtcctctgcgacgacataatctgtgaagacgtgaaagactgcctcagccctgagatccccttcggagagtgctgccccatctgcccaactgacctcgccactgccagtgggcaaccaggaccaaagggacagaaaggagaacctggagacatcaaggatattgtaggacccaaaggacctcctgggcctcagggacctgcaggggaacaaggacccagaggggatcgtggtgacaaaggtgaaaaaggtgcccctggacctcgtggcagagatggagaacctgggacccctggaaatcctggcccccctggtcctcccggcccccctggtccccctggtcttggtggaaactttgctgcccagatggctggaggatttgatgaaaaggctggtggcgcccagttgggagtaatgcaaggaccaatgggccccatgggacctcgaggacctccaggccctgcaggtgctcctgggcctcaaggatttcaaggcaatcctggtgaacctggtgaacctggtgtctctggtcccatgggtccccgtggtcctcctggtccccctggaaagcctggtgatgatggtgaagctggaaaacctggaaaagctggtgaaaggggtccgcctggtcctcagggtgctcgtggtttcccaggaaccccaggccttcctggtgtcaaaggtcacagaggttatccaggcctggacggtgctaagggagaggcgggtgctcctggtgtgaagggtgagagtggttccccgggtgagaacggatctccgggcccaatgggtcctcgtggcctgcctggtgaaagaggacggactggccctgctggcgctgcgggtgcccgaggcaacgatggtcagccaggccccgcaggtcctccgggtcctgtcggtcctgctggtggtcctggcttccctggtgctcctggagccaagggtgaagccggccccactggtgcccgtggtcctgaaggtgctcaaggtcctcgcggtgaacctggtactcctgggtcccctgggcctgctggtgcctccggtaaccctggaacagatggaattcctggagccaaaggatctgctggtgctcctggcattgctggtgctcctggcttccctgggccacggggtcctcctggccctcaaggtgcaactggtcctctgggcccgaaaggtcagacgggtgaacctggtattgctggcttcaaaggtgaacaaggccccaagggagaacctggccctgctggcccccagggagcccctggacccgctggtgaagaaggcaagagaggtgcccgtggagagcctggtggcgttgggcccatcggtccccctggagaaagaggtgctcccggaaaccgcggtttcccaggtcaagatggtctggcaggtcccaagggagcccctggagagcgagggcccagtggtcttgctggccccaagggagccaacggtgaccctggccgtcctggagaacctggccttcctggagcccggggtctcactggccgccctggtgatgctggtcctcaaggcaaagttggcccttctggagcccctggtgaagatggtcgtcctggacctccaggtcctcagggggctcgtgggcagcctggtgtcatgggtttccctggccccaaaggtgccaacggtgagcctggcaaagctggtgagaagggactgcctggtgctcctggtctgaggggtcttcctggcaaagatggtgagacaggtgctgcaggaccccctggccctgctggacctgctggtgaacgaggcgagcagggtgctcctgggccatctgggttccagggacttcctggccctcctggtcccccaggtgaaggtggaaaaccaggtgaccagggtgttcccggtgaagctggagcccctggcctcgtgggtcccaggggtgaacgaggtttcccaggtgaacgtggctctcccggtgcccagggcctccagggtccccgtggcctccccggcactcctggcactgatggtcccaaaggtgcatctggcccagcaggcccccctggcgcacagggccctccaggtcttcagggaatgcctggcgagaggggagcagctggtatcgctgggcccaaaggcgacaggggtgacgttggtgagaaaggccctgagggagcccctggaaaggatggtggacgaggcctgacaggtcccattggcccccctggcccagctggtgctaacggcgagaagggagaagttggacctcctggtcctgcaggaagtgctggtgctcgtggcgctccgggtgaacgtggagagactggcccccccggaccagcgggatttgctgggcctcctggtgctgatggccagcctggggccaagggtgagcaaggagaggccggccagaaaggcgatgctggtgcccctggtcctcagggcccctctggagcacctgggcctcagggtcctactggagtgactggtcctaaaggagcccgaggtgcccaaggccccccgggagccactggattccctggagctgctggccgcgttggacccccaggctccaatggcaaccctggaccccctggtccccctggtccttctggaaaagatggtcccaaaggtgctcgaggagacagcggcccccctggccgagctggtgaacccggcctccaaggtcctgctggaccccctggcgagaagggagagcctggagatgacggtccctctggtgccgaaggtccaccaggtccccagggtctggctggtcagagaggcatcgtcggtctgcctgggcaacgtggtgagagaggattccctggcttgcctggcccatcgggtgagcccggcaagcagggtgctcctggagcatctggagacagaggtcctcctggccccgtgggtcctcctggcctgacgggtcctgcaggtgaacccggacgagagggaagccccggtgctgatggcccccctggcagagatggcgctgctggagtcaagggtgatcgtggtgagactggtgctgtgggagctcctggagcccctgggccccctggctcccctggccccgctggtccaactggcaagcaaggagacagaggagaagctggtgcacaaggccccatgggaccctcaggaccagctggagcccggggaatccagggtcctcaaggccccagaggtgacaaaggagaggctggagagcctggcgagagaggcctgaagggacaccgtggcttcactggtctgcagggtctgcccggccctcctggtccttctggagaccaaggtgcttctggtcctgctggtccttctggccctagaggtcctcctggccccgtcggtccctctggcaaagatggtgctaatggaatccctggccccattgggcctcctggtccccgtggacgatcaggcgaaaccggtcctgctggtcctcctggaaatcctgggccccctggtcctccaggtccccctggccctggcatcgacatgtccgcctttgctggcttaggcccgagagagaagggccccgaccccctgcagtacatgcgggccgaccaggcagccggtggcctgagacagcatgacgccgaggtggatgccacactcaagtccctcaacaaccagattgagagcatccgcagccccgagggctcccgcaagaaccctgctcgcacctgcagagacctgaaactctgccaccctgagtggaagagtggagactactggattgaccccaaccaaggctgcaccttggacgccatgaaggttttctgcaacatggagactggcgagacttgcgtctaccccaatccagcaaacgttcccaagaagaactggtggagcagcaagagcaaggagaagaaacacatctggtttggagaaaccatcaatggtggcttccatttcagctatggagatgacaatctggctcccaacactgccaacgtccagatgaccttcctacgcctgctgtccacggaaggctcccagaacatcacctaccactgcaagaacagcattgcctatctggacgaagcagctggcaacctcaagaaggccctgctcatccagggctccaatgacgtggagatccgggcagagggcaatagcaggttcacgtacactgccctgaaggatggctgcacgaaacataccggtaagtggggcaagactgttatcgagtaccggtcacagaagacctcacgcctccccatcattgacattgcacccatggacataggagggcccgagcaggaattcggtgtggacatagggccggtctgcttcttgtaaaaacctgaacccagaaacaacacaatccgttgcaaacccaaaggacccaagtactttccaatctcagtcactctaggactctgcactgaatggctgacctgacctgatgtccattcatcccaccctctcacagttcggacttttctcccctctctttctaagagacctgaactgggcagactgcaaaataaaatctcggtgttctatttatttattgtcttcctgtaagaccttcgggtcaaggcagaggcaggaaactaactggtgtgagtcaaatgccccctgagtgactgcccccagcccaggccagaagacctcccttcaggtgccgggcgcaggaactgtgtgtgtcctacacaatggtgctattctgtgtcaaacacctctgtattttttaaaacatcaattgatattaaaaatgaaaagattattggaaagta

SEQ ID NO: 528328 - DNA, 759 bp, Homo sapiens
agcggggccgtgggtgatgccggcgtcctggcgggcgggagcagcatcgaggccgatctggccgagtccggaactcggtcgggcgaagtggactgcggggtaactactggccccccgtcgtcggctctgctacccggatggctcttggggacttgcgccttgcgagggcctctgtactccgtacataaggtagacccggatttccagctgcttgatgaggggtgcgggcgggagtctgctacaccatttttgatttgggcttccgctttgatgtggcatggttcctgacggagcacttcgcccttcatgtggtccaacctgggcattggtccttacctatctccctgtctgtggttggggcagagcctaagggcactctatatttacccgcgctcactccattcacttggtgagaggagatgaatcggcccccaaggagtcaatgaaccaacgaaccctaggttcagtcagtcagtcgttactcgtgagtgctagtgtgccagtgctacggacatctatacatggcaaattgtcattacgcaacatggctgagcctttcagtgccacagaacccaaggccatcggccatcggaactaccatgcaggctactccatgtctggggctggcctcaccggtagcctgtctaacctcttctgtggagtctgcgtgcgcatcgtgggcagtggggctgccctggccgatgctcagaaccccagtctctttgtaagattctcatcgtggagatctttggcagggcc

SEQ ID NO: 528329 - DNA, 100 bp, Homo sapiens
ggcttcagttcagtcgggactgaagcaaaggctgagaggctgggagatggatacctgacttgtgatccacgatgggaagcccaagttaagtcgggacctg

SEQ ID NO: 528330 - DNA, 199 bp, Homo sapiens
cgcacagattcaagagtactgcgacacaatgactatcagcgagataatccgagcgtcaaacaagataagaagatagatcgcgggaagttgcttcgccacagccattacaccatcttgtgttgagcagcagcatatggaggcgttactatactacgaatgtcggctcgaccagttgagctctcgccctcgtcatccatga

SEQ ID NO: 528331 - DNA, 430 bp, Homo sapiens
acaatggaacatgaggcatagatagacagcaccatggtacgagggaactaactatgcatacctacagatacagaccgaggtgtagctgatagatcaaagtgtatggtgatacagcaggccaggacatgagttttagtatgtagtcagcacaggcagggctatatgtactgggccataacgaaaggcagacctatagcatatctgcttcttcttttggtttatatgttctggaccatgaggaaaggcagaacctgtagcttattagctttccccttgatcctgccagcctgagtccatttccctaattaggactccacaatagctctgactatcacttcaccttctgcctaaagcctgtaatcaaaaggaagcaaggtctgatgatagcactccagcatatgtatttctgtggtttatgcttgatacgcag

SEQ ID NO: 528332 - DNA, 148 bp, Homo sapiens
gtgttgtacagaggtctcaatgtctacgaagagtcctcttgtcttcttctgtcaccatgttcatagccacacctttacggccaaaccgtccacctcagacgattctgtcggatatagttttccctgattggatgtgaaggtcatagtt

SEQ ID NO: 528333 - DNA, 844 bp, Homo sapiens
  misc_feature (24)..(24): n is a, c, g, or t
  misc_feature (68)..(68): n is a, c, g, or t
  misc_feature (71)..(71): n is a, c, g, or t
  misc_feature (103)..(103): n is a, c, g, or t
  misc_feature (114)..(114): n is a, c, g, or t
  misc_feature (121)..(121): n is a, c, g, or t
  misc_feature (133)..(133): n is a, c, g, or t
  misc_feature (144)..(144): n is a, c, g, or t
  misc_feature (173)..(173): n is a, c, g, or t
  misc_feature (180)..(180): n is a, c, g, or t
  misc_feature (195)..(195): n is a, c, g, or t
  misc_feature (200)..(200): n is a, c, g, or t
  misc_feature (210)..(210): n is a, c, g, or t
  misc_feature (311)..(312): n is a, c, g, or t
  misc_feature (361)..(361): n is a, c, g, or t
  misc_feature (369)..(369): n is a, c, g, or t
  misc_feature (379)..(380): n is a, c, g, or t
  misc_feature (383)..(383): n is a, c, g, or t
  misc_feature (391)..(391): n is a, c, g, or t
  misc_feature (402)..(404): n is a, c, g, or t
  misc_feature (421)..(421): n is a, c, g, or t
  misc_feature (432)..(432): n is a, c, g, or t
  misc_feature (440)..(440): n is a, c, g, or t
  misc_feature (447)..(447): n is a, c, g, or t
  misc_feature (470)..(470): n is a, c, g, or t
  misc_feature (477)..(477): n is a, c, g, or t
  misc_feature (510)..(510): n is a, c, g, or t
  misc_feature (542)..(542): n is a, c, g, or t
  misc_feature (590)..(590): n is a, c, g, or t
  misc_feature (634)..(634): n is a, c, g, or t
  misc_feature (741)..(741): n is a, c, g, or t
  misc_feature (767)..(767): n is a, c, g, or t
  misc_feature (771)..(771): n is a, c, g, or t
  misc_feature (792)..(792): n is a, c, g, or t
cgcggccacgaatggatcgcagancgacctcagcacagcaacgcagagcgcatctgcagaaaaaaaangangaatgtatctggagtattaaactttgtaactntctcatcaacnaagcaanaaaaaaaaaaanaaggaaaaaancccacacgaaacaatcagaattagaattngattaanaagacgcgtataggnatcangctgactacncctcagctccgtcctcggggagggtgaagccagcgtgggacactttggaaggcctatcaatcacaggggcgccaaaatcaaaaggcgggtcagtaggccannccgggaggcgcgaaaggcgaggccagcgggtgttaagaaggatatggtnagaagagntctttgtctnnatncaaggggncgtctgatcannncgtgtgtctcggtgagnaattcgggagnaggtgcangcctgtnctactcgctaccacgcgtcttcngggaggnagtgaatgagccggttatcttctcagggagggntagtgctggccactgtgcactgccgctgccancacgcccggtcacagccagtgtctatgggcgtctggcgcggctgcgangctgtctagaggactcctacccttctgctctgagtgcgcaagtnttcctggactctccggctgtgggctgtggtttggaaacgaggttgttcatagaggctgctctggggccaccatgcagggcaacggtgacgtccagaggccacctgcntgacatctccatcaccaaatctccangaanaccctgtttcctatgtgaggncattgcccagcccacgtttgcctccttttcctccctctgccacacgcgaatt

SEQ ID NO: 528334 - DNA, 128 bp, Homo sapiens
agtgctgactgcaaatgatgtgagcagtacaacccacatggttgctgacctgaattgccttctccaagcacatctacaatgcctacctgaaaaacttcaacatgaccaaaaagaatgcctgcagcatt

SEQ ID NO: 528335 - DNA, 129 bp, Homo sapiens
gggtgtctggcatgagaatggctgttactactcagggccatctggctcattgaagagtctgccatgagcgatttcacgtctgtttgtcgttaccgccgatcgagcttgttataattatgcctcatacgg

SEQ ID NO: 528336 - DNA, 263 bp, Homo sapiens
  misc_feature (2)..(3): n is a, c, g, or t
  misc_feature (7)..(7): n is a, c, g, or t
  misc_feature (11)..(12): n is a, c, g, or t
  misc_feature (18)..(20): n is a, c, g, or t
  misc_feature (22)..(22): n is a, c, g, or t
  misc_feature (24)..(24): n is a, c, g, or t
  misc_feature (37)..(37): n is a, c, g, or t
  misc_feature (51)..(51): n is a, c, g, or t
  misc_feature (87)..(87): n is a, c, g, or t
gnnctgnggtnnctagannntncnctacgcgaagtangaatggcgcagcancagcgcgtgagaacccgggcgcgcatccggcgcagnggcgatccgcaagagcccttacccggcacgctcgccgccgacgcgagcgtcgagcaggcatgggatggcgtcgagcttccggcctcgacgtggtgtgccgaggaggcacaccacatgaagctgcgcgagttcaagcacagctacgcctcgagagatcgcgtagcgcattgtccata

SEQ ID NO: 528337 - DNA, 452 bp, Homo sapiens
atgtgcatatattgatgggtcacagtatagcgtgcagatagaagctaacgaacaaatgtttagtttgctgaagatggccttatatggacaggtttctaccagaaatattactttatcaggtgtaacatctgcttcaggaacatggcagtatgtttacatgtcagaagttttgtttaattctatggtatttctaaattgacttgtttaaataaattcagcaaatggatagcattgttttttatttgcttcaatatgggggtagataatagctaaagagccaaggatgaatttcttcaaatgactttattctgtaagctttacataggtgttggaggattcctaaggtgtcagcattttgtaaaggtaccacaaaggagaagttgatagggaatctaattttagaatgtgccaaatggtctgtgctcaacaatataattgaaccggatagcttg

SEQ ID NO: 528338 - DNA, 1025 bp, Homo sapiens
tcccggcacgtgtctcggcacgtggcagcgcgcctggccctggtgcttggatggctgcctggctgccctgtgatcctgcctggcctgtggtcgccgagtcggtgtcgtccttgaccatctgccgactgctgttcatttgcagcctggctgagagctcagctcctgacccctgccgctgccccgctgcttcccaggaggttcatctgctccttccctgactgcagcgccaattacagcaaatgcctggaagcttgacgcgcacctgtgcaagcacactgggggagagaccatttgttttgtgactatgacagggtgtggcaaggccttcatcagggactaccatctgagccgccacattctgactcacacaggagaaaagccgtctgtctgtgcagccaatggctgtgatcaccaaattcaacacaaaatcaaacttgcagaaacattttgaacgcaaacatgcacctcaacaaaaacaatatatatgcaggttcttgacgactgtcacgaagacctttaagaaacatcagcagctgaaaatccatcagtgccagcataccaatgaacctctattcacgtgtaccaggacggctgtgggaaacactttgcatcacccagcaagctgaaacgacatgccaaggccacgagggctatgtatgtccacaccgggctgttcctttgctggcaaaacattggaccggaacctctgacaccatgtgacagaacccataacgaggcacatcctatgtgaacgaggccggaaacatttgacgcaagattccttagccacccctacacccatgccccacacacggcgattattgtcgtgatccgaagcagcgcgtgtgaataccaattccctggtcgctacctccagccaatccctcgtcatgagaaaacggcgctggtggtaacacgtgtgtgcgaagctgggagcacgtcacgcgtgatgctcactcaacagcatgtgcaccccacctcacgcatggccattggtatcccacggcggtcgctcgagcagaggc

SEQ ID NO: 528339 - DNA, 147 bp, Homo sapiens
ccctcccctgaaggattaacagcaatgatgggcattcgtgaagttgggggggttgggggtgggattgtgtcctttaaggggaggggttcatttgagtaaacataaaccccaacttgggccattttttataaaatgattttaaaggca

SEQ ID NO: 528340 - DNA, 539 bp, Homo sapiens
tagaggacccggtgaaaactgtaacgtaagacgtgagaaccataaaactctacaagaaaacctaggcaaaaccatacagtacatagacagggcccaagacttcaatactaaaacaccaaaagcaatagcaacaaaagccaaaatggacaaagggcatctaattaaactaaagtgcttctgcacagcaaaataaactaccatcagagtgaacaggcaacctacagaaggggagaaaattttggcaatccatccatctgacaaagggctaatatccagcatctacaaagaacttaaacaaatttacaagaaaaaacaaccccatcaagaagtggacaaaggttatgaacagacacttctcaaaagaagacatttatgtggccaacaaacttagaaaaaaaaaaggctcatcagtcacgggtcattagaataaggcaaatcaaaaccacaaggagataccattccaggccagttagaagggttatcattaaaaggtcaggcaacaacagatgcgggggaggatgtgaagaaacaccactgag

SEQ ID NO: 528341 - DNA, 198 bp, Homo sapiens
caggatatcttctcagcagcccaaagctacagtgtgactcagatcaggatgtcttctcagcaattgagggttcatattcttacctacttttgttaccgtttaaccccaagggaaaaatagtttaaaaacgagtcattcatttctttcccatgtagatagagtctattgatcgttgacagacaccgagaagataccggg

SEQ ID NO: 528342 - DNA, 140 bp, Homo sapiens
ctcagactagtaggatataatttgttcatgctgtcccaaaggcatgggagctttttgaaaagaaagaaaacagtgtgttggcttttttttttaagaaagttagaattgttttaccaagagtctatgtggggttaggtctg

SEQ ID NO: 528343 - DNA, 573 bp, Homo sapiens
aagtacagtgtccctgtctgtctggggagcacgatgcactgtcccctcttcgtaccctccctgagcgctgtgtcgagctatcacgttccggctgctactctgctctgggcccatgtggctccggctcgtgggaatggtagatgcctgatccgggtgctcacggctggcgcctcgaagaggcaaggtggggagttaggaaagagctgggccagttctgtgtaccccctcgggcccctgccccccgccactgctgtccacttcccaggcagcccaggatgtgtactgtcaccggccttaccgcaggatccacagcacggagcaaacagcatttggaagtcgtgttcgcagtacttccggccttcaaactgcaaaggggtcgcagagagaggacaagcaaaccacctatcatccccatgagcagccaggcccttgttgggtcaggacctgacagcaggggatgaggcactgaggcaggtgcatgccgggctgaggctggagcagtgggtcccaggcctgtgcagagaggacactggcccttttgggatggtggggtgcaaagggaggtgcccccgt

SEQ ID NO: 528344 - DNA, 958 bp, Homo sapiens
tgagcgggccggcggtgtcgtctagctgggggagtgtcgtggccatgctggtgggccagggcgctgtggctgctgttggcccgcgtgtgtgtcacctgcgcggtggtgctgctgctgagctggcgtggggccggcgcacggctcggaggacatcgtggtgggctgcggtgtgcttcgtcaagtcggacgtggagatcaagctactcgctcatcgagataaacgctgtacaccaagcatggcgactttgaaataccagacagactgtgcccctaataatggtaacttgatgatccctttgtatgcatcaagggggatttcattctgaacgattgagcctcccctagggtgcacgttctctgagccgacgaccagtggagctccatgtgcgatggagtcagtgacatctgacacacagcggtggggacatcgaacttctgtacttcactgggttctctgctgaattggccaaggcttcgcactacctcaaagcttctgcgctggagcatctactgaacatcctcgcaactcatccaacctgggccgttgaaaggaggcaagcgaacacagtagcgtgtaaccaactcccaatagccacatgccgtgcacgtccccctcatagtctgcttggctacaatgctgtctggcctctgtcgcgacagtcgccgcggagacgccattagaaagtgggtagaacaatccatgcgtctcaaacacctaccaactcggctacacgacagcagcgactcaagggcgccaacgccacagagcgtgccgccaacgctagccctgcgggagcgaagagccacgcgacggcgagcaggcccaggcgggacagtgctagggaaacaaacgcgcgcgacgagcacgacagaccgcgacacagtacaacagagcacaaacaacggtggccaaacccaccaggcgcacgcagtgctggcgaacaccgacaacccagca

SEQ ID NO: 528345 - DNA, 576 bp, Homo sapiens
  misc_feature (62)..(62): n is a, c, g, or t
gggaaggtgttggcttaaaaagacaacaggccaggcgcagtggctcacacctgtaatcccangactttgggaggccgaggcgggtggatcacgaggtcaggagctcaagaccagcctggttaacatggtgaaaccccatctctactaaaaatacaaaaattagccgggcttggtggtggtcgtctctaatcccgctcctcggaaggctgaggcagataattgctcgaacctgggaggcggaggttgcagtgagccactgcactccagcctgggcaacagagcgagactccgtctcaaaaaaaaaaaaaaaagacaaacaaaccaagtaaggggatatcattaaccaattgaggacgggctcccttgtcccctgccagggcctgcagggaaggttaagggccaggttccttttaaacaaagccaagtcatcagggccctcccggggttggagacgctagagttcgccacggaagccgggtttcctaggggcaccgcctagggaagtgactcaggactctcagtggcacccggtcggggctccacccgagggggtgcacttttgatgagatgtctctg

SEQ ID NO: 528346 - DNA, 779 bp, Homo sapiens
ggggaccacctcccccttctttgatcccagcatctcagtcaccctcccaaacctccatatggctctcaatggtgctcacttgcttggaagcaggctcccaatagagaggcggctgccctctacagtctctttgactgtaagacagggctctgtatcagtgagacgcatgagaaaagtcccacggctaatggcagacaatttgcactttgaccatgtgtgttcagtgtgtggaacctgagataccttatttattaacaggaagtctgattttttcacggggagtcttgggtgctaatatttgctggggctagggagagagagatccagattattcttgacatgggatcccttccataacaggtacttttgatgggcaagacatacgggttggccacagaaggcacagccagcctctgaaatcatagctctccagtggcttttaaagaaacgctggtcctcagcactaagcaaaatcactacaatagcctagttgctttttgggaagccttccttagggaagaatgtccacggtcccagtggtcaactagtatgctctttgagcaattttgacacgtcgttgaaactctaagaacttttcgagaggggtcggcgagggttgtccaagaatctaagattacggatagaatgatgttcctcgggaatttgcagctagtcgctttttagggggcccaccagtgtcccacaaatccctggggcccatctcggacctgctaaggccagccggcaatcgaaattccacccccttagaggacactcgt

SEQ ID NO: 528347 - DNA, 120 bp, Homo sapiens
agcaagttccaggccacgccagcagcgtggccactgggtggatagtaagggccgactatgtggataaatcccagggttctacgaccatcgcccaccatcacagtagcggctcaccaaata

SEQ ID NO: 528348 - DNA, 361 bp, Homo sapiens
tagtacatgttaggacacaaaacaagtgtcaacaaatttttataaattgaaatcgtatcaagtatctcctcagataagaagtggaataaaactagaaatcaagaataacaggccaggtggggtagctcgcgcctgtaatcttcgcactctgggaggccgaggtgggcagattgcctgagctcaggagctcgagaccagcctgggcagcacgctgaaaccccgtttttactaaaatacaaatcagccaggcatggtggcgtgcacctgtagtcccagctactcaggaggctgaggcacaagaactgcttgaacccaggaggcggaggttgcagtaagctgagatagtgccactgcactccag

SEQ ID NO: 528349 - DNA, 100 bp, Homo sapiens
tcagtcggtaccactgcaccatattatttcgtctcattaactgttgacttctactaggtgttacttctaaaacattacgtattgagtttaatggtgaaca

SEQ ID NO: 528350 - DNA, 86 bp, Homo sapiens
caatcacatctccaagagccactgagagcatgaaatgatatgagaaggggttgcccttccctccagtcgaaacggccgcgaattta

SEQ ID NO: 528351 - DNA, 290 bp, Homo sapiens
  misc_feature (76)..(76): n is a, c, g, or t
tgcctgcttactcgggaaatttgcttttgccaaaaccgcttttttggggattccgggcccccctccttacttgggntggttttggaaccccaaccgggttcggccggtttgggggtttggaaaattaattaccttgttcttcgaattggttgaaagggtaaagaacccccaaaaaccccaatcaaggttttgaatgcattaagacccgacattctcgggtatttattgtctgtccccacataggacccccacccccgaccctcgcgaataaaaggccttccatttgccca

SEQ ID NO: 528352 - DNA, 259 bp, Homo sapiens
  misc_feature (7)..(7): n is a, c, g, or t
  misc_feature (107)..(107): n is a, c, g, or t
  misc_feature (147)..(147): n is a, c, g, or t
  misc_feature (156)..(156): n is a, c, g, or t
  misc_feature (210)..(210): n is a, c, g, or t
ctcaggnggctgaggcaagagaatcacttgaacccaggaggcagaggttgcagtgagctgagatcacgccattgcactacagcctgggcaacaagagcgaaactttntctaaaaaaaaaaaaatcactgggcttcttcatgctctgntcacatctntcgtaaaagcttaagctctctccggggtccgggtttggccgtgccgtggaattntgggtggcctggctggggtctctggaaatttggctgcagcagagaacag

SEQ ID NO: 528353 - DNA, 943 bp, Homo sapiens
gagtcaagaagaaagctgatttatacatccatggtgacatacatacatagaaagtgggatatatgtgcgtggataatgccatcttaacaagccctgagtggggtgcggacatatgagctatccctagagctggtagaacgaaactcaaagattcacaactggattgcagacggtcgattgaacggagggactccctgactagacgtcagaaatgaatccaccatggtccctggatcggcaataagctcccagatcctagtacactagtacagtgacactcaatgagtcaataactgattacagggttacagctgcttcatcagctgcaacattgcgttagtcactgaagattgctggcacagcttcagaaggattgtgtggcagactatgcactggcttaacgcgccatcccgcaactttattaaacgctattccatagaagcatcacgagatcttatttctctccctgtaatagaatgcaacatatcacgggaccaatgggcttgctattgtgtctcagggtattgtctttattcttggagagctattttcatacagttgtgcatacacaaggtcgacatatctatacttgtgtgaatagaaaatctgtagctgcagttctacattgtccagtagaggtcatccattgtgtcacaccaaatcatcagggaatcctttcagcgtggttcaggtgagtatttcactatagacattctggtctgaccggaacacgattcgctatctggcgtcaagactgtgccaatataatctttacctattatattctcattgacaacctaagggtcctgggggggatttaaagccctaagtgagcatgggaaatgctcgggaaggccaccctttggtttatattccaccacaggtggcgttcttgtcccggcatattccgtgcgttccatcacaaaagttctccgccggccta

SEQ ID NO: 528354 - DNA, 503 bp, Homo sapiens
  misc_feature (13)..(13): n is a, c, g, or t
  misc_feature (143)..(143): n is a, c, g, or t
  misc_feature (390)..(390): n is a, c, g, or t
  misc_feature (423)..(424): n is a, c, g, or t
cgatcccttcacnggtcgagtcacagtctgataggattacgtctactcatgtattaatagcatggggaatagctaacttttaaaaaattattgatttcctccctgttaaagatttcaccagaaaacttcatataaaatcaggncctttttggacaatttttaaaatttgtatctttactagaacatgagaatctttttcccttggaagcttgaattataaatgtggtgtttggcctggctcagcagcaccagttgactgctcgtgtgccagcggtgtggggaggacggggcaggacgctgcagctctctccagccctgttggcatcctcagtgcctgcaggcctctcgctgcctgttgggctgtctggggggtggccatttagggatcgnggggacggggtccaccccaagaagaaagaaagnnccgtccacaggcccggctctgggccacgttgccccggaagcaggtgctccagagtcagtgagggctctccccaaccagc

SEQ ID NO: 528355 - DNA, 84 bp, Homo sapiens
ggatttgctggtgcagtacaactaggcttaatagggacatggcaaaactctgtctctactaaaaatataaaaacgttagaagct

SEQ ID NO: 528356 - DNA, 329 bp, Homo sapiens
tctagaggacatctctacgagcgcatgtccccaaatccatcatggcagctgctgggatgaatgcaagtttttcagccataaggtagcgaaatctacagaatcagattacatccacttccaatcacgcgggttgggtaatccacttagttccaggtaacatacgtaagatgtccactgggttgaaaccacaattatgatgcaatcaggactgtacttgacgatctgaggaataatgaatttgaagacattaacatttctctgcaccagattgagccgactctccccttcttgctgacggactcctgcagttaccactacaatcttagaat

SEQ ID NO: 528357 - DNA, 251 bp, Homo sapiens
  misc_feature (66)..(66): n is a, c, g, or t
  misc_feature (186)..(186): n is a, c, g, or t
cgccgcctctgcgtgggccggccgggagggcctcgggggactgactgacagagtttcactcctgtnacccaggctggaggacaataatgtgatctcgggtcaccacaacctccgcctcccggattcaagcgattctaatgcctcagcctcccgagtagctcagattacaggcatgtgccaccacgnccggctaattttgtattttcagtcgagacggggtttccccatgttggtcaggctagtcttgaatt

SEQ ID NO: 528358 - DNA, 166 bp, Homo sapiens
tatctataagtcttcatatgtcatccaacttcaactcgttgactttatctatcagtccttcaatgtcgcccataccaagaagtttgctaatacatggatagtatgaatgatcaaggtaagatggcagattattttcctcaggcgaaaatgttctgagtatcagtaa

SEQ ID NO: 528359 - DNA, 1064 bp, Homo sapiens
ccctgttcccaggcacattcccatgggtggccctgttcccaggcacatgacccttctggcctcccaggtgttcaggtatctcccagctccttgtggcccctcatcttgccccaccccatctcccccagggagcagaggcagaaggggagggggcatacctgcttctcaacctcatgtggggtgggcatgggtgggtggacggaggttgcccagtgggccaggcatggggaggagcacaccaggagccgaagggcccctcctggaaggccagagactcgcgggcactgggtcacactgctggaatggaagacggcagagtctgtgcgtctgggcactgtggcagcgacagtaacctggactgcagattctgcggggcaatcccggcgagtgtgcgcagcagtgtgcggcaagagccaagctcccaggcactgccctcctgcaagtgggtgcccatgcgctgctcacgtcgcctgccacggggctgccctcctgcagctgggctgcccactgctgtcgctcagcgctgcctgcccatgtgctgagggcctgctgctggccgcggcagcgcgtgtgtgcccacggcaccgctcgcttccatctctgccactaggaaccacgcagcgccggcgcgcgtggcaggcctcccgggcagcaccacgctgcacgccccctccccagctgctgcaccgtactgtgccaccgcccaggtcctgaggacggtgcccatgctgggcgcccgcctttccgaccaggctgatgcccagcccaccgggcaccgccccgctgctcccgggccgttccctgcgcgcctgcagctccagccgcacgcagcacccattgccccttctgggctctggcccctccaccctcacgcctgatgcgcccgagcgtcctacgccgccctgttcgctccgacgacgacggccgccgcttcactctacccacgccttagactctccgccctgctccccccccagcgcacgcacgccctgccctccccctgctccccccaggcgccttcccccccaacccccccccacgcccgccccgctcccgccctcgcc

SEQ ID NO: 528360 - DNA, 118 bp, Homo sapiens
ggcctggacttcttagggtatacagcctacagggggaaacagcttctgacacctctattattgcggtgcctctcactgccttgacttcagaaaggcatggaggcaaccagggacaaac

SEQ ID NO: 528361 - DNA, 375 bp, Homo sapiens
tcctttcgcgactagcttatgataagaatttgactcatcttcaagccatggcatcacacagcaccatcactcgaagatctattgtgctctatccgcatggagactgatggcttcctcccttcacacttggaatctgagcacttacctgcccactactcagtgcaacaatgcacctgctggatggtttcactgagtcacattactgatgtgcctctcgggtgaacagatctatcttatacacagcatcccttctgtgggcatcactacctgtctaaatttcaggtgattctgaagggaacatgagtaacagaacctgaccatcacccatgacccaagaacactcacgaaaactaaaaagaaacgtacctttaagac

SEQ ID NO: 528362 - DNA, 874 bp, Homo sapiens
tgggcaacacccccgctgggataatatgctgcccacaaggccccttggggtcatacccctggcgcacccccctgtgggggcccgactccgccccgagaaggtgtgtgggccccccacaacagatgttattttatcccgccccgtttaggacacccttgtggggtcgcgcccctggtgttgtggaccccccgcgggttaatttttctcggggcggttcttcccgccgtgtaggggggtctcccctcggcgtcctgttctcccctgcgcagttattttgttgcgccggtggaccaagcgtaaggcgttttagataatttgatagacaagaaggaaagactggccgcccccgaggggaccgcccaatgcggccccacggttctccctgagaggaggagtcctcgccgccctcctctggagcggccccgaattaaggaagccgccctctctctccgcccgtggaagaaaaacccgacaaataaagggttataggaagtcacattatatatgtggggagaaaacagtgtgggcgccccctggatatagatgggcgccccacacagggcgtctccccactgccaagccgtccgagtggcccgctctgttgcacacccggggggtcctgcccgcctcggggtctatagtgtgttgttgttccccgctcgccgctcgtccctcgtggttgagaaggccagcgaaaactagaagggggattacaaacccccacttccctcgctcgtgatactctctttgagcacgccaccgagattaggagaagttgtgggatttgtggggttaatttaattttcctcccacttttgtttccggaaattaaagtatgcccaaaaaaaaaaaaccctttttttgcccaaaaaaa

SEQ ID NO: 528363 - DNA, 415 bp, Homo sapiens
ccgagatggtgccactgcactccagcctggttgacagtgagactccgtctcaaaaaataaaaagataaaaattagccaggtgtgatggtgcacacctgtggtcccagctacttgggaggctgaggtgttggggatcacgaggtcaggagatcgagactatcctggccaacacggtgaaaccccgtctctactaaaattacaaaaaatcagccgggcatggtggcgggcgcctgtggtcccaggtactcgggaggctgagataggagagtcacttgaacctgagaggcggaggttgcagtgaactgagattgcgccactgggagacagagtgagactccggttcacaaaaaaaaaaagttaaaagggaggttaatattatcggggttgtgcaaaacagggtgtgatgtgtggggcg

SEQ ID NO: 528364 - DNA, 1376 bp, Homo sapiens
  misc_feature (413)..(413): n is a, c, g, or t
  misc_feature (491)..(491): n is a, c, g, or t
  misc_feature (1376)..(1376): n is a, c, g, or t
cagagcgagactccatctcaaaaaaaaaaaaaaaaaaaaaaaagggggttatttgggccaaatggatttatcccctctcctcgggtgtaaccggtgagggaaagtgaaacccagaacggggcaaatgtgactgggctccgctccacaaagctgtagtctcagaggcaaagctgtggccaagaacatctaagtggtctcttgctcccagtgccagggcccagtggaagggaattgactctaagggagaggagtctcagtggggaaatagggccagacgcttcttcattatttcttctcacacaacttttctctctcctctctgtgggctcccctgtgtgtctcttttctccctctcacgattctccctgtgagagagtttgaggcaaagtgacacaccactgtgtgtgactctnccccaaagacacacctgtgagacacaccccgtgtgctagtgtgtgcgcccaaaggctctccctgaatatactcagagnctctcacagagtgttctccctgtgagagagagagtgtgagagtgtgtgtctacacacagagggggtgtgggggcgacagtgcggtggggaactcacgtgtggagagccccccccttggtgggccgagggggtagtgtcaacaagagcgggagaagccgagagagagagagaaggggaacatacccgcaatataaatttgagtccccccctctagtaatataactgcaccccactagtatagtgagggagcagagtggggcggcgacccacagctgaagagttgtggtggggagagctctccacgagaagaaggggggcggaggcctcatacagaagactctcctgtggtgggcacccctgttgttgttgacacaggaaggggccagaagaacactcctcctttgttgagggcgacgccgccccctgttgggtgtttgtgtggggggcgacaccccccttcttgtgtgggaacaacttgttgatgcccaccagttgtggggcgctattctcgtggtggagcaacatgagcaggctgctgagcaccagcggcacacccgccaactattatttgtttgctgcacgggggcaccaagagggtggttggttggcagtatggggcggttgagggcgcgggcacataatttcttcctacaccacaaaccatcctttttcatgaagaagcaactcactaatattttatgtcgcccgcccgaagggggtggtcggcgctcctcctcattatttattccccccccacattttttttattaagacagagggtcggcggcgccaccttctccttccgccgcaaagtatttattttgtagcagacaggagaacacgtaattttctcaccacactgttggtgggggggggataaaaacn

SEQ ID NO: 528365 - DNA, 160 bp, Homo sapiens
  misc_feature (135)..(135): n is a, c, g, or t
acagaccctcaccactactatcttcctaggaacgacatatgacgcactctcccctgaactctacactagatattttgtcaccaagaccctacttctaacctccctattcttatgaattcgaacagcatacccgcnattccgccttatccgtgaactatct

SEQ ID NO: 528366 - DNA, 683 bp, Homo sapiens
ggtctaagtgtagtttgcttcacaataaaatttctagagattatctgtatctgtgctattgagatcatgaaacttgagtattcattaaaaaaactcatgaagaacacatacttaacaaatgtatatggattacctttccgtcatgtgaagagctgcattatattataggtattctgaaggataaacataagctacacatgtgacaaagtgcttacactaagcgggtgtatactatagtgtccaacaggtatggtgagcatatgttcaaatggaggatggctaggaacagaaaatttagaagacaaatacatggtggattttagcaaaggtggcttgggtatctattgctcacctgttgggcactacagtgataacccttggtaatgcttagccaaatccttaaatacttcctggatactataatagcagagttaccgcacaggagtgagtatgagagaaataatatgacctgaggaaggtatagccatactgcaacgtgtagagtgaggaagaatagtggaggtgaatgttgagaagtcaggcctggagaatactccccgctcaggaaaatgtcagcccttcttgcctcttttgtgccgccccagttctgggacttgagattgtctaccatagagtccagcttggtgtgctattgactggaatcattggtgttcatcctaaag

SEQ ID NO: 528367 - DNA, 176 bp, Homo sapiens
acgatcccgaattcccgggatcgagctcacgcgtccgattgaaataagactcccactggtccgggaatctctccagcttctctctctctggttattcaggagacacatgttcggtcttaaaactggcatggagcgcatgccctcccttgcagaaaattatcaaggaagagggagtt

SEQ ID NO: 528368 - DNA, 892 bp, Homo sapiens
gatccgatctctgtaccgagacttgctcctgtcgtgtagacaaggtacttcttttgctgcactgcactactcgtcagaatcttagtacttactgcaatacccaggtagggtgcaaagagctcggagagttgaggaggcaggacgccgcgggatgaagacgaacaaatacctgttagtcaataacatgccgtacgactctcatcacagggttaagtcacctgtactggagattcaagccagggttgcataacccgagaccacaagcacgtcacacgatgacatacatgtctgttaaattgtttcccatattgtcagtacttcctcactaacgtatcttcacgcgtacctatataacgtcaaagtgtaaaagcaatgccaccacaagcactaagaatgcactgaacttagctattacttcgtcacaacgtgacatttagtcccggcatacacttatctggatcatatatgcaagcaccctctgagaatatgcgcacctttccaaacacgcgtcttgttctgccactaggagtaggaggcatgcctgcgccacagaaaaagatccggggcatatccttcgacacattttaggtgggcccactttctagtccggcacggaaattgttgcgccaaaccaaaacccaagtgggtccgtctaatcgaattgcctctacttatgcaactgagttcacatttcgatcagcccatcgccattgaaaccctgcataactgttcctagcgcatgagcgggcccattagaatccctatatctgcaaacccattcaaattcaaggagcgttaccctcacccgcaattcagtgttatcactagccggttaattcattgttacagagcgttgcagacagctatggtgagaaccctaaccccgatattc

SEQ ID NO: 528369 - DNA, 303 bp, Homo sapiens
atgagtgcttcaatggacaatgacctcgagatcgacgagctgcagaatgctgcctgggctccgtggccgtcaagctgggagcagtgggagaaccacctgtcggcgctccatcgtagtcatccaccctgacacaggccgcgacctgtccccggaggaagcccaccgtgccgggctcatggactggaacatgtacgtgaaactcagaagccaggagtgcgactgggagtagatctcagtgaagggtcccaatggggcgagtcctcagtgatacaccgacaggaagtctggcaaggaagttctcca

SEQ ID NO: 528370 - DNA, 406 bp, Homo sapiens
actatacctatctatgcacaaaaagtagtaaggctatagaagacatgctaggtcatcatccaaatactaacctcaagatccacacataagacatacaacactattctccaaagagcacaccatggctgcagtgtacctctccttctctactacctcttaagataccttaactttatcttaaagcttctccttattacgagtgaactggattggataagccgctggtcttgtccttaaatattacatcccagtcttcaaaccctgctaccagccgtagaagtgcatactagtgagtaagccatagttaggcacagcaatgtggatgtacaaagataggctttgatcactgaaagcacctctctcagctgccatcttgagaacagatatctgagagatttcccacaca

SEQ ID NO: 528371 - DNA, 449 bp, Homo sapiens
agggcatcaataactccaagtttcggatcaatctctcaaaactgataaaatgaccaaaaagggggaattgttaaagcgaactaaatatggcctgagaaggactccgtacttctgtattggagtccctgtgaacaaactgagcctaacttaataggtagacaagattgaaaacctaaattaggagtatgtacctgtcacaattgctgagtctcggccagtcccagcagccgtacttcaatcactcatacactgctgaatgttcaaactgtgtgtaaatagggcaaatgccaacctgtaactaatccaggtgtttctctacctcacttccctttttttgtctataaatcttccaccacgtggctgcactggagtctctctgaatctgctgtaattctgggggctgcccgatgtgcaaatcattcattgctcaattaaactcctttaaattt

SEQ ID NO: 528372 - DNA, 180 bp, Homo sapiens
gcgttgtacggctgaactttgctggtggatacgtgcatcttccatttcaggcatgttgcacatcagtgctggcaggtgtcttgtgtgacacacagcatcaggcactttctatattcaaccattacaggtgttcatctgtgcccagttccagcaccgcggccatgtgtacctgcagctcgc

SEQ ID NO: 528373 - DNA, 247 bp, Homo sapiens
cagtcatgtatctcttggtgacagggacgcattctgataaatgtgtcattaggcaattgcattgtagtgtgattatcacagattgtacttatacaaaacttagatggcatagcctactgcatacctaggctatatgggagagcctattgctcccaggctacgcacctgtacagcatgtgactactgaatactataggcaattgcagcacaatgggaaatatttgtgtatctaaacataagtaaaaag

SEQ ID NO: 528374 - DNA, 133 bp, Homo sapiens
ttagatcgagctcgtgtacctgcagtgaactgagattgtgccattgcattctacgcctgtcgacagagtgagactccctcaaaaaaaaaaaagggggctctagtggcttctggtgggggcaagatgttggtgt

SEQ ID NO: 528375 - DNA, 970 bp, Homo sapiens
gatttgatatgcgtgatgtctcacagaaagttctgcgctcgcagacgtgggtccctcgcgcttcctgcctcggaagcgcagcagcaggcatcgagtgaaggtgacagagcttccctaacgatggacccgtccaagccggtccacctcatagcctttctgggattacactggctggacatgactcagatcgtgcaggaagtcagagcaggccgcggacttgaccggtgacccatgaccgcgcggtggtctgcgaggctgtgatcctacttgtggacacacgcgacccagtggtggttgtggtcgctttgtgtggctagcgtcggagcacccctcgagggcctccgcaccttccagagtgtgttggctgatgcacatcacgcgctgactcgcgagaagccgtgatctctcctccttggcctatgtctgagaagaaggccttttatgccatgtactgcgaccatgtggccgtgatgtaccgatggccagcggcagctggtgaacggaccttcaaaccaggcattgacatcaagatatcgtggcacagctcatccgttgtcacttcgcccgactaggcgcaagagtgccggcctgcgtctgctcgtgcgaccaacaaagcagcgggccccgccgtgcactggcagactccatgctcaacgcgagtgcacatgagggcccggcagcacagctgcgacctgaggtcccctgcccagagtgcttggcggcaatgcagcgctgcctggttcagcccagtgtctcgcggccgcgatgcacatgatccccgtccctcggggctgcgccacggccaaaggctaccacacggggtcaccagtcggttcggccccccacggcacctgtccccgcacgacccaccctgcctcgcacgtggcctgtctttgggcgccggctcccgctcggctcccctcctcgtcgcccgcccccgcacacgtctccccccccccgcgcttcccca

SEQ ID NO: 528376 - DNA, 833 bp, Homo sapiens
  misc_feature (252)..(252): n is a, c, g, or t
gcccgcccgccctgccggaggcggggctcagtgccctgaagtggaggcgcccgtgggccacctccctccctgcagccgcagccgctgcgcagaggcgctggctccttctcctcccacctgggacaggtgtctccccagcccccgctcccaggggcctctctctctctcccgccccgcagggtcgagtcccggcaggggctcggggatcgggtagtcagtacctctctgcgtctccagccgccggtagttggngaccctgtggctggagtgcgttttcaccaggaaggagcgcggcatgttcccctcccgggcggcaggccggggtgggctggggcgggaggggcgcgcctgggtccggactgctgcgtccgccggcgcttgaaggggtcaggctcattagcatagcgcgccgcctccgccaaccagcgcccggcgcgagtggggcggggccacgggggcggaactgagggcgaggcggggtctcgggcaacacgcccaggacaggtgcgcgggcgggacggggcggggagcgcgtggccgccggtgtcctccccacgggaattctctggcgtgcgcgccgcgagtcacacaccgaccgtcggggcctggacacccactcgccgtgagtgaagggcagagtcaaagctgtgtggaaaccgagcgagaatctcttcccacagaaatgtggaagcgtcggcgagcgccgtcctttggagaaccttgttgcggagaatgagctcactctggggctggctcgctcccatccctttgaaatccaaggcaggattgtggggagagccagaaagagtgccagtaacacctagggggctgac

SEQ ID NO: 528377 - DNA, 577 bp, Homo sapiens
agtaaaaatctttttattgtgggaaatcttttctttatttttatttaaaacattttatatggtaagaaaaagagggttttgggggtatatatatatgggcgccaagagatgtcctgatctaggcatgcgacgcgtaataatcacatcatgtaatatggggagaacatcccgtgaagcatttatttgcgttgcaatcaattcattatcctcttttacccatattggaacatacaaataaattgctgttgcaaatagactccctgaagtgctgtggactaccaggccttattcattcttttcaaaaaaccccaacgggtaataagttccattgttcatgagcaagatgagcaggtttgttacataggtaaacatgtaccatgttgctttgctggacagaacatctcatcaccctggtatgaagaccagcaaacaccagctatgtttactgatgctgtcactgggccgacccctgttctgaaagagcctagtgtgtgttgatacccaaaaagagacatgtgctctcacattaagaatccagacaactttcaacatagacacacgtggagtgtaaaagttt

SEQ ID NO: 528378 - DNA, 117 bp, Homo sapiens
tccgactatacgtacacagcagctcgcccctgagttatcaatttaacatttctctagtattcatatcccttttcttaccatatacctcagtgtatccttcctgtgttacgtctaggt

SEQ ID NO: 528379 - DNA, 373 bp, Homo sapiens
aggatgaagtttttttgcctgttactgctggtatatcctaaaaactctgggctattttttgggcttttcctttgctgcctaagggaaagaatatcccatctatcaggtcaagacttgtacatttgccccccccacttagacctaacatgtttgcatttatgttcaacccgtccatattgtatgaaatacccccttgtttttgctataaaaaaaaggcataatgttaagaatatcttttatatttatattgagtaattgccgggcccctacttagctggttcattttgatcccaaattcagggttttttcatttagctttttgatgacggactgaataaacagggtcccaatatggccctattttgccccttta

SEQ ID NO: 528380 - DNA, 315 bp, Homo sapiens
  misc_feature (53)..(53): n is a, c, g, or t
  misc_feature (156)..(156): n is a, c, g, or t
cgtaaaccagcgtcggcggatccactaactctctgtcctgcagttgaacacanagaggctgtcaggtgcttgaaatgcagctggtctgaacagagacatactggtgtgaaatacacactggattttaaaaaccagttaaaactctccttaggaatngtgtatactaattacatggtgaaatggtaatattttgatatattggggtaaatgagctatcgtattaacataattgactttttacttttttaatgtgaccactcaaaagttttaacattttaaatgtagttctcattatatcgcggtgtataccggggt

SEQ ID NO: 528381 - DNA, 160 bp, Homo sapiens
ggcatcccggctcgttttgcggctcttggggcggctccatcgcgtggcgcttggagggggcacatttgggggttttccctgttttcccgttgtccatgtcacaacgagccggctcttcgggtcctaacacgtgcgctcgtgctccacctccccacgcgcc

SEQ ID NO: 528382 - DNA, 123 bp, Homo sapiens
gggcggtttaattagccatggattgggcctggggtcggccctaaggtaattcctggccttaaaaataaacaggtaggtagccatattctttcacataaattggtgcttaaccatttaaaatta

SEQ ID NO: 528383 - DNA, 300 bp, Homo sapiens
  misc_feature (72)..(72): n is a, c, g, or t
caaaattagagtctgctggatggtgtttgcctgaacccgtattcttccattcatgccgaatactatgtccangggatagagttttgccacttcctgtatgagtgcacaatctggagctaatagcctgcacatggggtctgtttcttttaggtgcaccttcaaatgacaagtaagacaaggaagctgggtcactgcgtccaacatcaagtttgaatatatgtccagatttagctgtcacgagggcagtgacgatggtctccttttacgggaacatagcgcttgtgctgagagtccgcccag

SEQ ID NO: 528384 - DNA, 395 bp, Homo sapiens
  misc_feature (9)..(9): n is a, c, g, or t
  misc_feature (127)..(127): n is a, c, g, or t
  misc_feature (140)..(140): n is a, c, g, or t
  misc_feature (326)..(326): n is a, c, g, or t
gtaaatttnccttaatgttattttatgccccttttggggcagggtttgcctaattatttgatgtcccatataaataggaaccttactaaaaatatattgaatcttccttagaaatgggcattcaccncttggcgtggtgntcacgcttgtaatcccagcactttgggaggctgaagcaggaggatcacctgaggttgggagttcaagaccagcctgaccaacatggagaaaccccatctctactaaaaatacaaaattagccaggcgtggtgcgggcgcctgtaatcccagctgcttgggaggctgaggcaggagaatcgcttgancctgggaggcagaggttgcagtgagctgagattgcgccattgcactccagcttgggcagcaagagcgaa

SEQ ID NO: 528385 - DNA, 237 bp, Homo sapiens
agtgatcgggacacacacacacgacacacccacacacacacactctctctctctctctctctctctctctctctctccttatcataggagtgttagctggaatatgccttagagatcatctaatatctattagaaaagtgaatttcttgagagagagtgatgtgttcgagatcccctatcggggaggcgtgaacagagcctgaagaacaggctcgtgacccaaggtgtgtgccttgt

SEQ ID NO: 528386 - DNA, 1259 bp, Homo sapiens
ctagtatggggataaggggtgtaggtgtgccttgtggtaagaagtgggctgagggcattggaatcttaggagcgaaacgcgtataaatcacctgcgcccgcacaataaggggagtggctcatatgctgtaatccaacgaggcaaatagagtcagagcccgtcacagcacacgtatacctactgcagcaacaccgacactgctggctgacgcaatcgcgacgacgaccccgccgcacacccggaaactcccaaagacccagcggcgaacaacaacatgtcatagtatagacgaccaggcgtaaccactggaaaccgagcagagcgagacatcagccacaaaaaacccaaacgtgacgcagcaggacaggagcaccaccaggcagaatcacccgccggaagggacaccaccccgcaccacacgacgtgaccccgcccgaccatcccgcacccgccgcccacaggggagagccccagacgcggtagcaacgagacgagcaaaaccggcaagaacacaccccggacacaacagcagacacaaaaacacacacaagacacaccagcccgaaacgccagcgcacacacacggacgaccactcagccacaccacacaccccagcacaaaccgccaccacagccacgcaaccaccccaccccaccgacacacaaaccaggagccacacggcgcaccaccagacaaaaccgcaccccgagcggctggacgtgacaaagaccgcgccggcccgagacgcacacctccgcgcgcagcacgccccacagcgcggaccactcagccccctgctgccctgccacccacaccgccgacgcccccgcacgcacaccagtggcgcgacgaagggaccggcacggtcaagctcggggcgacgtctggtgggacaggaatatcgcccagtactgcccgccccgaccgcggtcctgttgggtgtggactctgcgtcgcggcttccggcgtggtagtcggggctgccagggaggcccgcggacgttggcccacgcgtgcagggacatctcgcccgcggcgccggcggtgcatgcaggggccacagaccgcagctcggccacgcgccggcgggcggggcggtctagacatgactggctcgttcgcgatggtcgggggacaaggtcggacgcaccgaagccgcgcccggagcccgtggcggagatcggatggggaccaagccgccaacgactggggagcgcgcgcgcacagcggccgagccgtgggcgggcgcgagagcata

SEQ ID NO: 528387 - DNA, 258 bp, Homo sapiens
cgagagacagatcgaatcgagctcggtccgaacgggtgatgcggttgtgtgaagtttttcaaatcttctaacaaaagaattaaaagaaaataaaccccagatttctgaagtattttaaatatgattttggcatgatggtaaatataggtttttcccttgatttttttttttctttttttttggagacgggcccttcattacactcaggccatagggcgggggtgcaatctgggctcgcggcacccgcattcacccgtt

SEQ ID NO: 528388 - DNA, 403 bp, Homo sapiens
  misc_feature (204)..(204): n is a, c, g, or t
  misc_feature (212)..(212): n is a, c, g, or t
  misc_feature (216)..(216): n is a, c, g, or t
aaaataaagtagaaaatatcagcaaagaacttcattatttgttttgccataatcttatgtctaacggatatgcattaatttttgctatcctaagtctagaagttacagagttccttctctgactgcttaccttttccttgaccctaaatctctgagaaggaaattctactgattcagtcttattaggagtttattttcaatggncacttagnggtnaaaagccaaagtactcacatcacccacagcctctctgccctcatctccttacagtcatcctctggctcactgtactaagtaatggtgactgctgcttttaaagatgacaggcttaatccacctcaaatactctgtaccaactggttccttctaactgggaacactcttctggtcaaaatggactcac

SEQ ID NO: 528389 - DNA, 102 bp, Homo sapiens
cacccaggcgcacttcttcacaagatccaattggatcacaccctattaccctatgcttataaaactctacccaactaccagctccagaagtgcgcctgggtg

SEQ ID NO: 528390 - DNA, 613 bp, Homo sapiens
  misc_feature (529)..(529): n is a, c, g, or t
ttttttttgaagaaaaaagataaccgtatttattaaaatgaaacaaattatgtgtatgactgcaagagttctggcatgatgcatcttggactcaacaaatcttgttggggaatcccatgtggttggagaacagcaggatagttatttactctggtgagtctgtcaccaggcagttgtagtaccatgaggttttacatgcaccatttaaacaatgtactaggccgggcactgtggctcacgcctgtcatcccagcacttgggaggctgaagtgagtggatcacttgaggttgggagtttgagaccagccaggtcaacatgatgaaaccccatcttgggccgggtgcagtggctcacacctgtaatcccagcactttgggaggccaaggcgggtggatcacgaggtcaagagatcaagaccattctggccaacatggcaaaaccccgtctctactaaaaatacaaaaattagtcgggcgtgctggtgcatgcctgtaatcctagctgcttgggtgctgagttaggagaatngcttgaatccgggaggtggaggttgcagtgagccaagatcgtgtcactgcactccagccggggcaacagagcaagactctgctc

SEQ ID NO: 528391 - DNA, 860 bp, Homo sapiens
ttttttggttgaccgggtttgcggctcacgaaacaccaggcacatttttgggtccccccgaacacccccccaagggctaagaatttgggggcgccccctcgtctggatacccctaggcctacaccttgggggtatcttcccgaggaaccccgggttccttcgggaccccccatgggaatatttgggtcctctgggcccggcccccttccagcggcccagaggtttttgtgtgctggacccgggggcaacttggtgtgccagacattgagtctgaactggttcccgggtcctgacccagtactgtcccatttgcctgagcgcccgtcggcacaaccggcaccccgggggcccgaggcgccaaagggagagctctccagatccggggtccaaaacccggggtggacccactgtcccccatccaatctgccccaaagagggatctctctgcacatgccacatacacggggaagactggaagaatgggaccagagatttgccagccagcctgcccccagaacccagccccttgtgtctttcgtccccttggcaccaggcccaggttcatcaaaggcttggacccagggcttctggggatgtgtgagggggaaaagcgccaactggtgatcccactccgagctagggtatggagaacgcgggagctccccccaagattcccggcggtgcaaacctggtgttcgaggtggagactgctccaaatagagcgacgaactgagctgtaacccgactggggaggggccacgggggagaggccccccatcagggacccgactgttcccaaaaaaaaaccaaaaaccaaaaccaaccaaaaaacactttaaagcccaaaaaaaaaaaataac

SEQ ID NO: 528392 - DNA, 454 bp, Homo sapiens
atttttcagccaaacaaatgctgagagaatttgccactactaagccagcactaccagaaatgctaaaaggagttccaaaccttgaaacaagaccttgaaatacatcaaaatagaacctctttaaagcataaatctcacagggcctatataacacgatgaaaaaaattattaaggcaacaactagcatgatgaatagaacagtacctcacatctcaatactaatgttgaatgtaaatggcctaaatgctccacttaaaagacacagaagggcagaatgaataaaaatccaccactaagtgtgtgctgtctttgagagactcacttaaatgtataaggactcacataaatttaaggtaaagaggtgggaaaagatattccacgcaaatggaaaccaaaagtgagcaggagtatctattcttatatcagacaaaacacacttcaaagcaacaacagt

SEQ ID NO: 528393 - DNA, 515 bp, Homo sapiens
caggaccagtctcaaaaacacaaaaataaaaataaaggtttccttactattaagtgtcatttactgtattaatgtcaatacagtaacaacactcaaattatcagaaactgtaaaaatttccagtttttactggaaataaaaactgggccgggcgcagtggctcatttctataatcccagcaattttggtggccgaggcaggtgtatcacttgagctcaggagctcgagaccagcctgggaagcatggtgaaaccctgtctctaccagagatacaagaaattagctgggcatggcagctcaagcctgtggtctcagctactcgggaggcggaggtggagggatcacttgagcccaggacgcggagattgcaatgggcctagatcccgccactgcactccaggctgggtgacagagtgaaaccctgtctctaaaaaataataataataattaaaggtaccaaaaataaataattgatggtaatgctgacccaaattaaatttaaccttcagattact

SEQ ID NO: 528394 - DNA, 567 bp, Homo sapiens
gctgcctgcctactactacaggaaaaaaaaaatctaaaaatctttccactatccacagtttttaggtttcttctcagtttctggtgaactttcccaaatactggcacaggatgggacagaaaaccccatccacgcgaggcctggagggcttctcagctggggtcatatcttcctggcaagcctaactggctgggacagtctcttcttagaatcgggaggtgaagttcctgaggcggtgggccccagctaaggttcccagcagtgtcctatcgaaacctggcggtctgaggacacccggcagttcctggcgggaccacatgtcagacaggagaagccgggcagcttctgcggcctggggtgaggcacggcttcggcacaggtggatgatgtggtggagcatgcggctggagaagtacggctgggccagtgggggctgcgaggccatcaggttcctcacagggtagcaggccgaggacaagatgtctccggagtggctggtattgccaggggggctgttgaggagcctggtcacctcggggaacacctggttccccatcactctgtgca

SEQ ID NO: 528395 - DNA, 879 bp, Homo sapiens
cgctgggtggggggaggaggaaggagggacgagaaagaacagaggcaggagggacaaaaaggcggcggtgtcggccggtgcggcaagcgaggcaaaccgggcaaagggcactccccacagagcgacttacgagctcgggtgtcccccccccgcgacggcccctaaatcggcggaaacgtgtcgcaccacagcacaggcacctggtcgaagaggaggttcgctttggcgccgcgggcgaccaaagagccatggggccaccggcgcgagccccggggtcagcggttgctccgccccgggcctcccaaagcggggtaaccctgtgtgtccccccccaccccgacaaagttggttttccgattaaatacaaatgggggattcccccctttatcagcgtatcttgaactgcttgccctccggtgtcccccgccgcttccggtgtcgccccagaagctggattactcaggcgtgtactccacgcgcacccccgcccgcctttaacatttaataaaggaaattaatcgtcgtccttctctcttacaacaaactgaaactccaagacttaaatttttcatccgattatcatgggaatctgaggttcgtggacctctgacaagggtcattagaggtatataaccggggcgttttctttccaccaaggtaagggtatcgctccccccgcatcatctgtctgatctttcccgcgtatacccacttcgtacaatagcaattttccctctagaggcccaacaagttccaccaaaaattttacattttgcaaatgttgattcatcaaccgtgtgtacaaacagacgtttcttgtcaaacccgataaaaaaaggaattttttaaagaaaaaaaaattatcaagttcttacatta

SEQ ID NO: 528396 - DNA, 319 bp, Homo sapiens
caggccccgtaacaatgccgagggctaggtgagaactaggcaagctctgggatcctgagccaagccgcattggggctgaggtttgttcgtcgagcccagtttccctttgcagtatgcagctcctagaagcgcgttgtgtgccgtttcggagctaggccctaggtgggtccctccctagctggctatgggtgggatcctagggccagtgcacacagggcttcttcaggccaaatcagccttctgcgcgaaggagaagacgcttggagttggtttccagctgcggagaccacgaggcaagcagcagattgttcggggcctg

SEQ ID NO: 528397 - DNA, 207 bp, Homo sapiens
ccagtggggcatgcagctggtacaccgtgaggcagagcttgttgaggtagatgtagacgttgaccagcaggtcaccagtggggcatccgggtgctacagccaaccacagagcaagagaatgtgcagtatgctggcctggactatgaagcaatcctgctgcagactggcaggcctccagaataagacccaagtgcccatggtggtcat

SEQ ID NO: 528398 - DNA, 85 bp, Homo sapiens
cccccttaaggggaaattgggtttttttttaaaggcccccttttaaaggggtggattttcccaaaaaccttttttttttccccca

SEQ ID NO: 528399 - DNA, 374 bp, Homo sapiens
ctatcgatcagctagggtataagtaacctgatctcacgattgtactcagtcccggcacacgttccctattcgctgcgtgatcgatccaacgcttgatcaacttctgcttcaccatgatgcgtaagagccgacatcgaagcgatccaaaagcgaccttcttacttagaatagcctttcggaagcaagtaatccctgtggtaacactgctgacacctcctgcttaaaacccaagaggtcagaaggatcgtgaggccccgctttcacggtctgtattcgtactgaaaatcaagatcaagcgagcttatgcccttctgctccacgggaggtttctgtcctccctgagctcgccttaggacacctgcgtaaccgtttgc

SEQ ID NO: 528400 - DNA, 401 bp, Homo sapiens
tgaattttctacagaagtcaaggcagtcaaactgcggcgagatagaattgtggtggtttggactccatgattaaggtgtccacattcacacacaatccccatcagttgcacgtcttcgaaactgtataacccaaaggcctctgtgtcttgtcccaatagtaacaactccctcctggctttccgggcacgcacacgggccatgtgcagcttgtggactggcagcagagaagccacggacatcctgcacacgaggtgtctgagctgtgatcaactgagacaagatgatgatcgaaaggacgcttatagatatgtactctggataatcagactgagagtccagcacatttctgctcttcatcgtggtcccatctggttccggcccggcatgctttttgcgtgaa

SEQ ID NO: 528401 - DNA, 330 bp, Homo sapiens
aatgatatcggagctataaccgaacaggaccaaaaattggttcggggttgtctttgtactagtatacacacatgagtttagaatacaagtaataagtaacagtcttttgcactgtgggaaaggtcgtgcatgagaaatgccttacggatagttgttgggattttattatgctgttgacggtttggtttgtgtggttttgtttgctgttgattttttctctcttgctaccagcatggctatgccagacaaaccccccagtcccgggagctaggaagtgtttaggacgggtctggaatacacaccttggtagtacgccggctccagggctga

SEQ ID NO: 528402 - DNA, 190 bp, Homo sapiens
cccccccccccccccggggggggaccccccgcccccgttttttaaaggggggccttcccccctgggcccccggggggcgccccggtttttgggggggggggccccccccccccccgttttaaaaggggggattttaaaatggggggggtttaaatgccccccgggggggggaaaaccccctcctttttta

SEQ ID NO: 528403 - DNA, 286 bp, Homo sapiens
gaggatccctgagcacgaatgtcatgatcgtatcttatctcaatggatgtgctgatgcggctgcgacgcagcgcgccagtgagatcgccgagttgttgcgcataactggctggcgttacgcacactgtaatgcccgttcgcttaccttcgaatggcgcccatgatgggtaagaaatcccaggtgctgatacctgcgataattcgattgatggccaggtacgagcctgtaggagtttgggagtcatcagatagctatcgcgttgaggtttacctgcggagcaacagc

SEQ ID NO: 528404 - DNA, 511 bp, Homo sapiens
tatgcatgaccagatggacaagagggggtgataccgggggtccagtgtgcaaggactcagcagtagtgaagtggtagtccatgacaccgtgatcacagatcttatgtgagctgattccatccaccacggtctgagatcctgatgatcagatcgacatcattgtaggcgatggtgatgaccacatctgggacattgtcgggagtgtctaggtgactctccatagtggctctcatggcattcattgagcagctccggcaggatgtaagtccagtggcaatagggatgaaggggaaccgggcagccacatggccattgatgcggacacggggcgcaattgacatacttgtgctcacacagtgcgtctggcaaaagtccaaccacttctcaatcaatctactttggtgagagacgagtacagatgatgccgacaaagtcaggcttgtcctcatgcagcgccaggtgatgcgtggccaacaatgcggattccaagcctcgaagtcagcgccttgat

SEQ ID NO: 528405 - DNA, 131 bp, Homo sapiens
ggacccacggcggcagcggggcatagagcagacttcgtcgggaaaaaaataaacaaaaaaataaaggcatgccaggtacaggggtgtgcaccggtagtcccagctactcaggaggctgaagtgaaaggatc

SEQ ID NO: 528406 - DNA, 285 bp, Homo sapiens
tttttttttttccaggggccttttgggcggggcaagggctgggccccgggtttttaatccgggggacgggggccccttccaaggggggggtagggggggcccaaagggccccaaaattttggggggcctttcccttttccccccctttgggggttgccttgggggaaattttgttcccccctttgcctccccccttaaaacttgggggggggaaggttttttaagccttttcccgggtgggggcccccccttaattttcgtttttccccctttttttttgtccca

SEQ ID NO: 528407 - DNA, 142 bp, Homo sapiens
cctcggctatcatcggcaccaggcaggggggttatttctgttaatgttagtacgggtggggaagtcgaggttgacctgtttagggtgaccaagaattattccagtgctatatgcgcgcttgtcatggtaggtcgcgatgagt

SEQ ID NO: 528408 - DNA, 678 bp, Homo sapiens
  misc_feature (656)..(656): n is a, c, g, or t
cgaaggccacgaaggagacgaggaggaggagcgcaagaagcggctcggccccggcggcctggaccccgtcgaggtctacgagtccctccctgaggaactccagaagtgcttcgatgtgaaggacgtcgcaagatgcctgcaggacgccatcagcaagatggaccccacgcgacgcaaagctaccacatgcagcgcttgcactgactcaggcctcgagggtccacaagtctaaggccagcgagggccaaggagggagaggaggcaggtcctggggaccacattactggaagctgttccacaagacggacgatgagaaggaccgtcaggtcgtgacctgccccagctaccaccgccaccagcttccaggcacggatgagcccctaggtcagaaaacagactagatgccatctcgcccgctcctgacttccttacctgcgctgctcggcccagccaggggggcccgcccagccctacctggcctctccaactgtctcacactcctccagcgcccaattcaagtctcagcttagagtaaggggcttcactgcagcagccccccattaagcacttgtgcacaaaggacccgggggtacggggaagggcagaggtacaggctggttacaaggtagaagggagggtccccagccaaggggccngcatctcgtcactgggctctgt

SEQ ID NO: 528409 - DNA, 494 bp, Homo sapiens
gtgatgcatgcttcttaccggcgtatgtcaatctaggtggcagatgtaacacgaagtagaactatacccactacgtacacgtgccaagatgtcgtaccttgatacctagcgggacctgcaggatcgtcaacagttgctagcatacaggagtacggtaaatcaaggatcagaaaaggaggagacgattgatgctacttctcagacagactacgacaaatacgataaaaaaataaaagtggcatagactaccttgaagcctgactcatttcctcctcaccatgcctgtgaaagccgcgcgagctcttctatggggcgagctgcggcctcacatcgcttgggcccattccccatgggcagtgcccgctactcttgtcacagatcccttcagactgctcttctgtccaaggcccatcatctgcggctcgagctctacacgctatgcgtcatgcgaatgcttctctccacctggtgctcatctgccggtggccgtgatc

SEQ ID NO: 528410 - DNA, 124 bp, Homo sapiens
gcgtccctttcaggtaagatctccatagtatatatgcattttccatgtcaagttatgacggagttaggaatcacaaatacaataaacaatcaaaataaactgttttggagggcacgaaatatat

SEQ ID NO: 528411 - DNA, 482 bp, Homo sapiens
ctgcttccactggccccacccatccacccatcttgcctccccattctctctgtccatgggtggtgacaagctttgccttgacctgagcccatgtacctaggtttgcaccttctctggagtgaaagaggagatgagttattttaatcttgaagatcccaggtcagaacatcagttttctagtccaagcgctgcctcactgtcttcatttataaaatgagagaggggatgcactgttccccaaatctgagacccagggtgtacacgattggagccaagtctcacagctggggaggagtggctccggcacttgagttcagtttctctggctccaaatctgtagggagtgggggtctcccttagataagtaggttaagatccttttgtgattcataagcgtgatgattgggttttcatgctcatgtgtgagatatgcctctctcaagccttgttacaacatcacattacctgtctgatgttacaaa

SEQ ID NO: 528412 - DNA, 840 bp, Homo sapiens
  misc_feature (177)..(177): n is a, c, g, or t
  misc_feature (567)..(567): n is a, c, g, or t
  misc_feature (598)..(598): n is a, c, g, or t
  misc_feature (681)..(681): n is a, c, g, or t
  misc_feature (688)..(689): n is a, c, g, or t
  misc_feature (695)..(696): n is a, c, g, or t
  misc_feature (746)..(747): n is a, c, g, or t
  misc_feature (749)..(749): n is a, c, g, or t
  misc_feature (759)..(759): n is a, c, g, or t
  misc_feature (765)..(766): n is a, c, g, or t
  misc_feature (770)..(771): n is a, c, g, or t
  misc_feature (778)..(778): n is a, c, g, or t
  misc_feature (782)..(782): n is a, c, g, or t
  misc_feature (785)..(785): n is a, c, g, or t
  misc_feature (790)..(790): n is a, c, g, or t
  misc_feature (792)..(792): n is a, c, g, or t
  misc_feature (803)..(803): n is a, c, g, or t
  misc_feature (805)..(805): n is a, c, g, or t
ggttgttgaccatatgtatgtcttcttttgagaagttttttgtcatgaaatctatttcgtcccatgtaacgattcctggtgaaacaacaaaagaaaagagcatgcatgagcaccactgcttctacctgatgaatagcaaaaaggatttaaaaaaaggcctcttccactccattgggnctacctttgaaaacagtgtgaagttgggggctgacatttctttgttagcacacaggagtacaatatctccagaaagccttggccacacaagtaggaaggaaatttgccattctatgcaagtccttaaaagttaaaagtacttggttatgacttgtttatacgtgggacatttgcctttttgtgcctggatcttgcaactcaaataggctatatttcacaatagccctgttaattttacaaagatagtttccttatacttacttgaagtgataaattgcttcatcatgaacacataaccttttgttgtgacttcttggcataaacagtttcaatatatctaatatatactgtcgcaaagagtagtttttctacaatgttgtaaattcacantcttaaaaaatattttaagtcattttaattntgtgttgtttcccaacattattgtgactatcaattattttaccaaatatttatttcataaatccttaataagaattctattantaagttnntatgtnntgagtgtatcaagagttataattacatttcatcactaagaaaataattanntngatagaagtngtatannttcnncataatnctantanttgcntngagttcaagtntngaatgtttttcacattttataattcctggcttaaa

SEQ ID NO: 528413 - DNA, 1273 bp, Homo sapiens
  misc_feature (683)..(683): n is a, c, g, or t
atgtgtgtgttaatcccgcagaatggtttcttgtgggggacgcagcacaaagtggggctacacacgacgagagcccacgagatgctcctgttcttctccctttccgcggagaactcctttgtgctctctatgattgggccctagtggaccaccgaccctgatgtggtctcaaagacccaatttacgaggggcaacacctggtgaatacccaacccccacgctttttgggaggaacatctgtgcttcgcccttacataatgcaccggggggattttttgggccccttttgtgtgttacacccccaagggatgggcccttctcttagggattcacgggaaccacatgtttctggcccccatataagggtgcccacagcctgtcttgcgcccgggtgctgtggtgccccttttgcgcacccattgttgaagttcaccctgttggccaggccccgggagcaccgtgggttctttggggcctccgtagaaaggctcctcccctttgtttccccaggcttttatggtattctaccccccgtgaaaaagtctgtcccacagggcgcaccccacgtgtgagaactctcctgaggtgaatgctgcacggctggagtcacagagctggaagcacacaaaggtggggaagccaccgcggaaagccacacgcttgctgagaacacatgcgctcanacattcgttccccccgtttttccctttgggcctgtgtcacatccacagcacaggtgtttctgccacaaatggcacagcaatcttacccacccccctgagaagtggccttgaatatcaccacagaggggaaatcttctgcactttctcgctttccctcggagagggtggtccgccaaattgttggccacgttgttctcgttctgcacagagttggcataaccccacacttgttggcacttacgtagccccacttctatcactcacacgggtacacaacgaggtcctggccttgttctgtggaagacggagttacacccttcccacacttgctgaaaaaggtcaaggcctttcttggctgaatccactctgcctttgtggctgctgcccctgtggctgctgccacccaccacgctgctcctgctgctgctgcagccccacgctaaaggttgaagccccacggaagaggtcggaaggaagtcggaccgaaggatatgggaatttggtttttttgactaatccacccaaaagccaacccacttagcccagttttatttgccaaaacacaggaaataaaggcttactttctttta

SEQ ID NO: 528414 - DNA, 726 bp, Homo sapiens
  misc_feature (537)..(537): n is a, c, g, or t
  misc_feature (540)..(540): n is a, c, g, or t
  misc_feature (565)..(565): n is a, c, g, or t
  misc_feature (631)..(631): n is a, c, g, or t
  misc_feature (641)..(641): n is a, c, g, or t
  misc_feature (663)..(663): n is a, c, g, or t
  misc_feature (693)..(693): n is a, c, g, or t
  misc_feature (700)..(700): n is a, c, g, or t
caagtcttgagttaagaaggaaagatgaaaaaaagaaaaaagcaccaatacccagatttaaaaaaaaaaaaaaacgatcatagtcttaggagttcatttaaaccataggaacttttcactttatcttcagtgtttagcttgtaccagtcaggtgattaagttagaaacttacaagttgtgttataggcttatatgtgttgtagtgtgcgtggtttatgacctttaattaaaggtgtaattatgtttttaccagcaggggtttttttaacttgtgactatttgtattaaaaacaaattcttgatattccagaagcacattgaagtttgcaacttttccacccgtgcccattttttgtaaaactgcagtcatcttggacccttttaaaacacaaatttttaaactcaaccaagcctggtgataagtggaatggcttactggtttatactggtggtatgttttggattacagccagataatgctttcttttccagtcgtctttgagaattaaaggaaaaaaaatcttcagatgcaagggnttnggtgtagcatcttgtctatcatgtntgtaaatactggagaagctttgaccaatttgacttagagatggaatgtaacttgcttacaaaaatngctattaaantcctgcttaaggtgtctaattntctgtgagcacactaaaagcgacaaataantgtgaantaccatggtcactacacaaaccacaa

SEQ ID NO: 528415 - DNA, 1306 bp, Homo sapiens
  misc_feature (483)..(483): n is a, c, g, or t
  misc_feature (618)..(618): n is a, c, g, or t
  misc_feature (1306)..(1306): n is a, c, g, or t
ggccctgtgcgcgcgcacacgtcgtcggagccctcgggtgacatgcaaatgagctggctccaggtgtcgccaagagcctaagcggcccccaactgctcagaatgagacatcccctagacgccagagcccgattgaccattcggcctttgcctcgagggtacgggaatagaaaccatcatggaacattaatcgtcacgtccctggttcccccgtcgcggcacgtgctacgaggccgggtcgatgccctgtgggggatgccaccccgtcacatcgaacagtccggaacgacctcaacggcactgtcactccatccctcggtcataggctggaggccgagtgccacgctgcctaaaggtcatcgggacaccggagcgcgccacgacatgattgcaagtgttgcatgcgtgtcgtcgaccaagcgccgctaagtaagagcgaccgctagctagcgcttggggaagcttggagcctccatcgccatgnagtccggagtaggattccaagggtgctcgtttgacactcctcactcaaccgcgattcgttctaggacacgggatatccacgacagggtcgtagggggaacccgtcgaacgcgggcattccgtgtgttctcccccngagggaaccacgtggcgcccacctcactgttgccttgcccccagggtgtggtgtcccctgagctaggtgttacccgttgtcagcgcacggtattcgcattcattccacgggaagcagcgtgaggaaaggccctgacagcaaactatcgacgaattacatttccgggcaaacagatgccaaggcacaggaccgtggaaatacgacccggagaaacgccaagcgtttgacacaacgcgggtttttgacggggaacaagacgggacacccccttttccaacacgggcgggacggttcccccaatagcgctccaaacggcgtatgatccgttgagccgttaggcggaaccgtgcggtcgaaaccgaagttccccaaagttgggaccccaggggatgccgggttgcgtaagagggcgcccccattttccgccagaggctattaagacgcccagtggtcagttacgatgggcgggcaccagccacaagagagcctcgcaatttctcttccacgggcagtgaactttggcgacaggtggagcataggaaagccgtgtaggaggcaagggcgaaggcaccgtagcggcctaatactccatggcgatggttagcagaaccgttacagggaggtcggaggaggaagagcggaggccacaccatgagttaacatcccagacggtgttgggagcgacccn

SEQ ID NO: 528416 - DNA, 310 bp, Homo sapiens
cccccgtgcgcacagcttctccaagtgctggattacagagcattgaccaatctgcgtccctacccacaatatttttaggcatggaccaagtcttgtattcgtttgagccacacacaccattcagacacagagtgcgggtcctttcacgtctcttctcatgtcccgatccctgtcagctgtcattcacctgtgtggtacgagccatcggctgtggcaactctgcgtaagatggctagtcatttcacgatctctgatcatgtccactacaatcaagactgtcgagaagcacttgagcttggggtcagtcatt

SEQ ID NO: 528417 - DNA, 159 bp, Homo sapiens
gacagaccagaagagtgagtcatatgtagtacacaagagtaagcattgtagaggatgagaggtgtttattataataatgttagtagtattcggctatgaagaatagggcgaaggggcctgcgagagtatatcgatgttgaagcctgagactagattcgg

SEQ ID NO: 528418 - DNA, 222 bp, Homo sapiens
aagtccctcaacccatctcgggacagcagagataggctcaggtagccagcagttcctgtgtctgttgacagagtaggcaaagactaggggaagggcacggcctctagagactgccgccatttgaggcaacgccacagccaattgttcctgtgcccaaagaaggaagttgggcctcccttctcctcacataggccagataatcagtctgaggcaggggtgagg

SEQ ID NO: 528419 - DNA, 111 bp, Homo sapiens
  misc_feature (29)..(29): n is a, c, g, or t
  misc_feature (67)..(67): n is a, c, g, or t
tatagaagaatatagttattttaattgtnatattaactgtagggtgaggaaaggggggggggtcccnttgtggtgaactatgttatagcttgttactcatagtttcttttt

SEQ ID NO: 528420 - DNA, 808 bp, Homo sapiens
  misc_feature (267)..(267): n is a, c, g, or t
caaccgtcatctactctaccatctttgcaggcacactcatcacagcgctaagctcgcactgattttttacctgagtaggcctagaagataaacatgctagctttgattccagttctaaccaaaaaaataaaccctcgttccacagaagctgccatcaagtacttcctctacgcaagcaacccgctagtcctataatcgcttctcaataggcttatcctctctcaagacaatatactctgccggacgaatagaaccagtaaccaatanctaccagatcaatactcatacattacataatccataatggcatatagcgaataaacactcaggaatagcccccgtttcacttctgacgtcccagaggttacccaaggcacccctctgacatccggcctgcgttcttctcagcatgacaaaaagctaggcccccatctcaatcatataccaaatctctccctcacgtaagacgtaagccttctcctcactctctcaatcttatccatcataggcaggcagtttgaggtggattaaaccaaagcccagctacgcaaaatcttgagcatactcctcaattacccacataggatgaataatagcagttctaccgtacaatcctaacataaccattcttaatttaagtatttatattatcctaagctactaccgcattcctactagtcaagttaaagctccagcaccactgacctactactatctcgcacctgaaacaagctaacatgactaacacccttaattccatccaccctcctctcctaggagggcttgccccgctaagcggctttttgcc

SEQ ID NO: 528421 - DNA, 715 bp, Homo sapiens
taggtgtcccctcagaattaattttctggattgtcacaacgtattcaagtagtgtccttgaacacagccacccagcccttagggtggtccctggcgtgtcctgtgggcgggcagacttcctgagggtgcagttgcggggaaacagagaactgcttcgagcctggccacctttccctccgtgtgccggctgcttctaggagatgctgtgggacggtgcccggcttcgcgggtgactaccatgccctaaggagcagagcctccaggatgcccccgggctagcgctggacgctaagacgcccagaacctaatcacagtcagcagtttccctccactgacagtgatctgcatggtccattcctggcggcctgggggcctcgtctacagttcaacctggctggcttccccgattcctccccaggggagatcagtgtcgtgtgtaacctgggacaagtcactggggtcctctctaccagggagtgcctggagcaatttcaacccccagctcagctgcagccctatccggggtcagctctccacccagagacccggagcttgctcggagattgccggtctgccccagctcggggacaagtgaactccagaagtatgcagacttggcagatgccgcatgctggatcctgggcatgagggctgggctgacactcgtccattcggtgcatactgccttgaattttcactatccatcattaaacaa

SEQ ID NO: 528422 - DNA, 109 bp, Homo sapiens
taaccgagacaagaagagaaaatccaaataagctcaatgagaaatgaaacaggagatattgccactgacaccagtggaaataccaaagatcctcccaggctactatgaa

SEQ ID NO: 528423 - DNA, 216 bp, Homo sapiens
ctgctatccttgggtagcttgctgcatgattggacgtgggagagttacgatgtcgccacagtttactgagagaagggctaacacggcctgaaccgatgcgtgtttgtgggctagaatacacaccacatagcgattggacttaatgtggctgaggcaccccgattatagcgcatcgttactgcctgactgggctaacctgtaccttcatcaaaggtg

SEQ ID NO: 528424 - DNA, 436 bp, Homo sapiens
tgtcactgacaaggagcccgaggtatcattcccctggagaatctgagcatcgagagttggacgacccccggaacacgaactgctttgaactttacatacccaacaacaaggggcagctcatcaaagctgcaaaactgaggcggacggccgagccggtggagggaaaccacatggtgtaccggatctcggaccccacgcaggaggagaaggacgagtggatcaagtccatccaggcggctgtgagtgtggaccccttctatgagatgctggcaggaagaaagaagcggatttcagtccaagaagaggcaggagcagccctgagcccctgaccccaactccattatttattacggagctgacccgcctgggtggccggaccccatgggccttggggctgtggatcctggttccctgtttggaaaattcatcacctcta

SEQ ID NO: 528425 - DNA, 772 bp, Homo sapiens
cgggcggcccgagagctccgggggccgttgcaggccggccaagcgcccgccatgcgcgctgcccgcgccgcgccgctgctccgagcgtgctgctcctgctggggccgtggctggaggctgcgggcgttgcggagtctccgctgcccgccgtggtccttgccatcctggccctgcaatgccgaacattcgctggcccactacctgggcgctctggagcggctggactacccccggtgccaggatggccctctggtgtgccacggaccacaagtgtggatcgatgaccacagagatgctgcaggatctggctggcggtcgtgtgtggctcatgactatgctgctgtggtctgtgcggcctgagggcgagccccgtgtactaccctagatgacgagggtccctaagtcactggaccaatggaagaggccaccaggtaatctgactggagcgtgaagcaggaagccctcaccgtttgccaggacctgtgagggccgactatatcctggtgttgcggacacatgacaaccattctgaccaacgaatcagactctgcggcattctcattgggtgcacggggctatccagtggttggccccaatgcttggactcccagacctactacttccaaacttctggtcgtggcgatcagccccccaggggctactaccgctcgcactaggcgatgtaactttccccaccaagaatccgccagcgaccgcgaggctgcttccgctgatccccactgtgtccactcctagctttccttgccatccc

SEQ ID NO: 528426 - DNA, 887 bp, Homo sapiens
taatcatttggataaggagtcccacgtttttatttgcactgggcccagcacattaggtagccagtcctgactagcagatagtagcattaattctatttgaagtcaaagttgttgaaagtgtataagtggcctggctcggtggctcatgcctgtaatcccagcactttgggaggctgagatgggtggaacacctgaggtcaggagttcgagactagcctggctaacatggtgaaaccccgtatctactaaaatacaaaaaattagcctggcgtggtgatgggtgcctgtaatcccagctactcggaaggctgaggcaggagaatcgcttgaaccccgggaggtggaggttgcagtgagccgagatcgcgccattgcactccagcctgggcaacaagagtgaaacactgtctcaaaaaacaaaaaaagtgcataagccagttgttttattatttgagtttaaacaaatgggtgcctctgttaatgtttaggctaagataatttctcagacctagttttattatggataatttaatgttttcctgattttccctgggtaaaaagacatagggcctgattacttccaacagagggacgaaaggagagtcttcgccagattgcaatggatgaaagcttccggttcagatctgtgccttgcttgcaacaagttgttgatcactccaggctatacgtcaggaatctttcagtcatcccaattggtctcctaattttactggctgttcagggaactcgtgggaacttcttggtaattgcagacattcaaatgatcccctgtgaatttaacgggcagtctccggctataaacatcacctggtggttttgcaccacaagtttacactcatttggtccgcgtttgtcacaatcgatga

SEQ ID NO: 528427 - DNA, 146 bp, Homo sapiens
cgtcgacgtttgggtccccagcactgttaggcatgttggtgtgagcctgtaacttagagcctgtttcaaaatacaacatagggaaggaagctggggatgtgtgtgtgtgtgtgtgtgtgtgtgtgtgtgtgtggatgtgtagtgag

SEQ ID NO: 528428 - DNA, 465 bp, Homo sapiens
ttcggccataatggccgggaagctatggataattaaaccgtggcaattgagctaaactacttgactaaaatggtaatcaggctttatgaggatcctccaaacaccaccagttcccttaaggagcattaaagcaggcagcaacccagttccagggggaccttcaagggcagttgttcctaaaacctaatttcgtaaaaggattttacctagcaaaccagaaccgcatgaccccaaaaaaaccactggaaaaaggaatggaaatcttaccaaaagctggaccttttaatcctaataaaattagaaggtcctaaggtttctccttaggcattaatgcgtccacttaaaaaggttttaaaatttagggtttccttggttaatgtcaaggtaaggaactgtggccatgacctggaatggttaaaaccacggttggttagcattctgtgagcaggaaaccttatagggata

SEQ ID NO: 528429 - DNA, 447 bp, Homo sapiens
aggattcacactgcacagagtgagaccccctatctcaagaaaaaaaaaccaatttgtttcataattatgtaaattaggcctgggcatggtggcttatgcctgtaatcccaacactttgggaggccgaggcgggcagatcacttgaggtcaggagttcgagaccagcctgagcaatgtggtgaaaccccatctctaccaaaaatagaaaaaattagccatgcacgcctgtggtcccagctacttgggaggctgaggcaggaggatcacttgatcctgagaggcagaggttgcagtgagttgtgatggtgccactgcactccagcctgggtaatacagtgagactccatctcaagaaaaagcaaaaaaaaaattatgtaaaatacttacatggttccaagtcagatctaacaaaaaaagtatattgaaggaagtttagtttatatccca

SEQ ID NO: 528430 - DNA, 431 bp, Homo sapiens
tcccaaactgtcgacaggttgacgggaggctgaggctgggcctgggaggggccaccaaagatgcagtgatctgtggcctggagtaggttgctagagaagcattagctgtgcctggttgaggtcaacttgagaaagttcaggtcctgtagaaaaggctgggaggtaggacctgggtctaaagaggccattgtagtgatggagctgttcctgtgtaggctgtggtgaggcagtagcctcatctgcggaggctgccttgacgtagtggtatgggccttgataggccattgacagtcatgagcttggtctgtagaggctgactggagaaagttctgggcctggagaggctgccgggaggtaggagcataatgtagaatcagtgggcgtgttaagcttgttttcctgcaactggatgttcccacgtttcgctgtca

SEQ ID NO: 528431 - DNA, 443 bp, Homo sapiens
cacgagggtcgccgccgcgctggtccagacgcggatgcagggcacggggggacacagctccgcgccccctgccgacgaggccgtgaaggctctcgacaagcggctcgccgccggcatcgaggaggtgaccgccgagatcggcatcctcagcggcatcgtgcgtgagctggcctcggtggtggccgcccaggacggcgacatcgaccggctgaaggttcagacgcaagcgcaggctcagcttcaggcccaagccgccgccaagccggccgcgccatcgcgtccggcttcacggccgaatccaccggaagcggtaccgccctctcccgccgcgcaggaggccgcgccgatgcggctcgtgccgcgcacgacgcctcccgccccccgcctgtccgatccgttcgagacggtcgcggacgagactccgctgattcgagccttcgacg

SEQ ID NO: 528432 - DNA, 380 bp, Homo sapiens
ctccctgtgtaaactgccaaaaagccttgggatttgtaagctgttcttacccctttccttgtttcattttgataaatgttttctcataacttggtttgtctcttcttgccttcaggccgtcaaactccaaatggtcatgcaaccagagcctcggttgatggcttagtctgctgggaacccttagataggcctgtgagggagatctgactgatgtttcctcaaaacagcaccctctgtcagtaggaagcagttaagatgggtctttgtccttatccttaccctgattctaatggtagatagatgtacttctttacaggggggaatgagacagccatgtataaagggggtccccaggaacctctgactagcctaagcactgg

SEQ ID NO: 528433 - DNA, 356 bp, Homo sapiens
  misc_feature (123)..(123): n is a, c, g, or t
caagacgatccatggtaaacaaggtatgtcatatcctcacagatgggaattctgtatcttggtctgaaagtggagttagttttttggccaaccaatttgggcggttacagaaccaaacactgnctccacagttgctgcaagcatcatctcacttcttcattgtagctcttattctgtgttcacatttcccgtgggtgtatctgctcaggtggaagttaagctcatgtgtctgccctgtcgaggcaagggattctggggcatgtgacatttcctgtattctcacttgggaaatgtcgaagtcataatgtgagcagttatcccagacgtacgatgactgtggcacatatatcagtcgc

SEQ ID NO: 528434 - DNA, 288 bp, Homo sapiens
  misc_feature (7)..(7): n is a, c, g, or t
  misc_feature (173)..(173): n is a, c, g, or t
  misc_feature (175)..(175): n is a, c, g, or t
ccccccnacaactctaaatgtaaaaacctgcacttttcctgggggtgggcagtggggtcgggggttggggggggccggggcgatagcttcaccctggactaagtgtttggggcaacctgctcggctgtatgttttttgcacgctcacccggttaagggggggtttgtccctgntnccgcctccagtcctaagggaggggcttgcccccccttttacattccaatttttaaatctttgaaatatggggttagaaattaatttaatgataaaacccctttgaaaggtcca

SEQ ID NO: 528435 - DNA, 237 bp, Homo sapiens
  misc_feature (14)..(14): n is a, c, g, or t
  misc_feature (109)..(109): n is a, c, g, or t
tttatatatatatngttttattttgcagtctcgctctgtcacccaggctggagtgaaatggtgtggtctcggctcactgcaacctccgacccccgggctcgagcaattntcccacctcagcctcccaaatagccgggaccacaggagaatgccaccatgcccggctaatttttgcaccctcagcagagacggggtcccaccacgatggccaggtccgtcccgaacttcttgacctag

SEQ ID NO: 528436 - DNA, 312 bp, Homo sapiens
cccaccccccccccccccccctggtttccccccctggcccggggggtcaagtgggtttttctggggcctggcccgcttttaggattttttttcatcccccctctgggcccccgccttttagggaaggaggggtgggggctagtgggagaccccacccaaaacttagggttagggccgggtggggggaggctgggggcctttttgggatggtttgggtttggttttttttaaccggggcatattggggtccggtccagctgggaagaaaaaaatatatccatggtttcccattaaaaaccggggctccctgga

SEQ ID NO: 528437 - DNA, 134 bp, Homo sapiens
gtgctgtgcctgtcctgctgcccagggctcagaaggaaagcggttcggctccctgcccccagccacttcccgcactgtgcccgcatctgatgcccatgctcacgcggtggctaattctggcgtctcatcagacg

SEQ ID NO: 528438 - DNA, 434 bp, Homo sapiens
acatacgggtctcctgagcctcatgctcaaaatcgcagttcatgcataacactatgtacatgctcactgaatattattctgaaaaataacatcgtatttggtcagcccaatttcatacctcctatctttgtccataccccaaataagaaggttagaagagaaggccaaagtcatctgccattctttcaaatctttgcccaactccctgctgcctgccataaaactcaaaatttattcaataatgcattcaaaatgcttctgaaattagagtagagcaatcaagtataatttttcctacaaagaaggctcaaatttaaatgtgctcaagaaacaaaagtctagttgtcccaaggctttttagctcccttcatatcagtaatgccagtaggacaaatcctaataatctaaaatagaattatgtagtgcttacacac

SEQ ID NO: 528439 - DNA, 145 bp, Homo sapiens
cataccccatcaacgacaatatactatcatcaacgctattatacttctcaacgctttatgcttctcaacgctttatactatctcaacgactttatacttctcatacgctttatactatctcaccgactttatactatctcaaccg

SEQ ID NO: 528440 - DNA, 1075 bp, Homo sapiens
aacctattgtttttgtttttgtgttcttgtttttttgatttttgtttattgtttctttttttgtgtattgttgcttgtttgtggacaaaaaaaaaaaaaaaacaagaaagagaaagaaaagaccgggtgagaaagcacatgaccaccattgtttattttttggtgggctttatttctcttctcacgttttttcccgttttgttgtgagcaccccctttttttgcttgggggcccccccccgtgtggtatacagattagcccggcggtttctagtcgcgcgttttcgttgtatgcgcagcacgcggcgtgtggagttcttatacggggggccgcaacccctcttcgcccccgggtttctggggatgattatcccccgcgctcaatttcgcggggcagataagctccgggtctcattactcacatgggggggactccccctccgcgtcctcgtcatgtgcgggagactgttctttccggggtgcctcatgttcctgggggaaccccccccaccattgttcccaggtgcgggttcttcgccagggtcgccgcccactgtttagatgttgcgcccccaagcccgttgattgagcatcattgtgctctcgcccccccaagtgtttttttcgcaacaacggtccccctcttataaaaccgggcgtgctaagagcatctccaccccccgacactgatgtatcttccgccccctccctaatttgcctacaggtatttggttgttgttctggtgtggggagaaaatttttgtgtgaacttcccctcctctctgcggccccaccttcgctaatccccccgccgctagatatttcaggagtcctttgtgacattgccccacttgcaccgacgaagcaaatcttgtgggtgggaaaacatttcttctgggaggacccttgtacgttcgttcaacgccttcgggaatatcgagtgattatgagtccagaagcgacgtaattcttgttctcagtttccccgcaacacgggtatatctctttcacccggtttctgttatttctggtttctccacccttgtgcgaacctcccccaacaatagaacaagaaa

SEQ ID NO: 528441 - DNA, 281 bp, Homo sapiens
taaaaatagaaacttgattttccaaaaggtcctcctgtagataacaagacatgcatctgctctccaggcccgggactggcagcggggacctcaggcaggcaggctagggcgagggcctctgaggcaagatcagaggttgggctgagacagtcagctgcacaaaactggccatgtcacgagcaccacagcgaaacttcatccatgctctggcaggacaggaaagcagccggccccttgggagtatacgaatatttgccatatactctttgcttgttccgctg

SEQ ID NO: 528442 - DNA, 165 bp, Homo sapiens
  misc_feature (102)..(102): n is a, c, g, or t
gacaggtggaaatcaaccgcccgcggggttgcggggcacaaagaggcagctggcggctccgctgacccattaccgcctccctggacgaagtttgggctcggnagccgggtgatgcatcctatagaaggcgcagaacagcacgtgttctccccggtgcccggggct

SEQ ID NO: 528443 - DNA, 280 bp, Homo sapiens
cacgggggagcaaaattgggtcatcatctctgcccgctctgcttgatgcccccatgttcgtcatgggtgtgaccagtgagacagtatgacaaccagcctcaatgatcactcagcaactgcctcctgaaaccacccaaccttgcttagacacccctgtgccaacggtcactccactgaccaaccttgtggtactcagtggacacgtgacctcactgacccaccagtcccactgccaatcaccttgccaccccccgacacgaccttggtggactaggacccc

SEQ ID NO: 528444 - DNA, 305 bp, Homo sapiens
gatacgtgtggacatcagtggtgaggggtccacagtaaaagtatttctctaagctagcgtaccatgcacatgtgaataattctatcccgggtgggtttaccggaccgggatcgagaacaggtatcgagataaagctacttgtatgggctgcagcgcaccaaagaaaattccatcattgtgctacagtcaaaaagatgagggactgtgctctgccaatgtgactcggtattattgaatccaagatacagaacgtgtgatgttttcacctatactggccgtcggttgacagacaataactttgttag

SEQ ID NO: 528445 - DNA, 704 bp, Homo sapiens
tgggcatggtggctcatgcctgtaatcccagcactttgggaggctgaggcgggaggatcacttgagcctagaagttggagactaacctggcgagaccctgtctcaaaaaaaaaaaaaaaattcaattttagcttacgcaggaatttggacattttaacggagcggaattcttcttcttaccttcttacaaaactcaacactttaacactttttgttcaccttctcagaaatttatttatagaagtggtggattttcacttgggtctagttttttctcctttatattagtgtggataatttatattgtggttactctcttcttattttactgtggacttaccagaagaattattacaaaagattactgtggtgcaaacaagaattgtggttacggtggtctcaaaagaaagcttatacaaaactatacaatttataaaagaaaattagcacaagtcttgtgagaaaaatatagaacagacatatagttacaacattattgtgtggttatatgtggcttaaagaaaacctgtggtttttataattattctacaggccttttggaggtgtttaaattggggaatagacataataggggtggtctttatagttctcaaggcattgtgttaagggaaaatatccttcttttatattctctctatacaattattagaattacatgtgttcagtggcaatattattgactg

SEQ ID NO: 528446 - DNA, 185 bp, Homo sapiens
gttgaaggttagatctagagcatcccctttataacccaccaccaataacttactactcatgccaggtctctcccattactcaatctatcctataattagacaccaagttattaggttacaacttccctcatgatgtaatcatggaagatagaaacttacttgtacatgtactcgatttgatggat

SEQ ID NO: 528447 - DNA, 120 bp, Homo sapiens
  misc_feature (120)..(120): n is a, c, g, or t
gggaagatgagcacggagggtggtggccgtcgctgccaggcacaagtgtgccgccgcatgtccttcaggcgcggagcaaccggttttgacaaggcactcagtaatgctgaattgaaaagn

SEQ ID NO: 528448 - DNA, 162 bp, Homo sapiens
attttgaaaagaaacctacaaaaattgtatttccatatttcatagtcagccaaaaatattggtcaactcatgctctctgcaaggttctgcaaaaattgcggagtggtatagacaaggcaccattgcaatatataatactttttgggtattggcccaaaaatt

SEQ ID NO: 528449 - DNA, 168 bp, Homo sapiens
atgttgcacgtggcatttcatcaggcgtcagtcagcaagtcagcaggttcaaggcagggtgcatgtgtggctcatgcatggtggggcatgcatgcaggctcattgtttttttgtgcaattcttcgcatcaatggccccatttgggcccaaaagccggttcagcggggt

SEQ ID NO: 528450 - DNA, 364 bp, Homo sapiens
gtgcgagccaaacgatcagctaatttttggtattttgatacagacggggtttcaccatgttgcccaaactgatcttgaactcctgagctcaggagatccatccacctcagcctcccaatgtactaggattccaggtgtgagccaccgcactgggcctaggatcactttattggcagtgataatctgattttttttttttctttttttttttttttttttttttttttttttttttttttttttttttttttttttttttttttttttttttttttttttttttttttttttttttttttttttttcctttttctattcccgggggggaaaaaaaatattgttgagggggggggggggacgacaa

SEQ ID NO: 528451 - DNA, 140 bp, Homo sapiens
tcgcgctagaggtcccagttctggtcgcccatgagtggacccctccccccaacttttcatgtttcttaaaggcatttgggttttttaaaatctgtacagcaagagcaacttttgctgtcaaataaaaatgagaaatgcag

SEQ ID NO: 528452 - DNA, 108 bp, Homo sapiens
cgcgcgacatggactacagatatagctgcagccctgagcgcttcatcacttataccacgggcagaataagtctccatgtaggttgtattatgtgtgctccacattttt

SEQ ID NO: 528453 - DNA, 323 bp, Homo sapiens
  misc_feature (3)..(3): n is a, c, g, or t
ggnggggttttcccttcacccccccccaaaatcttttccctttttttcccgggggggtctttttaaaaaaaaaccccccccggaaggttgggggctttggggctgtggctaattttaccccctttttttttttttttttcccccccttattcccccccccgggccccggaaaccccctttttccttaggccgttttttgggttttctttaaagcccccctttttttttcccccctttttttcctgctttccccaaaatttttttttccctcccccttgggccccctttttttttttccccttaaagcttttgggggggtttta

SEQ ID NO: 528454 - DNA, 1056 bp, Homo sapiens
gcgctacccgcttctccccctgcttgttttctgcggactggcggtgcggggggtggtaggggggcctgtcgcgtgcggtgggggcgcgcgggtgggacaggggcgtggggcgccttggggaggtcgcccgcccgtagtcctgtctttcggtgctcccccagtggttttggcgctgccttgtggggtggggtggacacgggtatctattgtggtggcctttgtggtcttaccacagggcctggggggggactccttgggcgcgctcggctcttgggggtaccaccgccttggttgacggggaatgtccaggccaaacgtacccctggtggaaggggtaaccaggatgtatcagccccgggacaaggggaaggaagggatgggggcgcccaaggcaccctggatgagttcggcctacctgtttgcggggtttctttgtaacctgggtgttcccctcagaggagttccctcaaacacacccctgggccccacgagaccacgagggcctcgccgaaggggaaggaggcctcggccttctgtgccagaccgcgtgcagcacgtggtgaaagttctgttgggtgttttagagcttttcttcacagaggtgggaaatgagctcctctttgccttcctgggccctccgggggccttttcgaggtcagccttccccaagccctctacctcacggtcctcgttctgccctcgaggaaccctccccccgggtgatgttctgccaaagtctgtgctgtccgtgccccacggctgggaagaggctaatctggggaagggggaaaagaaggccgaggcacgaatacaccccccgaagttatgggtttgcgaactccgccctccctgggagcctggagttgggtcagatgcctgtccttggaggggaacaaggttgactgcttaggaaggcgccgatcgcacacacagggctgccacggcctggcccctctttgggaaaggttgagagtctgagacgggcagccctgtcccttcctccagatccgctctggttttttacaccggtttgtttaataaagcctgtaaccgcca

SEQ ID NO: 528455 - DNA, 928 bp, Homo sapiens
gggagcgattcggtggcacgtggagccacgggtgagagtagggggctgaaggcaggcagcagcggccaggccgcctctgtagaccgttgggtctcgggataccccgtttcttcctgtaggtgtgggacgtgcggtgcgggcggagatggacactcccccgcctctccggaattgcggagtcgggaaaccccgatgatctccctgtgtcaccagaccagacgcaggttcgcaggatgcgtttcccccgagggctttcttgaaagcccaagggcccttcaaatgttccgttgctaccaggggtgcccgaaagaaaggccggtgacaccgagcggttgaaatggccttgaagccagtgtttgtggcaggcacttcaacggcggagaatcttggacattgggttggaaacccggctcgatttgtgaccaccttggggtcccgggtaccggggaccactcggggtgggacttcttgaggcgcgcccaagggcacctttcaggacacaacgggaccccagcacacaggctggttcggatccaagaaatgaccgactccccaaggctgaggcagattgagttctcatattcagacaaaagccccaaagggccgcaagttgcttgacaggttcttacaccccgggcctcacatccagcttccaaaagtcccatacggaagcgaacccactgtgactaattctcggcgcgaacagtgcgccaaattctgactcttgcagatggcagaatgtatttcgacaagacgctggaaactaaacggggcttgacagtggcagaggtctgaacaacgctacagcccacttgcgagcacttcgcgcacatcgggaacggaacggtggcacacggcggtcctcagacgacgcgaagagaacgcctatgatgatggataagaatatcgaaggttcttgaaaaggctt

SEQ ID NO: 528456 - DNA, 245 bp, Homo sapiens
tacaaaagcggaccctaatggtgcaaccgctattacaggttcgattgttcaacgattaaagtcctacgtgatctgagttcagaccggagcaatccaggtcggtttctatctattataaatacctcccagctcgaaaggacaagagacatgagaccaacctcacaaacgcgactcagagataattaatgattcaatcttaacctaattaactcataatagatccagccctagaacagggcacatta

SEQ ID NO: 528457 - DNA, 144 bp, Homo sapiens
aaggctgatgctggagtggccagtagaggtggtggagcagagcagccatcttattaagatggggctagtatcaggctagggtttatttaaacagcacacaacatgtttatggttaagaaacattattttgcttatcagatgtaa

SEQ ID NO: 528458 - DNA, 121 bp, Homo sapiens
ctcacgtaacccgcgtaactcaccctaacccgcggaaggcggaggtggagcccgagagggaaccagcggggaaactgaggctcggggtggagcgcaggattgtggtacgcgcccagactgc

SEQ ID NO: 528459 - DNA, 911 bp, Homo sapiens
gagatttgaatcgcgggacccgtgggcagacggtggcaggcggcgtgcatggtgtgccccgacagtcgccccactgacatggcagcccatttctcaagtgaccacgcggcatctctacagttcaacgaagctggcccttcttcggagggcttgtgcactgaatcccggagacggattggccgaggactggctgtcatccacttgccccacatgagaacgagccagacttgtgaccatgatgtatctgtctgcgttcaaggcgcgtggaaggctgggagccagatgacgaccccatagaggaacataaaaaagcattcgtccggatctgcgctttcactttctgtcaagaagcagtatgaagaattaacccttggtgcaatcgtttgaaactggacagagaaagagccaagaacaaaattgcaaaggaaaccaacaaataaggaagaaagaatttgcaggacactgcgaacgaaagtgcgccgtgccatcggagcagcttggctggccatggattgcagggctctgggccggagcctgcctgggtcccagcagtggctgcaaccagttcacaggggtttattccctggtgccaccagaaattccctggtgggcccccttagcaatgtccttaggcaaaggagatccagcattttcaaatctaggatgtatcaaatgtgctcttggtggtggtatctgcaaagttggacaacagcaggttgcttcctgcctgttgcagagggcaatgactagatgcgtaaacaagcaggactgactactcactcgtcacaccactcaacaaagcgaggcacccagaagggacacaacagaaataccagggacctacccacggtggcaaacggaaggcgacgcaagaaaggagagggaccgagaggcaacacgcgaaagaatgg

SEQ ID NO: 528460 - DNA, 215 bp, Homo sapiens
ttcacgagtacgtcacttttggttacatatactgtagtctattaagtatgcaatagcatttcataaaaaaaagcacataccctaacttagaaatactttatcgctaaaaaaatgctcataacaatctaagccttcagggagtcttttttttttttttttaaaaaaaatgggggtctggctctgccacccaggtgggttttgcgggggcttgatca

SEQ ID NO: 528461 - DNA, 205 bp, Homo sapiens
gcgccccgatcagtaagatctaccctggcccttttcttcccgaggaggctgaggggtctcactggtactgccacctatctccatttccaggtgttttctgtttcgtacttttccgttttcacttcatcatttttctgttgcagaccacatctcttctttcctggggcagcccctctcatcttcccctctgcatactgatcggggt

SEQ ID NO: 528462 - DNA, 118 bp, Homo sapiens
  misc_feature (7)..(7): n is a, c, g, or t
  misc_feature (28)..(28): n is a, c, g, or t
  misc_feature (34)..(34): n is a, c, g, or t
  misc_feature (70)..(70): n is a, c, g, or t
  misc_feature (96)..(96): n is a, c, g, or t
aaatgtnattttttttctggggattatnaaattnatgtccctttgaccagtcgtagctggaagcgtatgnaaatatgtttccattgtgattgaaanagcaagctgagatgggctgatc

SEQ ID NO: 528463 - DNA, 426 bp, Homo sapiens
aatcccgaacttgatggaaacctgcttctcctactccggttattgtggactcccacacagccaacaacagaagaaaagagtttactcgaactagcaagtagatttggataatttcggaacttagaagatattgacacaacagatatcaatctggatgaagatatataggatgatcgactgtaatgctctccatctacctgactaaacagatcatcattatctataggtattgattgctaccctgaccacagcgcttaggactatgagaaacttcttagatttccatatgtaaatgctgtggaccactgggagcacaatgcccacatcatcttaagaagagtatatgtgcagcatttaaatcactgtgtataccttgtaagctaaaacagacatgggctttgatttttttcatactattagaccata

SEQ ID NO: 528464 - DNA, 394 bp, Homo sapiens
  misc_feature (169)..(169): n is a, c, g, or t
  misc_feature (234)..(234): n is a, c, g, or t
tgtgtctgtcatcaagactattctgtgtgaacttagttagaaggtgatgaaagtggtgccatgtgtcaggatgctctagggctcacttctgtgactgtgcacatggattccatgaggaccactgtgagctcaactttgatgatgtggctgaccggacacattgcaggcntgccttcctccttcaactactgggagcctcaggctatgcttgtatctgtcaggctagattaaaanacaggaaccaggctagaaagatggctctctctataagtactcttactcaggtaagagcactgactgctctcccaaaggtcctgagttcaaatcccagcaaccacatgatggcttcacaaccatccctaatgaaatctggtcaaaaacgcccgcgaattta

SEQ ID NO: 528465 - DNA, 159 bp, Homo sapiens
agatggcgggtgaaaaagttgagaagcagatacttaagagaagagacccgaagccaagaagggttgatgcttggtggcaaggtgaaaaagggtaacctcaaagcttaaaagcccagagggggagccccattgcagcggcaccctgttcctgttcagagg

SEQ ID NO: 528466 - DNA, 294 bp, Homo sapiens
  misc_feature (160)..(160): n is a, c, g, or t
  misc_feature (227)..(227): n is a, c, g, or t
gtcgacgtgagagttacagctcttaaagatggcaccgacccaggccgggcgcagtggctcaggctgcagtcccagcactttgggaggcggaggaggtgaatcacgaggtcaggaaatcgagaccatcctggctaacatggtgaaaccccgtctccactanagatacaaaaattggccagcatggtggctggcactgtagtccagctacttgggaggctgagcagganagtggatgaacccgcgagcagagcttcagtgggcgagatcgtgcaatgcatccacctgggaacagag

SEQ ID NO: 528467 - DNA, 154 bp, Homo sapiens
atgggaatgacgttagactccattgtgatggaccccaagaaggacgtcctcatcgagttctacgcgccatggtgcgggcactgcaaagcagctagatgcccgtgtacaacagccctggccaagcaagtacaacgggccaacaaggggccctggt

SEQ ID NO: 528468 - DNA, 264 bp, Homo sapiens
gtccgacggattgcggacgtgaagatggttgatccccggggaataacccacttgcgcttgcgcatttgccgcgtcgtagacgccaccgaggcgaacataggatgcggacaggcgtattgtgctgtttggtgtatcgggcgcggcggcactgacgccgctggacaggtgcaggctgcgcgacaggctgagatcaatattgccgtcaaagatgagaagatcgcgcgtgtagagcgaaagcgatccaaagccgcccttctggctctg

SEQ ID NO: 528469 - DNA, 149 bp, Homo sapiens
ccccttttttttttcccaaacctttggaattcccatgtttttttttctcccccgaggattattttggaaaggttttttatcccctcccccctttttccattttttctttaaatttcctcccaaaaattttccctttttttcccctttta

SEQ ID NO: 528470 - DNA, 154 bp, Homo sapiens
cccatcctccccaaaatagccttgtgatttcggaagtatggactaaaatcacactcctccttaccttaccgcttggactctggtggctcccaactcgccgtcagaccccacctgccccggtggtggaaagcgcctggacagaccatgaccacag

SEQ ID NO: 528471 - DNA, 118 bp, Homo sapiens
tagaagctttcgtcagttgcgccggatgcaaggaactggaactggtgcatcgcctgaccgtgacacctccggcctgttgatgatcgccaagaagcgcagatgttgcgccacttgcaca

SEQ ID NO: 528472 - DNA, 299 bp, Homo sapiens
  misc_feature (15)..(16): n is a, c, g, or t
  misc_feature (22)..(22): n is a, c, g, or t
  misc_feature (34)..(34): n is a, c, g, or t
  misc_feature (71)..(71): n is a, c, g, or t
taccccggagctctnnaggccnagaacttttcantcagcctctacagaccaagctcatgactcacaatggnctatttaggcccataccctacgtcacggcagcctccgcagatgagcctactgcctcacaacagcctccacaggcacagctccatcgttacaatggcctctttagacccagctcctgcctcccagccttctctccaggccctgaactttcaggcccagctcctgtcttgtgttggcctatacaggcctggcatcatcctttcaacagcctctataggcccggcctctag

SEQ ID NO: 528473 - DNA, 415 bp, Homo sapiens
  misc_feature (349)..(349): n is a, c, g, or t
  misc_feature (351)..(351): n is a, c, g, or t
  misc_feature (353)..(354): n is a, c, g, or t
  misc_feature (365)..(366): n is a, c, g, or t
  misc_feature (370)..(370): n is a, c, g, or t
tcactgcagccctgaactcttgggctaaggatcctcctacctgagcctcctgagtagctaggactcaggtctccctctgttgtccaaggctggagtgtagtagtgctatcgcagctgactgcagcctcaaccttccaggctgaagcgatcctcccacctcaacctcccacgtggctgagactacaggtgcttgccactatgcccaactaatatttggaattttcgtatacgtggattccagaggggtgacagcgaaacgtgggaccatccagttgcaggaaaacaagcttaagacgcccactgattctacattatggctcctacctcccggcagcctctccaggcccanancnntctccagtcannctcnacagaccatgctcatgaggcggatatgctcatacgcgatgcatat

SEQ ID NO: 528474 - DNA, 207 bp, Homo sapiens
tatccgtcgccctggccaccaccgcccgggccgagaaccaggactcacgcctgcaggtgtacaacgtcccggcccacgaactgcgggcccgggtcctggacgtcgagcagatcgcccactcctacctgcgcggccaccaccccaccgggctggacgggcggcaccgacagcccgtcgatgacacccgcatcgacaccgccatcgcca

SEQ ID NO: 528475 - DNA, 1477 bp, Homo sapiens
  misc_feature (104)..(104): n is a, c, g, or t
  misc_feature (107)..(107): n is a, c, g, or t
  misc_feature (139)..(139): n is a, c, g, or t
  misc_feature (423)..(423): n is a, c, g, or t
  misc_feature (459)..(459): n is a, c, g, or t
ccaaggtaactatttaggaacgtgcacgtgtaggccaggatgattacttgagagtatagagcggacgacttgacgacagataagcgttatgaattggttacaangantatcgcgtcatgttactgagactcttgcactntaggtgagatcccctaaaagacccatgtggtacgcaagcccctgatcagcgtaggtctcatgtacgataccctgtgacaccgtgaggataccctcgttcatgagctacgggcgtgcttactgcgatagcaatcactgtccgcgactagcatcattgcgtccatcctcgcgcatggaccatcatcacactcactcagtgttacacactccctctcacatttggttgcactatcgcccattgagtcgcatggctacttaactctttattaacacaaagctgtcccnagtcattgctcttcatggacacagagcgaagaccgntagggagagatcgtggcttcaggttgttgtagcatcctctcaaattacaccggcagacattactgggacctctcagttaggatagcacacggcacactattcctcaggtcgcagagaaccccccattgatagtgcatttctccttgcgtagcaaagtcgaatgtctccagtggaagtgcggtccccaggggggttgttacaattccattcagtttaatgtaatgttctggaccctgagacaaacaacgtcccaagattgtacctgagacggcccaccttcgaacaagttcccggcacttccattatacttcccatactactccgaaaggggaaccttccagagaacgtaacgttagcttctcgccgagttgaaattgaggggcttggcttggggacgtggaaccttttccctaaggcaaaacgtcgccttccgcgttagatcacctttcggctactttatagcgcacacacgaaagtaatttaagacccttagcgttgggtgcagggaaaactcctatccttgggggcttatggttaaaccctaacgttatagttcccgtggagatctgaccttattccacggttcctttccctttatactgtggagccagtgtgtaccctctcgagaggcggagtaaacttaaaaattgcgacggcgagttggccgtgagattaagcgtgccgcccggttcatcagggagttgaattttaaggcccaacgagagcaagcaagatgggggcgcgttcaaacaatctattcccgagtctagaatgtgttaatacccaccagttttgagaaaccctttgtcagatgtccacacgcggcatgaaaagagaaccccgtccatgtgtgtgcacatagaaccctaaaattcccccgcgatttttttacatcggtagttgcggtctgaaaagcctcgaaggatttatctaccggggggcggtgtcccccctcttttcaaaacaaagacaaccacgccaatattatggaagccaagagagaggcgtcaccccacat

SEQ ID NO: 528476 - DNA, 112 bp, Homo sapiens
agtgactctggcttctatctctgtgcctggagtgtgctccgggacactcttagtcgggtcggtggctacaccttcctaactatggctacaccttcggttcggggaccaggtt

SEQ ID NO: 528477 - DNA, 550 bp, Homo sapiens
  misc_feature (12)..(12): n is a, c, g, or t
  misc_feature (14)..(14): n is a, c, g, or t
  misc_feature (406)..(406): n is a, c, g, or t
tctagaggatcntncaccacagcctctggggaaagaaggggtgcatgaactccccttagtccacaggcgcctccctgtggcccaaggccctcttcacactccatcttgtagccccagcaggagctattttccgaaaagtgaaaagctctgaaggtcccacaattcatggtatgtacaggggctcggaggagggaaactgcccagctttcccccggcacagctgcaggggtagggggtatagataagaggagcaggccttggccaggcgtggtggctcacgcctgtaatcccagcactttgggagggggaggcaggcagatcacgatgtcaggagatcgaaatcagcctggccaagatgatgaagccccgtctgtactaaaaatacaaaaattagccggacgtggtngcgtgcacctgtaatcctagctacccggaaggctgaggcaggagaatggcgtgaacccggtgggaagagtttgcagtgagccaagatcgcaccactgcactccagcctgggcgacagagcaagactcggtctcaaaaaaaaaaa

SEQ ID NO: 528478 - DNA, 170 bp, Homo sapiens
ctgcgaaaaaaaaaaaaaaaaaacggcaaagcagattttctggaggttttctttgggggggggcaagccaaaagggggggaacccaacccagctggctcaagaatggccgtttggagaaaacgggaggcctctgggggcccttgcctgcccaaatggccctggggggcct

SEQ ID NO: 528479 - DNA, 2427 bp, Homo sapiens
  misc_feature (15)..(16): n is a, c, g, or t
  misc_feature (22)..(22): n is a, c, g, or t
  misc_feature (34)..(34): n is a, c, g, or t
  misc_feature (71)..(71): n is a, c, g, or t
  misc_feature (1813)..(1814): n is a, c, g, or t
  misc_feature (1831)..(1831): n is a, c, g, or t
taccccggagctctnnaggccnagaacttttcantcagcctctacagaccaagctcatgactcacaatggnctatttaggcccataccctacgtcacggcagcctccgcagatgagcctactgcctcacaacagcctccacaggcacagctccatcgttacaatggcctctttagacccagctcctgcctcccagccttctctccaggccctgaactttctcaggtctccctctgttgtccaaggctggagtgtagtagtgctatcgcagctgactgcagcctcaaccttccaggctgaagcgatcctcccacctcaacctcccacgtggctgagactacaggtgcttgccactatgcccaactaatatttggaattttcgtatacgtggattccagaggggtgacagcgaaacgtgggaccatccagttgcaggaaaacaagcttaacacgcccactgattctacattatgctcctacctcccggcagcctctccaggcccagaactttctccagtcagcctctacagaccaagctcatgactcacaatggcctatttaggcccataccctacgtcacggcagtctccgcagatgagcctactgcctcacaacagcctccacaggcacagctccatcgttacaatggcctctttagacccagctcctgcctcccagccttctctccaggccctgaactttctcaagtcgacctcaccaggcccagctcatgcttctttgcagcctctccaggcccagctcctgcatcttggtggcccctccaggcccagcctctgcctcccgtcagcctctacagtcccaacgtctgcctcacagcagattcttcacgcccagcatctacctcactgtggaccccccaagccaagctcccaacctttcagcagcttctacacacccagctcctgccacccagtggcctctttaggccaagctcatgcttcacaagggcctttccaggcccaacttttgtctcatggcaaccttccctggccagattcctgcctgtctcccagcagcctagacaggcccaggtcttgcctcacactggcctctctacatccagcttatgcctcacggtggcctctccaggcccaactcctgtcccaggacgtcatctccgggcccaaaacttactcaagtcagactctctagtcccaactgctgcctcctggtggcctatgaaggcccaaaatctcctcaagttgacctttccaggcccagctcctgcctcctgtcagcgtctacaggcccaacctctgcctcatgggggcttctccaggcccacctcttcctcttggctgggtctacaggcacaactgctgcctcacaacagccttttttggcccagttcctgtccagctcatggcggccaatgtaggcccaaaacttcctcaagtcaaactctccaggcccaccttctgcttcccggtggcatgaacaggcccagctttgacttgagaacagcctctgcaggccctgctcttgcctcccaggggctttttccaggcccagctcttgcctcatggcagctgccccaggccaaatttctgcctgcctgccagcagcctcaacaggcatagctcctccctcacagtggcccatttaggcccaactcatgactgtcgggccatttccaggcctagtgcctgcctcgtggctgactcttgaagcccaaaacttcctcaaatcagccttttgcccaacttctgtctactgtcggactctacaggccagcctctgcctcacagtggaccctccagacccagatggtgtctcactgtggcatcctcagnngaagctcctgcctttcngcagcctctccaggcccagctcctcctgcctcccagtggcctctttcggcccagcccagctcatggctctcggcggccttcccaggccccgcttttgacttttggcagcctcttcaggcgcagaacttgatctccagtcggcctttgcaggcccggcctcctgcctctcgaaggcctgcacgggcccggcctcggcctcggcctcacagcggactctccacgcccagctagctctcgcctcactgcggcctccccagtccaaagctcctgcctttcggccacttcggcaggtccagctcctgcctgccagtggcctctttaggcccagctcattcctcacgtcggccattccaggccccgtttttcccttccggcagcctcttggcctctaatttgtttatcttttgtgtataaatcccaaaatattgaattttggaatatttccaccattatgtaaatattttggtaggtaatttatttggagtgagtttctgcgccaagcccgaattttttattttattttccttattatttggtgttaaacaggtttaatgacggtcatggcaactttttggcacaatgaaaaatatcgccca

SEQ ID NO: 528480 - DNA, 3119 bp, Homo sapiens
  misc_feature (15)..(16): n is a, c, g, or t
  misc_feature (22)..(22): n is a, c, g, or t
  misc_feature (34)..(34): n is a, c, g, or t
  misc_feature (71)..(71): n is a, c, g, or t
  misc_feature (1813)..(1814): n is a, c, g, or t
  misc_feature (1831)..(1831): n is a, c, g, or t
  misc_feature (2975)..(2975): n is a, c, g, or t
taccccggagctctnnaggccnagaacttttcantcagcctctacagaccaagctcatgactcacaatggnctatttaggcccataccctacgtcacggcagcctccgcagatgagcctactgcctcacaacagcctccacaggcacagctccatcgttacaatggcctctttagacccagctcctgcctcccagccttctctccaggccctgaactttctcaggtctccctctgttgtccaaggctggagtgtagtagtgctatcgcagctgactgcagcctcaaccttccaggctgaagcgatcctcccacctcaacctcccacgtggctgagactacaggtgcttgccactatgcccaactaatatttggaattttcgtatacgtggattccagaggggtgacagcgaaacgtgggaccatccagttgcaggaaaacaagcttaacacgcccactgattctacattatgctcctacctcccggcagcctctccaggcccagaactttctccagtcagcctctacagaccaagctcatgactcacaatggcctatttaggcccataccctacgtcacggcagtctccgcagatgagcctactgcctcacaacagcctccacaggcacagctccatcgttacaatggcctctttagacccagctcctgcctcccagccttctctccaggccctgaactttctcaagtcgacctcaccaggcccagctcatgcttctttgcagcctctccaggcccagctcctgcatcttggtggcccctccaggcccagcctctgcctcccgtcagcctctacagtcccaacgtctgcctcacagcagattcttcacgcccagcatctacctcactgtggaccccccaagccaagctcccaacctttcagcagcttctacacacccagctcctgccacccagtggcctctttaggccaagctcatgcttcacaagggcctttccaggcccaacttttgtctcatggcaaccttccctggccagattcctgcctgtctcccagcagcctagacaggcccaggtcttgcctcacactggcctctctacatccagcttatgcctcacggtggcctctccaggcccaactcctgtcccaggacgtcatctccgggcccaaaacttactcaagtcagactctctagtcccaactgctgcctcctggtggcctatgaaggcccaaaatctcctcaagttgacctttccaggcccagctcctgcctcctgtcagcgtctacaggcccaacctctgcctcatgggggcttctccaggcccacctcttcctcttggctgggtctacaggcacaactgctgcctcacaacagccttttttggcccagttcctgtccagctcatggcggccaatgtaggcccaaaacttcctcaagtcaaactctccaggcccaccttctgcttcccggtggcatgaacaggcccagctttgacttgagaacagcctctgcaggccctgctcttgcctcccaggggctttttccaggcccagctcttgcctcatggcagctgccccaggccaaatttctgcctgcctgccagcagcctcaacaggcatagctcctccctcacagtggcccatttaggcccaactcatgactgtcgggccatttccaggcctagtgcctgcctcgtggctgactcttgaagcccaaaacttcctcaaatcagccttttgcccaacttctgtctactgtcggactctacaggccagcctctgcctcacagtggaccctccagacccagatggtgtctcactgtggcatcctcagnngaagctcctgcctttcngcagcctctccaggcccagctcctcctgcctcccagtggcctctttcggcccagcccagctcatggctctcggcggccttcccaggccccgcttttgacttttggcagcctcttcaggcgcagaacttgatctccagtcggcctttgcaggcccggcctcctgcctctcgaaggcctgcacgggcccggcctcggcctcggcctcacagcggactctccacgcccagctagctctcgcctcactgcggcctccccagtccaaagctcctgcctttcggccacttcggcaggtccagctcctgcctgccagtggcctctttaggcccagctcattcctcacgtcggccattccaggccccgtttttcccttccggcagcctcttggcctctaatttgtttatcttttgtgtataaatcccaaaatattgaattttggaatatttccaccattatgtaaatattttggtaggtaatttatttggagtgagtttctgcgccaagcccgaattttttattttattttccttattatttggtgttaaacaggtttaatgacggtcatggcaactttttggcacaatgaaaaatatcgcccatgatcaacgtgttctcttctggggaagggggcaaaggcagggtgaatcactttcttaaaaagtatagctcaagttgggagtgcagagggaatggggagaaaacccttccgctgcctgtgtcgaagtgcaggagcccccacccccatactcacctgagtccagcccctctggggaaagaaggggtgcatgaactccccttagtccacaggcgcctccctgtggcccaaggccctcttcacactccatcttgtagccccagcaggagctattttccgaaaagtgaaaagctctgaaggtcccacaattcatggtatgtacaggggctcggaggagggaaactgcccagctttcccccggcacagctgcaggggtagggggtatagataagaggagcaggccttggccaggcgtggtggctcacgcctgtaatcccagcactttgggagggggaggcaggcagatcacgatgtcaggagatcgaaatcagcctggccaagatgatgaagccccgtctgtactaaaaatacaaaaattagccggacgtggtngcgtgcacctgtaatcctagctacccggaaggctgaggcaggagaatggcgtgaacccggtgggaagagtttgcagtgagccaagatcgcaccactgcactccagcctgggcgacagagcaagactcggtctcaaaaaaaaaaa

SEQ ID NO: 528481 - DNA, 666 bp, Homo sapiens
ttttttttttgctggaaatgagtgtctttatggctggtacggtacaaatatgaagacgaggagaaaggccagtagggacggaaaactgtcagataacaacattcgcccacggaggaaaaagacccttaaccacacgcggaacaaaccgctacaccgtatccgcagccgtgcgcagtgtaacgtggggtagccacatggacgagggtgatcaggggagagcaacgcccatcaaagagctaaacgtccaaaacacccagaagcgtgtggcttacgagggatagaggagaagggtcggacaaaaccccagcgcgggtggagaagccctcccttcttccgcggtgaaaatgtcggggaagagaagctctccaacaccctgtgggctcagccgaaattctttcacgagtcgcgtgtggcccgattctctctgttgtgaggggccgtgaacactctgtggtgtctcgaggtcgcgaaacaacggagaaaacaaacgaacagtcttgtgatacccgtgtgtagaaatgactccggcccgtgtgtgtgtgctcgaacgcgggaggaactgtgcagccgactttcgacaccagagggttctgtggggttgtgcaccaagatttatcttaagaaaggggacggaaacattcttcttgcaagtgtgcaagccatgcg

SEQ ID NO: 528482 - DNA, 198 bp, Homo sapiens
gaatcagtcctcgtggtggtggtggtgcatgggtgtccaggttgtcactctgtgtgccggtgggtgttggggttggggtccctgtggtgagtggtggtgatgggtgtcgtggttggggtctgtgtgccggtggatgtaggggtaaggggtcaccgtacatgatggtggtgctgggtgtcgatgttgggttctgtgtgc

SEQ ID NO: 528483 - DNA, 624 bp, Homo sapiens
tacctaaagctttaataaataggtacatcatttctcaaaagtgttcactctaggatcccattctttaggtttgttcttttccagcaatatcatgaaatctcagagtatctggtgtgagttacgggccgctacagttcgatctgggagtcccacgttatgtcagttgctatggtcatgtttcaccatccttctgcacggttcctttactccttatcttactctcgtaataggatatatgtatctgactgtccacttgtaatgaagttcaggttcatgagcagcgtggttgaagcagtagaacagatgttgagcactagtttttagtagtttcatgtcaagtgtgagttgtgatagatagagctcagaatgtaggtagagtcaccacagatatacagcattagtgcgtgtatcactgcttcataaggcatctgtgcagcagaatgagctatcttgtatgcttcttctgagcggtaggggtagtctctagaagtgtcagctatagtctttacgaagttggtcatgcccgcacccacatcgatccacttgttcagggtcgcaggctagccaggagaaaagaccatgcctgttctagtacgggttaagggtgggtaatgcgcatttcat

SEQ ID NO: 528484 - DNA, 2114 bp, Homo sapiens
  misc_feature (179)..(179): n is a, c, g, or t
  misc_feature (184)..(184): n is a, c, g, or t
  misc_feature (232)..(232): n is a, c, g, or t
  misc_feature (274)..(274): n is a, c, g, or t
  misc_feature (280)..(280): n is a, c, g, or t
  misc_feature (289)..(289): n is a, c, g, or t
  misc_feature (335)..(335): n is a, c, g, or t
  misc_feature (354)..(354): n is a, c, g, or t
aaaaaaaaaaaaattttttttttaaatgggctgggcatggtggcttgtgcctgtagtctcagccacttgggaggcttaagtagtaggatcgcttgagcctgggaggttgaggctgccgtgagctgtgattgtgccactgtgcttcagcttgagtgacagagtgagaccctcttgactcnaaacnaaaaacatggtttctcctctctctcctgtcttcttactctctatcccntttgatgtagtgatttttaaatgcttttgtaagttaattctnaacacnaaagagacnttgtaatgaggcacaccactaaagtgagcatgcccaattaaaaccngtgtaatatagataagaanatctgatttttcaaaaaagatactctacataaagaatccttcatataaaaagttctttcttgtagtacatttaaagttttaattcactcatgtataactgagagttcctttgagccctttttaggcagggaggcatgtctgtcatctagcgtgtggcccagtaagtgattattacattggaatcagtttttcagtcttttaaaataaattctgtgccataagaataaaagataaagagaaaaattaatgttaactatttttagcttattataactatgtcaacaagtgtttattaatacctattatgggaaagtcactgtggttggcattgaaaattacatcatctttaaagcagtatttgtccccagatggactcatcactagcaaagactaggttcattggaaggcatagggtgagagaatgggaagatgaagtggaggcgggttgttaaagtgctgtcagtgagtgattttgtctacttgaataatggtccatgtttgggggcatattgtgtttcataagaagtgaaaggtatttgcaaagtaagctacaaatgacccataaatctgttaacaacagtccttaatatgcaaagatgaaaaacaagcattactgctacccaaagggaactggtgcttggtgatgtgcagatggggctgttggttaagagagctattacaggttttctctcttaggtttcataggaggtagttactgagatgagattgttttatctttttgaatacagatctcttgtcttgagttagttctgaggatgggagtaataaaggagttttttgtttttttgtttgtttgtttgttttggctccttagtaatactcctctgacatttatttctattattcttcaaagaaaggaaaccaactgaaatgtttgctttaacaaacattttaataagttctctgggtttttttttccccttttaaaaaaattagcatataccatagcaataaaagaactaatgttaactattgtatgctacaacttaagtgatttttctaaagaagcacaatgtcattgaaagtattattgaaaaggatcatagtcacattgaatttgtgaaggccaaagaaattgaagggagtgatattttcattttatgatattcacatatttagtaaattttgtgtacaagaataccaggcagagtgttttacccatggaaacaggtttcagattactttgtttttactgttagagtctcaagtttagaaatgctaacacttaaatcagtttttttctcactatacttgaagattgttaatattttgatatcttcctagcttgatgaatttaaacatatcttcagatctgtgacagtgacagccaataggactgataatattagcttcaaaccaataatatccagggttaaaataaaaatcatagtgaaagtacgattgtaaaattatgctatattaacttttaagtctgtaataacttgacatcaaaatgttatgtaattaccataaataatggctagcgagaacatctttggaaattctcaaattacctttcttactacactgtttgcagaatgaatgtagaaatgatcctgttagctttctgaatgttctgtggttgaatgtgtttttgcttaaataaagcttttggtatttgtttaaattacacttcttgagaagtggaaattttaggatcatctttgctttgtttcagttttgtgatttttgaaatgaatgtttagtttactgagccagttggtcatttcttcctcatg

SEQ ID NO: 528485 - DNA, 2617 bp, Homo sapiens
  misc_feature (232)..(233): n is a, c, g, or t
  misc_feature (301)..(301): n is a, c, g, or t
  misc_feature (318)..(318): n is a, c, g, or t
  misc_feature (2003)..(2004): n is a, c, g, or t
  misc_feature (2021)..(2021): n is a, c, g, or t
aaaattctgccccgattagaggatccctgtggagatgggtctcattactgtcacccagtggagtacagtggcacaacctctgctcactgcagcctccacctgccaggctcaagcaatgctcctgcctcagcctcccgagtagctgggattacaggaagtgagctcacaatgactcaagctgccacatagtgttgattgtgaaatgccagttgaagctatgtcctgcgagttnngggtgctacagttgaccactgcagcagtaaagatgactctgaagaatggcgtgggatggatcctttcnaatgcacttgagcagcngtctccaaccacagggccacagagctggagctggatctaccatgaaagacttctgaatccaggaagagagactgactgggcaacatgttatctcaggtctccctctgttgtccaaggctggagtgtagtagtgctatcgcagctgactgcagcctcaaccttccaggctgaagcgatcctcccacctcaacctcccacgtggctgagactacaggtgcttgccactatgcccaactaatatttggaattttcgtatacgtggattccagaggggtgacagcgaaacgtgggaccatccagttgcaggaaaacaagcttaacacgcccactgattctacattatgctcctacctcccggcagcctctccaggcccagaactttctccagtcagcctctacagaccaagctcatgactcacaatggcctatttaggcccataccctacgtcacggcagtctccgcagatgagcctactgcctcacaacagcctccacaggcacagctccatcgttacaatggcctctttagacccagctcctgcctcccagccttctctccaggccctgaactttctcaagtcgacctcaccaggcccagctcatgcttctttgcagcctctccaggcccagctcctgcatcttggtggcccctccaggcccagcctctgcctcccgtcagcctctacagtcccaacgtctgcctcacagcagattcttcacgcccagcatctacctcactgtggaccccccaagccaagctcccaacctttcagcagcttctacacacccagctcctgccacccagtggcctctttaggccaagctcatgcttcacaagggcctttccaggcccaacttttgtctcatggcaaccttccctggccagattcctgcctgtctcccagcagcctagacaggcccaggtcttgcctcacactggcctctctacatccagcttatgcctcacggtggcctctccaggcccaactcctgtcccaggacgtcatctccgggcccaaaacttactcaagtcagactctctagtcccaactgctgcctcctggtggcctatgaaggcccaaaatctcctcaagttgacctttccaggcccagctcctgcctcctgtcagcgtctacaggcccaacctctgcctcatgggggcttctccaggcccacctcttcctcttggctgggtctacaggcacaactgctgcctcacaacagccttttttggcccagttcctgtccagctcatggcggccaatgtaggcccaaaacttcctcaagtcaaactctccaggcccaccttctgcttcccggtggcatgaacaggcccagctttgacttgagaacagcctctgcaggccctgctcttgcctcccaggggctttttccaggcccagctcttgcctcatggcagctgccccaggccaaatttctgcctgcctgccagcagcctcaacaggcatagctcctccctcacagtggcccatttaggcccaactcatgactgtcgggccatttccaggcctagtgcctgcctcgtggctgactcttgaagcccaaaacttcctcaaatcagccttttgcccaacttctgtctactgtcggactctacaggccagcctctgcctcacagtggaccctccagacccagatggtgtctcactgtggcatcctcagnngaagctcctgcctttcngcagcctctccaggcccagctcctcctgcctcccagtggcctctttcggcccagcccagctcatggctctcggcggccttcccaggccccgcttttgacttttggcagcctcttcaggcgcagaacttgatctccagtcggcctttgcaggcccggcctcctgcctctcgaaggcctgcacgggcccggcctcggcctcggcctcacagcggactctccacgcccagctagctctcgcctcactgcggcctccccagtccaaagctcctgcctttcggccacttcggcaggtccagctcctgcctgccagtggcctctttaggcccagctcattcctcacgtcggccattccaggccccgtttttcccttccggcagcctcttggcctctaatttgtttatcttttgtgtataaatcccaaaatattgaattttggaatatttccaccattatgtaaatattttggtaggtaatttatttggagtgagtttctgcgccaagcccgaattttttattttattttccttattatttggtgttaaacaggtttaatgacggtcatggcaactttttggcacaatgaaaaatatcgccca

SEQ ID NO: 528486 - DNA, 898 bp, Homo sapiens
  misc_feature (8)..(8): n is a, c, g, or t
  misc_feature (399)..(400): n is a, c, g, or t
  misc_feature (430)..(431): n is a, c, g, or t
  misc_feature (433)..(433): n is a, c, g, or t
  misc_feature (435)..(435): n is a, c, g, or t
  misc_feature (461)..(461): n is a, c, g, or t
  misc_feature (463)..(463): n is a, c, g, or t
  misc_feature (508)..(509): n is a, c, g, or t
  misc_feature (529)..(529): n is a, c, g, or t
  misc_feature (531)..(531): n is a, c, g, or t
  misc_feature (547)..(547): n is a, c, g, or t
  misc_feature (549)..(549): n is a, c, g, or t
  misc_feature (554)..(554): n is a, c, g, or t
  misc_feature (615)..(615): n is a, c, g, or t
  misc_feature (623)..(623): n is a, c, g, or t
  misc_feature (741)..(741): n is a, c, g, or t
  misc_feature (786)..(786): n is a, c, g, or t
  misc_feature (805)..(805): n is a, c, g, or t
  misc_feature (809)..(809): n is a, c, g, or t
  misc_feature (896)..(896): n is a, c, g, or t
tagccaanttcaagtccagcatctaccggatcctgatcgcaacagacgtggcctcccggggcctggacatcctacggtacaggtgtcatcaaccacaacacccccggctccccaagatctacatccaccgagtcggccggacggcccgtgcagggcggcagggtcaggccatcacgctggtgacacagtacgacatccacctggtgcacgccatcgaggagcagagcaagaagaagcgtggaggagttctccgtggaagaggcgcgaggtgctacagatcctcacacaggtcaacgtggtgcgaagagagtgtgagatcaaactggaggcggcccactttgacgaaaagaaggagatcaacaaacggaagcagctgatcctggaggggaaggaccctgnncctggaggccaagcgcaaggctgagctggnncnangatcaacgagaagaaccggcgcttcnanggagaaggtggtggagacgctgaagcgacagaaggctggcagggnntggccacaaggggcgtccancncaggacaccgtcgtgngncccanctcaggcccagtcccctcccagggcctggtcttgagccccacacggccatctgcccagtcncttgactngtccatggagctgagggtcggaggaaccttccttgggggcagcagcccttcccgggggcctacccagtgccccacagcaaaacccgtgggcgctcgtgttgtgcgggccctgctcctntgccccgaaaccactggctggtcccttccctgagccctggccaanattcaggctgcaggggaanaaanaacatgaccgggaggttgtgaccccaacccaaggtccccccccaggggtgccgcatacaggaggtgcttaataaacgggtcttttgnca

SEQ ID NO: 528487 - DNA, 867 bp, Homo sapiens
  misc_feature (328)..(328): n is a, c, g, or t
  misc_feature (466)..(466): n is a, c, g, or t
  misc_feature (773)..(773): n is a, c, g, or t
ggcaagcgtcaccgatgcaccgcttctgctgccccctcacgggtcccagctcgctcgtgagttggatggacgcaaacctggtgttccctgacggtgctggtgccaccatcaaaatggccatggggtggcgatgtgcggacctacctgcgctggtaggtaagagaactaccgcacgtcttggctgagagggcaagggtggatcagcgcgagtgggggaagtcacggcagattccgatgtgcgcatgagaggcagctcgtgtaacatccacgtgtctcttctgcctgcgggcagtgccgagttctctcgtgctggtttcaggggaggaantgtaacgctgtgcaggtgtacgcacgtgcagtgacagcctggtgacggcggtgagtcactggcaggcaccaatgagcgcgtggtacccggccaacgcaacaccctggtctcgtggtgctgccgcgctgcgcagaacantgtagacccggggcgcagtgtaggccctccacagagaagttgtccgaagacgtgaagaatcatgctggtccgtgggccacgccctagcgacgaagtgggacataatcgagaggactctatctggtgcgcgtccgtggagtcgactgatctcaactgccgatggctgttagtcaggccgtgactcgcaattccgtggtgcgcttcgagctgtttctcacccttgtgcccaacccataatggtgcgcactcagacctcagccccggggtagatcagtttgacctgaggtcgcgagattgcgcgtcctgncggtgccaacacgggcaccgagtgcttctgaggagggggactaatggactataagtgggctcttggcacccgttgccttgcatggagaatccta

SEQ ID NO: 528488 - DNA, 319 bp, Homo sapiens
ccctattggtttgtaaaatggggcctggggggttttgttttatcccttaaattttgttcccaagggttttttgggggtggggattctggttttattagctttgtgtgtgtcctcttcccccaaacccccttttggtggggacatccccttggcagttgccgcctcttggccccgggtaacaataagggggctcctctcattttttcttttggacgttggccctacaatcaaatgtaagttttatttatttgtactggtggaaatttttaatctgcttttacaaaaataaattttcatggttggagcttttgcccctgga

SEQ ID NO: 528489 - DNA, 2681 bp, Homo sapiens
  misc_feature (179)..(179): n is a, c, g, or t
  misc_feature (184)..(184): n is a, c, g, or t
  misc_feature (232)..(232): n is a, c, g, or t
  misc_feature (274)..(274): n is a, c, g, or t
  misc_feature (280)..(280): n is a, c, g, or t
  misc_feature (289)..(289): n is a, c, g, or t
  misc_feature (335)..(335): n is a, c, g, or t
  misc_feature (354)..(354): n is a, c, g, or t
aaaaaaaaaaaaattttttttttaaatgggctgggcatggtggcttgtgcctgtagtctcagccacttgggaggcttaagtagtaggatcgcttgagcctgggaggttgaggctgccgtgagctgtgattgtgccactgtgcttcagcttgagtgacagagtgagaccctcttgactcnaaacnaaaaacatggtttctcctctctctcctgtcttcttactctctatcccntttgatgtagtgatttttaaatgcttttgtaagttaattctnaacacnaaagagacnttgtaatgaggcacaccactaaagtgagcatgcccaattaaaaccngtgtaatatagataagaanatctgatttttcaaaaaagatactctacataaagaatccttcatataaaaagttctttcttgtagtacatttaaagttttaattcactcatgtataactgagagttcctttgagccctttttaggcagggaggcatgtctgtcatctagcgtgtggcccagtaagtgattattacattggaatcagtttttcagtcttttaaaataaattctgtgccataagaataaaagataaagagaaaaattaatgttaactatttttagcttattataactatgtcaacaagtgtttattaatacctattatgggaaagtcactgtggttggcattgaaaattacatcatctttaaagcagtatttgtccccagatggactcatcactagcaaagactaggttcattggaaggcatagggtgagagaatgggaagatgaagtggaggcgggttgttaaagtgctgtcagtgagtgattttgtctacttgaataatggtccatgtttgggggcatattgtgtttcataagaagtgaaaggtatttgcaaagtaagctacaaatgacccataaatctgttaacaacagtccttaatatgcaaagatgaaaaacaagcattactgctacccaaagggaactggtgcttggtgatgtgcagatggggctgttggttaagagagctattacaggttttctctcttaggtttcataggaggtagttactgagatgagattgttttatctttttgaatacagatctcttgtcttgagttagttctgaggatgggagtaataaaggagttttttgtttttttgtttgtttgtttgttttggctccttagtaatactcctctgacatttatttctattattcttcaaagaaaggaaaccaactgaaatgtttgctttaacaaacattttaataagttctctgggtttttttttccccttttaaaaaaattagcatataccatagcaataaaagaactaatgttaactattgtatgctacaacttaagtgatttttctaaagaagcacaatgtcattgaaagtattattgaaaaggatcatagtcacattgaatttgtgaaggccaaagaaattgaagggagtgatattttcattttatgatattcacatatttagtaaattttgtgtacaagaataccaggcagagtgttttacccatggaaacaggtttcagattactttgtttttactgttagagtctcaagtttagaaatgctaacacttaaatcagtttttttctcactatacttgaagattgttaatattttgatatcttcctagcttgatgaatttaaacatatcttcagatctgtgacagtgacagccaataggactgataatattagcttcaaaccaataatatccagggttaaaataaaaatcatagtgaaagtacgattgtaaaattatgctatattaacttttaagtctgtaataacttgacatcaaaatgttatgtaattaccataaataatggctagcgagaacatctttggaaattctcaaattacctttcttactacactgtttgcagaatgaatgtagaaatgatcctgttagctttctgaatgttctgtggttgaatgtgtttttgcttaaataaagcttttggtatttgtttaaattacaaaaaaaaaaaaaaaaaaaaaaaaaaaaaaaaaaaaaaaaaaaaaaaaaaaaaaaaaaaaaaaaaaaaaaaaaaagagggggggggccggacaaaaataataatcccccgggggagggacacaaaattacgcgcgacccacgtttttttgtagagacaaagagcgaccaacaaacagagaggggataattaataacaacagacaagcgaggcaggcggccgaaaaaacaacaaggctagatcagaagaaacaactgaagctaatgtggcactttgggagagaacgacccccacatgcgtcgggacacagtcatagcgcgacaccacaccaaaccaagaaataaccggcagggggagataacaaaaaagagagggggggatgaggtggtggcaccccaccgcaccacgtgggggggggcagaaaaaagttgcctcgcgggtcatctctttcatcaactacgaccggctgctcacacaaacaccacagagatgacaagatcagccaaacaaggagcaaccgaaaaacacaagcgatgacagagcacgaggaaaagaaacgagactcacacacaggagacaagcaaccgacagacacagccaacaaaagaaccaccaacagcgactaagcagcacaacgcaacgacaaacagcaagagaatcgacacaaagcaacaca

SEQ ID NO: 528490 - DNA, 2314 bp, Homo sapiens
  misc_feature (1700)..(1701): n is a, c, g, or t
  misc_feature (1718)..(1718): n is a, c, g, or t
tcaacaattttgagaaccactgggctaagaccaaaatgacaacaacctgtaagacttttaagaaagatgtagaagcaggagacctgagcaatccatgcctggcttgctcaggtctccctctgttgtccaaggctggagtgtagtagtgctatcgcagctgactgcagcctcaaccttccaggctgaagcgatcctcccacctcaacctcccacgtggctgagactacaggtgcttgccactatgcccaactaatatttggaattttcgtatacgtggattccagaggggtgacagcgaaacgtgggaccatccagttgcaggaaaacaagcttaacacgcccactgattctacattatgctcctacctcccggcagcctctccaggcccagaactttctccagtcagcctctacagaccaagctcatgactcacaatggcctatttaggcccataccctacgtcacggcagtctccgcagatgagcctactgcctcacaacagcctccacaggcacagctccatcgttacaatggcctctttagacccagctcctgcctcccagccttctctccaggccctgaactttctcaagtcgacctcaccaggcccagctcatgcttctttgcagcctctccaggcccagctcctgcatcttggtggcccctccaggcccagcctctgcctcccgtcagcctctacagtcccaacgtctgcctcacagcagattcttcacgcccagcatctacctcactgtggaccccccaagccaagctcccaacctttcagcagcttctacacacccagctcctgccacccagtggcctctttaggccaagctcatgcttcacaagggcctttccaggcccaacttttgtctcatggcaaccttccctggccagattcctgcctgtctcccagcagcctagacaggcccaggtcttgcctcacactggcctctctacatccagcttatgcctcacggtggcctctccaggcccaactcctgtcccaggacgtcatctccgggcccaaaacttactcaagtcagactctctagtcccaactgctgcctcctggtggcctatgaaggcccaaaatctcctcaagttgacctttccaggcccagctcctgcctcctgtcagcgtctacaggcccaacctctgcctcatgggggcttctccaggcccacctcttcctcttggctgggtctacaggcacaactgctgcctcacaacagccttttttggcccagttcctgtccagctcatggcggccaatgtaggcccaaaacttcctcaagtcaaactctccaggcccaccttctgcttcccggtggcatgaacaggcccagctttgacttgagaacagcctctgcaggccctgctcttgcctcccaggggctttttccaggcccagctcttgcctcatggcagctgccccaggccaaatttctgcctgcctgccagcagcctcaacaggcatagctcctccctcacagtggcccatttaggcccaactcatgactgtcgggccatttccaggcctagtgcctgcctcgtggctgactcttgaagcccaaaacttcctcaaatcagccttttgcccaacttctgtctactgtcggactctacaggccagcctctgcctcacagtggaccctccagacccagatggtgtctcactgtggcatcctcagnngaagctcctgcctttcngcagcctctccaggcccagctcctcctgcctcccagtggcctctttcggcccagcccagctcatggctctcggcggccttcccaggccccgcttttgacttttggcagcctcttcaggcgcagaacttgatctccagtcggcctttgcaggcccggcctcctgcctctcgaaggcctgcacgggcccggcctcggcctcggcctcacagcggactctccacgcccagctagctctcgcctcactgcggcctccccagtccaaagctcctgcctttcggccacttcggcaggtccagctcctgcctgccagtggcctctttaggcccagctcattcctcacgtcggccattccaggccccgtttttcccttccggcagcctcttggcctctaatttgtttatcttttgtgtataaatcccaaaatattgaattttggaatatttccaccattatgtaaatattttggtaggtaatttatttggagtgagtttctgcgccaagcccgaattttttattttattttccttattatttggtgttaaacaggtttaatgacggtcatggcaactttttggcacaatgaaaaatatcgccca

SEQ ID NO: 528491 - DNA, 133 bp, Homo sapiens
acttagggtatagagaatagagtacatcatactctacagtacacgcctagtagggaatgttgtcccattagagtgcattccctccacgtactccttcccctttgctttctaacatgtatgatgcatatactct

SEQ ID NO: 528492 - DNA, 2619 bp, Homo sapiens
  misc_feature (179)..(179): n is a, c, g, or t
  misc_feature (184)..(184): n is a, c, g, or t
  misc_feature (232)..(232): n is a, c, g, or t
  misc_feature (274)..(274): n is a, c, g, or t
  misc_feature (280)..(280): n is a, c, g, or t
  misc_feature (289)..(289): n is a, c, g, or t
  misc_feature (335)..(335): n is a, c, g, or t
  misc_feature (354)..(354): n is a, c, g, or t
aaaaaaaaaaaaattttttttttaaatgggctgggcatggtggcttgtgcctgtagtctcagccacttgggaggcttaagtagtaggatcgcttgagcctgggaggttgaggctgccgtgagctgtgattgtgccactgtgcttcagcttgagtgacagagtgagaccctcttgactcnaaacnaaaaacatggtttctcctctctctcctgtcttcttactctctatcccntttgatgtagtgatttttaaatgcttttgtaagttaattctnaacacnaaagagacnttgtaatgaggcacaccactaaagtgagcatgcccaattaaaaccngtgtaatatagataagaanatctgatttttcaaaaaagatactctacataaagaatccttcatataaaaagttctttcttgtagtacatttaaagttttaattcactcatgtataactgagagttcctttgagccctttttaggcagggaggcatgtctgtcatctagcgtgtggcccagtaagtgattattacattggaatcagtttttcagtcttttaaaataaattctgtgccataagaataaaagataaagagaaaaattaatgttaactatttttagcttattataactatgtcaacaagtgtttattaatacctattatgggaaagtcactgtggttggcattgaaaattacatcatctttaaagcagtatttgtccccagatggactcatcactagcaaagactaggttcattggaaggcatagggtgagagaatgggaagatgaagtggaggcgggttgttaaagtgctgtcagtgagtgattttgtctacttgaataatggtccatgtttgggggcatattgtgtttcataagaagtgaaaggtatttgcaaagtaagctacaaatgacccataaatctgttaacaacagtccttaatatgcaaagatgaaaaacaagcattactgctacccaaagggaactggtgcttggtgatgtgcagatggggctgttggttaagagagctattacaggttttctctcttaggtttcataggaggtagttactgagatgagattgttttatctttttgaatacagatctcttgtcttgagttagttctgaggatgggagtaataaaggagttttttgtttttttgtttgtttgtttgttttggctccttagtaatactcctctgacatttatttctattattcttcaaagaaaggaaaccaactgaaatgtttgctttaacaaacattttaataagttctctgggtttttttttccccttttaaaaaaattagcatataccatagcaataaaagaactaatgttaactattgtatgctacaacttaagtgatttttctaaagaagcacaatgtcattgaaagtattattgaaaaggatcatagtcacattgaatttgtgaaggccaaagaaattgaagggagtgatattttcattttatgatattcacatatttagtaaattttgtgtacaagaataccaggcagagtgttttacccatggaaacaggtttcagattactttgtttttactgttagagtctcaagtttagaaatgctaacacttaaatcagtttttttctcactatacttgaagattgttaatattttgatatcttcctagcttgatgaatttaaacatatcttcagatctgtgacagtgacagccaataggactgataatattagcttcaaaccaataatatccagggttaaaataaaaatcatagtgaaagtacgattgtaaaattatgctatattaacttttaagtctgtaataacttgacatcaaaatgttatgtaattaccataaataatggctagcgagaacatctttggaaattctcaaattacctttcttactacactgtttgcagaatgaatgtagaaatgatcctgttagctttctgaatgttctgtggttgaatgtgtttttgcttaaataaagcttttggtatttgtttaaattacaaaaaagagacgagaatacaagataactaaacctaaacagacggacaaaataagcatcagacctgaatagaaacaaataccctgtggaaaggccaaggcgggggcccaggaagagggacaaacctgcggcgcagaccgagcgtgtcgccactggatctcagacctcgcctggacggagacgctggacttcgagcagaggtggacgtggagcccatgaggtggaagacttcgaggcacgtgggagccgttctccaagtctgcgattccaaaacgcgggtgcggtgcagggtaaggaccgaactcctccagaagtccgcaacggtgacttgaaccacagtcgtgaggagatggcgggcccccgagagctttcttccctcggaaggaggttctctggaccccgtgaccttgcgtcaaagttcgcgcgagggcgaacaaaaaaggcaacaaaagcacaaccacaacaggccctgcgtcacaaaagggccttggcccttggccatagctgaaggaggcaaccaaatgccgactgaaaaagggagataccgaaaacaagtaacattacagggaacaacatccgatagtaggaagagccaagacaaaaagtacactaccg

SEQ ID NO: 528493 - DNA, 2939 bp, Homo sapiens
  misc_feature (2325)..(2326): n is a, c, g, or t
  misc_feature (2343)..(2343): n is a, c, g, or t
gctggactgtagtggcatgatcatgcctcactgcagccttgacctcccaggctcaaacttccgcattccgaatagctgggactacaagtgtgcaccaccacccccagctaacttttttcttcttttggatggagacagggtctcactgtgttgtccagaccggtctctagctcctggccttaagcaatcctcctgcattagcttctcaaattgctggaatttcaggcatgagccaccatgcctggcctgggctagtcctatattctctagagttctctttactttgtgctagccaatctctcattatgctgttcacctgttataatgaataattctctgtattaaattttaccactttaaacttttgagtggtttatgcttcctgattggactctgactaatatgttaggaagggtcccaggagataaacccacacagatgggatttgggcagtgctgagctctttgccagtgggaaatgggatgctggtgatttccagtaggtgacctcacagtgactcaagctaccacttactgttgattgtgacgaaatgccagctgaggcacatgccttgggagctaagtggttgctgcccttgaccactgtgaagactggtgtgggaagggtcgttttggatgcacttgagcaggggtccccaacccctgagccatggagccgcaaggagccacacagcaggaggtgagcggtgtcgagtgagggagtgagggaagcttcgtctgtatttacagccactcccctttgctcacattcccgcctgagctccaccttctcagatgagcagcagcattagattctcataggagaacgcaccctgttgtgaaccgtgcatgtgagggatctaggttgcgctgtccttatgagagtctaatacctattgatctgtcactttctcccatcacgctcaggtgggaccatccagttgcaggaaaacaagcttaacacgcccactgattctacattatgctcctacctcccggcagcctctccaggcccagaactttctccagtcagcctctacagaccaagctcatgactcacaatggcctatttaggcccataccctacgtcacggcagtctccgcagatgagcctactgcctcacaacagcctccacaggcacagctccatcgttacaatggcctctttagacccagctcctgcctcccagccttctctccaggccctgaactttctcaagtcgacctcaccaggcccagctcatgcttctttgcagcctctccaggcccagctcctgcatcttggtggcccctccaggcccagcctctgcctcccgtcagcctctacagtcccaacgtctgcctcacagcagattcttcacgcccagcatctacctcactgtggaccccccaagccaagctcccaacctttcagcagcttctacacacccagctcctgccacccagtggcctctttaggccaagctcatgcttcacaagggcctttccaggcccaacttttgtctcatggcaaccttccctggccagattcctgcctgtctcccagcagcctagacaggcccaggtcttgcctcacactggcctctctacatccagcttatgcctcacggtggcctctccaggcccaactcctgtcccaggacgtcatctccgggcccaaaacttactcaagtcagactctctagtcccaactgctgcctcctggtggcctatgaaggcccaaaatctcctcaagttgacctttccaggcccagctcctgcctcctgtcagcgtctacaggcccaacctctgcctcatgggggcttctccaggcccacctcttcctcttggctgggtctacaggcacaactgctgcctcacaacagccttttttggcccagttcctgtccagctcatggcggccaatgtaggcccaaaacttcctcaagtcaaactctccaggcccaccttctgcttcccggtggcatgaacaggcccagctttgacttgagaacagcctctgcaggccctgctcttgcctcccaggggctttttccaggcccagctcttgcctcatggcagctgccccaggccaaatttctgcctgcctgccagcagcctcaacaggcatagctcctccctcacagtggcccatttaggcccaactcatgactgtcgggccatttccaggcctagtgcctgcctcgtggctgactcttgaagcccaaaacttcctcaaatcagccttttgcccaacttctgtctactgtcggactctacaggccagcctctgcctcacagtggaccctccagacccagatggtgtctcactgtggcatcctcagnngaagctcctgcctttcngcagcctctccaggcccagctcctcctgcctcccagtggcctctttcggcccagcccagctcatggctctcggcggccttcccaggccccgcttttgacttttggcagcctcttcaggcgcagaacttgatctccagtcggcctttgcaggcccggcctcctgcctctcgaaggcctgcacgggcccggcctcggcctcggcctcacagcggactctccacgcccagctagctctcgcctcactgcggcctccccagtccaaagctcctgcctttcggccacttcggcaggtccagctcctgcctgccagtggcctctttaggcccagctcattcctcacgtcggccattccaggccccgtttttcccttccggcagcctcttggcctctaatttgtttatcttttgtgtataaatcccaaaatattgaattttggaatatttccaccattatgtaaatattttggtaggtaatttatttggagtgagtttctgcgccaagcccgaattttttattttattttccttattatttggtgttaaacaggtttaatgacggtcatggcaactttttggcacaatgaaaaatatcgccca

SEQ ID NO: 528494 - DNA, 253 bp, Homo sapiens
  misc_feature (225)..(225): n is a, c, g, or t
cgccctcatgcgtgggcataagagctccagcctgggtacacacaacatgtttgaattttaatccctggccaggcatgctagctcacgccttgtatcccagcacttggggaggccgaggtgggttgatcacgaggtcaggagttcgagaccagcctggccaacacggtgaaaccccatctctactaaaaataaaaaattagccaggcatggtggtgggcgcctatnatcccagctcttattgcccaggctggag

SEQ ID NO: 528495 - DNA, 2118 bp, Homo sapiens
  misc_feature (179)..(179): n is a, c, g, or t
  misc_feature (184)..(184): n is a, c, g, or t
  misc_feature (232)..(232): n is a, c, g, or t
  misc_feature (274)..(274): n is a, c, g, or t
  misc_feature (280)..(280): n is a, c, g, or t
  misc_feature (289)..(289): n is a, c, g, or t
  misc_feature (335)..(335): n is a, c, g, or t
  misc_feature (354)..(354): n is a, c, g, or t
  misc_feature (787)..(787): n is a, c, g, or t
  misc_feature (789)..(789): n is a, c, g, or t
  misc_feature (798)..(798): n is a, c, g, or t
  misc_feature (802)..(802): n is a, c, g, or t
  misc_feature (811)..(811): n is a, c, g, or t
  misc_feature (831)..(831): n is a, c, g, or t
  misc_feature (834)..(835): n is a, c, g, or t
  misc_feature (850)..(852): n is a, c, g, or t
  misc_feature (855)..(856): n is a, c, g, or t
  misc_feature (858)..(858): n is a, c, g, or t
  misc_feature (864)..(864): n is a, c, g, or t
  misc_feature (868)..(868): n is a, c, g, or t
  misc_feature (876)..(876): n is a, c, g, or t
  misc_feature (886)..(886): n is a, c, g, or t
  misc_feature (890)..(890): n is a, c, g, or t
  misc_feature (896)..(896): n is a, c, g, or t
  misc_feature (898)..(898): n is a, c, g, or t
  misc_feature (910)..(910): n is a, c, g, or t
  misc_feature (915)..(915): n is a, c, g, or t
  misc_feature (918)..(919): n is a, c, g, or t
  misc_feature (926)..(926): n is a, c, g, or t
  misc_feature (928)..(928): n is a, c, g, or t
  misc_feature (938)..(938): n is a, c, g, or t
  misc_feature (941)..(941): n is a, c, g, or t
  misc_feature (949)..(950): n is a, c, g, or t
  misc_feature (957)..(957): n is a, c, g, or t
  misc_feature (963)..(963): n is a, c, g, or t
  misc_feature (967)..(967): n is a, c, g, or t
  misc_feature (972)..(972): n is a, c, g, or t
  misc_feature (975)..(975): n is a, c, g, or t
  misc_feature (978)..(979): n is a, c, g, or t
  misc_feature (984)..(984): n is a, c, g, or t
  misc_feature (986)..(986): n is a, c, g, or t
  misc_feature (1003)..(1003): n is a, c, g, or t
  misc_feature (1016)..(1016): n is a, c, g, or t
  misc_feature (1031)..(1032): n is a, c, g, or t
  misc_feature (1038)..(1038): n is a, c, g, or t
  misc_feature (1040)..(1040): n is a, c, g, or t
  misc_feature (1057)..(1058): n is a, c, g, or t
  misc_feature (1074)..(1074): n is a, c, g, or t
  misc_feature (1078)..(1078): n is a, c, g, or t
  misc_feature (1081)..(1081): n is a, c, g, or t
  misc_feature (1091)..(1091): n is a, c, g, or t
  misc_feature (1094)..(1094): n is a, c, g, or t
  misc_feature (1105)..(1105): n is a, c, g, or t
  misc_feature (1110)..(1110): n is a, c, g, or t
  misc_feature (1117)..(1117): n is a, c, g, or t
  misc_feature (1131)..(1131): n is a, c, g, or t
  misc_feature (1157)..(1157): n is a, c, g, or t
  misc_feature (1163)..(1163): n is a, c, g, or t
  misc_feature (1165)..(1165): n is a, c, g, or t
  misc_feature (1186)..(1186): n is a, c, g, or t
  misc_feature (1199)..(1199): n is a, c, g, or t
aaaaaaaaaaaaattttttttttaaatgggctgggcatggtggcttgtgcctgtagtctcagccacttgggaggcttaagtagtaggatcgcttgagcctgggaggttgaggctgccgtgagctgtgattgtgccactgtgcttcagcttgagtgacagagtgagaccctcttgactcnaaacnaaaaacatggtttctcctctctctcctgtcttcttactctctatcccntttgatgtagtgatttttaaatgcttttgtaagttaattctnaacacnaaagagacnttgtaatgaggcacaccactaaagtgagcatgcccaattaaaaccngtgtaatatagataagaanatctgatttttcaaaaaagatactctacataaagaatccttcatataaaaagttctttcttgtagtacatttaaagttttaattcactcatgtataactgagagttcctttgagccctttttaggcagggaggcatgtctgtcatctagcgtgtggcccagtaagtgattattacattggaatcagtttttcagtcttttaaaataaattctgtgccataagaataaaagataaagagaaaaattaatgttaactatttttagcttattataactatgtcaacaagtgtttattaatacctattatgggaaagtcactgtggttggcattgaaaattacatcatctttaaagcagtatttgtccccagatggactcatcactagcaaagactaggttcattggaaggcatagggtgagaaaaagaggaaaaananaaaggaggngggnaaaaaaaantgcagaaaaaaaaataaatntgnnaaaataaaaaaaggnnnaannangggggnaaanagagtttnaaaaaaagtnaaangaaatngnaaagaaagcaanaaatnacnnaaaaaanantaaaaaaaantanaaaaaaannaaaaaanaaaaanaagnataanagnaanncaaangnaacaggtgcatggagangtgcaaaaggggntgaaggaaaaaaaannaaaaanangaattcactctaaggtnncaaaggaggtagtaanaganaanaaaatgtttnaanattttaaatanagaanactagtnaagagtaagtacanaggaagggagaaaaaaaggagaaatnagtttnantgtttgatagaaagattaggnaccaaagaaaaanacctctgacatttatttctattattcttcaaagaaaggaaaccaactgaaatgtttgctttaacaaacattttaataagttctctgggtttttttttccccttttaaaaaaattagcatataccatagcaataaaagaactaatgttaactattgtatgctacaacttaagtgatttttctaaagaagcacaatgtcattgaaagtattattgaaaaggatcatagtcacattgaatttgtgaaggccaaagaaattgaagggagtgatattttcattttatgatattcacatatttagtaaattttgtgtacaagaataccaggcagagtgttttacccatggaaacaggtttcagattactttgtttttactgttagagtctcaagtttagaaatgctaacacttaaatcagtttttttctcactatacttgaagattgttaatattttgatatcttcctagcttgatgaatttaaacatatcttcagatctgtgacagtgacagccaataggactgataatattagcttcaaaccaataatatccagggttaaaataaaaatcatagtgaaagtacgattgtaaaattatgctatattaacttttaagtctgtaataacttgacatcaaaatgttatgtaattaccataaataatggctagcgagaacatctttggaaattctcaaattacctttcttactacactgtttgcagaatgaatgtagaaatgatcctgttagctttctgaatgttctgtggttgaatgtgtttttgcttaaataaagcttttggtatttgtttaaattacacttcttgagaagtggaaattttaggatcatctttgctttgtttcagttttgtgatttttgaaatgaatgtttagtttactgagccagttggtcatttcttcctcatg

SEQ ID NO: 528496 - DNA, 486 bp, Homo sapiens
  misc_feature (448)..(448): n is a, c, g, or t
actttgtgcacatagcctttaatgctttgagattgttttggaatttctggcacattttgagaagaaaactgcctgtgtctctacttggctctctgagaaaaaaaatgagtttacgtactagaggaactatacattgtaggcttggaaacaggctggcacactgaataatggcagtctaccgtaggtgctcagaaatggaagcagagctgtattgtctgctacctgcatgtgtaatgaacttcatagcttgctatggtggcagggagatcatgcggagtgttcagcttcacacggagcctgggaacaaggtccaggggagaagtattttcaatactccctctcacagcagtttattccatcaggttccctctcattctccttggctacagcacccaattaaagccttcttccctggtgatactcattgactccatgattggcatgctgngtagtgagcagcaggacatagaccccaatggcaggtcg

SEQ ID NO: 528497 - DNA, 2962 bp, Homo sapiens
  misc_feature (2348)..(2349): n is a, c, g, or t
  misc_feature (2366)..(2366): n is a, c, g, or t
gctggactgtagtggcatgatcatgcctcactgcagccttgacctcccaggctcaaacttccgcattccgaatagctgggactacaagtgtgcaccaccacccccagctaacttttttcttcttttggatggagacagggtctcactgtgttgtccagaccggtctctagctcctggccttaagcaatcctcctgcattagcttctcaaattgctggaatttcaggcatgagccaccatgcctggcctgggctagtcctatattctctagagttctctttactttgtgctagccaatctctcattatgctgttcacctgttataatgaataattctctgtattaaattttaccactttaaacttttgagtggtttatgcttcctgattggactctgactaatatgttaggaagggtcccaggagataaacccacacagatgggatttgggcataggtttggtttcccagggggcagtgctgagctctttgccagtgggaaatgggatgctggtgatttccagtaggtgacctcacagtgactcaagctaccacttactgttgattgtgacgaaatgccagctgaggcacatgccttgggagctaagtggttgctgcccttgaccactgtgaagactggtgtgggaagggtcgttttggatgcacttgagcaggggtccccaacccctgagccatggagccgcaaggagccacacagcaggaggtgagcggtgtcgagtgagggagtgagggaagcttcgtctgtatttacagccactcccctttgctcacattcccgcctgagctccaccttctcagatgagcagcagcattagattctcataggagaacgcaccctgttgtgaaccgtgcatgtgagggatctaggttgcgctgtccttatgagagtctaatacctattgatctgtcactttctcccatcacgctcaggtgggaccatccagttgcaggaaaacaagcttaacacgcccactgattctacattatgctcctacctcccggcagcctctccaggcccagaactttctccagtcagcctctacagaccaagctcatgactcacaatggcctatttaggcccataccctacgtcacggcagtctccgcagatgagcctactgcctcacaacagcctccacaggcacagctccatcgttacaatggcctctttagacccagctcctgcctcccagccttctctccaggccctgaactttctcaagtcgacctcaccaggcccagctcatgcttctttgcagcctctccaggcccagctcctgcatcttggtggcccctccaggcccagcctctgcctcccgtcagcctctacagtcccaacgtctgcctcacagcagattcttcacgcccagcatctacctcactgtggaccccccaagccaagctcccaacctttcagcagcttctacacacccagctcctgccacccagtggcctctttaggccaagctcatgcttcacaagggcctttccaggcccaacttttgtctcatggcaaccttccctggccagattcctgcctgtctcccagcagcctagacaggcccaggtcttgcctcacactggcctctctacatccagcttatgcctcacggtggcctctccaggcccaactcctgtcccaggacgtcatctccgggcccaaaacttactcaagtcagactctctagtcccaactgctgcctcctggtggcctatgaaggcccaaaatctcctcaagttgacctttccaggcccagctcctgcctcctgtcagcgtctacaggcccaacctctgcctcatgggggcttctccaggcccacctcttcctcttggctgggtctacaggcacaactgctgcctcacaacagccttttttggcccagttcctgtccagctcatggcggccaatgtaggcccaaaacttcctcaagtcaaactctccaggcccaccttctgcttcccggtggcatgaacaggcccagctttgacttgagaacagcctctgcaggccctgctcttgcctcccaggggctttttccaggcccagctcttgcctcatggcagctgccccaggccaaatttctgcctgcctgccagcagcctcaacaggcatagctcctccctcacagtggcccatttaggcccaactcatgactgtcgggccatttccaggcctagtgcctgcctcgtggctgactcttgaagcccaaaacttcctcaaatcagccttttgcccaacttctgtctactgtcggactctacaggccagcctctgcctcacagtggaccctccagacccagatggtgtctcactgtggcatcctcagnngaagctcctgcctttcngcagcctctccaggcccagctcctcctgcctcccagtggcctctttcggcccagcccagctcatggctctcggcggccttcccaggccccgcttttgacttttggcagcctcttcaggcgcagaacttgatctccagtcggcctttgcaggcccggcctcctgcctctcgaaggcctgcacgggcccggcctcggcctcggcctcacagcggactctccacgcccagctagctctcgcctcactgcggcctccccagtccaaagctcctgcctttcggccacttcggcaggtccagctcctgcctgccagtggcctctttaggcccagctcattcctcacgtcggccattccaggccccgtttttcccttccggcagcctcttggcctctaatttgtttatcttttgtgtataaatcccaaaatattgaattttggaatatttccaccattatgtaaatattttggtaggtaatttatttggagtgagtttctgcgccaagcccgaattttttattttattttccttattatttggtgttaaacaggtttaatgacggtcatggcaactttttggcacaatgaaaaatatcgccca

SEQ ID NO: 528498 - DNA, 167 bp, Homo sapiens
agtctcatgagatttgagggttttataagcattgggcatttccccgggtggcactcattccatccggccgggttttcctttgccttttgccataattgtaagtttcctgaggctttcccaacaaaggggaactgtgagtcaattaaacctctttcctttataaatta

SEQ ID NO: 528499 - DNA, 1834 bp, Homo sapiens
actttgtgcacatagcctttaatgctttgagattgttttggaatttctggcacattttgagaagaaaactgcctgtgtctctacttggctctctgagaaaaaaaatgagtttacgtactagaggaactatacattgtaggcttggaaacaggctggcacactgaataatggcagtctaccgtaggtgctcagaaatggaagcagagctgtattgtctgctacctgcatgtgtaatgaacttcatagcttgctatggtggcagggagatcatgcggagtgttcagcttcacacggagcctgggaacaaggtccaggggagaagtattttcaatactccctctcacagcagtttattccatcaggttccccaatggcaggtcggctccacgtaggcctactttgcgcgtgcgcatcatcgtttcgacgcgctcggaagcaacttcctttgcctgctcaccgccagcgtaggtgctaccaccgctgccgtcgccgccgccattttgatggcaggaagagtccggttctgggacagctggagacagtggtggtgactgaaataactttaccaaaggaaagctattttgcgaactatcttctccagcggagatggccaatgtgctttgtaacagagccagactggtttcctatctcccaggattttgctctttagttaaaagggttgtcaatcccaaagccttttcgactgcaggatcatcaggttcggatgagtctcatgtggctgctgcacctccagatatatgctctcgaacagtgtggcctgatgaaactatgggaccctttggacctcaagatcagaggttccagcttcctgggaacataggttttgattgtcacctcaatgggactgcttcacagaagaaaagcctggttcataaaactttgcctgatgttctagcagaacctttatcaagtgaaagacatgagtttgtgatggcacaatatgtgaatgaatttcagggtaatgatgcacctgttgaacaagaaattaacagtgcagaaacttactttgaaagtgccagagtagagtgtgcaatacaaacatgtccagaattgctgcgaaaagattttgaatcactgtttccagaagtagctaatggcaaactaatgattctgactgtaacacaaaaaactaagaatgatatgactgtttggagtgaagaagtagaaattgaaagagaagtgctcttagaaaagttcatcaatggtgctaaggaaatttgctatgctcttcgagctgagggttattgggctgactttattgacccatcatctggtttggcattttttggaccatatacaaacaacactctttttgaaactgatgaacgctaccgacatttaggattctctgttgatgaccttggatgctgtaaagtgattcgtcatagtctctggggtacccatgtagttgtagggagtatcttcactaatgcaacaccagacagccatattatgaagaaattaagtggaaattagcagaaatatccattcatttgctgtactatttgtatgtaatatttgggttgatctataaacactgtcagactaaagtttttaaaatatacttatttctaagtatttatttcagcatttatgaatttgcaacattggcaagtgatttgggattttaaaattgcaaatgttcatttattcatatcattgaatacacgttgaacacatccacattgtataggatgtggtaattagcttgtaaccagggtatgatctgctattgttatttctcctctttattggaaaaaggcctcagttttaattattttcttcccaaaataaatcacacatttggttacaa

SEQ ID NO: 528500 - DNA, 3049 bp, Homo sapiens
  misc_feature (2)..(2): n is a, c, g, or t
  misc_feature (2435)..(2436): n is a, c, g, or t
  misc_feature (2453)..(2453): n is a, c, g, or t
tnacgtcaacccagtcaacaaaaaagtagcagctaacatcaactgaccttttataccaggtgcctattgaggtcatagtttaatttcttataactgtttcttatttcacttaccaactctgtcttcagttactcccagatttttactgtgtttgtacagatgaccttttgtttagattgaattgtctccccagaagtaagattactgtgagacatggtgaatggacattctcattacccttgatgtaaattgacagggttttgggtgtctcccagcctataatcttagcttctcaaattgctggaatttcaggcatgagccaccatgcctggcctgggctagtcctatattctctagagttctctttactttgtgctagccaatctctcattatgctgttcacctgttataatgaataattctctgtattaaattttaccactttaaacttttgagtggtttatgcttcctgattggactctgactaatatgttaggaagggtcccaggagataaacccacacagatgggatttgggcataggtttggtttcccagggggcagtgctgagctctttgccagtgggaaatgggatgctggtgatttccagtaggtgacctcacagtgactcaagctaccacttactgttgattgtgacgaaatgccagctgaggcacatgccttgggagctaagtggttgctgcccttgaccactgtgaagactggtgtgggaagggtcgttttggatgcacttgagcaggggtccccaacccctgagccatggagccgcaaggagccacacagcaggaggtgagcggtgtcgagtgagggagtgagggaagcttcgtctgtatttacagccactcccctttgctcacattcccgcctgagctccaccttctcagatgagcagcagcattagattctcataggagaacgcaccctgttgtgaaccgtgcatgtgagggatctaggttgcgctgtccttatgagagtctaatacctattgatctgtcactttctcccatcacgctcaggtgggaccatccagttgcaggaaaacaagcttaacacgcccactgattctacattatgctcctacctcccggcagcctctccaggcccagaactttctccagtcagcctctacagaccaagctcatgactcacaatggcctatttaggcccataccctacgtcacggcagtctccgcagatgagcctactgcctcacaacagcctccacaggcacagctccatcgttacaatggcctctttagacccagctcctgcctcccagccttctctccaggccctgaactttctcaagtcgacctcaccaggcccagctcatgcttctttgcagcctctccaggcccagctcctgcatcttggtggcccctccaggcccagcctctgcctcccgtcagcctctacagtcccaacgtctgcctcacagcagattcttcacgcccagcatctacctcactgtggaccccccaagccaagctcccaacctttcagcagcttctacacacccagctcctgccacccagtggcctctttaggccaagctcatgcttcacaagggcctttccaggcccaacttttgtctcatggcaaccttccctggccagattcctgcctgtctcccagcagcctagacaggcccaggtcttgcctcacactggcctctctacatccagcttatgcctcacggtggcctctccaggcccaactcctgtcccaggacgtcatctccgggcccaaaacttactcaagtcagactctctagtcccaactgctgcctcctggtggcctatgaaggcccaaaatctcctcaagttgacctttccaggcccagctcctgcctcctgtcagcgtctacaggcccaacctctgcctcatgggggcttctccaggcccacctcttcctcttggctgggtctacaggcacaactgctgcctcacaacagccttttttggcccagttcctgtccagctcatggcggccaatgtaggcccaaaacttcctcaagtcaaactctccaggcccaccttctgcttcccggtggcatgaacaggcccagctttgacttgagaacagcctctgcaggccctgctcttgcctcccaggggctttttccaggcccagctcttgcctcatggcagctgccccaggccaaatttctgcctgcctgccagcagcctcaacaggcatagctcctccctcacagtggcccatttaggcccaactcatgactgtcgggccatttccaggcctagtgcctgcctcgtggctgactcttgaagcccaaaacttcctcaaatcagccttttgcccaacttctgtctactgtcggactctacaggccagcctctgcctcacagtggaccctccagacccagatggtgtctcactgtggcatcctcagnngaagctcctgcctttcngcagcctctccaggcccagctcctcctgcctcccagtggcctctttcggcccagcccagctcatggctctcggcggccttcccaggccccgcttttgacttttggcagcctcttcaggcgcagaacttgatctccagtcggcctttgcaggcccggcctcctgcctctcgaaggcctgcacgggcccggcctcggcctcggcctcacagcggactctccacgcccagctagctctcgcctcactgcggcctccccagtccaaagctcctgcctttcggccacttcggcaggtccagctcctgcctgccagtggcctctttaggcccagctcattcctcacgtcggccattccaggccccgtttttcccttccggcagcctcttggcctctaatttgtttatcttttgtgtataaatcccaaaatattgaattttggaatatttccaccattatgtaaatattttggtaggtaatttatttggagtgagtttctgcgccaagcccgaattttttattttattttccttattatttggtgttaaacaggtttaatgacggtcatggcaactttttggcacaatgaaaaatatcgccca

SEQ ID NO: 528501 - DNA, 801 bp, Homo sapiens
agcggggggcgggaagagggaagcgccgaggctgcctgactggaatgagggtagctgcggcgactgcggcggctggagcggggccggccatggcggtgtggacgcgggccaccaaagcggggctggtggagctgctcctgagggagcgctgggtccgagtggtggccgatgctgagcggggagagcctgagcctgacgggcgacgcctgcgcggccgagctggagcccgctctgggacccgcggccgccgccttcaacgtgctcccaaacggcggcgtgcgcgggcgactctgctgcccgggagcccaagccacggcctggggcccccggagccgccggcgccgctcggggccccgcgggttgaggccgggcggcgtcgccgcccggtgcgccgggtgcggggtgggtgaaagccaagaggcgggccggcttggggcattcagcgcattccacggggtcggccgcgagaacccggatgccgatcctcaatctcccaagatcttcccggggctggctgccgacccgagccgggcgctgcggcttggccgaagcccattcctggtgggtgaacgggaccggacttggccagggcaacccaggaccaggccgtgcaggcgcttgaaacgcaccggcaagcgtcctgtgctggaaggtacaagttcatacccaggaagttaacacccctattttcaagaaagacatcataagatattccgaatctgccggtgggaaaggtgccagaccccaagtcaacaagacttaatgtgcagagaagacacatggagtccgacaaaaaaacag

SEQ ID NO: 528502 - DNA, 2091 bp, Homo sapiens
actttgtgcacatagcctttaatgctttgagattgttttggaatttctggcacattttgagaagaaaactgcctgtgtctctacttggctctctgagaaaaaaaatgagtttacgtactagaggaactatacattgtaggcttggaaacaggctggcacactgaataatggcagtctaccgtaggtgctcagaaatggaagcagagctgtattgtctgctacctgcatgtgtaatgaacttcatagcttgctatggtggcagggagatcatgcggagtgttcagcttcacacggagcctgggaacaaggtccaggggagaagtattttcaatactccctctcacagcagtttattccatcaggttccccaatggcaggtcggctccacgtaggcctactttgcgcgtgcgcatcatcgtttcgacgcgctcggaagcaacttcctttgcctgctcaccgccagcgtaggtgctaccaccgctgccgtcgccgccgccattttgatggcaggaagagtccggttctgggacagctggagacagtggtggtgactgaaataactttaccaaaggaaagctattttgcgaactatcttctccagcggagatggccaatgtgctttgtaacagagccagactggtttcctatctcccaggattttgctctttagttaaaagggttgtcaatcccaaagccttttcgactgcaggatcatcaggttcggatgagtctcatgtggctgctgcacctccagatatatgctctcgaacagtgtggcctgatgaaactatgggaccctttggacctcaagatcagaggttccagcttcctgggaacataggttttgattgtcacctcaatgggactgcttcacagaagaaaagcctggttcataaaactttgcctgatgttctagcagaacctttatcaagtgaaagacatgagtttgtgatggcacaatatgtgaatgaatttcagggtaatgatgcacctgttgaacaagaaattaacagtgcagaaacttactttgaaagtgccagagtagagtgtgcaatacaaacatgtccagaattgctgcgaaaagattttgaatcactgtttccagaagtagctaatggcaaactaatgattctgactgtaacacaaaaaactaagaatgatatgactgtttggagtgaagaagtagaaattgaaagagaagtgctcttagaaaagttcatcaatggtgctaaggaaatttgctatgctcttcgagctgagggttattgggctgactttattgacccatcatctggtttggcattttttggaccatatacaaacaacactctttttgaaactgatgaacgctaccgacatttaggattctctgttgatgaccttggatgctgtaaagtgattcgtcatagtctctggggtacccatgtagttgtagggagtatcttcactaatgcaacaccagacagccatattatgaagaaattaagtggaaattagcagaaatatccattcatttgctgtactatttgtatgtaatatttgggttgatctataaacactgtcagactaaagtttttaaaatatacttatttctaagtatttatttcagcatttatgaatttgcaacattggcaagtgatttgggattttaaaattgcaaatgttcatttattcatatcattgaatacacgttgaacacatccacattgtataggatgtggtaattagcttgtaaccagggtatgatctgctattgttatttctcctctttattggaaaaaggcctcagttttaattattttcttcccaaaataaatcacacatttggttacaaaaaaaaacaaaaaaaacacaacaacaaaaccacgaccacagaaagagggggggcccaaaaaaatccgcgagggcgccagtgtgccccccacgctttgtgaccaccggggccccaggggggcgaataaaggagagacggccgcgtaaaagcgtggcgtgcgaaacggcctcggctcgggagacccctctcggggggcatgggccccccacagttagcggcaaaacagcgtgggtaacccgcctctcgaagtcggcttt

SEQ ID NO: 528503 - DNA, 653 bp, Homo sapiens
  misc_feature (1)..(1): n is a, c, g, or t
  misc_feature (16)..(16): n is a, c, g, or t
  misc_feature (36)..(36): n is a, c, g, or t
  misc_feature (44)..(44): n is a, c, g, or t
  misc_feature (84)..(84): n is a, c, g, or t
  misc_feature (634)..(634): n is a, c, g, or t
ncggtcccccaaatgnatcctatcatagtaaatcanctccacgnaagggctacaatcgaaactgcctctcttcaaaattccagntatccagctcttgatgcggccgatgcgactcgacacttttcagcgctatactaagctcaggcactttgaactgaaaccgccctttattatcctgagcaaataaccttcccaccctcaagacatggggtgccttgatctcctttcgagttccgatactgggcacatacccacgattgggaaacagcgccgttacattaaagttcttatcgatcatcgccgtttttagaaacgcatattgatccgccgcaccatccgtcgcattacctgcggtataccccatatacatcgccacaaacatcgactccggcattgtcgaactgtcggccacggcaatgctctcaacctgctccgccaagtccgtagtcttgaacaacggtgactcactccaggcttcaatgacggtttgcggcatactccaactgtcgtcgtacttcttgtagaccatgttcaagcgcaacatcgggttactgtgtactttgataaccggtgaacccggatctggcggtatgggggtaccacctgggagataccttcttcaacgtcatctgancgggtgtatcccgcatcac

SEQ ID NO: 528504 - DNA, 1467 bp, Homo sapiens
actttgtgcacatagcctttaatgctttgagattgttttggaatttctggcacattttgagaagaaaactgcctgtgtctctacttggctctctgagaaaaaaaatgagtttacgtactagaggaactatacattgtaggcttggaaacaggctggcacactgaataatggcagtctaccgtaggtgctcagaaatggaagcagagctgtattgtctgctacctgcatgtgtaatgaacttcatagcttgctatggtggcagggagatcatgcggagtgttcagcttcacacggagcctgggaacaaggtccaggggagaagtattttcaatactccctctcacagcagtttattccatcaggttccccaatggcaggtcggctccacgtaggcctactttgcgcgtgcgcatcatcgtttcgacgcgctcggaagcaacttcctttgcctgctcaccgccagcgtaggtgctaccaccgctgccgtcgccgccgccattttgatggcaggaagagtccggttctgggacagctggagacagtggtggtgactgaaataactttaccaaaggaaagctattttgcgaactatcttctccagcggagatggccaatgtgctttgtaacagagccagactggtttcctatctcccaggattttgctctttagttaaaagggttgtcaatcccaaagccttttcgactgcaggatcatcaggttcggatgagtctcatgtggctgctgcacctccagatatatgctctcgaacagtgtggcctgatgaaactatgggaccctttggacctcaagatcagaggttccagcttcctgggaacataggttttgattgtcacctcaatgggactgcttcacagaagaaaagcctggttcataaaactttgcctgatgttctagcagaacctttatcaagtgaaagacatgagtttgtgatggcacaatatgtgaatgaatttcagggtaatgatgcacctgttgaacaagaaattaacagtgcagaaacttactttgaaagtgccagagtagagtgtgcaatacaaacatgtccagaattgctgcgaaaagattttgaatcactgtttccagaagtagctaatggcaaactaatgattctgactgtaacacaaaaaactaagaatgatatgactgtttggagtgaagaagtagaaattgaaagagaagtgctcttagaaaagttcatcaatggtgctaaggaaatttgctatgctcttcgagctgagggttattgggctgactttattgacccatcatctggtttggcattttttggaccatatacaaacaacactctttttgaaactgatgaacgctaccgacatttaggattctctgttgatgaccttggatgctgtaaagtgattcgtcataatatggctgtctggtgttgcattagtgaagatactccctacaactacatggtaccccag

SEQ ID NO: 528505 - DNA, 1297 bp, Homo sapiens
  misc_feature (1176)..(1176): n is a, c, g, or t
actttgtgcacatagcctttaatgctttgagattgttttggaatttctggcacattttgagaagaaaactgcctgtgtctctacttggctctctgagaaaaaaaatgagtttacgtactagaggaactatacattgtaggcttggaaacaggctggcacactgaataatggcagtctaccgtaggtgctcagaaatggaagcagagctgtattgtctgctacctgcatgtgtaatgaacttcatagcttgctatggtggcagggagatcatgcggagtgttcagcttcacacggagcctgggaacaaggtccaggggagaagtattttcaatactccctctcacagcagtttattccatcaggttccccaatggcaggtcggctccacgtaggcctactttgcgcgtgcgcatcatcgtttcgacgcgctcggaagcaacttcctttgcctgctcaccgccagcgtaggtgctaccaccgctgccgtcgccgccgccattttgatggcaggaagagtccggttctgggacagctggagacagtggtggtgactgaaataactttaccaaaggaaagctattttgcgaactatcttctccagcggagatggccaatgtgctttgtaacagagccagactggtttcctatctcccaggattttgctctttagttaaaagggttgtcaatcccaaagccttttcgactgcaggatcatcaggttcggatgagtctcatgtggctgctgcacctccagatatatgctctcgaacagtgtggcctgatgaaactatgggaccctttggacctcaagatcagaggttccagcttcctgggaacataggttttgattgtcacctcaatgggactgcttcacagaagaaaagcctggttcataaaactttgcctgatgttctagcagaacctttatcaagtgaaagacatgagtttgtgatggcacaatatgtgaatgaatttcagggtaatgatgcacctgttgaacaagaaattaacagtgcagaaacttactttgaaagtgccagagtagagtgtgcaatacaaacatgtccagaattgctgcgaaaagattttgaatcactgtttccagaagtagtaatgggaactaatgattctgatgtaacacaaaaatagatgttgactgtggggtgaagtgattgnagagggcttgaaaagtctcaaggggcaggaatggatggctgagcggggtttggggggttatgggccttggtggggtttggccgttaaactttggagtgagcggttggattgggaacggggg

SEQ ID NO: 528506 - DNA, 170 bp, Homo sapiens
agcttacttacttacccagtgtgcccaggcatatagagaatgggagaaaatttatgccatctacttatctgacaaaaggctaatatccagaatctacaaagaacaccaacaaatttacaagaaaaaaaaacaaaccccatcaaaaaatgttaagaaatgggttaagtaag

SEQ ID NO: 528507 - DNA, 1483 bp, Homo sapiens
  misc_feature (68)..(68): n is a, c, g, or t
  misc_feature (81)..(81): n is a, c, g, or t
agcgggagctgcactgccggctccgggctgggggatctgtgcctggcatggggacgagttctggcctncttagggtacggngagagcttggactttggtcctgacgtggtggacgacacaccttcgaagagtggacgttacctcagttgtctgttgttagagtttaatcgatcactcctctgttttgttgtgttctttcccagaaataactttaccaaaggaaagctattttgcgaactatcttctccagcggagatggccaatgtgctttgtaacagagccagactggtttcctatctcccaggattttgctctttagttaaaagggttgtcaatcccaaagccttttcgactgcaggatcatcaggttcggatgagtctcatgtggctgctgcacctccagatatatgctctcgaacagtgtggcctgatgaaactatgggaccctttggacctcaagatcagaggttccagcttcctgggaacataggttttgattgtcacctcaatgggactgcttcacagaagaaaagcctggttcataaaactttgcctgatgttctagcagaacctttatcaagtgaaagacatgagtttgtgatggcacaatatgtgaatgaatttcagggtaatgatgcacctgttgaacaagaaattaacagtgcagaaacttactttgaaagtgccagagtagagtgtgcaatacaaacatgtccagaattgctgcgaaaagattttgaatcactgtttccagaagtagctaatggcaaactaatgattctgactgtaacacaaaaaactaagaatgatatgactgtttggagtgaagaagtagaaattgaaagagaagtgctcttagaaaagttcatcaatggtgctaaggaaatttgctatgctcttcgagctgagggttattgggctgactttattgacccatcatctggtttggcattttttggaccatatacaaacaacactctttttgaaactgatgaacgctaccgacatttaggattctctgttgatgaccttggatgctgtaaagtgattcgtcatagtctctggggtacccatgtagttgtagggagtatcttcactaatgcaacaccagacagccatattatgaagaaattaagtggaaattagcagaaatatccattcatttgctgtactatttgtatgtaatatttgggttgatctataaacactgtcagactaaagtttttaaaatatacttatttctaagtatttatttcagcatttatgaatttgcaacattggcaagtgatttgggattttaaaattgcaaatgttcatttattcatatcattgaatacacgttgaacacatccacattgtataggatgtggtaattagcttgtaaccagggtatgatctgctattgttatttctcctctttattggaaaaaggcctcagttttaattattttcttcccaaaataaatcacacatttggttacaa

SEQ ID NO: 528508 - DNA, 131 bp, Homo sapiens
ggttgattgtgactgcctctctcactctggcctccagacacggcaggtgatcccatgtgacatgcggggggcactgtgcggcaggagcgagtgacgggtcgccatggaattctcctcatgagaaaacttct

SEQ ID NO: 528509 - DNA, 634 bp, Homo sapiens
  misc_feature (22)..(22): n is a, c, g, or t
  misc_feature (73)..(73): n is a, c, g, or t
  misc_feature (75)..(75): n is a, c, g, or t
  misc_feature (84)..(84): n is a, c, g, or t
  misc_feature (95)..(95): n is a, c, g, or t
  misc_feature (101)..(101): n is a, c, g, or t
  misc_feature (120)..(120): n is a, c, g, or t
  misc_feature (175)..(175): n is a, c, g, or t
  misc_feature (190)..(190): n is a, c, g, or t
  misc_feature (202)..(202): n is a, c, g, or t
  misc_feature (217)..(217): n is a, c, g, or t
  misc_feature (223)..(223): n is a, c, g, or t
  misc_feature (226)..(226): n is a, c, g, or t
  misc_feature (425)..(425): n is a, c, g, or t
  misc_feature (536)..(536): n is a, c, g, or t
  misc_feature (540)..(540): n is a, c, g, or t
  misc_feature (546)..(546): n is a, c, g, or t
  misc_feature (548)..(548): n is a, c, g, or t
  misc_feature (552)..(552): n is a, c, g, or t
gttcatggttattacacaagtnattacacaagtccagtgtataaacactacctgaacacattgtaagttcttntnatattattnaatattatatnataaangtttttttgcattaattcnataattctcaaacagatattcatcgaaatgaggtaggtctaatgtgtcatttggnaaagcatttaatggngaggaggaaaantacttattgaaaatnttagtnttnatcggactctccaagtttaatgttctaacgcaggcattatttgttagagagtctggctgaacttcacatggatttttcttggtggggctacaataattatggtcctgtctcagatgtgtgttctgggaaacatcattgaattcacttggtactggtggtgggatatgactatctcccattcccaaatacctaaagtcancttccccattttctgacagctctgttgaaacaggtgtaggagacaataattccgctaaaattttttcatgagtttgactactgtacagggaaacaccaggaaaagtggtgnatgnagaatnantggnaatattaattggatatggtagaataatttaacaagtcctctattgattcacaatcatttggagacccatcctggggaacctg

SEQ ID NO: 528510 - DNA, 1897 bp, Homo sapiens
actttgtgcacatagcctttaatgctttgagattgttttggaatttctggcacattttgagaagaaaactgcctgtgtctctacttggctctctgagaaaaaaaatgagtttacgtactagaggaactatacattgtaggcttggaaacaggctggcacactgaataatggcagtctaccgtaggtgctcagaaatggaagcagagctgtattgtctgctacctgcatgtgtaatgaacttcatagcttgctatggtggcagggagatcatgcggagtgttcagcttcacacggagcctgggaacaaggtccaggggagaagtattttcaatactccctctcacagcagtttattccatcaggttccccaatggcaggtcggctccacgtaggcctactttgcgcgtgcgcatcatcgtttcgacgcgctcggaagcaacttcctttgcctgctcaccgccagcgtaggtgctaccaccgctgccgtcgccgccgccattttgatggcaggaagagtccggttctgggacagctggagacagtggtggtgactgtacggatggtttccgcccatgttagcccctccaaatttgcccgtgttggggttacagccctcgaaataactttaccaaaggaaagctattttgcgaactatcttctccagcggagatggccaatgtgctttgtaacagagccagactggtttcctatctcccaggattttgctctttagttaaaagggttgtcaatcccaaagccttttcgactgcaggatcatcaggttcggatgagtctcatgtggctgctgcacctccagatatatgctctcgaacagtgtggcctgatgaaactatgggaccctttggacctcaagatcagaggttccagcttcctgggaacataggttttgattgtcacctcaatgggactgcttcacagaagaaaagcctggttcataaaactttgcctgatgttctagcagaacctttatcaagtgaaagacatgagtttgtgatggcacaatatgtgaatgaatttcagggtaatgatgcacctgttgaacaagaaattaacagtgcagaaacttactttgaaagtgccagagtagagtgtgcaatacaaacatgtccagaattgctgcgaaaagattttgaatcactgtttccagaagtagctaatggcaaactaatgattctgactgtaacacaaaaaactaagaatgatatgactgtttggagtgaagaagtagaaattgaaagagaagtgctcttagaaaagttcatcaatggtgctaaggaaatttgctatgctcttcgagctgagggttattgggctgactttattgacccatcatctggtttggcattttttggaccatatacaaacaacactctttttgaaactgatgaacgctaccgacatttaggattctctgttgatgaccttggatgctgtaaagtgattcgtcatagtctctggggtacccatgtagttgtagggagtatcttcactaatgcaacaccagacagccatattatgaagaaattaagtggaaattagcagaaatatccattcatttgctgtactatttgtatgtaatatttgggttgatctataaacactgtcagactaaagtttttaaaatatacttatttctaagtatttatttcagcatttatgaatttgcaacattggcaagtgatttgggattttaaaattgcaaatgttcatttattcatatcattgaatacacgttgaacacatccacattgtataggatgtggtaattagcttgtaaccagggtatgatctgctattgttatttctcctctttattggaaaaaggcctcagttttaattattttcttcccaaaataaatcacacatttggttacaa

SEQ ID NO: 528511 - DNA, 1751 bp, Homo sapiens
accagagttaaggggcatcaggcacaaaaacgtttccaagagcatgatgggccacggatctgactactcactcagtgaagggcgtgtgggtcgtgtgccaaccgtcgttgtaggtgatgtccaacttcaagatgagatcataagacggatcatgcatgttcaccaagtgaagacaaccccacatggcaatgacagtgccaaagcccagccgggcacaggaccaaagccgcgtgagtctccgaccataccgcgcaatcttcacttgaacttgactgcaccatgacagaacacctgagggcgcgtttgacactaatccttgctcctacagacgatactcactcacgcactagacagagcgactacggaccctcaacgggctacaccctaccgagcgaattcccacgcacacgcctccgacaccacccctgctcgccacgacacccgctcccgccgccccacccgcagacaccaagcgcaaccccgacggcacatccagccacgcgctctacccacgcctcgcaccgcctcccactccacacagcgattacattacccttcgatccctcatagctcaccaccactctactcacaatccctagcgctccccaacaaacaccgacttccttccaatcgcacattaccgtccacacactacaacacctccatacctccgccacccacccacccaacccactccaaccccacctcgcacacaaaccccaacacaccccccacacacccctctcccaacacctaccacaacctttacctcaaacgccgcgaatcatcaagacacataccatagccacctcaaccacacaataccccacacaacaccagccacaccacacccacctcccttacataccgcaaacaccttcaactcaccccgacactatacatcccacttccaccaacacacccaacccacaccacacacccacctacccacccctccccacacccccccaccaccgccctcacacacaccacgcactccaaaatccacccccctacacctattccacaaacacatccacatatacactcaccactccctatacatatcacacccaaccaactaacacccatcacaacaccacacccaccccctcacccatcaactaacacacaacagaaaaccataccgctagacatgcgtacacttcacatcaccctcactccatcatcgaacctactttacaccatatcacacactcataacatcagccacttacacccacctacatcactcacatcctaaccaccaccaactaccacatcccccccaatccaacaacccccatcacaacaccaacaccacatcacagctatcttcacaacgaacgtccctaccctacctcacatatcactacgctttctcaactattattataataacaaacaaatagacatctaacaacaccgcactacctccctcgcacaccaactccttacaaatcttacccatacaaactaaccacaaccaccagcgcctacaacgtccaacaccaaccatatcacacagaaaaacctcataccacaccacaacccagcctcacaaacaccaccacaaccaacactcacaccaccacacacgccccaccacctcgccaacctacaaaccatcaccacccaccaaacatccccacctcccacacaccactcccccccacacccccccaccatcccaaccaccccccccacccctcacctcacaccaacacacccaaccactccctcccacaccg

SEQ ID NO: 528512 - DNA, 187 bp, Homo sapiens
tatccattcgagagattgtgtgcccttgcgactgtattggcaattccaatgagttgtttggtgacggctcaggatactgtgtgcactgccaggggaacacaacaggtagagcactgtagaaaagtgtctggattggttatatcgggtgattccatcagggtgagcatccaatattctgccagcctgt

SEQ ID NO: 528513 - DNA, 1670 bp, Homo sapiens
  misc_feature (67)..(68): n is a, c, g, or t
  misc_feature (127)..(127): n is a, c, g, or t
gccttcaaggtaagtttaacttaaccctctttgaaatcctcaagtcctgttttaatgaaaaacacannaaactaactcccttccccctggcaagagttccttgaagaaagaataagatgttaaggtnaggtaatggaagcccaatggcaggtcggctccacgtaggcctactttgcgcgtgcgcatcatcgtttcgacgcgctcggaagcaacttcctttgcctgctcaccgccagcgtaggtgctaccaccgctgccgtcgccgccgccattttgatggcaggaagagtccggttctgggacagctggagacagtggtggtgactgtacggatggtttccgcccatgttagcccctccaaatttgcccgtgttggggttacagccctcgaaataactttaccaaaggaaagctattttgcgaactatcttctccagcggagatggccaatgtgctttgtaacagagccagactggtttcctatctcccaggattttgctctttagttaaaagggttgtcaatcccaaagccttttcgactgcaggatcatcaggttcggatgagtctcatgtggctgctgcacctccagatatatgctctcgaacagtgtggcctgatgaaactatgggaccctttggacctcaagatcagaggttccagcttcctgggaacataggttttgattgtcacctcaatgggactgcttcacagaagaaaagcctggttcataaaactttgcctgatgttctagcagaacctttatcaagtgaaagacatgagtttgtgatggcacaatatgtgaatgaatttcagggtaatgatgcacctgttgaacaagaaattaacagtgcagaaacttactttgaaagtgccagagtagagtgtgcaatacaaacatgtccagaattgctgcgaaaagattttgaatcactgtttccagaagtagctaatggcaaactaatgattctgactgtaacacaaaaaactaagaatgatatgactgtttggagtgaagaagtagaaattgaaagagaagtgctcttagaaaagttcatcaatggtgctaaggaaatttgctatgctcttcgagctgagggttattgggctgactttattgacccatcatctggtttggcattttttggaccatatacaaacaacactctttttgaaactgatgaacgctaccgacatttaggattctctgttgatgaccttggatgctgtaaagtgattcgtcatagtctctggggtacccatgtagttgtagggagtatcttcactaatgcaacaccagacagccatattatgaagaaattaagtggaaattagcagaaatatccattcatttgctgtactatttgtatgtaatatttgggttgatctataaacactgtcagactaaagtttttaaaatatacttatttctaagtatttatttcagcatttatgaatttgcaacattggcaagtgatttgggattttaaaattgcaaatgttcatttattcatatcattgaatacacgttgaacacatccacattgtataggatgtggtaattagcttgtaaccagggtatgatctgctattgttatttctcctctttattggaaaaaggcctcagttttaattattttcttcccaaaataaatcacacatttggttacaa

SEQ ID NO: 528514 - DNA, 427 bp, Homo sapiens
gcggccgcctactactactactaaattcgcggccgcgtcgacattctcatgactactttggtagcatatgaagaagtattgtctacatatgttcaaagagaggatgcgctgttggaggtccaaggattttcccacaaatcacatgaacacaaatctcagtcagacagtgatagcttattgcaccccaggactggtcaaccaggtctaccatctgtattcaggaactaaactgtaacccagaggtaagaccatcgagagaccagtccagtgtaacttccgactggatgttctattaatgagatcaggatgttactggcatctataaaacaaactccgagcagaggaggcatcctcatgtttcagggaagcatctcagaacaaaatggcgtcgacgcggccgcgaatttagtagtagtagtagtcgacc

SEQ ID NO: 528515 - DNA, 194 bp, Homo sapiens
gtagtgagtgtgtacaggcggagttaaatgctttatagcacaagacagaaaaaactgcgctagaagccaacttattcatacatcatcatcgttcttcttgcatctatcatctagcttcatcgttcgctccgtcctcctcaatacctcgttcatactatcctcatctatacctacctactatccttactagtaag

SEQ ID NO: 528516 - DNA, 1026 bp, Homo sapiens
gcctcagaattcacaaaatttccacaaaatctagtccaaaggaggctggcagagtctggaagggtattggtagtgcatgggggcaggagggccctacctgatgggtgcaacccttacccctatagcctccctggaaaatgtttttctgccagggagcttgaaagttattcagaacctcttccccagaaaggagactagattgcctgttgttttgagtgttatgtgagcctcagaaagtatgagtcagttttgcccacccacatctccccacactaacctgggttcccatttccttccaatcccatacccccataagagccatttaggggccactatttgactagggattcaggctgcttgggataaagatgcaaggaccaggactcccatcctcacctacatggactggctagagtcctcactcccagtccaaatgtcctccagaagccatctggctagaggccagacccaaccaggagggagggggctatagctacaggaagcaccccatgccacagctagggtggccctatgcaagttcagcaacaacctagtcccttcccactacacctggctcccatgacatactgagggaccaactgggcccaaagacagatgacccagagactgaaatggcctcaagctgcctcacttcctacaagagcagcctgtggcatcttagccttgggatgatactcatggtgggtcagagagactcagccctgaggttcaagggagctacaggaacagatctgggagccaccagggtcagaccgctacctccgcgcacgacgggccaggaagagagacaagcgcatggggaggggtaaggctgaacacaacggacaaggcccgggccgggcacagggcacatcctggacacccacgacatgaccaagcatgggcaccaagcagacaaggccaaaaaggcccggaccagaacactacaggcaaccccaagacagaacacaccaggcaagacaccaccgaggcacaaaacccgggacctcgagaaccatacagaaa

SEQ ID NO: 528517 - DNA, 1967 bp, Homo sapiens
actttgtgcacatagcctttaatgctttgagattgttttggaatttctggcacattttgagaagaaaactgcctgtgtctctacttggctctctgagaaaaaaaatgagtttacgtactagaggaactatacattgtaggcttggaaacaggctggcacactgaataatggcagtctaccgtaggtgctcagaaatggaagcagagctgtattgtctgctacctgcatgtgtaatgaacttcatagcttgctatggtggcagggagatcatgcggagtgttcagcttcacacggagcctgggaacaaggtccaggggagaagtattttcaatactccctctcacagcagtttattccatcaggttccccaatggcaggtcggctccacgtaggcctactttgcgcgtgcgcatcatcgtttcgacgcgctcggaagcaacttcctttgcctgctcaccgccagcgtaggtgctaccaccgctgccgtcgccgccgccattttgatggcaggaagagtccggttctgggacagctggagacagtggtggtgactgaaataactttaccaaaggaaagctattttgcgaactatcttctccagcggagatggccaattagaaacggggtttcaccatgttggccaggctagacctcaggtaatccacccaccttcgcctccctaagtgctgggattacaggcatgagccactgcacccagccaagatttgagaatctcacaggttaacgggtgctttgtaacagagccagactggtttcctatctcccaggattttgctctttagttaaaagggttgtcaatcccaaagccttttcgactgcaggatcatcaggttcggatgagtctcatgtggctgctgcacctccagatatatgctctcgaacagtgtggcctgatgaaactatgggaccctttggacctcaagatcagaggttccagcttcctgggaacataggttttgattgtcacctcaatgggactgcttcacagaagaaaagcctggttcataaaactttgcctgatgttctagcagaacctttatcaagtgaaagacatgagtttgtgatggcacaatatgtgaatgaatttcagggtaatgatgcacctgttgaacaagaaattaacagtgcagaaacttactttgaaagtgccagagtagagtgtgcaatacaaacatgtccagaattgctgcgaaaagattttgaatcactgtttccagaagtagctaatggcaaactaatgattctgactgtaacacaaaaaactaagaatgatatgactgtttggagtgaagaagtagaaattgaaagagaagtgctcttagaaaagttcatcaatggtgctaaggaaatttgctatgctcttcgagctgagggttattgggctgactttattgacccatcatctggtttggcattttttggaccatatacaaacaacactctttttgaaactgatgaacgctaccgacatttaggattctctgttgatgaccttggatgctgtaaagtgattcgtcatagtctctggggtacccatgtagttgtagggagtatcttcactaatgcaacaccagacagccatattatgaagaaattaagtggaaattagcagaaatatccattcatttgctgtactatttgtatgtaatatttgggttgatctataaacactgtcagactaaagtttttaaaatatacttatttctaagtatttatttcagcatttatgaatttgcaacattggcaagtgatttgggattttaaaattgcaaatgttcatttattcatatcattgaatacacgttgaacacatccacattgtataggatgtggtaattagcttgtaaccagggtatgatctgctattgttatttctcctctttattggaaaaaggcctcagttttaattattttcttcccaaaataaatcacacatttggttacaa

SEQ ID NO: 528518 - DNA, 188 bp, Homo sapiens
tcttatcttttttcctcactatctggagttgatctcccttttactcccaggccatcactcttgacttccagatatcaggtccctgccttctccctggtgctggaacaggtcagattcctggaggacgagattcatgagtttgggagtaatcaggaatcatccctcagtatctattctgattgttatgg

SEQ ID NO: 528519 - DNA, 1205 bp, Homo sapiens
ggccgtcgtcggagaccgagtggttctatctcccaggattgtctataagggtgtcaatcccaaagccttttcgactgcaggatcatcaggttcggatgagtctcatgtggctgctgcacctccagatatatgctctcgaacagtgtggcctgatgaaactatgggaccctttggacctcaagatcagaggttccagcttcctgggaacataggttttgattgtcacctcaatgggactgcttcacagaagaaaagcctggttcataaaactttgcctgatgttctagcagaacctttatcaagtgaaagacatgagtttgtgatggcacaatatgtgaatgaatttcagggtaatgatgcacctgttgaacaagaaattaacagtgcagaaacttactttgaaagtgccagagtagagtgtgcaatacaaacatgtccagaattgctgcgaaaagattttgaatcactgtttccagaagtagctaatggcaaactaatgattctgactgtaacacaaaaaactaagaatgatatgactgtttggagtgaagaagtagaaattgaaagagaagtgctcttagaaaagttcatcaatggtgctaaggaaatttgctatgctcttcgagctgagggttattgggctgactttattgacccatcatctggtttggcattttttggaccatatacaaacaacactctttttgaaactgatgaacgctaccgacatttaggattctctgttgatgaccttggatgctgtaaagtgattcgtcatagtctctggggtacccatgtagttgtagggagtatcttcactaatgcaacaccagacagccatattatgaagaaattaagtggaaattagcagaaatatccattcatttgctgtactatttgtatgtaatatttgggttgatctataaacactgtcagactaaagtttttaaaatatacttatttctaagtatttatttcagcatttatgaatttgcaacattggcaagtgatttgggattttaaaattgcaaatgttcatttattcatatcattgaatacacgttgaacacatccacattgtataggatgtggtaattagcttgtaaccagggtatgatctgctattgttatttctcctctttattggaaaaaggcctcagttttaattattttcttcccaaaataaatcacacatttggttacaa

SEQ ID NO: 528520 - DNA, 157 bp, Homo sapiens
agtcttttttttaaaaaaacccaaggggttttggggggccctttgggggtgcctgccaactgtttcccaaaaattttttaggattttttttattttaataattaaaccccagggaatgccttccgggccttagccacttaggccaacccttttgggc

SEQ ID NO: 528521 - DNA, 132 bp, Homo sapiens
gctggatggacttgtatcccagctactcaggaggctgaagcagaaggtcaattgggcctggaatttgaggctgcagtgactgtgattgtgccactgtcctccagcctgggcaaagagtgaaccctgtttcgg

SEQ ID NO: 528522 - DNA, 603 bp, Homo sapiens
ccaaaaaaaaccccttttttataataatttttggtattcttttggttttcataaaaaatttttttctttttttaaaaccaaatgtaaaaatccgggctttttaaaccttcccccaaaacccaaataaaattaaatggtaaaataccttaaaactatttccaaattcccatttttaatccttttttgtatttctctaaatttttttaaattgggtccttatgtatttcttaaaatttcccttaaaaattttaattttttgcccctttcaaattttgaaaaaaaaaaaaaattttttgtattttccccccccccccaaataaattttttggttcttcctccaattagggtctttttttataacctccaaaaccttttttaaaaaaaaattttatttcccctttttttaaaaaaattttaaaattccccaaaaaaccttttttttattgctttttccagttctaaaaaattttttaatgtttgggggcagggctttatttaaccccttttaaaaaaaaaaatttgggacccccggtgtttggtccatccctttggaaatttttaaaaaaaaatattttttaacccggctctctggaggtaattccc

SEQ ID NO: 528523 - DNA, 1149 bp, Homo sapiens
aattatttgttgctctcttgagaaagattgggttgtttcatgtggtagatttatcttgtgttttgttcgttaattggccctgcgcccttgtgttttagagattgcgctggcgtgttgtgggggcggctcgcggacgttgtgtggataagaagtgattggtgtgtttggggggggggcgggggcgacacagacgcccccgctcgctgttgtgcgccccctttgtgtttttttctcacctcgagagttagaacacccgcgtcgcgtcgctctctcttcttggttgcgcacacacagagagatatgtctttcttttagtcatgtgtgtgtgtgtgtgtctctctcatctctctctgtgagagagtcacctctctgtgtggtgtgtatgtgagataaagagaagaaactctttataagagcgccacacaccccgcgctctctcctctcgtgtgtctctctctctcacacacagcagtgtgtattatagagcccccccgcgcgcgcgcgtttttcttcgttctcgctcgaggtgtggggatgatcatctctcgctctcccacacacaccccctactctctctctgtgtctgcgctctgcgcgcgcgcgagagagagaagagagagagagacacatctctgttctcccactctctctctcgagacacacctctccgcccacactctctctctctctctctctctctctcctcccacaccccccccctctctgttgtcacagctctctctctctctctctctctctactcttatatatatttgtgtgaaatagtatatgtgtgtgagatataatatattttacacccctctctttatctctctctctttttcgacacacacggtgtgtgtttaaagaagaaacacccgcccaccgccccccgcgccactactatatatttttgtgggtgtgtgtgtgtggggagacacacacagcagcagagagaggagaggacgacacacaggagagagaaatatattttttaacacacacataacccccctttttggaacacacagtgtgtgtatataatctctctctgtgttctgtttttgtgagaaaaaagagagagaaaaaacacacacacgtgtcctcttttgggaccacacacacaaaaatttttctcctttttttata

SEQ ID NO: 528524 - DNA, 642 bp, Homo sapiens
  misc_feature (190)..(190): n is a, c, g, or t
  misc_feature (208)..(208): n is a, c, g, or t
ttagtctagctttcttgtatacatcagccttcacatccatgaacgtgagtcaagtagcaattggtcacattgatagtgagccagatcccttttcagagctcctattcatgcgtccgtatcatatcatccatcactttcatcttcgctcagtcatctgctctcagatctgtaaggcatgagagcctgaagnagaagttggatactgagnaacggcctgtgcatattttatatccttcgtgtcgtgtggtgatatgtatagggtacacatggattttctctgaaaaagctctgcttaatgtcaggtgtctggcacgcaggtaacatctgcctaagtatcaccaataccgaagatctgagagcctctcagttctgatcctctgtataacccttagtcgccgtatctgcttgcacagtccatatataaatttagtcagctaattgcaagcttcatctgtatagcgaatccgcctgtctccgatgtaaataccgtaagcagtaggatcatccacgtgctcatgcatcagtcagcccaattcgtagatattcgtggtcactctggggatacccatctcagtgcattcagctgccacggttgatagtccaaagcttggcttcagtacagcgcctatatccttgtatgcg

SEQ ID NO: 528525 - DNA, 144 bp, Homo sapiens
  misc_feature (8)..(8): n is a, c, g, or t
  misc_feature (92)..(92): n is a, c, g, or t
  misc_feature (124)..(124): n is a, c, g, or t
ggagaagnactaatgtgcaacagcagtggacatctactcctttggcatgtgtcactggagatggcagtcctggagattagggaatggagagnctcatatgtgccacaggaagccatcagcagtncatccagcttctagaagacc

SEQ ID NO: 528526 - DNA, 209 bp, Homo sapiens
aactgacgcgaaggaagctctcagctagggaaagagttaaattttagattacagaacatggattcagggagtgtctggaacaaattggctgacccttactggtaacctgctattcttctggtgttatccttcaggattgttccactaaaatttatttttcaaaaaatttacttcacattattctatgtaagtgatgacgcgtcagtttg

SEQ ID NO: 528527 - DNA, 1027 bp, Homo sapiens
  misc_feature (31)..(31): n is a, c, g, or t
  misc_feature (76)..(76): n is a, c, g, or t
  misc_feature (125)..(125): n is a, c, g, or t
  misc_feature (371)..(371): n is a, c, g, or t
  misc_feature (401)..(402): n is a, c, g, or t
  misc_feature (404)..(404): n is a, c, g, or t
  misc_feature (422)..(422): n is a, c, g, or t
  misc_feature (424)..(424): n is a, c, g, or t
  misc_feature (435)..(435): n is a, c, g, or t
  misc_feature (454)..(454): n is a, c, g, or t
  misc_feature (460)..(460): n is a, c, g, or t
  misc_feature (501)..(501): n is a, c, g, or t
  misc_feature (545)..(545): n is a, c, g, or t
  misc_feature (548)..(548): n is a, c, g, or t
  misc_feature (556)..(556): n is a, c, g, or t
  misc_feature (562)..(562): n is a, c, g, or t
  misc_feature (565)..(565): n is a, c, g, or t
  misc_feature (567)..(567): n is a, c, g, or t
  misc_feature (572)..(572): n is a, c, g, or t
  misc_feature (624)..(624): n is a, c, g, or t
  misc_feature (791)..(791): n is a, c, g, or t
  misc_feature (795)..(795): n is a, c, g, or t
tttcccgccacacttcttctgggcactactnccttctgtcgcttcagctgctgcttccaggtcttctgctgctgtngcgccaccaccatctgtacccacaggggagttaggatcaggcctccagntgggagccccaggagcagaggaagaggtggaagagtcctcaccactgcaagagccaccaagccaggcagcaggcaccacccctggtccagaccctaaggcctatcagcttctatcagcccgcagtgcctgcctgctgggcctgttggccgccaccaacgcgctgaccaatggcgtgctgcctgccgtgcagagcttttcctgctctacctacgtttgtttttcctaccacctggtctttggttctnttcattgtttccaatcccctttcctgcttnntngccatgggtgttctgttnanttcttttgcangtctgtgctgtcttttttntgttgngctttttttttgggggttactgatggcgctggcatcctgancccctgcccgcccctggtgggcacctcggcgggggtggtcctcntgntgctttcntgggtnctntntcttngcgtgttctcctacgtgaaggtggcagccagctccctgctgcatggcggggngccggccggcattgctggcagccggcgtggccatccaggtgggctctctgctcggcgttgttgttatgttccccccgaccagcatctatcactgtgttccacagcagaaaggactgtgcagaccccttgtgactccttgagcctgggcaggtggggaccccgctccncctnacacctgtctttcccgtcaatgctgccaccatgcctgagtgcctgcagcccaggaggcccgcacaccggtacactcgtggacacctacacactccataggagatcctggctttccagggtgggcaagggcaaggagcaggcttggagccagggaccagtgggggctgtagggtaagcccctgagcctgggacctacatgtggtttgcgtaataaaacatttgtatttaaaaa

SEQ ID NO: 528528 - DNA, 181 bp, Homo sapiens
  misc_feature (39)..(39): n is a, c, g, or t
  misc_feature (82)..(82): n is a, c, g, or t
  misc_feature (119)..(119): n is a, c, g, or t
  misc_feature (128)..(128): n is a, c, g, or t
aagtggtgtgatgtaaatactggaaacaaaaacagcagntgcattgattttgaaaacaaacccccctggtatctgaacatgntttcctcaggaacaaccagaggtatcacaaacactgntactcatcnactggctcagactgtactacttttttttttttttttcctgaaaaagaaaccag

SEQ ID NO: 528529 - DNA, 243 bp, Homo sapiens
aaaaaaaagaaaacttttaaaaaactcccctttaaaaccaaacctctttgtgttttggaccaaggaattttccaaatttgattgggattttgttttgaagtttaggatatttttccccccataaagccccccgttttatgcccctctaattttgaagtttggggattgggggggggcctgggtttttttttttttaaagggggggtgaccaaatggaaataaacccggggctgtggcccttta

SEQ ID NO: 528530 - DNA, 232 bp, Homo sapiens
aagaaaatggacagaagagatataaaacccttactaactctagaatgttaaaaaagtgaggggggggggtgtcaaacaatagctctttatgatcatgctcttaaagatgttaaataccagcggataattgaattttgaagctgctacttagcacttacttgcattatatgcttcagatactgtaaaccaaagaataacaacgtgcaccattgtggaaatcacgtgagagaat

SEQ ID NO: 528531 - DNA, 326 bp, Homo sapiens
tatcattatcgaggttgatatacatgggtgtgcttatcaaagtagatattccgccaagatagattcaggacgctcacatccttgcgccagtaggtcacctcgtcacccaattctttgatggctttcacctgctcattcaggtcatgtgttctcacaatgaatgtcacacgaatgggtgtcattctcgtcagctaggccagctttgtgcatttccagtcgtgactgatacacctcttgcgtcaaatgtaatgcacactccattgcattcagcccgctctcccagtcatcacagtctggttcctcgatatcctgaaggaagatctggc

SEQ ID NO: 528532 - DNA, 134 bp, Homo sapiens
atcagcgagtaaagtctctgtgagaccttgcgtgcagtgtccacgagacggtggaggcctagaagaggcagccggatgctgacggggaagacgccgagcgattcagggttcccatggaaggcacaagtgtagta

SEQ ID NO: 528533 - DNA, 374 bp, Homo sapiens
tccccaggggccacaacaaaataggggcttttggattataaaacggaaaagtatgtgatgaccaggaactggtgggggggcgccctgcaaaggctgctgcagtttgggatcgtcgtttatgtggtaggggaaaaaacgtgttttttttggtgaccaacttccttgtgacgccagcccaagatcagggcaaatgcccaaaaatacagggtcttgttatgttgcccaggctggagtgaaaaggctattcacaggtatgatcaagctccctgcagccttgagcctcctaggctcaagccatcctcccaactcagccttttgagtaactgagactacaggggtgtacccccattcccagctaataaagtttattttta

SEQ ID NO: 528534 - DNA, 492 bp, Homo sapiens
  misc_feature (9)..(9): n is a, c, g, or t
  misc_feature (12)..(12): n is a, c, g, or t
  misc_feature (26)..(26): n is a, c, g, or t
catcgactnccnattgccattgacgntcatgagctggatgtactgcttagcgccaggcattatgcaacctgacgaaactgctgtcgtcgcgcgcagtgataccacctgatacgtggttgctcgcatcaaccccagcggtgaacagatggatgacagctactttggccaacgctccctgcattgtgaagtaagctgagccgaacatgacgccgcagtgtgcccagcttatgatatctatgaggacttcaggaacgcgcattgcgtacgccagtatcatggaaccggctgccgaccagttcatcatcatagcctatgccatactgtagtccagtgatgcagccaggatagaatgagcagttgcattcttgcacaaaccaatgttgctgctgagagataatcagttgggctgcaagcgataccccaacgcagaggtccaacacgtagtgagctgatcacagcatgtgtgtatgcacaactatgtaggtgcatcgt

SEQ ID NO: 528535 - DNA, 162 bp, Homo sapiens
cccggggctcggggtgggagggccggggtcgccggaggagccgccctgaccccggggcctcgtgccagcaagcagggcagcggccctgcttaggctgcagcagcccaagccgacatcggtcccgaccctggggttcaactgctagcagcagcgccaaccggc

SEQ ID NO: 528536 - DNA, 416 bp, Homo sapiens
cagctcgggtaggcccccagtgatgccagcccataggctccaagagcccccaaccgggacccaaccctgcctccctgggctaggctctggcctgggcactcaccccctggcttagacaccttctcaagggctggccttcagggacccctggtgggtctgcctgcctgggccacccttcctgcctgggcctccccttggcctacctgggccagcccccaccacctggcatgccctcctggggccaagagtgggcctgcaacccacccacttgcctgcccaccacctggcatgccctcctggggccaagagtgggcctgcaacccacccacttgcctgcccacccaactcctgggcgctccccactctgcccaggccttgagtgtccacattaaatgggtctcccacaaaaaaaaaaa

SEQ ID NO: 528537 - DNA, 1225 bp, Homo sapiens
  misc_feature (351)..(351): n is a, c, g, or t
  misc_feature (1225)..(1225): n is a, c, g, or t
gggagctgtagtatgctgcatcaatccagtatcagctcccctccgtaactgcagcgtctatgtatccttgcaaggctgtgctgtgtggagcaggcctccgagacagacagccacgtcagtcatgttgactcagtgcacgtcatggctgataacttcaacccatccatgcagctggctgatatccccgagacgagcaatgacaacaattggctttattacgtacggcgaattggagtcacgagctgatatatagtgcggctgggcatttacccgttagccgtcagaacacctttcatgcctttgccaatattgcacgcacgattaacctaagtacactttactttgactcgnttccattgctcttacaggctcaattgccagctgcgtgtgactttcctagtgcaaacagaggtgcctttttcgtactacaaacaattaaatgtaagcagcatcgggctttggtccaacttattctcaagtacatccaaaaacttccggtcaccatggggaacgcctcatagcacaaagtctaaccaaatgatcactataccctcgaaacctgtacttccctccctccataattgaattcttgaccgaccgcctttcttgagtccaaacgagaaacaatggacgtgcatacaaaattaattaggcctatcttcttcaacaggcaacaaaaggaacttgtataacctcaagattggccagcaataggggccaagacatctcccatatgaatgaagccaaaagttacagccggtttgtcgtgtcaaccaagtcacagggtgacacatacccgaattcgagatacagacggaaaatcattattgggggcggacatcacctaggaatcttgttaagccccattgcaggagggaatccatgacatctgaggaccgtttatcacgcgtattcgctagacggaagggaccttcgatacatattggaggcttgtgatagcacacctttgaatagccaaagccagccaaatggcctagccgattggttcacagctactgttggcaaactctttatagcacatttgaagtcacatttctttaaaacggccagtgaaaattgtggggatcacaagcggattgtggtcgccacagggcaaattggatctgatagccaagtagggtttcatcagaagggcaaaccacatggggcataatttgatacgtcaaagaagaccgcatatataggcctaatatggcaagaacgn

SEQ ID NO: 528538 - DNA, 725 bp, Homo sapiens
aaaagaacacacaacactgagtctgcggttacgttcagcttgatcccatctcggcgcgagaacttgtagggctacaggtgttagccagtgcaccgagcgaaatagctcaagtttccaaaaacaaatctgaatcctcttgtattcatagcgtcgctggtctggcatcagagagtactatacacggttcccacacctagttcggcccagctcaatgtcagtacttcagactcgcaccaaagtttgttttcacgcactacagttcacaagtcttacgataatctgtgtacttgtcagattagtacatccatacaacagtttcaggtggttaaggttctcgggctccctcacctcaatgctgttctaaacctggtagattgtagccaatcaaacagtctgctgatttaggatcaccttcaacacttaggtatcctaggtcatagcccctaatctgcaagcaatgtgcagtcctgtaaacaatccattccctcaggattcctcaagcctcattccgcccctgatgaaagatgttctgtttgttccacgcaactatggaagctgtttcaatcatcgcaagtgccgctgaaagcgagtgataggctggttagagggttaaacattctcttcaatgggttgtaggtgtttaactcaatgtagtaaatattccaagatgattttgttccagttcttttgtgaatgtccaatctaccaattgattctcatttgtg

SEQ ID NO: 528539 - DNA, 105 bp, Homo sapiens
cgctacctgtcagttattcacggtgcataccatttctggaacgcgacttacgatcatagcctgttttcgtgctaagattttttaagctcacccagagctagttct

SEQ ID NO: 528540 - DNA, 456 bp, Homo sapiens
tggggtgtgacatgatgacgtcacgcaggaagcgcatggtgtcaggtaaatctcttcgcttccaagggaacctggtgacggactgtgccatggataaatggtgcagatccagctgagatactatgcttttcccacgctctttgcaacccacagatcaggagattccctcaggtgcctatgctaccagggccctgggcttcaagcacaaaatttggtggctgtttgggcagacaccgagatagctgcagtttcttttcataccccagtggcgcctggaacaccagcgagacagaactgttgactccccctagaaagggggctgaagccagggagccaagtggtgtagctcagtggatcccaccccagcttcgtgggggtagaggcgtctgctgatactgaggcttggttaggcagttttccgctgtcagtgtaaacaaagctgccaggaagttcgaa

SEQ ID NO: 528541 - DNA, 1143 bp, Homo sapiens
  misc_feature (1130)..(1130): n is a, c, g, or t
catattactctgatttctcgtcgttgcttttctcctccttcgggctctttcgttgatttgctctgtgctgtttgttctactctttttgtgcttcgctttttgtttgtttttcttctcttcttgtttttatgttctgtttttctttcctctccggtttcatccttttgtcgctcccgccatttctcccgatgtcctcccgttttgctcctcttgtctttgttcgtttacatcttcttctctgggctctttgtcttatgtgttgtgatttcctcttgtttaggtgcttccttttgttcttctggcttctagccttcgtggtttgtgtttctatgtctttcttgtctcgcctgtaatcgtgctcctgtattccggctgccttcccaagcttctgcttttattcagaacttttctgcgccactgcagactagctctggtctgatgttattacctgggtactttatccagctaactgagtcacaatgatcaggattggatttggtaagaatagagatttcttttattttataccacttcccatgactgaccattactaagctcaccactagtagttcctgattacaggtgcaacctgtatgactatgcccttcctactttggggtagccacgcttttgatgtgtcagtagccgcagagtgattccaccacctgaggatgtcactcatcaaactcttcctttggtgtgtgaattatctagtggaaaagagccaagctgtaattagacctccactgtgtacttgagctcggatagaacatgttgaattctgcaatatgtttcttcggttaaacattgcactagttcttacctcatttctgtaaatcaagttttgtgaactctgtgtgttgtattgtgacaaattcataaagataatcattgatatgtttgaatttgtgaatatttctaacttggtagactttaattgaagaagtaaaattaatgttatttttatatgatgcacggggaattttaaagtcaaatgcttttgtagataaatttacaaaaatacagtgtggtttattatatacttagtttaacccactggttgttattctgtaaacaggattagtataaatggtacattttgaatgagcttgtcttattattaaccagantggaaaattccaa

SEQ ID NO: 528542 - DNA, 185 bp, Homo sapiens
ataactatgcaacatgtctccaaatgtaccattagacctcctatctgcctattcaagatctctggcagtggaggaagtctctttacgacaatagtctaaacaattagttacaaaatttaccgacttatctcattcctgtaacagtcgatatctggctgtcctcactacatgccatggggatcctc

SEQ ID NO: 528543 - DNA, 850 bp, Homo sapiens
  misc_feature (13)..(13): n is a, c, g, or t
  misc_feature (56)..(56): n is a, c, g, or t
  misc_feature (65)..(65): n is a, c, g, or t
  misc_feature (82)..(82): n is a, c, g, or t
  misc_feature (117)..(117): n is a, c, g, or t
  misc_feature (160)..(160): n is a, c, g, or t
  misc_feature (175)..(175): n is a, c, g, or t
  misc_feature (177)..(177): n is a, c, g, or t
  misc_feature (183)..(183): n is a, c, g, or t
  misc_feature (187)..(187): n is a, c, g, or t
  misc_feature (195)..(195): n is a, c, g, or t
  misc_feature (199)..(200): n is a, c, g, or t
  misc_feature (237)..(237): n is a, c, g, or t
  misc_feature (243)..(243): n is a, c, g, or t
  misc_feature (283)..(283): n is a, c, g, or t
  misc_feature (306)..(307): n is a, c, g, or t
  misc_feature (309)..(309): n is a, c, g, or t
  misc_feature (316)..(317): n is a, c, g, or t
  misc_feature (329)..(329): n is a, c, g, or t
  misc_feature (333)..(333): n is a, c, g, or t
  misc_feature (364)..(364): n is a, c, g, or t
  misc_feature (369)..(369): n is a, c, g, or t
  misc_feature (372)..(372): n is a, c, g, or t
  misc_feature (397)..(397): n is a, c, g, or t
  misc_feature (431)..(432): n is a, c, g, or t
  misc_feature (451)..(451): n is a, c, g, or t
  misc_feature (505)..(505): n is a, c, g, or t
  misc_feature (510)..(510): n is a, c, g, or t
  misc_feature (523)..(523): n is a, c, g, or t
  misc_feature (532)..(532): n is a, c, g, or t
  misc_feature (587)..(587): n is a, c, g, or t
  misc_feature (601)..(601): n is a, c, g, or t
gccgcgtccggcngattcctcctccttggtcgccgcgtccttggctggcgtgaggncaaagcaanatgaggagcgggaaggnctcctgcaccctggagaccgtgtgggaagacaagnacaagtatgaggaggccgagcggcgcttctacgaacacgaggncacacaggcggacgncntccgcnccangcagctgncagnncgaggggccagccatgaatgggcccggccaggacgancctgangacgctgatgaggcggaagcccctgacggcggcagcaggngtgatcccaggaagagccaggannangcagganngcccctgcaganaaangaggaagcgctcccccaagagcgggctcggncccgnggnacctggccctcctgggcctctcggnacgaacgtgtgtggctggacaagtcacttttcgnnccaggcagagagctcctancgccagaagctggcagatgtggctgcccaggcagcctggcctcctgccttggcnccttngggtctctgcacncatggaaancaggtggctgccaccacgtgactgggggatctgggtcaacaagtcctccttcgancaggctgagcgggncttcgtggagtggtctcaggccctgttgctggcccccgagggcagccgcaggcaggggactcccaacacaggccaggcaggtggccgtccccgaactggcccaccagacccaacccaccaggtcaatgggacagccccgactgggcaggctgcaggcactgggtacaggagaggtgtggctggaagaagccccggtatgatgcagccgaagaggggaattctaacgaggacctgtttcgacgggcatca

SEQ ID NO: 528544 - DNA, 584 bp, Homo sapiens
gttgcttctgtataaatcttggtcataactttgggtttttttctctgatttaattagtgttgactagttccagaattaccaatcttatgcgatgctcttaagtcagttatcccgtctacggtaatattcaagagtctagtagcctggtggtactcaaatgagttgcgcggtcggcgcaaacagtagcaagagttagatgagatcgattagaatctgaaaagccgggtcaggtaagaaagcgaagtaaacccattcgatacataggtggaaataaagaatagtgatacgggtattcacattatgtgtgggaggatgaattttggtgtcagaaagatagagaagaaatacacaaatgtgtgagataagtctatgtcatcaagtagtgaaagttcagatggtgtactgtggagcatagagggtaattgtgctgagtgggacagaatttgctagataatgagagaaacttgggaggtaaatgggaatgagtggcttaatattaaatatggtacatggtatgtgattagagtaggtagatgagacaagagaaagaggagagaagagggacagaacaaggaaacaagaac

SEQ ID NO: 528545 - DNA, 1291 bp, Homo sapiens
tccaaacgaggacaatggttattaagtttttattccataatcataaatttaactctgcaatctccagctaggcattgggagggacacaaggaaaactgtggaacccaaggggaactgcagccgagagccacaaagattctaggatacgtgcgagcaaaattgggtgtggaggggtgctctccgtgagctacagaaggaatgactcttggtggttacagataaataccacaagttcaaactttattctcgagtttgctccacagttcagcaatggggtgactctctctgtgcgggctcatggcccatctcctcgtggacccaaaagggcctccagtggccttccacaatatttcagtgcctctcttcacatgtttgtgccaaaacaccacatgtgctttgcacactccaaacacatgtcaagttcttggggaaagtgtgcaagatgtgaaacaacgtgtgggaacccattttgtggtgttggggtctccagacatttgtgccatgggaccaaggagtgccaggacccgatagtgcttaaagagaagtagaaggttctacatttttcaaatttcttccccatataaagtggcccttttgcccacccaggtggcccatatagtggggcgtgtgtgcagagttccaaccacccgtggatcaactttaaacccgcgtggaaaataattttcttggtaaaaacgacgggtgaaccccttttagtaacccaaaattccctttatcttcctccagggtggctttcagagaaccccagaaaaacatttttcctgccgagctacttattggggaggacccctttgttgtcttttgccacacaacgaggggctccacaacagtggaagaaccgcgggccccaaaagtggggtcttcgcccagatagaaaacgcgacaaatttgtcgaaaacagacccactcggtggtgggtgattgaccccttggtctaacattagtttacacaggggtttaccccctcagggagcggggtgcgccaacaagttagagagccgacaatttttcatttatgagcgtatgccaaagcggaaagccaaaagttgcttccaaaacaaccccgtgtggcaaacgggtaaaggtctgaactcaacagcgacaataggggcccaaaatcggtgacgccctgtataccccgaaggggggttgattttaaacctccgtgctaaaaggtgggaacttgtgtgtgccaagcaaagtgacccccctatatgtggtaccctcaaaaacatgtgtaacacgtttgcccagtataaaatcaccccag

SEQ ID NO: 528546 - DNA, 444 bp, Homo sapiens
caacgattggtcctcagactacggctgataattccaggacgtgggaacggacccaggtacaatacgcgtcctggagtacgatacccagcaaatggcagcagactctacagaatagggaactgactgtgaaaagacaaatagaaagcaagagcaaaaacaatatcaatgaataagaccccacaaaaatccccatttaaaggtcagcagcatgctgggcacggctggcttacacctattatcccagccagcactttggtaggccgaggcaggcggatcacctgcggtctggagttcgagaccaggctggcctcatatggttaaaccctgtctctattactaatactatattgagccgggtgtggtggtgcatgcctgttatcccagctgatcaggaggctgaggcatgagaattgctggcacctgggcggtgtgcaggctgcattg

SEQ ID NO: 528547 - DNA, 221 bp, Homo sapiens
attagtccgacctatatcagcggaggggggggggttttcggataacataggagacgatcttgtcggctttcaagacatggagtgtgtgccttgtggagaccctcctcctccttaggggttggggctgtatagtcttacctactcaggaggctaaagcaagaggattccttgagtccaggagttcaaggccagcatggacaacatagcaagaacttgtttct

SEQ ID NO: 528548 - DNA, 1166 bp, Homo sapiens
actactatactgttcctatacatattataaggtagaaaaaagtttagtaaatccttataaagaggatgcagtttagacggttaatatgtcagcttacccagacatattctatcaaggaaaacctagtggtagcaataaatcttatggaacggactacttatactcatgtacctttaacacacatctaagcacatttcatactccatcccatgtagagtttaaattcgcagatgcaatttaggtacatcggcatcaaattcacacatagcaatacatccgtcaggtattacagatggtgggattgatgaactttggtcactttctccatccaaaactactttattacggacactagtcacagttatggcttctcagtccatgcaaaagctcagatacataggggtctacataattctcactgagagccttgatataagcctatcttagtatatgcattctaacttgactgtctcaccacatgacgtatctgctgtatcaggcagtacagacagaccacaggtacacacactgaaatcagactgggggatcgagcgacacgttttcaacacaacacagttcataaacaaacgacactctttggattctggcatgcaccaaggacaatgctaggaaacaaatcgagagatacactatggacactatgacacaaaaccagaacccctcatgacaatcacagtaatcccatgcaaagaacaacaccaaggcacataaaaaacaacatagcaatggcgactacggcaaacggaagagacaccatacaagcaaccagaagaagacaaatacaggactcagtgtccacactcctatacgtagtgtgaacgataacaactaatggaacacaaaagacataagaggaagcagtacgaaactagggaaaaggagaaccaacacaagaaccagcaacgacacagagacagcaaataaccaaacaacaagcaaccagggatatgacacgacaacgaaaaggccaacgagaaacagagagagaagagcagcagaccacaaacaaaacaaaacacaagacagatcaccaaagaacaaaaccaaaaaacgaaagaacagaacaagacacgagagaccgaaacgacaggacccagacccacacaacaaaaccaacggcagccaacgaaaacacaagagaacaa

SEQ ID NO: 528549 - DNA, 667 bp, Homo sapiens
  misc_feature (644)..(644): n is a, c, g, or t
gtcaggctcttcaactgcaggctggatgacattcctgggcaataggtccaaccaagggctggcgtctacagtgcgaagggcttcacacgaacaaggagctggccaggagtcccacactcaaaggcagagatgatgggcacaggaaacaagtctgggagatatccacatctcctgagggggcagaacagaaaacgtgcatcctgaagatcaaaggctctatcacacctcctgtggtccagtggcttccacttggcgtggatgatggggaggtgacatcatgtgggagggtgtcctgggaacaggtagaggtggcggcacagagtgctgcagtattcagacatctccttgcacccggtggaattctgtgccaggagcataaccttcccgatccttgataagtgcgttcaccttaaccagcatgtcggccacgtgcatatcacaagcccgctcagaaaacacttgagcaagagcctcgatgtaccaggaacctcgtttggtgttccgcatggcggcagtccctttgaggcaggcatagccgcatatcatgtctgagcgcgtgggcagtctcatcttcggcaacttttctttaccggcatcactctcctcgcacccaggggatcctgcgtggttctttccatcttgtnggtcaccccacgatcagtctcat

SEQ ID NO: 528550 - DNA, 249 bp, Homo sapiens
agcaggtcctaggtccagcagattctacagtactggagggggcgccgatactgcgagggctgttacactgacacgcctggagaagatgtaacacgcgtgcggggagcccatcgagctgtaccgcaatgcatgagggccacgggcaatggctcgtatcgaccgcgaactgcattcacgctgtgatggatctgcgcccgcccccgtgcgagggcacctcgcgtacagtcgctgggacgcaggaccaaacgc

SEQ ID NO: 528551 - DNA, 141 bp, Homo sapiens
cggaccataactattcagcataactattacagcatacactattacagcataaactatttccacaatagtggcatttcaggttactcttcataactatgggggaggttatcattatatctaactataacctcccccatagtt

SEQ ID NO: 528552 - DNA, 1444 bp, Homo sapiens
  misc_feature (129)..(129): n is a, c, g, or t
  misc_feature (233)..(233): n is a, c, g, or t
  misc_feature (244)..(244): n is a, c, g, or t
  misc_feature (270)..(270): n is a, c, g, or t
  misc_feature (275)..(275): n is a, c, g, or t
  misc_feature (335)..(335): n is a, c, g, or t
agcaatacctgcaactgatgaattcttcccgggcgagacctgccagtccgcatcggcactggcctcatagcagttatgttgacactgtcgaataaatcccatgtccgtggtgcaaggctgtgtgtggtngtttcgatctagagtccctacctagctccgtcactggcgaggtagtggcctcagagagtagtccttcagctcaacttgcaccattccaaacaaggcgcgtcttntcatgtgcaantctgtgctcgaaatattcacctacgnaccanccataaaccatctacttagacctgagaattatctaagacttactcttgtcaagcacgacntcagcggcgcatgccaaaatgaataaccgtgttggactcctttcgcacgtttccttttctcattatcggctaatacagggaagtctggatgagtaaggtgactggggtatttgcccgaggatggtcaattccttaaaggtttcctttccctttctgagacggagaaccacaccgtaaggctaggcgacgagtacaacttttggccttgtgggatcccggccttggcgccttggaacattatggcccccaaggaattcctggtggcaaggccttaccttgagacaaccgctttataacaacacccaaggcgaaggacaatagttttcgcttcctaacacttaattgccggctacagaaaaatggcttgtggttgtctccaacaaaccaaccaattatttttccaatttggttcttgccaatgacaaggggcggggttccaaccaccaaggacggagaaaatcccccaccattaagtattgtccggagggcccaacgggccaataaataaaattttgtccaaatattataacccttgggagaaacgcacccaaagaaattgggcgccccaactcttttattggacgctttccctaggttggtcatgtccagccgtgttgatagtcacggacatgttgggacttctcctcccccataattttaataaaatttgtgggtcgtgggccacaactatattctcctaaacaagggacacacaacaggtttgaggcccttcacaagaggccaaatcagaacagcggcgcattgtgcgcggcccccatattggtcgccaacaacgggtctggcggcacacaatttacgggggtctgtagggacgagggacattttccctcagaaagagtatttttggggcccccccgaggcctgggaaacgacaacaaacacctcccccgatatatagtcctgtaataaccacccttttaggagcgcatgtgtgtaacacagaacactatttgctgcccgtttgaactaccactgccaggacgcaacactctctcggggtggctggcgtcctctttctacaaaaattttctgcctccccctccaacgaggcgaggagaacaagtctcctcatcatacacagcgtggcc

SEQ ID NO: 528553 - DNA, 305 bp, Homo sapiens
acagacgcgtcttccacaggaaaaaggccacgacaacggccgcaaccggcacggcaacaagggctacggcatggcgccctttcaagaaagtcacgatgctcatcatcggtgcagatcgctggaggtcaacgagcacccctcgatcgcctgacgatggtgcgtgtaccactggcgaaatgcggtgacatccatgccgtcaaggtcatttcgttccgaacttggcgcatcatcatactggaatccagccagccgaagaatggtgcgttccacggaattaacgccgtcgaaggcctcgatcttgtggg

SEQ ID NO: 528554 - DNA, 290 bp, Homo sapiens
gcagctgttttttcctagctgccaagactgttcaggaagatcgagagaattccagtactaaaggtatttccaaggagacagtttctgtggatgttcctcatctgaaattttgagaattgagagaattattcttggataagttgaattgggatcttcacacagccacaccattgggttttcttcatatttttcatgtccatttcagtgttcaactaaggcctctagtttactttttcagttttgtcccaaattgagcccatctcaacattttggcagtgcttaccacgcaa

SEQ ID NO: 528555 - DNA, 190 bp, Homo sapiens
  misc_feature (9)..(9): n is a, c, g, or t
  misc_feature (58)..(58): n is a, c, g, or t
  misc_feature (92)..(92): n is a, c, g, or t
  misc_feature (106)..(106): n is a, c, g, or t
  misc_feature (172)..(172): n is a, c, g, or t
ttgcccatngggaccagaaccctgggagagacttggatgaggagtggttgggctgtgncctgggacctagcacggacatggtctgtcctgancagcactcctcggncaggcatggctggtgacctgaagaaccccagatgtgagggcaccaccaagaaatttgtggccctanccttgtgagggagagaac

SEQ ID NO: 528556 - DNA, 1181 bp, Homo sapiens
  misc_feature (844)..(844): n is a, c, g, or t
  misc_feature (1013)..(1013): n is a, c, g, or t
ccttttctctctaggattttcgttaccaagaccgaagtttgtgtttccgaagaaaggatttttcacgagagtgtccaaagttacccagttctgtgtttttttagaggacccaataaggggtgggggaaccagctatattggcccacattaaggccttattaataggaggacaccacttgtcagcccgccgttgtttgtcgtttatgtgtataaagcgaacaccacagaccgggggggaaagggggtggcttatacaaagggattaaaataaccgcggtttagatttgaagtgccaccccctgttggaggatgtggccgcatttgtggagatctcgagaaataagaaataggtgttgaaaatctgcctcaaaaagggcgaaaaaatcacccgctaaaagtggcctctgagaaggaatgagagggacccccaaagagccccacaaaaacccacgctgtagaaagatattggagtgcacttcacttcttcccctcttgccgcgagaactttgtctctctggccccctcgcgttgtttgttgttgttttttctcgttttaatgtgcacacacccacactgtataaaaagctctcgggttgggagaactttaactctctcttgtctctttaaagaagtaaagtttgtagaaactttcgagttgtttttcacatagcttcacattgtagacttttcacacataaatgcactcgttgttatataagtgtagtgtcgcctctcacttcacctctggagaagtggagactcttctcgaggagaatttatatgcccacgagagtttcacacacactggagatccacttttgccccacgctgaagaatggctctntatatgtgagattgtaaaggaatatatggtataaaatggtttaatatggtttatactcttgagaaagtataaaataatatactaatggttctctggttttgagggagatatattggagataccccaaaactctcttcctcttagggcgtaactgagttcttgagtttcntgagtcactcacgagaaatttcacccacgagaacccaacttgctttcccactaaatccccactttctaataatgagagaaattcactggaggaagtgtaactggcacctggaagagtttagtgttttttgtatgcttgaaaataaagtatgtactgttttgaatgtga

SEQ ID NO: 528557 - DNA, 953 bp, Homo sapiens
tttccggcgggtcatactatatgcgcgccgcggccgcattctggtgttccgccggtgtccccggtgcgtctccccaccggttgtgccccgccctggatttctcgtgactgggtccattaaaaggtttgaagagtctttggaccccgcggggccggcaacgcccccggggcctggttcccgccgtgttttcgtccctcgtcctccattgcccgttgcccgttgtgggtgccacgggtcccctgcaagacaattctctggtgttgaggaaagttttccccctctgtgtgtcaaagcctggaggtgccgcctcttttctgatggtctcggcggccgcgcccctctggtaagggggttcccggccaaacgcccaccatgcgcgggaggcctttcccgagcaggaccaaccctcggggccccttaccgggttcgggcgaatacaaaacaacaaaccgatcagcgcggcgggcgcaccacacaaaagccaggggaccacacagaaggtgccctggcgactagcagcaggcattccccacagtggcgtcaccgaagagcctcgcatgagggccagaaggatcatcatgccgcctgtgacggcgccccgccccctgctttaatcgagcgtggtggaaaagaccgcgtcttccaggcaacgttgggttccttgcacagaaggcgccccttgaacagtacacatgtctagaagcatctggtgtaaagcagcatacgcacaggccatggttggagacctcctcctccagaaagaatagcatggatatcttttcgggcacaccactgagcgttttcttttttagggtgagccgcagtcttaagattgaatcaaccgatgatcacgaaaaccgcagaattattcagtgggccacacacgcttgcacccgcgcaaacatttcccaaaactttgagacccccttcaaaaagaatacgcaaaaaaaaca

SEQ ID NO: 528558 - DNA, 475 bp, Homo sapiens
  misc_feature (22)..(22): n is a, c, g, or t
  misc_feature (443)..(443): n is a, c, g, or t
tccagtggtgctggggatgggngaattttatagcttttttacattaacccaactatctaccaggtgagatgtgtgatttttgtaaagaacccccccacctcccatatagtaccacaagttaaagattaacaattatttccaggtatttcctaacccagagcaaacccctaaacatttgtcaataataacttaataagaaacaactctaaaaaaagagtttaagttaaaaccccatagaccagactatctacataagaacagttaatccattaaacccttttatgcaccaaattaccctcatgatttattgacagtggcctaaaattttacgcaaaacatgggttttttttaaataaattacttatctttcctccctctcctctcttgttgggcaccctattttttttttttctttatcccctcacaatatagtaatattaagnaaaattttaacatatctccccaaaccccttct

SEQ ID NO: 528559 - DNA, 845 bp, Homo sapiens
  misc_feature (3)..(3): n is a, c, g, or t
  misc_feature (130)..(130): n is a, c, g, or t
  misc_feature (219)..(219): n is a, c, g, or t
  misc_feature (382)..(382): n is a, c, g, or t
  misc_feature (391)..(391): n is a, c, g, or t
  misc_feature (394)..(394): n is a, c, g, or t
  misc_feature (401)..(401): n is a, c, g, or t
  misc_feature (452)..(452): n is a, c, g, or t
  misc_feature (529)..(529): n is a, c, g, or t
  misc_feature (534)..(534): n is a, c, g, or t
  misc_feature (540)..(540): n is a, c, g, or t
  misc_feature (582)..(582): n is a, c, g, or t
  misc_feature (595)..(595): n is a, c, g, or t
  misc_feature (777)..(777): n is a, c, g, or t
  misc_feature (825)..(825): n is a, c, g, or t
ganacggctccattcggcctagacatctctcatcctacacttcacatttatcctttgagtgagccgtattaacctctagtcatagtctggtatgtctgtgctttgatgtaattacatggtgtagattaanaactacctctattggtttttttactatgcattgcccataatatactgtgataacacattaccattcaaataaccttataactaaattgnagggttcttgagagtagaaagtatgtatttctttgtacttccttgcattacagttgcaggcacatggtaactgacacagactgtctggcttgatcttagaagtcgagcctgtcaagagttatttgaatgatactgtgttatcacagtatatgtggcctaaatnatcataatngtnatttgtnaaggacttattcccagttgtcagacatactaactactttttaatgtaaagnagatatccctatctgtatcaatgagcaaaatcaggatttatggagaataaataaaacatagccaactagtagcaganctggnattganagtaggcctgtctagcccaggataacaatgattgtgcgacanacgttcaaataanacgctgatatggaattctaatttccatttctttttctcaatctcttctttaagtctttctgatattctctctcattgttatgctttatatccctggtttgatatttctcttcctttgtgagttataggtaagtgacgctcagtctccataaagaatataagagagatgtctgaatataagtnaagggttcttcttggtaggtgttgttgttgtgattgttgtattctggnagaaaagcctcagctaattc

SEQ ID NO: 528560 - DNA, 956 bp, Homo sapiens
agccacttatacttgggagcctaggaagtcacaggggaaaaagcaacatggtagcctctccatctcaggctattactagccccattcttcagggcctataactaactacaagcctctttgacacaagcgaaactaataccgacatgatccagggcgctccagcagagaaacagggatagtggtagaacccttgcagttccatggctgaactaggtgatatactgggcatgagaagcatactaggcccgtcaaagaatctagaagctaggacttattgtctctagtccaagatggagtggactgaggctggacttaacctctcttatggactatgtgtggagatgccccccatagaacatatgctgagaataactaaagcccctagtggactgatggaggtgggcccattgggaggtgagttagggtgatgagggtggaagcttgcactgggacgcccagaggagctggcctcagtcctctttgctatcgatgtccttgcctgatgtattatggcttctgtaggaataaatttgattgctcattatcatttttgtgtggagacaccggggtttcgttgtttgggtcgggatttcacccggggaaaatgggagcgggctgccaacgccacatgggggaatactctaattcgaaaggggcatgagctcggtgaagaattaccccgggccgtaggcgggtccaggaccgggccagaatgttgccccgggacagtgccagtgtaggccgaaacgaaacacggaggaggctcaccagaatacaggcgacgagcggggcagctggaccgagggaacaacaacggaagacactccgagacaggcgaacaaacatgtaaacaagggaacacggagatggcaacgacgggagacgagaaacaacgacaaaaacctcgaaaacagacccaacacaacagcaaggagaaatagacacgaagacaggcg

SEQ ID NO: 528561 - DNA, 157 bp, Homo sapiens
cagcatttagcccaagattgagattcttatgaatacactgtattattacctgcaatactcatgaaacacgtgaacatctgaaagacagttaaatgaagactgctttatcaacatgccaactccctaccaagacattagatagatttcatgactctga

SEQ ID NO: 528562 - DNA, 1093 bp, Homo sapiens
gggtttgaaggcgtgagcgcgtgtgtgtgtgtatgtgtgtgtgtgtgtccttctgaaaacatagagctattgagtacagcatatatggtcatctcctctaaatttacatttccccatgttgatttttacaaggtctgattttcctgctgctgttaaccaagatgctttccatctttaacgtattatgtttccccattatccagaccccggcgtgatctgcatcctgagatttggagctgccactctttcttgtggttgatcacacaggaactcaaacccgtcattacctcattcttgaccatgaaacacgtcagtctgtgggaatagagggacgagcacggccaggggcgtacaacagacaaagaaaccaatgaatctaacactgtggccatgcttctgcaaaatcgagcgtgaagacatacaagtatcaggcattgccccaggaccatacactcgcgtgtgtactgaaacatggggcccttacttttgcgagatttatagaaataacctactaacaggtacccctacgagaatagcataacgttacaaccaagggtgtctgaactagaagcagcatatacccttggagtgtaagtgatcatactgaggcataaaacggattatacttcatccacgaagacacaatgtatagaccgagatattatgtcataaggcaaatcaggaccacaaagtgcgaatccatctcgaaaatttgccatagtacaacacatgtaggatctatcgcgataatagtactctcctgtatatcgaacccccctgcgaactcaaatcgccaatcgattcacctaattgctcaacaaaggcgttgcagtatccaccaagggaattctgctaacaccccccaaacgaattggaccggacccgaaagtgagaggtgacacagaagaccagagaatcaatgattgaacaacttcatgtcaccaggcacaaatggcacaacgaccactgccaccaaagaagaaaccttactcaagctaaaatgtctaggcaaaacgggagaaggacaggcagagagacggtcaaacacgcctagaccacgcgtatcagcgcagaccaaagacatacacaacac

SEQ ID NO: 528563 - DNA, 250 bp, Homo sapiens
  misc_feature (90)..(90): n is a, c, g, or t
  misc_feature (93)..(93): n is a, c, g, or t
ctcccttgtgccccagcccaagcccaattttttttttatccgaaagatcactgcctttgcccctcccctccggtggcccccatccccttnttncgtctcctccctggtaaacaggggaaaaacgggctgggggtagcctggatgtgggccaagtccccctgtcccccttgggggcaaaagcccctttaaaaaaaacccgcccagcctgcccccttttttgtcctggaaaatttttgggggtgggacccca

SEQ ID NO: 528564 - DNA, 84 bp, Homo sapiens
atctcttatttgggggatcaggttgtcactggccacttgcacagtgctagtgaggaggctgggcatcccttctgtcgtcttctc

SEQ ID NO: 528565 - DNA, 288 bp, Homo sapiens
gaggtgcgggtcgcctccagaggtgcgtggtcgtggcgcgagggatcctgaggctgctccagcagtccgccgccgccgtctcctgggcggcttgggttagccggcgagatcctgtcgcttcaaaccctacgagtccatactttaaaacaaaatcaagaaagtaagctttaaggactagagagtcgctccaacaagtgatggatttgaaagccaagctacttctggacagtatctacaggcgacattcagcatgtatctctatacatccataacacttatgatgacatt

SEQ ID NO: 528566 - DNA, 89 bp, Homo sapiens
ggtgtttggtttcgtctttggattctaaggccctccccctttccggcccccttcccaattaaccgcttttttaggggggaaaaaaaaaa

SEQ ID NO: 528567 - DNA, 1448 bp, Homo sapiens
  misc_feature (610)..(610): n is a, c, g, or t
cctcgctggcgcagtacggcgtcggtcgtcgtgactaactcacagaatgttcctgcttgtcttaagtgttgaactccccgtctccgtagtatgtcgctcctctttggtgggatatgcctgccgcatatgtgccagcacagcccgtgtgggttggttggcaccgccgctccgtctatgtaggtgaggtatcctcctccggggggggaccccgggtagtttcgccctgcaggcctcttctccgggcggagctgttcgttttaagccctcctttataggggcccctcacctggggggctatcggcgtgattaatacaccacgaaaggttttgcgacgccaacccccaagggggttaccgaccccttgtatggtcgccccgtttagtgggcccctatatttttaaggggtggagcccccctttattatgggacaccacacggtttttggttacccacacgtaaaataggcacgcgcgctcgggttataccccggggttctcggcggagttttttccccccgcggggagatatttctctgctgccgaagacgctgcaaacgggcgtttctcgcagcttctctgtggctctctcctggggcggaatgggagtatancccgcgtcgtttagtaaatgcttcgcgggtcttggggtttatatttgaaatggggggcggcccacaggccacactgggcccacgaaaaccttatggtgcacaaacgttgcgcgcaacttgcttatatatacactcgcggtacactctgtgtcttctaagattgtcttcgcctctttgggggctcgagagaggagaccacctctgtgtaagtgtgttatactcgggacactcttaagaccttcgctataaaaaagagcgctcgagatttctctgtggttaaaatctcttaaaggggagatatacaatatatagagttcgggttataatctgtataagagagcaagaaaaattgtgcacagatgggtgtgggcgccgtgtagacacatgcacacacgtgtatagaaatattataactctttcttttcacgagagaggagatataatatgagagaggcacctgagattttcacatatgtgataaaaaattcttggtcttttaagctcttgagacttttttggtgggctgtgtttttataaaattgttataaattatactatgtgatacacacatgtcacagttttaatatggagatgttgttataaattaatggacccttccacattggagataggttataaataatcttcacttttataaagcccacatttgaggtgggagaaagaatacacaagcaccaccacgttgtgctccccacacacattatggagaagaagtaagtgggcacattcacgagacacattccggaaatttgttggctagtaagttggaggaagtttcagtgagtgaatttaaaccaagtctatttaactgacgtga

SEQ ID NO: 528568 - DNA, 785 bp, Homo sapiens
gcttgtcccccagcggcctggaatccccttactgcttgggaatgtgacttgctcctggggggctggccctgcaggccaacttccctcatctctggcggcctcttgggctctgaccagcccctccccgggcaggctcacagaagctggcttctgggactgtcctgggccaagtgggcactgcgccagccccactgtgcctgggctgtggcccttcctacagggcgctcacatggccccgcgctcctgctgcgtgctgctggcagtggagcggctgctgcccgctgcctagcgtctgcagaacctgtccgagtctgctcacaccctctgtgcccccgaggctgctgtttgtgccgcccaacgtggacggcgcacagtggagctgcggctggtgacaacttcatccaggcctggggcccctgacttccgcacatgacgggactggtggacctgacactgtctcgcaatgccatcacccgcattggggcccgcgccttgggacccgagagcctgcgttccctccactgacggcaacaggtgtggagtggcaccggagcctccggggccccgtaatctgagacctcatctcgggcacagctggccgatggccgagctatgagattcctaagagctggagaccgactgtctacaaaactcggagtgcctggcggtcgcgctgctgctgaccccctcacctgacatactatgagcatgcccaggccttcgcactcgtcatcccgtgactactcacgctgccgcggtcggccgtcttgtggctaggagccctc

SEQ ID NO: 528569 - DNA, 404 bp, Homo sapiens
ctgtatcacgaggcttactgggacatgctcattgggtcggaatacggtgccgccttgatggtgaatcccttggtattagggccatcgatcaccaaacctctacgtggctgccggtacagtttcggttacgccacctgtccgaacctcgaagatcgcgtcaaggtggtgaaactactcgatccgacgagaattcggtgtacaactgtcagaggagttccagcttcatcctggccagtccaccgacgccttcgtcgtccatcaaccgggagcaaactatttcaatgccacgtgaaacgcacacagcgacccggcgaacggtatttcgccgctgtcttgtggggatttccgacggtactacttcgtcgaacacttagtccccggtgggtcgaggccaatagtaggtg

SEQ ID NO: 528570 - DNA, 141 bp, Homo sapiens
gatgcagtgtgacgttcacttagttccttgcgtcacgaggcacaggggatagatagacctgggaaaggggagacatcaaagactgaatgattctgcaattcttttgtcttgccattttcacgctgggctaatcaacgtccc

SEQ ID NO: 528571 - DNA, 351 bp, Homo sapiens
ggatgggtcacaggatgctactcgtggcacctaaagccacatctgccctccacagagcggcacttgcgccatgcgcagcgaatgtctcgaccttctccgatgtccttcctgaagcagtacagcagcccgtagttcttgatcagtgcgttctggttgtgcgagttcgtgtcaaacttgctgtctgtctgcttgaggatctgcccagatccggcggctgccgtcttccagcctccccatcagcgtttggatgccttcctctaggtcctttaggaggttatagtcatcgctgtccgaggtgtcatacaccaggttgttggcgaacatactcctgaggaaccgcacgggctccag

SEQ ID NO: 528572 - DNA, 557 bp, Homo sapiens
  misc_feature (2)..(2): n is a, c, g, or t
  misc_feature (132)..(132): n is a, c, g, or t
  misc_feature (339)..(339): n is a, c, g, or t
  misc_feature (419)..(419): n is a, c, g, or t
  misc_feature (522)..(522): n is a, c, g, or t
  misc_feature (528)..(528): n is a, c, g, or t
tntttccaggcaccgtggaaacatcactgggcgccggagagggtgccgccagtcgcgtggctaagtcttcggagccaacgccggcggttccaacagaaaactccaaaaaagaaagaagtggaagcgggtgcnttaaatcccccactgcagaaaccaggggctgaaaggcacaaaaatgtgttgcaatggcagaatccaggggcagtaacagtccagaacaagaaagcacagggaggaggggggagtaacgcggctccctgcaggacggcctcggctccacagcacaaacggctgcccacagtcctccaggccactcctgaatcccgaggggaatgattncttcagttacgaagaactaaatggtctcctctccccagtcgtccacgttgctgtccagcccgtcagtttccacccctccncgcaactccaggcgctcgtttttctgctccatatagagctcctgggccattctccggtactcccggaaatcttccatcaaggtgcgcctcctctccaccaatncctttnaggctttggacttaattaaacgatccttc

SEQ ID NO: 528573 - DNA, 169 bp, Homo sapiens
tcagccggtaccgcaaaatactatcgttgtattcacggatactctggcaagtctacattcttcaagccgacccgaagtatgttttgatatttaacaaataaaataaaaattaatctaagccatgttattttcaaaaagcggcagacccgagccttcgagtaagctttga

SEQ ID NO: 528574 - DNA, 1284 bp, Homo sapiens
  misc_feature (529)..(532): n is a, c, g, or t
  misc_feature (536)..(539): n is a, c, g, or t
  misc_feature (541)..(541): n is a, c, g, or t
  misc_feature (543)..(543): n is a, c, g, or t
  misc_feature (545)..(545): n is a, c, g, or t
  misc_feature (547)..(549): n is a, c, g, or t
  misc_feature (552)..(552): n is a, c, g, or t
  misc_feature (556)..(558): n is a, c, g, or t
  misc_feature (560)..(564): n is a, c, g, or t
  misc_feature (567)..(569): n is a, c, g, or t
  misc_feature (571)..(573): n is a, c, g, or t
  misc_feature (575)..(578): n is a, c, g, or t
  misc_feature (580)..(582): n is a, c, g, or t
  misc_feature (584)..(586): n is a, c, g, or t
  misc_feature (588)..(589): n is a, c, g, or t
  misc_feature (592)..(592): n is a, c, g, or t
  misc_feature (596)..(597): n is a, c, g, or t
  misc_feature (601)..(609): n is a, c, g, or t
  misc_feature (611)..(613): n is a, c, g, or t
  misc_feature (616)..(616): n is a, c, g, or t
  misc_feature (618)..(623): n is a, c, g, or t
  misc_feature (625)..(628): n is a, c, g, or t
  misc_feature (630)..(632): n is a, c, g, or t
  misc_feature (634)..(634): n is a, c, g, or t
  misc_feature (636)..(639): n is a, c, g, or t
  misc_feature (642)..(642): n is a, c, g, or t
  misc_feature (645)..(645): n is a, c, g, or t
  misc_feature (647)..(651): n is a, c, g, or t
  misc_feature (653)..(654): n is a, c, g, or t
  misc_feature (656)..(666): n is a, c, g, or t
  misc_feature (668)..(673): n is a, c, g, or t
  misc_feature (676)..(676): n is a, c, g, or t
  misc_feature (678)..(685): n is a, c, g, or t
  misc_feature (690)..(693): n is a, c, g, or t
  misc_feature (695)..(699): n is a, c, g, or t
  misc_feature (701)..(701): n is a, c, g, or t
  misc_feature (703)..(711): n is a, c, g, or t
  misc_feature (714)..(714): n is a, c, g, or t
  misc_feature (717)..(719): n is a, c, g, or t
  misc_feature (721)..(721): n is a, c, g, or t
  misc_feature (723)..(723): n is a, c, g, or t
  misc_feature (725)..(730): n is a, c, g, or t
  misc_feature (733)..(733): n is a, c, g, or t
  misc_feature (735)..(736): n is a, c, g, or t
  misc_feature (739)..(743): n is a, c, g, or t
  misc_feature (746)..(754): n is a, c, g, or t
  misc_feature (756)..(759): n is a, c, g, or t
  misc_feature (761)..(761): n is a, c, g, or t
  misc_feature (763)..(766): n is a, c, g, or t
tggttttgtcaaatgttttattgagtgtagacatctggagtactgtaaaacatgcattatctgtagattcaaaaaggagcaagccacattgtcctcactgtcaaatgtgtcaggcttggcatacatgatggagattaatgaagtatcatgagagtaatatggttcctgaaaagcttctacaatttggagtagggtcttaatcacgtgaaaagcaaagctgttcacatttagtgaacctgcatttcatggagggggggggggtacacagtattttaattttaaaacaaataaaaataatttgtttgtcaaagattcccatctccccaactttatttgtcgcattggttttcagaaattttaattttttaaaaatcagatgccttttggaagttgtatgtttatctgagcaataactaaattttatttcttcttcggttgttgaggtgtgttaaatttgaagaagataatatctccatcttcaacaatataatttctgccttgttgtctgtactttccagcagccttgacnnnntttnnnnancntncnnnttnaaannntnnnnnttnnntnnntnnnncnnnannnannccntttnnaaannnnnnnnnannnttncnnnnnncnnnngnnncntnnnnccnttncnnnnngnncnnnnnnnnnnntnnnnnnggncnnnnnnnnaaaannnntnnnnntngnnnnnnnnnaanccnnncntnannnnnnttngnnaannnnnttnnnnnnnnntnnnntncnnnnacttctgtctctcctcagcactcaattcttgcaacttgagttccaaggccccactaaaaggaatgaccaaagcacctgggtcatacttgtccacccactctttaatttttatcaaccatttgtttttctttctaatgtagtctttttcagaaagattaaccaagtagaccattggttttgaagtcaaaaataagtgtttattcaacacttcaatctctttgtcattccaatcatgatagaagcgaacaggtttcttttgatctataacccaggattttactttgcacattatatcatattcaggttttagttttttatctcctcctctcacagccaccttttctagtttatctataatgggcccaatcatttcctcatctttaagctgaagctcttcatgtattatttctatatctcgaataggatctacacttccttcaacgtgcgtgatatcatcatcttcaaaagcacgtgttagatgaaagatgccatcacaggcactaatatgagataaaaaa

SEQ ID NO: 528575 - DNA, 350 bp, Homo sapiens
atcatgcctcgtccagaatggtaaggtcagaaccattttgaagtcctttactcaagaaaagcaatgaaaaatattatcaaaatcaactttttcagatctctgaaaatcacagtcatgcaacaatctgaggataatttattcaaataaaatagctaaatatcaataaaaacagcaagtttgtttttgtttttgtttttttttgagaaggaatctcactttgttgcccaggctggaatgcagtggcgcaacattggctcactgcaactcaggtttcaagcaattctcccgcctcagtctcccaaataggtggaattataggtgcctgccataacacccagctaatttttctg

SEQ ID NO: 528576 - DNA, 332 bp, Homo sapiens
gtctcctgagtatcccccctcgcctggtcttctcccctgttgtgtgtccgactctcccttgcctttctctgcatgggatcacctcatctcctaatacttaccttcatgacatctgccatgcaccccgtttccagacttaagccacagtctcaggcttctggtgggtaaggacttagacttgtcttttttgggtagccactattctacctactgcagagtgatgcggccacttgccctgagctccggggctggctgaagccaccagaacccggtatagaggcctgggacagatcctctcctcagagcctccggagggatccgcagccctaccc

SEQ ID NO: 528577 - DNA, 235 bp, Homo sapiens
  misc_feature (4)..(4): n is a, c, g, or t
  misc_feature (35)..(35): n is a, c, g, or t
  misc_feature (42)..(42): n is a, c, g, or t
  misc_feature (67)..(67): n is a, c, g, or t
  misc_feature (110)..(110): n is a, c, g, or t
  misc_feature (119)..(119): n is a, c, g, or t
  misc_feature (122)..(126): n is a, c, g, or t
  misc_feature (154)..(154): n is a, c, g, or t
  misc_feature (218)..(218): n is a, c, g, or t
cccnggctgaagaagtgaattcgggattacagagnaggtagnggcatgcgccccagcctaaagcacngctggctctgaatgctccaccaccaccccctggagttgctgcnggaacagcnccnnnnnctgagaagaaaaggcagaagatggtgtnctgtggggatgggaggaggacactcttctggcgggaagtggaacggggttaaaagcattaaacntcaaggataagatgcct

SEQ ID NO: 528578 - DNA, 112 bp, Homo sapiens
ttacactcagccagtgctgagacccaaacagttatgacatcgggtagggggtgatgcacgtaacatgacctaagcgtcatcagcaagaacaagctggagggggccgcgcgcc

SEQ ID NO: 528579 - DNA, 254 bp, Homo sapiens
  misc_feature (1)..(1): n is a, c, g, or t
  misc_feature (19)..(19): n is a, c, g, or t
  misc_feature (83)..(83): n is a, c, g, or t
  misc_feature (140)..(140): n is a, c, g, or t
  misc_feature (204)..(204): n is a, c, g, or t
  misc_feature (208)..(208): n is a, c, g, or t
ntgctgcccaatcggcacnatgtcgaagaatgatgatgacagcagctttgagatggaaccaccaacggtggtcttggacagcnacctggaagggatcaagacttaattaccttagcagcactgttttgagatcaccgtgngcttagctgtgagaagttccacctgagagactctgaagacctactgggaggataacctcctcantagntccttgagcagatccaccgaggagttggatttgtccgagccttcgg

SEQ ID NO: 528580 - DNA, 377 bp, Homo sapiens
ccagggacattgtggggagtctccacacttcatgtacaacgcgtgccagttgatagatgatggtccagggctgtcatgtgcacgtaggcactgtcttcgtatccctgctcaggttttaggagcagtaagaacaggtaggcttcttcgcctactgacagcagtgcccgcgaccttcagggttcccgatcatgatgggctccggttcctctgtgtctcggcccgttgcagatgcacgtcgcggcgtatggcgtgttgggttcacagttgccccaaagccttttggaacacttgtctttcctggtcagagccttctgggtacttgtacttgtccgtgacgtccatgcgagcattgctgcccaccgccttggtgctgatgt

SEQ ID NO: 528581 - DNA, 331 bp, Homo sapiens
  misc_feature (304)..(304): n is a, c, g, or t
ggtcagctcggacgacactagctttagctcaagcgcaattcctagctttacccaaaactgggaaattgccgtcatgtatgggccacatggcgcaccagattttttcaccaaacaagatattgatacgttctttgccaatgagtttgaaattcactataactcaagccggacaggtattcgtttaattgggccgaaacctgagtgggcacgtgaagacggtggtgaggcaggcttacatccttccaatattcacgacaatgcttatgccattggcgcaattgattttacgggcgatatgccaatnattttgggtccagatggtccgagcgga

SEQ ID NO: 528582 - DNA, 236 bp, Homo sapiens
actagtgtgttcccagcctgttgtctgagttctttccagctagggtggtgtgtcccgggcgtggcccttcaactcgaaggatgccgtcgtcgactcgtcaggatggacacttcgaagagtgccccgcctaggtcaaagatgagcacgttggtctcccccttgcccgtcttgtccaggccttacgcgatggcggcggccgtgggctcgttgatgatccgcagcacgacagcccaaaa

SEQ ID NO: 528583 - DNA, 313 bp, Homo sapiens
atagtgctacacccgggaaccagttatgactgcgccgtcgtcttacactcacgaaaaagctatatcagacaaacatctcagacgcgtcaggaaatgtacaccggtctgaactattctgcccgccatcatcctaatcctcatcgccctcccatccctacgcatcctttacatcacagacgaggtcaactgactccactcccttacctatcaaatcaataggtcacacaatggtactgaacctacaagtacaccgactacgtgcggactaatcttcaactcctacatacttcccccattattcctagaaccaggc

SEQ ID NO: 528584 - DNA, 140 bp, Homo sapiens
  misc_feature (82)..(82): n is a, c, g, or t
  misc_feature (136)..(136): n is a, c, g, or t
ggaggcagaattgatccaggatcacagaatgtccaggcaatggattacggctatgctttatgcactagcattccctccaggncctaatgcagagcagcactcttttacaacattattgtgtaacgcttcctcatanagat

SEQ ID NO: 528585 - DNA, 409 bp, Homo sapiens
taaaaacacagtgccaaaaaaataaagcaaaatgtgataaaatttcaaggaaaaaaatccaacaaacccactgttttggttggagacttcaatatccctctatcagatataatcagttccagcagacagaaaatcaataaggacataattgaacttataatcaaccagatttaatagacatcaatggactgcttcatacagcaacaaccgagtacacattcttctaaagcttacatagaacattcaccaacacagacacattctaagccacaaaacacacctaaacaaatttaaaagagatcatacaatgtctgctatgagaccataatggaattaaactaaaaatcagtaacataactaaaaaatgtcaaaatacttggacattaaataaaatacttctaaagaacac

SEQ ID NO: 528586 - DNA, 320 bp, Homo sapiens
ggactgatccggctgctgccggagtaccaggagctgactgaacgtcgaagctggccctggcatgtggagatcgccacctaccgcaatgctgtctggagggcgaggagtgcaggctgagatggcgaaggcgttggacaagtcaacgtctctgtcgtacagtccaccatctccagtggctatggcggtgccagcggtgtcggcagtggcttaggcctgggtggaggaagcagctactcctatggcagtggtcttggcattggaggtggcttcagttccagcagtggcagagccattgggggtggcctcagctctgttggagg

SEQ ID NO: 528587 - DNA, 472 bp, Homo sapiens
tctacacttgagcaaagagctataatcagcataagttatgactggccgtcctcatacagtggggactgagatcagactcgggtgatgaccctgactagtactagataaagcatatatccagcttgatttgagcagtccattgtcagaactggtggagaaggagggttggaaccaggagccgtaaagattagggtggggcgtcaacatcagacaacaggacaagtgtcacttgcagagcaggtctgaagcagcagcatagaaggacaaggacacttgaaggaaagaagcaagggcagcttcctgtgtgctgagagctttcttcatgccaggatttgctctgttagcattcgcacacttggtctaatataatcccacaggcagagtgcttcaggaaacgccagagttttgtttagaccctggacctaccattaggaagctttgtcacttaaggcccgttgtattgcttctgttc

SEQ ID NO: 528588 - DNA, 327 bp, Homo sapiens
gctcgacttttaatttttttgagactaggtctcggtctgttgcgaagcttgagtgcagtggtgcgatcacagctcaatgcagcctcgacctcctaggctcaagcaatcctcccacctaagcctcctgagtagctgagactacaggcacacacctggctaatttttaaattttttgtagagacctaggtctcactatgttgcccagggtggtctcaattatttggtatggaatcaaacaggtctcccaccttggcctcccaaagtgctgggattacaggtgtgagccactgagcctggcctcactgcacatttttgaacaagtgagtg

SEQ ID NO: 528589 - DNA, 942 bp, Homo sapiens
gatctgaaccgcgcgggcgaaccctccggtgtcccgacctcaggctaagcttgatgcatggctgagcgggagcccacagctggagcaggtggactccagtatgcacgctggagaatcgaggaggagagatgcacgtcgcgtcaacctacaagcaccccgggccacgacagaagcatccggggagatcggcaggagcgggacaaggacgacggaggagcctgcgaagaggtacaacggaggcacctgctgggccgcgtggcgcggtttccgcaagagcccgagggtcccgaacgtctccggtgatgtgacatggcccgtgacccttgggtggtgcatgcctcggtggccccggtgccccactggagacctggtatcatgagcgggcgaccgtggatagcgttcatagaagcagctcgtctatgtgctgaatggagggatggtggagctagcggagtcaggcgtcttcgtgaagcgcgcgcgcgctcttcacagagcagtaatcatgggtcctaggaatgaagcatcacatcgtggtcatacctgttcgacgtgacaaagcgcagtcgacagactcacatcctcacatgcatttacgattgcgtagggcgatggtcttgtggcccctcgaagccgagacgagattgtacgtgaagtgcctcaggatttccctcgggtgtgttgagcagaggcagacactaatggggtaatagcgtagaccacgggtggggatggaaacatcaaattggacccatccactggcgtcctacccaagaaggaaagtagaggaaaagacctgagacaacacccagtccctcgcaggcagatggagcaccataagacaggacacgaagaagggactcggtaacgtgagctgaggcgacgatccatgaagagcagcgtccaagggccacacattgaccaggtgagaatctaccccgccag

SEQ ID NO: 528590 - DNA, 107 bp, Homo sapiens
cagccctggacactctgagcagaggcagacaacacaggcgctttgcaggctgctctgaggtctcagcccatcccccaggaggactgggattttgtatgatcaaatct

SEQ ID NO: 528591 - DNA, 127 bp, Homo sapiens
cgtcaagaagtgtgttattatgttggaattcccccccacaacttacacggagctgattgctgtatgtggacgtttctctatagaatctaagacagatctactcaggaatgtcattcccagcagcggg

SEQ ID NO: 528592 - DNA, 275 bp, Homo sapiens
  misc_feature (16)..(16): n is a, c, g, or t
agagagagagagagcncaagagagtgcacaaatttccttttcctctgcctttttgttctatctaggccctcagccgattggatgttgcctggtcatattggatgagagcagatcttccttattcagtccactgattcaaatgccaacctcttctggaaacaccttcacagacatacccagaaaaaatgctttataagctatctgggtattccttaacccacttaaaatgttgacaactaaaattaaccattaaaatgactttaccatagtgaaaa

SEQ ID NO: 528593 - DNA, 104 bp, Homo sapiens
tcacgaggactccctctccctactgtatcctatggtgcgggggcttgtatgattatgggcgtagattagtagtagttactgggttgaacactgattagtggtgt

SEQ ID NO: 528594 - DNA, 842 bp, Homo sapiens
caaccggggtgcagcatagagcaaagtttcttgttgcgcttcatatgaaattgtttgcccctcccgttcctgtggtaaaaacgcctgggagccgtgctgcccctctagttttttccagagcatttgggtgggaagccgcccacgggcagattaataggggtggtctctgccagcaccaccacatcggtgtgtgagagaggcgttttcttcacgagcaagattcacaccaccacatggagggccgaccccactgccacgggtctcgctatcatattccagacccgaccgacgctgtgccgcgggggggcggcatactccccacaggccccgggtgtcccaaaagaagtcgcctcgccggcgatctgggtccagagggtcgccacataagtagcggtccgcccactggattcgtctccaaatgaatggcgtctaatgggagaattatttctatctctccctgattatcccctgcgcccccccctcctcctcgtgagatccacggtggtagtgagcaaagaccgccgtgtctcactaaccttgttttgggtttccactattcggcccgcatcataccgagttcgtcgagggtctcaaactggtctatggtatcgccagaggcgatgggcacacgcttcccgataagatacagatggatactagttagtgggcgcacctgtcggtgttatcttaatctgtgtcgctatgcaccggacttatgtttgataatgagtcttttatcacaccgcgccatttttgtgctgggaagccgatcagtgccccacggacacgtcgcccatacatagtctggcgaaccccttacaaaaaataaacgccacataaca

SEQ ID NO: 528595 - DNA, 592 bp, Homo sapiens
atcgttgattcgtttctatttgtcaggtgcacaagattaccttctctgttttagccttctgtcttgtcaccaaccattcttacttggtggccatgtacttggaaaaaggccgcatgatctgttctggctccactcagtgtactaaggcaccctgcttcctttgcttgcatcccacagactatttccgctcatcctatttactgcagcaaatctctccttagttgatgagacagtgtatatctcacctttaaaccgtacctgatcctgaatggtctgtcatgtgtctgcctttaaagatccattccatctgttcttcgctcctctatggctctaaataatgagggggctaagttatacggcaaagctcagctgtacaaaatatttcctcagtagctatgcagaaaacaccagacaaacatgccattctataaaaggtgtagtttttcttttagaatgtaagctcctcaagagcagggacaatgttttctgtatgttctattgtgcctagacactgtatgctcactaatactgatatggagtccgcgtctgataaaggtaacaccgggggggcggggggggggggggggggggg

SEQ ID NO: 528596 - DNA, 213 bp, Homo sapiens
gactagaggatccgcatcccggttcctgggtataaatgtcagcatcggctggacgtgtgactcacgcctgtaatcctagcaccttgggaggctgaggcaggcagattgccgagctcaggagttcaagaccagcctgggtacacggtgaaatcccgtctctactaaaatacaaaaaaatagccatgtgtggcggcgtgtacctttagtcccagc

SEQ ID NO: 528597 - DNA, 335 bp, Homo sapiens
ggtgactctacaggatccttaatatgctgtctcagaaaaacaaggaagataaaaaaattcatggtataaaataactaaaaattaaatatagtctttagaaatgattttgtttagtataattaatactggtatgacaactgaatgcaaatgaaattatgatataaaatttctattctgctttgtatttttcgttaaagtttttataattgtcatctgaaaaaggatttaatattcttcttaaattcattagctaactctctcaatattattacactattatttgcctatttgaaaattgttactttctttcgtacataaatagcattcataatcat

SEQ ID NO: 528598 - DNA, 154 bp, Homo sapiens
tgatgcctcccatgtgattatggatcataacgattgttccacataggtctgcgagcctgaggcaggagaattacttgaggccaggagttcgagaccagcctgggccacatagtgagaccccatctctactaaaaataaaagataaaaaaattag

SEQ ID NO: 528599 - DNA, 97 bp, Homo sapiens
cagcccttcttcaggactctgggctgggaagccctgttggcccggcgcctgcaaccgccctttgtgcccattctgtccgttcgcaccgacgtcagca

SEQ ID NO: 528600 - DNA, 451 bp, Homo sapiens
  misc_feature (12)..(12): n is a, c, g, or t
  misc_feature (36)..(36): n is a, c, g, or t
  misc_feature (50)..(50): n is a, c, g, or t
  misc_feature (135)..(135): n is a, c, g, or t
tgacatggatcnttaccgtttagcgaaactcgacangaatctacaaaaantaatcaagtgaagctaataaattcagccaaagttgtagtatacaagatcaacacacaaaaaataagtggtatttcatatacactngcaatgaataatatgtaaagttaagaaacaattccagtggggggcagtggctcacacctgtaatcccagcactttgagaggccaaggcaggtggatcacgaggtaaggagatggagaccatcctggctaatacagtgaaacctctctctactaaatatacaaaaaattagccaggagtggtggcacacgcctgtggtcccagctaccagggagacagaggcagaagaattgcatgaacctgggaggtggaggttgcagtgagccgagattttgccactgcgccccagcctgggcaacagagtgagactctatctca

SEQ ID NO: 528601 - DNA, 437 bp, Homo sapiens
tcgaactccacacatcatgctttttcagtggccccatgctactccccagggctgtggattttagaggtgatgaccccggacttccctgggcaggcttggaagagctatacccaagtatgcagtcttccttggctttgcctctcttagggaggctcagagaggtcaagggagtgatccaatgccacacagcgctggggtctgcagtacctggctccctggagggcatgtgccatgatcccttctccctggggtctggtggccccagccaagccctaccaggtctaagaacccaggggaccttcccaggtgtaagactactcatgcctctgagccaccgagagaggctttaaaatctcagctccaaattaaaacctatgagctcctcaaaacaatgaaaaatttccctaataaaaggagaggcacactcaaaaaaaaaa

SEQ ID NO: 528602 - DNA, 278 bp, Homo sapiens
  misc_feature (14)..(14): n is a, c, g, or t
  misc_feature (204)..(204): n is a, c, g, or t
  misc_feature (207)..(207): n is a, c, g, or t
  misc_feature (235)..(235): n is a, c, g, or t
  misc_feature (243)..(243): n is a, c, g, or t
taggggccaggggnggaagtgtttgcccttccccaaatctagtttgatgtgtactaaacccttctgtagcaaggatggtggtaggtcttttgttactgcagttgccctgccccgtggctatttggatgaggagtgtgcacttgggcgtttctgtaaatcttgagataaactgtttggagatttcaccacctctctggtgggggnccnactctgtggaaattgtaaatccgttttntttataanacctggcactgtaaacaataaacatttctgcagcc

SEQ ID NO: 528603 - DNA, 162 bp, Homo sapiens
aacctttccttatgagaatcccttttttgggttaaaaataagggtaataatcccttccctggttaatttatagaaattgggcttttaattgtcagttcagttttttaatttgcgggaggtttttccggggggaaaattttttcatgttacttatactaacaa

SEQ ID NO: 528604 - DNA, 241 bp, Homo sapiens
gctgatccgcttaaggggcgctggtgaagcggctcatcaggtctatcaggaaagctgagaattggagtgagaatccagtgtggaaaatcaggaaagagggctggtatgagcgacagagaagtcattcagagaaagaggttattgaattcattgggagaattgaaatgctgttcttgaattttgtatcttaaagcggatcagcgggttaccgaagcctcgaaattcgttaatcaattggtcc

SEQ ID NO: 528605 - DNA, 238 bp, Homo sapiens
  misc_feature (181)..(181): n is a, c, g, or t
  misc_feature (197)..(197): n is a, c, g, or t
  misc_feature (214)..(214): n is a, c, g, or t
ggaagatcctggtggtgatgaatggtcagagcctccctatgactcacaggtttcagctgtccgaaaccaacaggaccctctttctatttggtgtcacaaacgtatactgcgaggacccttatgaatgttgaaatacgtgaactcaggtgagtgccagcacgcagtgacccatgtcaccctngaattctcctccatgngtccatgacctccccangaattcaccgcttcatacaccaag

SEQ ID NO: 528606 - DNA, 181 bp, Homo sapiens
tgacggtccaagctttaccgctactactaaatgctataccaaaaaaaatctgacatctgaaacatttctggatccttagacaagcattgtgctcagggatacgcaacctgtagtacgttctttatcattgttttaagtagtatatatattggtggtacagattctgaggcggtcaaagctt

SEQ ID NO: 528607 - DNA, 161 bp, Homo sapiens
ccataccatgaccagcacaagctctgccctacaatagcacaacccctgtactatacccagcacaacctctgccccaacaaccagcacaacctctgctcccacaacgagcacacagttctgcccctacaacctagcacaacctcccactccaaagaccagca

SEQ ID NO: 528608 - DNA, 299 bp, Homo sapiens
gggaagcaagaatttttaatggcagtcttgcaagatcaggtgcctggtgaggcaggtacacccggggcagtcacagcaggtagtttatctcctctaatgcaagtccctcccccagttcctcactggtcgagtactatggggttacaatctcccgagtcgcctgagtttcataatcccgttgtacgcgtccctaccgcttacaaggtgtacctgtctctaccgcttagtttgattccaatactgaactgctccattatggctgacctctctcatttgtcgtatgtactcaggacggcgtg

SEQ ID NO: 528609 - DNA, 403 bp, Homo sapiens
gatcactatctattgtcccggctggagtgcagtggcatgatcacaacccactgcagcctctacctcccaggcttaagcaatcctcctgtctcagcctcccaagtagctgagactacaggcatgagccaccatgcctagctattttttcttttctctttctttccttccttccttccttccttccttccttccttccttccttccttccttccttccttctttccttctttccttcttttgtagagaaaaggtcttgctatgttgtgcaggctggtcttgaactcctggattgaagccgtcctcctgccttggcctcctgatgtgctgggattacaggcatgagccactgctcccggcctatttctttccttataggattataggatggtcccgcctatgatat

SEQ ID NO: 528610 - DNA, 534 bp, Homo sapiens
  misc_feature (12)..(12): n is a, c, g, or t
  misc_feature (31)..(31): n is a, c, g, or t
  misc_feature (208)..(208): n is a, c, g, or t
  misc_feature (265)..(265): n is a, c, g, or t
  misc_feature (395)..(395): n is a, c, g, or t
  misc_feature (398)..(398): n is a, c, g, or t
  misc_feature (463)..(463): n is a, c, g, or t
  misc_feature (504)..(504): n is a, c, g, or t
  misc_feature (523)..(523): n is a, c, g, or t
  misc_feature (529)..(529): n is a, c, g, or t
tgttgtaccagnccaggttgtatttaatacntgtataagccctatcctcctaaaataattgggaagaaaagtagatatgcctccccaagtgagcagaaaatcctcctagacagatatacaagaaacctattaatagtggtaacccccccctaagagacttgacagatggctggagatcagggagtagggaaagagatgtaattttcanaatcatcctgtgcttttcaaattattacctatgtgcgggccgggcggggtggctcanacctgtaatccccagcactttgggaggccaaggcgggtggatcacccaggtcaggagattgacaccatccctggctaacatggtgaaaccccgtctctactaaaaaaatacaaaaaattagccgggcganggntgatgcgcctgtagtcccagctactcgggaagctgaggcaggagaatggtgtgaacccgggaggnggagcttgcagtgagccgagaatcgcgccactgcactccancctgggcaacaagaagcantccgtntcaaa

SEQ ID NO: 528611 - DNA, 215 bp, Homo sapiens
aggcccgcattgagagtgcacacgatttgtgcgccactccttagacataggctgcgtccctttaaatattgccatctgacgtgcggtggccgtggatgctcctgtctgccgtcgtgtggggctgtgatggatccttgggtactgtcatggggcggtgtgggagatgggggccgcggagtgtctcgtcctgtccctggcctaaagccccgaggagt

SEQ ID NO: 528612 - DNA, 116 bp, Homo sapiens
gtcctttgtgcttctaactgaggcagtggtagctgtggtggtctgcgagacatggtgtggctcatgatgcaggatgagtgatgacgtgtggcacacatggagacaggacccacaaa

SEQ ID NO: 528613 - DNA, 295 bp, Homo sapiens
  misc_feature (120)..(120): n is a, c, g, or t
catgtagggtgctttgcatgcctctgatcatgtgcccaatgccaggagtgccaagagccaaccgctcaggagggcggctgtatctgcagacgacggggctccagattcatcaaattccanggagatgaagatgcaagaacatagtgatcaggtgcctgtgggaaatatccctcgtagtatcacggatgctggctagaaggagcagaacacaaggcagttgcccacgcgggtagaccacgctcagctgtctctggctagttttcattgccagatcctggcgcactggagttcccga

SEQ ID NO: 528614 - DNA, 258 bp, Homo sapiens
  misc_feature (120)..(120): n is a, c, g, or t
catgtagggtgctttgcatgcctctgatcatgtgcccaatgccaggagtgccaagagccaaccgctcaggagggcggctgtatctgcagacgacggggctccagattcatcaaattccanggagatgaagatgcaagaacatagtgatcaggtgcctgtgggaaatatccctcgtagtatcacgacgctgacgtggtctccaggctgggcaatccttgtgttctctccttctaccagcaccgtgatactacgagggat

SEQ ID NO: 528615 - DNA, 112 bp, Homo sapiens
tgcagctgctgctgctggtcgcctctgacgattccccctgcttgtcctgctctggacgtgttgtactctcgtgtagcacaagagtatttctacatcccacagtgcaaagccg

SEQ ID NO: 528616 - DNA, 392 bp, Homo sapiens
ggaaggtcccccggggaggagttcgatgcagcagactctcggggcggtcggcctggccttagactctttgccaccatcgtggacctcaccatctggacaaagcagccctggcccaggttctgaggcccgtggtatccatggaggcccttcccgcattgtccccaaaggcacagcggctctgagaaggtgccaagactcttgtcttcgccagtaataggccttctggagaaacttctgtaccagctccttcttgcagtgggccggatgtatcccccgagtactaccaagtctggtgcccatgcacaatctcagcttcctgtcaagaagctcccatcggctcggcatgccaacctctcagcttccatccctgtgacctcatcagactcagatca

SEQ ID NO: 528617 - DNA, 1333 bp, Homo sapiens
  misc_feature (506)..(506): n is a, c, g, or t
ggcagcctccagaggacaggacgcagtgacgttcttgcccagtgatgagtcgtgagtgtgtggcagtgcagctgtgtctcctgtgtggccatgcatgcatgtggatgtgcactcacacagacatttgtttgagccattgagtgagccatgagtggtgcaagtgcctgccatgtgctgtgtgggtgacaagcatccatgacgcacgagctgctgcagttccctggacatcctcctgaactcatccccagagaccacaagcatgcactcgcagatgtgacatggactgcacgtgacgttacattgcaccagtgactgctagctgcgcggacacaccgtgtgagactgcaatgtgcccacgatgcaagtggtggatgctgcacaatgatccatgtggggcacacaatgtgatggacgcttggcatgacagcaacacattgacatgactgactaggacgaacggacgccagtgacagtcgacatagaccacgaaccacagtgaacccagntcacacagggagccagagtacagccatgaggccaagaactgaggcagcgatgaacgcccagactcatcttgcacagctcgacaacattgcgagaaaatttcggaacaactcagatgacgatatcccccgaaacctccctgaggactgggcacgacatgctactcgcgagagacgaagcataacaaagccattcatgacagcttctttggcgacgatgaatggagacagtcctgggaccagtgaccatgaccttggaactccccaagcaagcgaaggcggtggacttgcctggaagcgcggggggacagtaggaccaccatggcaggttggcggtcacgaacgtgagagcacgatcatggtgactagccacgatgacacgctggacagcatcggacgtagaacacaaccaccggaccaacatcagacgtgattgagcaggaggccgcatgaagcaacttcacacagcactaatgacccgagcagtggtccagcaatacagcataagcgcccagaagcagtgacatatccatagaaaaaggtaacactaacagcatacaaacagagtacctcgactccatagaacacgaaaatataacaacacaaaacatactaaaagaaaactatacatataaaagcaaatacacacaatgccacaaccaaaataaatacacatcactacacccaaccttacaacaccaaacacaaacaaaatcacaaaactccaccacccaaaaatccacctaatacaactaaaacacactaaaaaaatcaaagcaaatatacaactacaaaaacagatacacttacaaaccactatactaataaga

SEQ ID NO: 528618 - DNA, 401 bp, Homo sapiens
aatccttcgatatccaaagcatgacaaaaaagaataggacactaaatggatataaacacaccaaaataggaattgagcttattggcaacttagtcattaagtcattaactttaagccaactagtatacagtacattggtttaaagagatctagctttaggtgaactagtttcaagcaaactgactagtatcaaatcagtgtatcgctccctccagttccccccaactctagttttgggattgtgatggatgcgatccgggacccctctgagaggtggcaagtgagcttctactaggaaaccaagtgtaccagtgacctgagaagagagtaagaaagagtgcgagaagagacagagagacaagagcgcgagtgtgtgtatgcataaacacacgcacacatgc

SEQ ID NO: 528619 - DNA, 1091 bp, Homo sapiens
gagctgtcggggacggcttgaccgggaccgggtgtgtgctcatgtcggcgctcgctcctaatccctgtagcgcactatgcgtgagtgcatctccgatccacgttgcgccagggctggtcgtccatgatcgcaaaagtgcctgctgggagctctactgcctggcaacacgggatccagccgcgagtgctctacatggccaagtgaccaaggaacaatgggggacggactactgaagtccgtctcaaacaacttactctacacatggaagatcgggaacgctggcaatgcaacgtgccacgaggcgaatgtgtgagtacgtacttggtaactcacagtagacctggatcgaggtttctgcatatggtctgactagccgatcagtgtcgttctcagcctgaagctatggtccatcaacacgtgcacatggaaagatgtcttgcacagaatagaagtaatggccgatgggtgaagtacactccaattggacgactggaagatacatatgagactgggtgctcgggattctgaactttcgacggcagtattggcctgaaccacgatgacacgcggatcgtatcagggactatcctttggcctgaacccacaggtgtagtgtggcgggttgaacctgggtctgggttacagcgaccctgctcactgggagcgtcctgctcaattgagtatggcggaaggaagtccaagctgcaggttgctccatttacaccaggcaacccatgtttcacatgatggagttagagcccctacaagtccagccgtcaccacggagaaacaaccctgggagacactcgtgatgggcgaacatggaaaagcaaggaggccactagacatctgccgctagaaacctcgagatgagcgccaactacgtactagcggaatactagccagaaggtcgccacacggatcccacgatggggagcctgacgcgacggagaagtcgacaaccgggcaacccgagcagactcggcaaggcggcaccaggagaaacacacgacagaatgccacacacgggctagccccaagtaggcccctcaacccgcgggcggcggccaaacagcacaattgggtgcgcg

SEQ ID NO: 528620 - DNA, 687 bp, Homo sapiens
gtcacacaatcgtaattccaaaagccattatggataataaagggtgtaaagccttcagatatttcccccaaaaaaaaaaaaaaaaacaaaaaaaaaaaaagaaaaaaaaaaagagagaagaaaaaagaagacagaaacgaaaagaaaagaaagaaagaagagaaaagaaagaagacagaaacaagcagaacagagagagagagaagacagacaaagcaagagcagaaggagggagggggcgaggggaaggaagcaggagagagaagaaaaaaagaagacaaagacagagagggcgagcggcgcgcggcgccagagacggagagagaacagaacacaaacagacacgaaagcgcgagagtcggctcgcgagcagacgagaaagaaaagcgaagaacaagacaacaacgaagacgaagaggcgcggacagcaagaaagagaagccagcgaggaaggggagtgaaaagaggagtagagacggtacattgtaagtaccacacaaacaaacgaacaaagaagcggcgcgcagagaaacagacagcgagataggaaggggtggccaaaaaaagcaagcgaggccgacaccgagtgatgaaaaactaaacgatacttaagacacgcgaaaggaggagagacggagcaaacataagataacataaaaaaaacaaggccggcgcgagaggggaggg

SEQ ID NO: 528621 - DNA, 386 bp, Homo sapiens
aattacaatatacactaatcatcgtctggttacgcgtcgtttgcagtacattttagaaaaccgaattacagccttaaatagtatgtggacctaatacccagaagcacccccctttgtaagattgtaacaaaaattaattatgaatggagtaaatagttcttatggagtgggggacccaagagccatatcagtgctagcaaaatgggcagaattcataatagcatcaaacgttgccccttgcaagagctttcggtgccctaaatgatgtctaaaaggacaatattgaaaactcccttcagccgccccaaaggacagtgtttacagcaaattaatcagaaaaaaaaaaatccggccctccatggccctcaagcgggaggaagcttagg

SEQ ID NO: 528622 - DNA, 1575 bp, Homo sapiens
gagaagaaaaactttcgcctgagacctatttaggttgatactgcctctccaagacccaatggaaacatctggcatgtgcccctgcagcacagacagacctgtgtcaggctttctctgcatgtcaattcttgccagtcaaatgcatgtggcatgcagcaagcatggcagctcgcatcccacaaccctttgtcagtgcaatcatgtgcacacagcatcatttcatgctctaatctgcagcacaacacttcgcaggcaagcagcacagccagtccagacccaacaatcacctcacatagggtcagggcacagtcactaggcaaacaccatcgcagcagcccatccgtcaattccgactagagctaagataacaagaatttacaaaactcgaccactatcacagagatatgctctagcaaaggacgaacgcacatagtaacactcgacctagatcatacccactatacatatgacatccgagctattcaatagacacgcaaactacaatatcgatagtatgccacaaaggcactacgacactagaccttagccaagcccctcgcgatttatgagattgcatacacaactggaagccaaatctggatatataattctggcccaacggaccaaagcatcactgccaacagcacacaatgatccacccccatgcacagccaaccattcgggcacgaaccctttggaccttcttctaggatagcacctcgaacccaacaacacaattatagattccgcgttaagcagtcaaccacccaaacaagttaaaagcacgaagaagtagggcacaaacatgaacacggactcacatcaacagcaagacttctaacaacaaccctcacaagcagatccatcggggagcttccgacgaacatacctaacccaatttttgacaacctaacaccatatcccagcgaaagacacccattcctacacggactttagggcagcaagggagtccgcagttatccagaagcacaaacaaataaaatataggagccaacaagtaacccttgaaatggtaacacatacacataaattggtaggaggaaagtacatgaacaaatgggtagtcgacataatgcccatcccgattcaataaaacaataggaacgcaaggacacaaatataaggccttagcacacttgcaacaacttactgaaataactgacaacaattgcacaacacaaaacattctatccaacatttcccttaatcacataatcactgtaaaaaaatcacaatacttaccaattaaaccaacacaccatggattcacaacattgttactaccctgcacaaaccaacgcggcaacatacaccatcccacctaacattgtcaacagactcacatttctacacatagaaccataaacagatacccacacacccacaacaacatctgcaacatataaaacttcccacacgtccaacagcacacatagtaagaacacaaacacaatcaccaaaacatccacagcacaaataacataacacatactacacagcgcccacatcttcaaccccaaaaactaccttcgacatacaccttccacaacccaa

SEQ ID NO: 528623 - DNA, 493 bp, Homo sapiens
  misc_feature (208)..(208): n is a, c, g, or t
  misc_feature (377)..(377): n is a, c, g, or t
  misc_feature (411)..(411): n is a, c, g, or t
  misc_feature (419)..(420): n is a, c, g, or t
  misc_feature (430)..(430): n is a, c, g, or t
  misc_feature (449)..(449): n is a, c, g, or t
  misc_feature (457)..(457): n is a, c, g, or t
  misc_feature (462)..(462): n is a, c, g, or t
  misc_feature (482)..(482): n is a, c, g, or t
  misc_feature (490)..(490): n is a, c, g, or t
  misc_feature (493)..(493): n is a, c, g, or t
catcacccttgcaacaaccaccccaaaggaaaagagacgctgaacagtttaggaaagggctcgcgtctaagacatcaagcgacatacagagatgtgcaaaaacttggtgagaattaaaattgacctttggaagagggtaggggcaggatgttttatgacacttgtagaaaagacaggaggaacccgctgcgatggagattgggggganttggaagcaagcagccaacaggacagagttccagaactcatgcagatggggaagaggtgacagcccttccccactggcctcccccgtggaggtggagtagacagacccggaaagcagaaaaggccttcttcttccctgttcctaagccgtggtaccctagcctatgaantgaagctatatcctccaatcccaatttccattcntgtaacannccattcaggnttcctgagcaaatgggacnttccgagnagttnaactagacttggctaagccngctgggcntcn

SEQ ID NO: 528624 - DNA, 344 bp, Homo sapiens
  misc_feature (39)..(39): n is a, c, g, or t
  misc_feature (55)..(55): n is a, c, g, or t
  misc_feature (70)..(70): n is a, c, g, or t
  misc_feature (78)..(78): n is a, c, g, or t
  misc_feature (340)..(340): n is a, c, g, or t
  misc_feature (342)..(342): n is a, c, g, or t
gtggctcctacgtggttgaaccggggccctggagggcancgtctgggggctcctnccgtggctcagtgancgtggcanaggacaggtctacacgggccaggcgctgtgttgctctttcctcctggggtagggactcctgtggctgcacaggttgcccccgcccacctgcttgtgttttctcagcccttcttgttccaggtcaggatcctggccacctgcaagggctgtcctttgccttagccatgagtgatggccctggccggtttctggggcatagaccttgggaagcaagtccagtatggggacccagggcagcctgggggggtgtttttatttggantnaa

SEQ ID NO: 528625 - DNA, 110 bp, Homo sapiens
agttatgtatcatcacacgaatagcgtacattagccattaggtaatttctattttcttttctttttttcctgaaactgatttatcatgtctttcacccaatcctagggat

SEQ ID NO: 528626 - DNA, 172 bp, Homo sapiens
agtctccggatcttacgccgtacagttgcgctgcctcagagttaaatgagtactgcggcttacgtacgagcgtgtgtgcagagacagctgggtttgactggctcagagacactacactgggtccatcacacaatcagcaactgaccacccaatacgcaactggtacggcggg

SEQ ID NO: 528627 - DNA, 451 bp, Homo sapiens
tcacagacttctccgcgctgagtccagctgcaggacactcaagatcctgtgcaggcatggatgtaatccgggttagtgcttagcctcctcctcctccttccagcctgttcccggaaagaatacttctcgtcgtccacctgcttgagcttggtgcgcaggctcagcttctggcggttctcctcctgcagcaactcctgaatgttctgcagctgggactccagcgcggagacattccttggtgagcttgttggacttgctcgtcggatctgggtaacactcctcggtcacgttgtccagctccacctgcagcttggtgaccttgtcgggcagctctgtgcgcacgcgctctccctcgttgaacttgagctgcagctcctgcagctgcgcctccactttcttgcgctcgtgctccgagtcccctttgccctgcagctcgcccctgagttgggta

SEQ ID NO: 528628 - DNA, 410 bp, Homo sapiens
  misc_feature (5)..(5): n is a, c, g, or t
catgnaagtacatggtgatggcggtggttgcctgaatctgcatgcctggcaggatgctcaggattatttggcctggatcgtggagtccggtcagatggagcaggcgctgtatcaggcactgcaagtatttggagtgccctggattgaagaccgctttgagcgtctggaaggccataccatcgtcacagccgggcaaaagcgcatcagcgctgatttgttcgtgggggcggatggtgcccgttccggcctgcgttctgcggccggcattgagcatcaggggcgcgagtacggggatgccgggctggtggcccacttcaacgtagaacgcccgcaccagcaagttgccttgcagtggttcacgggtgattcgattcttggtcgacgcggccgcgaatttagtagtagtaggc

SEQ ID NO: 528629 - DNA, 193 bp, Homo sapiens
attgccactgcgaaccagccggctatcgataaggaatggaacgattgcgacgagccgctgcttggacgcggggattgtatgacggctgaagggcactgggaagcagccttagcggaccgcaccgctaagcaggcgacgaaggacgacgaggacggtaaggaggttgttcctccggggtacacggtcgttgatg

SEQ ID NO: 528630 - DNA, 107 bp, Homo sapiens
atgtacaagtctcaggcagctccatacctctcatgtgtctcattagtatattattattatctaagttagccattaacttgaatttcactactaaatattataagagg

SEQ ID NO: 528631 - DNA, 273 bp, Homo sapiens
ttatgtctctgctagtgatgtacagcacgcatggtgctggtcatctgctcagcttccagggtaggccttcaggtagcttatgaccatgcaaaaggtgaagggggatcagacatgtcacgtggtgaaagcaggagcaagaagggggcaggcggaggtgccacacaattttaaatgaccgtatcttgcaataattcaccatcaagaaaacagcaccaagccaagccacggtcaacccacaagccacggtcaggccacaagccacggtcaacccac

SEQ ID NO: 528632 - DNA, 426 bp, Homo sapiens
tgctagctccctcttcacagaccctggcagccgccattctactttctagtctctatgaatttgattactctagtaatcatataagtggaacactagtatctgtccttttgggaatggcttaattcaattaagcatcatgtcttcaaagttcatgcatgttgtagcgtgtgtcagaatttccttcctttttaaggctgaataatactccattgtgggtagataccaccttttgtttatccattcacccatcaatagacacttgggttgcctccacctcttggctcttgtgaatagtgctgtgatgaacaatagatgtgtaactatctctaggagagcctgctttcaattattttgggcatatacccagaagtggcatttaatgagattttcttaaaagtaattagcagatgaattcacctgcagcag

SEQ ID NO: 528633 - DNA, 295 bp, Homo sapiens
ctgcggtgactctagaggttcccgattttgacgcgttctcctccatgataggagcagatggttttcgagaaaaatgtcttcaacaagaccagcggactgagagtgagattgcttttttgggggtatgaccatcgtctacaagaacagcattgacctcttcctatacgtggtgggctcatcctacgagaatgagctgatgctcatgtctgttctcacctgcctgtttgagtctctgaaccacatgttaaggaagaacgtggagaagcgctggttgcaggagaacgcgtcaaaatcg

SEQ ID NO: 528634 - DNA, 343 bp, Homo sapiens
ggatgggttggggaacggggagtcccggcttggctttttctggtttttgaaagggacatttttatccctactccccttggtccccaaccccagttctggtgaaaatgtggatgataatggggccttgatttccaaatgaaaacagctttattggttaactttattggacataggaaacacgttcagtgtaaaagtgtaaaggggaattcagggttaatgctgcccctaaaaataaatgctaatgaaacttgggtttataaccttttgatcctttatttttgcatataaatataaatataaacaaatatttttggtataacaataaaccgtttccatccttgga

SEQ ID NO: 528635 - DNA, 199 bp, Homo sapiens
tctactttgatcaccaccctagctgttcctttctccagaccaccttacttttcaaacttgattcttgctatcacagctctctgtaacatcagttaaaatcagctgcctcaactctttgaggatgtttgtgcataggccggctttgtaaaacttaccgctaatggcagtcttctagcaaaaccagcatatctctggccaa

SEQ ID NO: 528636 - DNA, 412 bp, Homo sapiens
acgacaggaaagtgcatgcagttacattgagttgtgatggctgtctgtttgaaaacaaacaagcaaatagtactgtcatttgaagagtataatcttcggtaacacatatattttgttgaaggtctacgctgtgcaagacactatgtgtgaataatacttccgaagatagtagttaccttttgaacttttctgtggcggtaaaaaggaaaaagtctcactgtgctgagcttgaaagccctctttaaaatcgcaaaactgagttcaaagcctgtatcatacagaaaaggtgtgcctaaaagaacacatgttctcatatgtgtccaaaatacaagaagatctggcttttgtagtcttgtaatattcatactgtgagcctgtgtttttgaataaaaatgctttctaatctccaaaa

SEQ ID NO: 528637 - DNA, 215 bp, Homo sapiens
  misc_feature (35)..(35): n is a, c, g, or t
gagtgttcctgccatgtgggtccagtgttggtctncttttcagcatcattcctgtctctaatagaaagtgcatattcaaaatggtcttcaccagtgggtctgctcactcgctactgaaagtctctctagatgaatatgtttgtttatagtcagtaattattttatatttactagttcttttttaaaaagttttcctagtgttaatataatcatgt

SEQ ID NO: 528638 - DNA, 128 bp, Homo sapiens
cactatagacatctgattagaaagactgaatattctgaagagaaagagaacaaagaaaaacatactcgagaattcctaatagaacacttcagctgaacctaaaatggtgagcgagagtcaccatgagg

SEQ ID NO: 528639 - DNA, 755 bp, Homo sapiens
aattagccccctattaaaaattaattaaccactcatacatcgacctccccatccccatccaacatctccgcatgatgaaagcttcggctcttactcctatggcgcctgcctgatcctccaaatcatccatcaggaactattcctagccatgcgctactcaccagacgcctcatccgccttttcatcaatcgccctacaatcactcgagacgtaaagattatggctgaattctatgccggcgtacctgtcacgccgatggcgcctcagtattactttatcgtgcctcttcctacacatcgtggcagaggcctatatttacggatcgatttctctactcgagacaacctgaaacatcgggattatcctcctgcttgcaaccatagcaacagccttcagtaggctatgtcctcccgttgaggccatatatattcattctagaggggccacatgatgaattacaaacttactatcgcgccatcccatatcattgggacaagatcctagttcaatgactctgaggaggctactcagtagacagtcccaccctcacactgattctttaccttttcacgttctatcttgtcccttcattcattggcagccctagcagcaatgtccacctgcctatttcttgcacgacaacggggatcaaacgaatcccctaggaatcacctcccattccgataaaatcaccttccaccttactacacaatcaaagacgccctcggtttacttctcttccttctctccttaag

SEQ ID NO: 528640 - DNA, 225 bp, Homo sapiens
  misc_feature (3)..(3): n is a, c, g, or t
gcngttttggtgctgctgtgcctgggtgcatgatatgtctgaaacccacactgtgctttctgagtgctgcttccactccacacccctgctcatcctgcgaaacctgtgtgtgggaggcttttccactccctcaggcaccgcagcccaaacctctggctcacaccagcaccaatgtcattaggctggcagccaactccatcccctaggtctcaggcactatttttt

SEQ ID NO: 528641 - DNA, 1334 bp, Homo sapiens
  misc_feature (362)..(362): n is a, c, g, or t
  misc_feature (375)..(375): n is a, c, g, or t
  misc_feature (663)..(663): n is a, c, g, or t
tagattagctcacaggagaccttagcattccaccgcataagcctgatgacaggtcccctttcctctgagcccagtctagcgaatagcggaggggaacgcggcttgatacacgccgacgagttccgcgatcgcgcaaagaagctggaaagaggacgctggcacaagctcagtcagcagagattggttggcatctcaatgtccggatgttcagagtctcacacatgcatgaattaccaacacgctcctaggcatagacatcgatgtgcagtgtgattacacagatcagatgtaattctcaccaccagaatgattcgatacctcagaagagtcgaatcgttcagtgcgggctcgctcaggtcggngcccccgtgaggngacacacctccatgacagagacatgtacagacgacaccggacgatgtcaatgtggctcacaggaggtgtaatgagatcctggtggtgacaacggggtctgatgacgaacgaaggggaacggattgggccgcaatagagcatggccggagacatagttagcgcaagcgagatacgatgcagcctgagttcacatgcccatgtgattaacttgcccgaatgaccaatggcaggaacgtcgaaacacagggctagggagaacatgcatgcaggacaacgagtccatcgaangcaggggataattcgacgacctccatgagtgataccaggaaatgagatcatacggacagaatgcagagttcgggaagattgtggtacgcttaacagtgggagcaccattcgggaaggaccgaataagaagggatgtcttaaaggaccccgtgagcacgcacgctccaaaagaacccagcaagcaatttaccgaactacccacaagggggtggtacgcaagttgttcggcagtgtggcttgggacaacatgtggcttccgcgacatggtccatgttccaaaacggccctgggtgaatccatcgaagtcaagggctcagcgcttcaaacaccggattggcgtaccgcaaattgtgtgtgacccttcattgggttgagctctggggtgacaggcaccttgtgccacagcccaattctagcgggggggcccaacgcatagggaggcgctgttgagccaaaaggcccccggggacaacaggcaggcatgcaccaggatagacccgcggaaaaaaagcgacctcacagcaggagacccaaggttacgcacaccgaggggacacacggggaaaacatagacagagaaacaaggaccaccaagagatacagagaggggataggagccacaaagccacaagtggagcgacaagaccgagggcgaacagcgcagagaagaa

SEQ ID NO: 528642 - DNA, 604 bp, Homo sapiens
  misc_feature (227)..(227): n is a, c, g, or t
ggggggagggcggaagaaccctgaggtttttcctcacatttctgtcccatttttggaacctctggatttaaagaaatgaaaacctcaagtttgtggagattttaagaaatggttattccaatggaaacagctggagaacttatatttccgtgagaaaaaatttgctgttgaagttcatgatccacgaaggatttcagtttcaagaagaacctttgggcaaagtggcntgtttgtgcaaacatggtatgctaactcttctctcatcaagtccatttgggtaatggcaattagtcagcatcagttttacttggaccggaagcaaagcaaagcaaaaattccttcagccaggagtttagatgagattgcaatggatttgacagagacaggaacacaaagggcctccaagctggtgacactggaggcgaaaagtcagttcatcatggcaagtaatggcagtttaatctcctcaggttctcaagactcagaagttagtgaagagcaaaagagagaaaaaatccttgaactaaagaagaaggagaaactattacaagaaaaacttctgaaaaaagttgaggagcttaagaagatctgtctgcgggaggct

SEQ ID NO: 528643 - DNA, 708 bp, Homo sapiens
  misc_feature (35)..(35): n is a, c, g, or t
  misc_feature (331)..(331): n is a, c, g, or t
tactgtgaggacagggtaattgagcattatttganaatcaaaggtctcactcgaggtcaagctgtggttcagtatatgaaaatagtagaagctctaccgacttacggtgtccattattatgcagtaaaggataagcaaggacttccttggtggcttggaataagctataagggaattggccaatatgatatacaagacaaggtgaagcctcggaagttattccaatggaaacagctggagaacttatatttccgtgagaaaaaatttgctgttgaagttcatgatccacgaaggatttcagtttcaagaagaacctttgggcaaagtggcntgtttgtgcaaacatggtatgctaactcttctctcatcaagtccatttgggtaatggcaattagtcagcatcagttttacttggaccggaagcaaagcaaagcaaaaattccttcagccaggagtttagatgagattgcaatggatttgacagagacaggaacacaaagggcctccaagctggtgacactggaggcgaaaagtcagttcatcatggcaagtaatggcagtttaatctcctcaggttctcaagactcagaagttagtgaagagcaaaagagagaaaaaatccttgaactaaagaagaaggagaaactattacaagaaaaacttctgaaaaaagttgaggagcttaagaagatctgtctgcgggaggct

SEQ ID NO: 528644 - DNA, 126 bp, Homo sapiens
ctccggatctgacacgtcgcacagctcatccagaaatcattattatttaatacaaaagatttctggaatgagggaaatgatcagtccattttagcccagattagcagttggcagtgctgatacttt

SEQ ID NO: 528645 - DNA, 120 bp, Homo sapiens
  misc_feature (39)..(39): n is a, c, g, or t
gtgcagactgctgtattccaaactgggcactgggcgtgnttacatgtggcaagagtgaatcaatccttggcagggcatcgagtaccagaaatcagaacacatgatccgacaagcataaat

SEQ ID NO: 528646 - DNA, 1412 bp, Homo sapiens
  misc_feature (1053)..(1053): n is a, c, g, or t
cggtgctggccgccgccgggagagcccggggcagagcagaggtgctcattcagcactgtaggcccggaagattgtgtggtcccgttcctgacccggtcctaatggtcccttgatcttgcagctggactacgcggcaacctacctcttcttccacttagttgcatatcatgccgtatatctctattttattggtctatctcggctgggagcaagaatgacctccacctaaccagatgggctggaagtgtggtaagcagcacagtagcttgcgacctcaagacatctgtgctctgctatgctccgtgatacgtcagtttcagagtgcgttccacaggcccaagtaagcgtgggcaagaattgcttcatgtgagtttcaagcgtgcagagaacacagtccacgtgacactatcactgagtttgcacaacacagactctatgacacgtttcgtatcaaaagacaacgtgtatccctgttttcgcgtgagtacatggtggagcagatacaaagaacactcttccatagcctcggcgacctattgtggtctctgtggctgggtggagagcctccctaatcacccctgaaatcactgtgccagagtactccgcggcccctacgctatctcctgtgagaggtcagcgtgaagtgtgcgcccgtgtccaactagactctgcgtttaccctgggttacccacgtgcgagtctcacccgcggcgatagaccccttgtttccgaggcgaaagggcttgttcagagagaagcggtgggttccgtgggacacccctcccgcacgaggggttgccttctcggtgcgcccgtcctacgcgtgtcccttatacacacaccccattacaaacgcctacgtacacccccatgccaccccagggctcacttccgactgagatgcggaggacagggggcgtcgtagtccaagctcgaaaataggaatgccgcttaggaacgggagagggacggcgaacgccttgggggcttaacccctggtatgtctaaagaagggtacaggcgaaaataattgttgccaatcaaagttggccnttcgcggttataccatttggccactgtgaggacgaccgtagcatgggggggcccacttaggggacaataccggattatgttggcaccccgccctcggcctctgtgacggtggccccccccctaggccgatggatagatatccccccaagagttgtgtttatgccccttggagatgtcgcatgtttggtgccaagcgaacaaacaggggatagcattctgtgtgtgtcctaccaattgtcccagcccaggaggtgttgtcccccagtcacccaattgtaaccggtgcgacacggagacgtgggtatccccccccacccactattggggtgtgacaaccacatcacatattggtgcagatg

SEQ ID NO: 528647 - DNA, 149 bp, Homo sapiens
ggatgcatgatgtgtgcacgagtgtggatatacttgcctgttctgggggtgtacgtgtgttgtgtgcacacaggtgaacctgtacagtgatgcatgcgtgcccagggagtgtggatatacttgcctgttctggggttgtacatgtgtgt

SEQ ID NO: 528648 - DNA, 105 bp, Homo sapiens
ggagagagaaacaggtcagactcattcctagtacatttactaacatatattgagacatgaccatgatgtactggactaatcttaacttcgtctacagtctagata

SEQ ID NO: 528649 - DNA, 196 bp, Homo sapiens
tctagctgatcccttaggatactcctgctgctactcctgctgtacagaatatacaaaaccacaatggagcatgtgtatatgtggccaatgtcttcatctacattggtactgagataaaccatactcattgtctaacatgctgacgaaatcatctgagggggagggagctggatgctcagttgtcccatcacacgga

SEQ ID NO: 528650 - DNA, 576 bp, Homo sapiens
atgaacttgacccatatctctcatcatatacaaaaatcaaatcaaaatggattcaagacttaagtagaagacttcaaactatgaaactactaaaagaaaacagtggaaaaccactccagaacattggactgggtagagtactagagtaataccccacaagcacaggcaaccaatgcaaaaatggacaaatgggatcacatcaagttaagatgcttctgcagagcaaaggaaacaacacagtgaagagaaaacccacagaatgagagaaaatatttgcaaactatccatctgataagagattaatatccagaatatataagaagctcaaacaaatctatatgaaaaaaatctaataatccaatttaaaaatgggcgaaagatctgagtaggtattactcaaaagaagacatacaaatggcagacagcataagaaaaggtgccaacatcactgagcatcagaaaaatgcaaatgaaaactacaatgagggccgggcccgttggatcatgcctgtaaacccagctactcagaaggctgaggtgggaggactgcttgatgccaggagttctcgagacccg

SEQ ID NO: 528651 - DNA, 86 bp, Homo sapiens
  misc_feature (47)..(47): n is a, c, g, or t
attcaacgcttctaacagatgtacggggaccatgtcttatatgaagntttgaatgttaaataaattgtatattcactttaaaaaaa

SEQ ID NO: 528652 - DNA, 318 bp, Homo sapiens
ggcccgggctttcctcagacctccccagacctgttttttcatcagcccccgctgtttttttttgccggacgatgggtgcatctttcgggcccagtggaccccctccccagccctccctgaaccgttttcctgagtccctgagggcagacccagctccaggggccccgggcagatgccccccccccgaccctcctgctgtcccctggccttaggtcctgccagttccccagggtccgcccctgttcccttccctggcctcccctttctggggtttgtggctggctggggattaaaattaaagccattgtggccccttga

SEQ ID NO: 528653 - DNA, 287 bp, Homo sapiens
cacgaggccaaagtagactccttcgactgtatttagtttggccttttcagctttcttcttgcccagctctgtcgaattcatgggtgtgtgtgcacatgttggtttcacacacccatagtgattttgcgcacatgtcagtgctttttaatttctgcttgaatgttatgtcctgctgtgttgcagcatctaaagacattgtcaccgagtgtgtgtgactcaacgataatgagtgaggctagactgcgaacccaacatcacctccatcatggtaaggtgttggcgctgat

SEQ ID NO: 528654 - DNA, 388 bp, Homo sapiens
  misc_feature (19)..(19): n is a, c, g, or t
  misc_feature (59)..(59): n is a, c, g, or t
atagggaccctgtaatganttaatgcctttaaaaagaggttcctgttttggatgtgttncccagtatttgtttggaagatttaagagccccctttcagcagtttttgtggtggtggtttggtaatggctgattctctcagcatttgtcagaaaacgactgtatctttccttcatatatgatacttagtttcactggatacaaaattattggctgataattgttttgcttgaggaggcgaaagatagggccccaatccattctagcttgtagggtttctgctgagaaatctgctgttgatctgataggttttcctttataggtaaccttgtgcttctgtctcacagctgttaagattctttctacctctggaccagcctgctagcccac

SEQ ID NO: 528655 - DNA, 307 bp, Homo sapiens
aatgtatccgtatcttcatacctggttctggtgtgtagatttctttactggcgtctgtacctcacaccaacatgcaggaataccttattgctgataatctgctagccctcgacagctgctgatttgcttgcagcacgtgcacctctgcgtgtaccaccttggcttttcatgctatcgtcattcacatcgtccgttgttcatgcacatccatccatatccccacaatctttcacacatcatttccattaatatcccataatcatccagcttccaaggttgcctgcatagcacagcattctctctccat

SEQ ID NO: 528656 - DNA, 939 bp, Homo sapiens
agcccccgtgactgcacctggccatggcgcgctggggcccctgtggctgctgttgctcggggtcctgctggctggctgcacccattgatgcccagtgcggagtgtgcgcttgtctgtacccccgctggtggatggtgatgcgaggaaatgtctgtcattctggactgcacccctacgggaacccacgaccattatatgctggaatggttccttacctgaccgctcgggagctcgcccccgcctagcctcggctgagatgcagggctctgagctccaggtcacaaattgcactgacacccggggccgcagtcccccatagccatgctggactcccagggacgcctggttgctgggctgagtgcccagtgtgggctgacaggatgctgagactacgtgtgcgtggtgaggggcaggggctggcaaggcaacttgcttgaggccacctgcgcggggtcacacgtgttctgcaaagccagaggccactgaggtctcccccaacaaaagggacactgtctgtgatggaaggacttctgccccaggacatcgccacctggaaacatgccggaaccgggaacccgggcccccaagatcacgttggtatcggaaaccgtagcagtgagccttgagagtggtgcccgttaacaggactaaacccacagatggggctacattgaccaaacagcaacggctccagggaaggtcaatcggagacattgcttcttccccctcaaaccaagtaaccacatcttaaccttgcgtggacttccaggcaaatgggattagacccgaagaacgtagcaagggcttacccaacttgagtagccggaccaacgtaaacacggacctagcacatgataggacaccgagacacagtgacctaggcctgtggacagagcacacaaacctattccaagccttagcaccatgacaactaatccg

SEQ ID NO: 528657 - DNA, 112 bp, Homo sapiens
gaaggagggttcttgcttgttgccaaaaaacctttaagaaaaagcggagggattttcgcagagctgtaagatcaagcgccttagaaagaggtttgcccaaaagatgcttcga

SEQ ID NO: 528658 - DNA, 333 bp, Homo sapiens
tctgtgtggacatcagctcctgctttggtatactgatggcagcagagactctgactgaactggaggcggccattgagactgtggtctctactttcttcacctttgcagggcgggaaggacgcaaaggcagcctgaacatcaatgaatttaaggaactggccactcagcaactgcctcatttgctcaaggacgtgggctctctagatgaaaagatgaagaccttggatgtgaatcaggactcagagctgaggttcagtgaatactggagactgattggggagctggcaaaggaagtcaggaaggagaaggccctggagatccggaagaagtaaa

SEQ ID NO: 528659 - DNA, 759 bp, Homo sapiens
  misc_feature (39)..(39): n is a, c, g, or t
  misc_feature (64)..(65): n is a, c, g, or t
  misc_feature (67)..(69): n is a, c, g, or t
  misc_feature (81)..(81): n is a, c, g, or t
  misc_feature (116)..(116): n is a, c, g, or t
  misc_feature (130)..(130): n is a, c, g, or t
  misc_feature (137)..(137): n is a, c, g, or t
  misc_feature (140)..(140): n is a, c, g, or t
  misc_feature (151)..(151): n is a, c, g, or t
  misc_feature (210)..(210): n is a, c, g, or t
  misc_feature (214)..(214): n is a, c, g, or t
  misc_feature (568)..(568): n is a, c, g, or t
  misc_feature (577)..(577): n is a, c, g, or t
  misc_feature (608)..(608): n is a, c, g, or t
  misc_feature (646)..(646): n is a, c, g, or t
  misc_feature (667)..(667): n is a, c, g, or t
  misc_feature (741)..(741): n is a, c, g, or t
atacaatccactgttgcatgtagcctgaaaataacactntttgtcaaaaaaaaaaaaaaaaaanncnnnccaagaagagcncaaacactcttagagccccagggagcccggcactnacccgccaaaaggnaaaaggnaanagcggcgaggnccgggggaggggggcgggaaaaaacaggcgcaaacggggcggggcggggcgagcgaganaggngcgtcctgggacaggatgaggccctggtggacgcccaaagccacgtgtccaagagccgaggcctctccagcaagccctgcagtgggagaccttgcctgcgggccctgcccccaaggatggtgaggggcgccccgacaccgatcagcctgggcctctgggcacaggtgacacctgggggttcctcaggccagaggtggcgggcttgggctctcccacctagccctgtggagagccgagcaggggcctggtgccatgccccccgtgcaccaggcctcacgtggactccagcgtattgagtgggaacaggttgtggttggtgggcgtggaaaagtagagctgctcactcgacgcgtngttgtcgcncgggctgcttagccccagcgtccgctcaaantccagcagctgccccatgaagttgaagttgggcgagangttggactttttcctcttganaaagtcgtaggcgtcgttgagtgacaggttcatctcctgcatcagataggccacagtgaccgtcactgagcggnttatgcctgccaggcagt

SEQ ID NO: 528660 - DNA, 439 bp, Homo sapiens
agccccgaggatgtggagatcagagtttgtgtgacagagagggcttgagtttccagggcagtgaccagagaggagagaacagcacagagaggctgcagagcacgccctgagatcttcaggtgacaactcatctgcatatgaacatgagaaacgtacccaaagccaggaaaagaatcaaagaaagaaaggattagtgctaccagtggccaggataccacaccagctggaaatagtgcctgttcccaccagccagacggaaaaattgcagaaatcaccaggcattgagtaatctacacaggaccttgcctctgtagtggtcagactgagcactgttccaatttcacccaacagagctcaaaaacaacactcaagagtcaaactatttctgattaatttatctttgtcccagaacaaagcttaagaatatttataggaatac

SEQ ID NO: 528661 - DNA, 278 bp, Homo sapiens
aggtcggtccttctctcctccacctcatatgaatagtatgtaaacgaatactggttggccgggcggggtagctcacacctgtaatgcagtgctttgggaggccgaggcaggcggatcacccgaggtcaggatattgagactggccaacacagtgaaaccccgtctctaccaaaaacacaaaaatttagccaggcatagtggcacacgcctgcagtcccagccacctgggaggctgaggcagaagaatcacccgaacctgggaggtgggaggagaggaa

SEQ ID NO: 528662 - DNA, 223 bp, Homo sapiens
ctacctcctcctcctggcagattccgggaagcctttaggatgatatttcttcaactttatccatagttgtgccaactggaatggcatttgtttatgcgttcacaggacagagccagctcaagaaatctttaatctcactgtaggaggagtgaaaagaaaaacaagctctgtatgaactctctccagtcctcacaattacatttgtttttctgctcctttctcc

SEQ ID NO: 528663 - DNA, 572 bp, Homo sapiens
  misc_feature (28)..(28): n is a, c, g, or t
  misc_feature (33)..(33): n is a, c, g, or t
ggcccgtaaattcccaaatgaaaggccngcaanccaaagggggccgcattccccggggcccggggttgggtcccatccggcccattgtgggttgccccacggtttggtcccacaaaaaggtgggccccggccccggtttcagcttgaaggagttcagggtggccggcattcacaaaaaggtggcccggaccatcggcatttttgtggatccaaggagggggaacaagtccccggagtccctgcaaaccaaggtgcagggggtgaaggagtaccgctccaaatttatctttttccccaggaagccctgggcccccaaaaagggaaacagttttgttgaaaaattgaaattggccccccagttgaccggaccggttatgcccgtccggaaggtttataaaaaggagaaagctcgagttttccttgaggaaaaaaaaaatttcaaagcctttgttagtttccgtatggcccgtgccaacgcccggttttttggcaaaggggcaaaaaaagccaaggaacccccagaacaggatgtttaaaaaaaaaaataaagccctcttgggggtttggaatca

SEQ ID NO: 528664 - DNA, 181 bp, Homo sapiens
acaacagaggaagtctaaatcacacatcgacaaagcaaacttcaacactgaaacaagtcatcttgaagttggattactcagacttccaaattgtacaataatggcctgaatttaagttttctaacgataaactcagtggtttgttttttattattaatagagatagaactattgtgtgttc

SEQ ID NO: 528665 - DNA, 121 bp, Homo sapiens
cacgaggttttttgaggaattaacagtctttattgggctcagaccacccgtccgtgggtcttgaggacctctgtgtacttggcaattttcttctccacgttcttctcggcctgtttccgta

SEQ ID NO: 528666 - DNA, 1030 bp, Homo sapiens
  misc_feature (288)..(288): n is a, c, g, or t
  misc_feature (767)..(767): n is a, c, g, or t
ggacgcgtggggtaaaacccagcccatgaccccttaacaggggccctctcagccctcctatgtgaccttccggccttagccatgtgttgattttcacttctccacttccattaacgctctccttcattacttaggccttacttaaccaacacacttaaccattattaccaattgatgtggccgcgatgtgttaccacgagaaagcgcacattaccaagggccaccacacacccacctgtgtccaaaaaggcgccttctcagattacggggattaattccttattttantatacctctcaagaaggtttttttctcttctcggcaggagatttttctcttgaaccctttttaccaacttccagaggccttgagcccccttaccccccaaacttgaggaagggccactgtggcccccaaacagaggcttcaccccggcttaaattccccttagaagagtctcccacttcctataaaccacattccgttatttacttcgccaattcgaggagagtttctcaatctaaccttgaagccttcaccaattagtctctataattagaaaacacaaccgataaaccaaattaattctcaagcactgtgctttatttcacaattttatactgtgggtctcctctatattttatacccctctccttatacaaagccctctaagagagttcactttcgggagttcttccccttttcacccaatttttcccgaagcgggcctatcttcacggcttcaacactattctcttgggtgagcnccacgggggctttccccacggacactttccacggctcctttcttgtggctctcaactttttccttcaacttatcgtggtttcatccgcccaaatctaatttttttcccactttttacattccagagacttcacttttggggctttccgaaggccgccgcccgtgattacctggcgcattttggttcccattgttggtttggcctaatttcctggtttgttcttcgtctattgggctgcggggtccttaaccctcccaaagggg

SEQ ID NO: 528667 - DNA, 352 bp, Homo sapiens
  misc_feature (44)..(44): n is a, c, g, or t
  misc_feature (51)..(51): n is a, c, g, or t
agcctcaaattttgggttcaagggagcctccccctcagcctccngagtagntgagactacaggtgtgcaccaccatgcctggctaattttttatttttggtagaaacaaggtcttactaaattgctcacacgggtctggaactccgggactcaagggatcctcctgccttggcctcctaagtgtggggattacagatatgaacccccaggccgggcctttgtcctagattgtatagggtaaggagacatactcagtaacggtttgaacccccatgtgggttccgtggggactattagggtaggaaggaccaaaagaaagccccagaaactagcccccactttttttcctcca

SEQ ID NO: 528668 - DNA, 367 bp, Homo sapiens
cccccccaaggtttaaaaagggctttttgggcccccccctttttaaaaggggtttagggggtttaaaaaattttttttccggggcccccccccgttaaaaggaaatttttttccccctgggccccttgcccggggaaaaaaaccccccgggggggaaattgggggcccaattttcccaaaaaaaggcctttttggggggggggggttccctgggggggggttaaagggcttttttttgggggggattgggggcccccttaaaagggtttttttcccccctttcccttatggggccttttaagccccccaaatccttttcgggggccttacccaaaaaaaaaaaaagcccaggttttggggtttttta

SEQ ID NO: 528669 - DNA, 892 bp, Homo sapiens
  misc_feature (578)..(578): n is a, c, g, or t
gagcttatcaatatggttaaccccgtccctgtgccccttaccagggcccttttcagcccttcttatggactttcgggcctagccatgtgatttcaagtcccagttcattaccctgctgcgagtactaggccctacttaccgacctcccttgcccatatacccatgatggcgcgatgtaacaccgagaaagcacataccaaggccaccacacaccacctgtcccaaaaggccttcgatacgggataatcctatgttatgacctcagaagtttttttcttcgcaggaatttttctgagccttttaccaactccagcctatgcccctatcccccccattatggagggcaactggcccccaaacaggcatcaaccccgctaaaatcccctagaagtcccacctcctaaaacacaatccgtatttaactcgcaatcacggaagtattcacatcaccctgaggctgcacccacataagtttaaatagaaaacacacccgaaaccacaataatttcaagcacttggttcattacaaatgttaactgggttcttctgatttgtgagcccctcgctatacaaagccntctcacgaggtgaactcttcgaagtgtctcccgctgtgcaccactatttccgacggcattttacgggtcaacacttttttgtagccacacacggcttccaccggagcttcaccgtcacattaattggctcaaactttcctcacctatctgcttcaatccgccaactaaatatttcacctttaacaatccacaacaatcacctttggggcttctgaagaccgcgccgcccgtgagtacgtgacacttgttgtagaatagtggtgttgagctatattcttgtatagtctcccactctattgatagaagggtcttta

SEQ ID NO: 528670 - DNA, 256 bp, Homo sapiens
tataaggcgggacggtgagatatgaactctgtttctacaagaaccacactacgggtcttcggtttaagggctaacaattaatcttttattctcttcttctgttgagtatacgctgtattttttaaaacggtagtgtttgacttgctatgtacatatccctcaagcagagcttcactacggatgagactctctttttaacaaacaagcaatttgtcatcagattccaagcacccaaatgttcacctccagaacaccg

SEQ ID NO: 528671 - DNA, 209 bp, Homo sapiens
tgagcttcagacacacttgcacccatccgttccctcctgaattttctgacctccttggttcattcgcttcttccttatctctaacttcttctgtccatcggtcttctcgggacaagacagaattatggggactactgtatgccaggcaattaacatccctcctatatcctacctctttgtggtgcccctctgctctccagcttatccct

SEQ ID NO: 528672 - DNA, 614 bp, Homo sapiens
gtcggagtcaagtactgcctctggagtcgactcccacctcaaacctcactcgaatgatggcggtccagtcctctctcagaagacgtccatcagcaacgtgattctgtcctcccagccaagctggcagctcccggagcccctgccctatcgctggtctcccgggctgtgcaggccctgcagggactgtgagccctcctcacgcggaggaagcagagggggctggacctgccggcctggcacatgcacgtggagaggccgactgttgtgcacactcacgcaggcacacacacacttgctcacacacacactgaactcatgctcacacatgcctgtcaggctcacactcacactcgctcatccgtgcactgacactcatacacggccagcgtcctaaggcggaagagtgaaggagaaaggcctgcactccaaggctgggctgcaagtgcagcgggggtgaggggtgggggatcgccggagcagaaataaattacagccaacccggtcaacacgtttccaaattttccaagacgtttgctgacgtcgttagctggtgacatcctcttcttcacatttttaaagcttaaaaataaaagtcctggatccaaaaaaaaaaa

SEQ ID NO: 528673 - DNA, 300 bp, Homo sapiens
tagccgagatcgcgctacgcactccagatagaatggacgatagagactccatctcaaaaaaaaaaaaaaaaagaaaaaaagaaaaaaacagtggtggaagtgacccccaaaggatcctgtgggtgtcctcgaaacttaacaggtcttctcttctctgcccttaaaacccatttggaagctccattattgctaaccgaacagttccacaaagaaaggtggagacacttattattttctctcaagttacagggacctcaaatggtatcccagggagacctcaaatgtactggatcattattt

SEQ ID NO: 528674 - DNA, 263 bp, Homo sapiens
tgagacagagtcttcctctgttgcccaggctgaagtgcagtggcgtgatcttggctgactgcaggctccgcctcctgggctcaagcaattctcgtgcttcagcctcctgaatcgctgggattacaggcgtgagccaccgcgcccggcctccttcaagacttttaatagtacaatcttatcagtggatgaggagaataattaatatatagaacattaccaattataaatacatatttacgtatcatttagtgttttctggagag

SEQ ID NO: 528675 - DNA, 1282 bp, Homo sapiens
ggagagaggttgaaaacaatccagagagcttcacactctcatgctgaagctccgagagcaccttgcctcttccaagatgaacggttatctgcaggcagctttctgttgccatgcttgctcaatgtgtcatgcacagcattacatgctcgctactagagggactttgcgtcagcgcgaggctaagatcctcgtctccttgtatcacaggggagatggacgctaacaatgacgcggagattcatgcaagcagcgcgattactcgtccactagcttcattgtagtgcatacgatacacactcagacacttacgcagggctcaaaggggtacaacttgtaagagcatggggatatccccggatgcattcatttatccactgcaacgcgcacatgatttgtgtgcgggaccgagtgaggacctatgcgtgagcacgacccggactttagccaagtggatagcaataacactcatgcacgcgaatgtggttctacggcgcggagcaaactgactactattccgaaggggaaagctgcatatggaacatcctttggtcaattcatttcccaaccctatgttgggtcgaaggtcggatttgaagaacaggtcgcaatcccccttgtctacttctaaaagaggtcccccggtttgaacgtgctagcgcgcaccgcaacggcgcgtcaagcgtaccaaatcccttgaaataagcggtgccccgttgcgacaaaggccctcttcccatcaggcatttatctcgggggcgcatatcagacttggtggcatatgccataggttgaattacacacattcttacccaagcaacctcctaacggcgtgggggctcttgacctcgctattacacatactggacacggcgggagtatcgtacgtacggtaagccccacccaaggacaacggcggcaccgctttcctttccgaacgtgcgctgaagttacgcttgacggaccgtcttaagtgggccccttaccggcccctatcccactacagacgacgggctgccgcacattgtccaggctgtcagtgggcttaccaatcgcgcgatctgtgtacgcgccaacagcgccctaacgagggagattcatttcttgggagctaggaccatcctcgactcggctatttccgccccgcaacggtctgggcctccccgcagatccatgtaggctctaaccttctacgggcaccgatctcggacggctattacatcgtccaacgccgaacagggagcgacaatcctatctacagttcccattatcgagctacacataa

SEQ ID NO: 528676 - DNA, 905 bp, Homo sapiens
agcggaatacgcgcaggcgcagcgggttgggtggcagcagcatcgagtagcggccgtttaggcagcaacatccgcaacaagtgtagacaaggtcccgcctgactccgctctggaaagtccttttgaagaatatggccctggtgaggggcggctggctgtggagacagagctccatcctccgtcgctggacgcggaactggtttgccctgtggctggacgggaccctgggatactaccacgatgagacagcgcaggacgaggaggaccgtgtgctcatccacttcaatgtccagtgacgtaaagatcgggccagagtgccatgatgtgcagcccccagagggccgtgagccgatgatggcctgctgactgtgaacctacgggaagtgcggcgcactggacctctgttgcggagagcacgggattgatgccctatgcatggaatgactagcactgctggaggcaaaatgtccagcccggtgtcgcgtctacacggcgtaccaagactactacgagagtggtgccccgcctaagtgcacagcgagggccacgtatgttccgcaagctacctaccggaacgccactacgcaggccctggacgttgacgcaccgtgatagtgcgggaggatcactgctacagacagccggacgcccctctggccatgggggatgccttgccggtagccagcactggcggcggcgcctgggctcgcttcatgttggtccgcccatgcttggttctgagccctgggactcggcagcatttgatcccctgcgcttggatggctgactccctcttcctccgggaacccatcctctagcatccaagcctgtccccattttggcctatcttctccatttgctccttccgggttggaccattccccccaatccttaacgttatccca

SEQ ID NO: 528677 - DNA, 304 bp, Homo sapiens
ctggatctgatcgtcattcggtggcgtgtagtgctcggcatcgtgtgctgtcgcgagattgctcacagtacattcgcagtgctggcactcagtctgttcccacgagatccattctggctcctggagtcatctcaccctcccccattctacctgattctcccgctccgagagtctttggggaccccaaggagagagtcaggtggaggaccaaacatgaacctcgattactgcttcctcatgatgtacgcgcaagtccaaaggcatctactacgtgcagctggaggatgacaaaccctggaaggta

SEQ ID NO: 528678 - DNA, 110 bp, Homo sapiens
cctggtgctcaggtctgcttctgttttaatctgttgtgatgtgttattttggtagagtggggttttttttttgagacagagttttgctctgtcacccaggctggagtgca

SEQ ID NO: 528679 - DNA, 1485 bp, Homo sapiens
  misc_feature (700)..(700): n is a, c, g, or t
gacagcttcgatgacatgacacctctcgtgagttccgcgtatcgtgcgcagaggctatctacgcgctatggttctagagaacgacccgtctgaccagtccaagcatgcgagaccattctacgctctgataagtactaagggagcttgaatgactagtgatatggcatacaataggccgcgctagaatctagggcactggggaagaacgggccaacattctgccgaatacttcggagtatcttgcagctacgcatctcgtagattgagcatgcataacacacgactcatccagcgcctatggtgcacttaccacgatcgcgcatccttcgcatgaaagtaaggtctactaggcaagagtgactaggagaggttgggtcagtggccactgagggagtactactatgggcgtcctgccatgtgcacgcctgtaatcgccggggcaccacatgtgcgttggctggagcgttgggcaggaaacactggccttattgggagacgtgtcgcacgcagcgagtacgagtcgtggggggtgaccccgcgtgggcgcggtgctggtgtagatgtgagtgcttgaagccaggaggagtaccgtgtcctcctcaacatacagtgcgggcagtgctcaggtacctaggtgagtgcacacgccgtgtacgtacagatgttcacacgtcgcgggtgcattgcaaggcatcgcggnactcttatggaccataattccccaaagaggcctctaaagagagagagcagacgcagggctagttattttaggcttgtccaagcccaataaaatgcacttgtctcgtattggtcgcttatgggagggtggatacacattgataggttgtcacttgacgggtgaacccccaagttccgggaatttcttctggtcaacactggaaaggaaccgaagtcttgaacccgttgggcaccggggtattccggggcaagtttccttagccattccacagcggtgggggacacgcatgagcgcacgtgtggcaagcgctgggaacaccactctcatgtcgacagtctggtcattcgaaaggacccctgtgaccaatgacagccagggggcagggacaactcttcgaatcaaaagaccccggggcagggaacgggcggcgcggggacacaccgcggacacaattcttggctcgacgagaatttcacagggaaatccggcccccgggtaagtgggacaaattggcgccaaagggggaccgcagaacggggtcacttagaggggagagataagacggacgccccaaccaccaaaatcaaaaccaacacaagcccgctggtgccaaccagaaacacagaagctaaagcgatgcgtatccacaccacaagcgacaggccgccccaccacgggaggcactcttccacacacacgcagcaggaagcgcccgcaacaacagctctgacagacgagcaagcaaccagccgaactgaactaacacccgaacaccgacaacccgc

SEQ ID NO: 528680 - DNA, 318 bp, Homo sapiens
cacctggacatagtacaggcactaccacagacagcctgtgggcagtagttccagtagcaggtacagaggacgatgctctgctccccgcggaagctctaatcaggcctcgctgctgcggagcatgcgaagaagatagcacactacctaaccctaccttgcgtaccgcacatgcctataaccctctacccctatccttccctacctatctatcctacctaccttaccctcccttacctttacttaccttccatctgtacacttagtataacctcccttccacttactccctgcctcttaccttccctccttctctacctt

SEQ ID NO: 528681 - DNA, 418 bp, Homo sapiens
tcctcttctaccatgcccacttccgcagtactgtctacctcgacacgcatcttcgactgtcaattgctacgtataggacaaaaccgatcccccgcagtgactctctgctcccagtcccgtgatgattggaagctccaaactgcactccaggcgtactactgccctatggtcgccgagtcctctgaggactctgacgaggagtcaaaggggctgggcaaggagaatgggattggtacgattgtgagctcccactctcccggccaagatgccgaagatgaggaggccactccgcacgagctccaagaacccatgaccctaaacggtgctaatagtgcagacagtataccacctctataccacctctataccacctctacccaccttcaccattttacagtataagaaagggtaccgagct

SEQ ID NO: 528682 - DNA, 289 bp, Homo sapiens
taatgaagagtcatcaacaggtcagttgctgaacaccgccaccagagggcttgggaggggcaactgccaccccatcatggcaaagtcaccaagaactgaccaggccagagaggtggagtggctgtttactgggcagacctcatgctgtgtttgccagttcccctgggcacattgattcatgggcccagaagccagggatgctgctgaaaaagcaagcactgaatcagcaccgcaactgcaaggctgttagagctgcttggctttagggacagatgttttatgctgaaga

SEQ ID NO: 528683 - DNA, 218 bp, Homo sapiens
aaggcatcccgttttgccggcagcagcagtgccgctcctcccagtggcggcgccgaggtccctgctggtgtgtggatcggatggacacgtccctgccacggtctccagctggcaatggacagctcctcctgccccaatggaagtagcggataaagctgggggatagagaggcatgaagggccaatgaaaagaaacatggagcagtcatcactcaacaa

SEQ ID NO: 528684 - DNA, 406 bp, Homo sapiens
gctcactcatagcacccatgacaggaacgtagaatctattcggtgagtattaagagttggggcagcacattggaagccctctatgagtgcagcgactcgcctatgtagttccagcagcggccacgctctgggcgatgttcttaaccccgatagccactctgggatgagccgcttttcagccaccatgtcttcaaattcatcagcattgaacttggtgaagccccacttctttgagatgtggatcttctggcggccaggaaacttgaacttggccctgcgcagggcctcaatcacatgctccttgttctgcagcttggtgcggatggacatgataacttggccaatgtgaaccctggccacagtgccctggggctttccaaaggcacctcgcatgcctgtttggagc

SEQ ID NO: 528685 - DNA, 474 bp, Homo sapiens
  misc_feature (37)..(37): n is a, c, g, or t
  misc_feature (141)..(142): n is a, c, g, or t
  misc_feature (311)..(311): n is a, c, g, or t
  misc_feature (361)..(362): n is a, c, g, or t
tccgcggcgctggggaggtcgccccgtggcacaaaanccccagagggccaggtggcgtctcccgggtcagagttgggatcaaggggccccccccatgagaagggagggctagacggaaaggcccaaaaagcctcccccccnnacgcttttcgttggaaggccccaagtaccaccttggtagaggtctcagctctggcatggctgcccccggatgtggccgaggggggcttcaaaccctgtgtccttaggagggggtggccttgaggcagagccggtgcctcacttaacccccccagggcctctattcctcnccatgaatgggctgtatgtcctgccccaacttggcccgcagcaggccagnncccccccccccccgcccagagctcagtagccagcctgggtcctgccagggcttctcgagggcttgggggaagaatagatttagtaaagcaggaagatctgttgttacttaac

SEQ ID NO: 528686 - DNA, 236 bp, Homo sapiens
ctgagtgagtggtgtgatcgtactcactgcatcctcagctcctgagtgatcttcacgcctcagcctccagagtagctaggtctgctggtgcatgccaccacatctagctcattcaaaaatttttttttgcagagacagggtttcgctacattacctaggctggtctcaaactcctggcctcaagcaatactcccatctcagcttcccaaagtgctggaagataagcacaagccagg

SEQ ID NO: 528687 - DNA, 310 bp, Homo sapiens
  misc_feature (28)..(28): n is a, c, g, or t
ttccctatcatattcatggggggaaatnaaaattttttttcccccaacattttttgggccatcgggaaggccccggggttattgggattccccccgaggcaaacccccacatgaaacatcctatctttgggggggtcttttttttttttaacagcggtaaaattaaaaattttcatgatttgagaagccttggttttgaagggaaaagtcttaatagtagaagacccccccataaactggggggggttatagggaggcccccccccctcccccccattggaagaaccggtaaaaataaattttagcccca

SEQ ID NO: 528688 - DNA, 1338 bp, Homo sapiens
gtgggggcccgtgacgggacgacgggacggacgactcacggacggacgacacctgacaacgccacgtacgactttaacacggtgtgacacaccattatataatactaaactttacttactttactttactttaataactatatactaattaatacttgacctcactatcttgagtgattgtatcaactacgcacgaacggggagacttatctaggcacgaggtcaatacgagaccaacataccgatgagcaggagacagtgatcagcaagactaaccctcgaaaagtgacaacaacaagagtatatcaaggatatataccatacggcacgaagagaccacctgcagagacattccagcacactgatatagtagtcaccatgagagtaaccttatgacagccataaacacgagtgtcagatgcgatatgacattgtcacttactatccacaacgacgacaatagactagacactaataccacaggacaactactagattaatacaaccaacacagccacacaataatttatggacaacccaaaacacacatagtaaccataacacaatatatacaccacacactaagaaacatgggacacacaacaaagaaccacaccattagcattatacaaagaaaggaaagaaccacacaagagggaatttaggaggacggagaacacaacagggatcaccattcaaaacctggacccaccagcacaaatcccacaaaaagaggcacccgaaaagacacacatcacgaaataacactcacaagcataacaccagacaccaaaacaaaacatagcggaagaaatcccatacacacaaaatgaatcacaacaacagtaaacaatacataccaaacaacaacaagaaaacaaaaaagccacaaacaacacaaacacactggacctaatcgatccgtcaatcaccctaataacaacaaccaaaacaataataaccacacacgccatatacaaacctagcaaacccacagacaaaacaaagaggacccaaaatcagataccactcaaactagagaacaacagacaacacaaacaccaatagcaacaacaatcgaaatagaggagaaatgtcaaaacaccatacacaccaaagacaacatgaaggcagaacaggaacaagcgacaccgagaaaccaacacaaacacaacaacaccaaccacacaccacacatataccccacagaaaaaagagacgagcagaagacaccgaaagaaacaaacaaaagaccgaaaccacacacaaaacacaaaatcaaaagacaaaacgaagcaacaaagagaaaacaacgaacaagaagacaagaaaaagaga

SEQ ID NO: 528689 - DNA, 911 bp, Homo sapiens
taaaacccggtcctggggtgggggtgggtataatactaagtggaaatgattatcatttacgggggaaggcgcttggtgaagtaggccttatttctctggtcctttcgtacagggaggaatttgaagtagatagaaaccgaccgggattactcgggtctggaactcagatcacgtaggactttaatcgtggaacaaacgaacctttaatagcggctgcaccatggggatgtcctgatccaacatcgaggtcgtaaaccctatggtttgatatggactctagaataggatggcgctgtatccctagggtaactggttccgtgggtcaagttatgggatcaatggagtatagtagtcgcttgacgggggaagtctaagcatgtactggctcggaggtggggttctgctccgaggtcgccccaaccgaaatttttaatggcaggttgggaagtaaggacctgggggttggtaaggtacggttggcattaataacttaaagctccatagggtcttctcgtctgctgtgtacatgcccgctcttcacgggacaggtcaatttcactggttaacagtaagagacagctgaaccctcggggaagccattcaatacaggtccctaattaaggaacacgtgataatgctaccttggaggggtttaggtacggggccggtaaaaatgtgtcctgtgaggggggacccaaaaacgggagggcacagggatgttttgcaccccggggggaaaaattgcgagggactataacttgtaatactagcaataagcaccggataggtaaacagaggataaatactggtgatagcttcatcatcaccgcgagggaaggaggaaaataggcaaagtgagagataaaacaattatagaagagtcaaggtatgaaatatataataacaagcag

SEQ ID NO: 528690 - DNA, 207 bp, Homo sapiens
  misc_feature (143)..(143): n is a, c, g, or t
tcagaggattccaactaagcagctatccaagtgtcctatcagtcaaaggacctcttgattacagcgcaggaacttgatcgttggggaacccagccccttgaacttggaagacccgtgtttcctggaccgcgaatcagtgtgtngggcatcagtgtattctgcaagggttgtgacctgaaactttttaaaaccaaccacctttgggaa

SEQ ID NO: 528691 - DNA, 151 bp, Homo sapiens
  misc_feature (17)..(17): n is a, c, g, or t
  misc_feature (55)..(55): n is a, c, g, or t
ggatcgcgaggtatgcntgcacaaggacaaggctttgagagcagattggacctantgattatgtgtatataaaaaacaagacatcttttaaagcaaagtctgggcaaattctctatggaaagggcgccactggcactttgattttgacttt

SEQ ID NO: 528692 - DNA, 385 bp, Homo sapiens
  misc_feature (206)..(206): n is a, c, g, or t
  misc_feature (214)..(214): n is a, c, g, or t
  misc_feature (217)..(217): n is a, c, g, or t
  misc_feature (220)..(220): n is a, c, g, or t
  misc_feature (229)..(229): n is a, c, g, or t
  misc_feature (233)..(233): n is a, c, g, or t
  misc_feature (238)..(238): n is a, c, g, or t
  misc_feature (246)..(246): n is a, c, g, or t
  misc_feature (252)..(252): n is a, c, g, or t
  misc_feature (257)..(257): n is a, c, g, or t
  misc_feature (263)..(263): n is a, c, g, or t
  misc_feature (272)..(272): n is a, c, g, or t
  misc_feature (287)..(288): n is a, c, g, or t
  misc_feature (328)..(328): n is a, c, g, or t
  misc_feature (347)..(347): n is a, c, g, or t
tgtgaaaggaccagtttcttaaagttcagtgttcccacggctggatacctgtgtgtctccataaaagtcctgtcaccaagaacgttaaaggcattttataccagcgtcttctaaaaaactaagtgaaaaacaaaaaaaggagaaaaaaaaaactttcataaaaaatccagtgctaaccacaaaaataaacctgaaacttatatttnacatactncantgnctgttgttnaccnaccgnagcttttnaccgtncactncccctnccaactatntccagatgtgcaggnncctcctctctggactttctccaaaggcactgaccctcggnctctactttgtcccctcanctccaccccctcctgtcaccggccttgtgacattcact

SEQ ID NO: 528693 - DNA, 145 bp, Homo sapiens
tcggctctaccttgttccttgaacatttccagacaactagcagactggcaacttgggtgaaagacaaggtagagccgagggtagagccgagagacaaggtagagccgagagacaaggtagaggcgagagacaaggtagagccgag

SEQ ID NO: 528694 - DNA, 294 bp, Homo sapiens
ccacgcatgggtcaagcctgcagatatcttacagtggctatgcaggctctgactttggattgctggggtcttagtcctgaaccccgagcgcagtaatttccagatgtcctcacatgttcgatcgtgaggttattaaaggttaaaatgacttaatggtgtgacacaagctaaatgctacaaaaaacattagttcttgcaaatttttttttttcagagacaagttctcactctgtcaccggggctgaagtcgagtgccgtaatcataactcactgcagcttcaaactcctgggctg

SEQ ID NO: 528695 - DNA, 188 bp, Homo sapiens
tttttttcactgtactttactgccacttcactgtacacttaaagacattattaaaatggtaaaatgtatgtaacatgctatttaccacaataaaaaaaaacattttgaaaaggaagtagtatagtgtagaccctattaaataggaggaggtgcagtattttgggattttatactaaggttcccctagg

SEQ ID NO: 528696 - DNA, 473 bp, Homo sapiens
  misc_feature (18)..(18): n is a, c, g, or t
agcaaggtggaattaacncacaagcccccggctgtggaaatttggacgaacagcgggtgtagtctggagcatttgtgggggggggagacgcgcgcgaaaccggcggcggggaaccctaaaaggtttgctttttgtcgggggaagacccgccttctccgcccggaagacccggggcggggcaaggccctgtctgcttataggtggcagagcccacagagggggccacaccccgaggcagactaagcgggggggttttcccccagcgcgcaaagcgacaagagcctttcggcaccttgagccccccaagagaaaagcgctttatgaggaaaacttgaaaaacagagttatcagctttaaactgccacaaatcgaaaagaaaggctttaattgagtgagctgggaacacccaagtgggttgattcttaaagaaaaagaaaccccaaactttttgcgtataaaccttttttccagag

SEQ ID NO: 528697 - DNA, 248 bp, Homo sapiens
  misc_feature (69)..(69): n is a, c, g, or t
  misc_feature (77)..(77): n is a, c, g, or t
  misc_feature (80)..(80): n is a, c, g, or t
  misc_feature (83)..(83): n is a, c, g, or t
  misc_feature (92)..(92): n is a, c, g, or t
  misc_feature (96)..(96): n is a, c, g, or t
  misc_feature (101)..(101): n is a, c, g, or t
  misc_feature (109)..(109): n is a, c, g, or t
  misc_feature (115)..(115): n is a, c, g, or t
  misc_feature (120)..(120): n is a, c, g, or t
  misc_feature (126)..(126): n is a, c, g, or t
  misc_feature (135)..(135): n is a, c, g, or t
  misc_feature (150)..(151): n is a, c, g, or t
  misc_feature (191)..(191): n is a, c, g, or t
  misc_feature (210)..(210): n is a, c, g, or t
ccggtgtccgctgtctgcggggcaacgggattcagtgcttccgcggagaaaagcctgtgcttatatttnacatactncantgnctgttgttnaccnaccgnagcttttnaccgtncactncccctnccaactatntccagatgtgcaggnncctcctctctggactttctccaaaggcactgaccctcggnctctactttgtcccctcanctccaccccctcctgtcaccggccttgtgacattcact

SEQ ID NO: 528698 - DNA, 701 bp, Homo sapiens
acagagaaaacccgagggaagtacccgcatgcaaaggacctgacgcatctcaaggaatactggaacgaccctgagtggatgaaggggagcggttcctgcgggattacactcctcaacaaagcgctatgaggaggaggaccgaggaggaggaacgatgaagaggaaaatggaggaccgaggagggggtccacggatcccccaggtccagactggctgtggacgactccatcagacgaaggggagctgctttcggaagaaagcaggaggcacttttgacacagcaagtacaattctccgtttctcgaggcagccggactcagcgatcggtctacacacctaaccctacgccagcgatcgccgtcctccgctgcgccgtccacggcatgcagcgctagcaacgcgcagcacacagggcacgccagcactcccggcaggcgcaccgcagcagggcaccaacagcccacagcaaagcgagggaccccggctccccctccgtctgacccgatacccttgaccccgacccgagaccgcgccgatctccctcgcgccccacgccctggcgaccgacaccccctgacgcgaccccgctccccccgggcctccccgaaccgatctctgcttggcggcccctctaacccgcccgcgcctaccccctcctccctcacccctacccttttccaacgccctgagaaaaagaagga

SEQ ID NO: 528699 - DNA, 635 bp, Homo sapiens
tgaatactgaccctgaaatcaataacatgacttgcccatattatcatgtatggtattgtggcatgaggcgacacgatcactacccattaccccgaactcggactactagctgcctgccctgatcactcgtgtgttgccagtggaagcaaggttcagatgattgattgtccttacttgatcgtgcaggacttggccagctccagaagggtcactcatcaagtcctgcaaatgtctgtatccttaagcagtgtcatcagtgtcctcagaagacactagcagagtccagggtgatgcgttcagccacaagcacaaagactgctttttctaaagagcaggatgaggtgaatgtgggaacggaaagcagttgtcacgaaggctgtgtggctctgctgggggagaggcatccacagtctgtgccaaggaggtacctcaccctgtgcagcaggagcgttaaggccaaaaaacaaaaggggccaacagaaaacagctcaggtgatggggggaggagcagcaagaaaaaacgacaaccgagaccaactgaaggttcggtcaggaatgcaggctcttccgtctatacagtgtttaaaaagatccaatgtgactgagatcatccagcctgcacttttatttgtagg

SEQ ID NO: 528700 - DNA, 765 bp, Homo sapiens
gtctaaccattgttctatatgtgcatgtgactgaatatggtgtattaaacgcgatgaaagtcttaatgctcaaagtatgttaacaatccatgtagtatatcagtccctttgtcgaaattcgtgctcctggtgcaatttttcatagaacggacttgtgccatctgtgcgagttagacctttaggttagctccacccctttgggaagcttagaacaatcctggatactcactacgcggggcatgcgtgcgtagatcaggggcagcataatagcgaagcgtgtggaagggggagagggctctttggcttagtaatctccgatatctaagaaccgatagatcattaggatgactaaccacgggatctactaggagcgctttttagtcaagctgcctgtgttcactttgtggacgataatttattcattaggcagacagtcataaagctgatacagaagtggggtgactaatcttagtgagtaaacatcggtaggagctagttgacacttctcctattttgtcacactaccgttgtaataatgcgatgagagatacaatcttggaacatggaatggtgtgaagggcagcctactgaacaggtgtatgtcagactagttcattcatcgtcggcaagccgaggggcccgaagggatcactacaggtaggagatgtatgccgcatgtgtacgtctctgtccatatgacccactctgaagccagcgacgtatgatcgtctgggtgactattggacccatgttcacggcctcgta

SEQ ID NO: 528701 - DNA, 443 bp, Homo sapiens
cccgctgtatatggaagtttctgtgccagggactgaatctgagctgcagctgctacctatcctgcagctgtgcgtcataccagacccttttaattcactgcactggaccgggactgatatctgtgcctctgtcagcaacccaagctgctgtagtcaatgttcttaacccactgtgccatcactaggaattcctgaggtgtagtacttttatgcctggctcataaaaccctcttctgtgcctctctgtgctctcccccatctgctagttggatataaatgactgcatgactttggtcggtgagagagccataggatcgaagagccaatattaccctgcatcccttaacatatggagaagagccatcccactagcaagaaatacaggccaagttcgacgccacatttttaagtaaatggaacaacagtctcacggggggatcctc

SEQ ID NO: 528702 - DNA, 469 bp, Homo sapiens
  misc_feature (199)..(199): n is a, c, g, or t
ccccggcttcaggaattcggcacgaggcccaataaacaagctatttaaaggggaaaaaaaagttgaaaaaaaggaaagctttgtcaaaaacttggaatgcaaatacattaacagatattgtggcaaaaaaacacaaaattcatttaaacatatttaaaaagataattttggaggcagaaaaaataaaaaaaaaaaaaancccactgggggggtcttcctccccccactccctttataggcggggttttttaaaagaggcgccgggttctattaaccccgataaaaaaaaaaaaactcctttcccccaaaaattatttttctttaaaaatattcttttttctcggggggggaaaaaaaaaaaaaaaccccccccaaatttttttcccccataattttcaatttatttatttggggcgcccaaatttgcgccccaatttttttttaaaaaccccccttttcattttttttt

SEQ ID NO: 528703 - DNA, 559 bp, Homo sapiens
aaatctaatacatggcagcacaactgaattccttccctaaagaaaaagtcctgccatggtaacatcataattaaaacactttttgggaagaagatttaaaatattggcccatgctacaggaagagaggtattaaaaatggtatacacaaggtcagtggacactatgaagctcaagcttacaaaaagaaggtggcaatatatggactcaggatctcaaagctgggggtcccagcattacggggcgtcaacagccttggcaagggcacagcacagtgcacgcacaaatcaagcgtgcaaatccggtccccagcatcaccaactctcgtgcaaacacagcgggccggtccccaccacactaagcaatcgcacagggccagttcccaaattcggcaacgtaactcacatctctcaacatcagcacaaagccagacttcggtcgggcgcgccctttcacttgcgacattgggcttacccactcggcctcttcggtacatactggtcaaaaacttcgtgaagctaagcaccttctcgcggtcccctttctgatccctcaccctaa

SEQ ID NO: 528704 - DNA, 345 bp, Homo sapiens
aaaaaaaaaaaaaaaatttgtgggccgcccggcccccaaaaatttttaaaaccatccgtggggggcggggccccaggtagggataagtgtaaccatgttgcaataaatgtgtggtcccctaaagaggagaatctcctggcggcaatgagatatacgtggctgggagtttcttcccccaaataaaaaaagcgcgcccgggaggcacacacacaggcgcgtgtccttgagaacaaatccccaagatgcggatttttcggagggatcatacaaggatgtctcctatcaaccaggagtggtcacaaggagatgcttctgatattcactatttaccgccgcaggctccgg

SEQ ID NO: 528705 - DNA, 573 bp, Homo sapiens
ccagcagcggacacagttcaggcagaagagccggcaggtttaagaactgctcatcaacttgtcttctgtctattgatagacctatctttacgaaagcaaaagtaatggtaactgaccgcgtattgtgctaccacattgtcattccttccctggtcagtgtctgtgtagaagacaccatcacttcaaggcctagtgtccgaggacgccaagcaggtgcctctcccttcccatctcatcgaaatagcacgacttgtctgtagacaatgacacagatgtggggctcattcacctggcgggccaagaacggcacgaagatctcgatgcctgcccgctgggcttcctgcacggccttctccatggcagcgggcgtggcaccctgcgagttggcatctgagaatatcggcagcctcttcttggcagcgccggacgaagtctcgcggttgtaggcgggttccttagcccatggcatcgctgacgtcggtggcgtcgttggtaaagtccttggctcgacggcactggccatgccgtgtattctgcggaacggcgcgacgcccgtctggcgctgtggcttgc

SEQ ID NO: 528706 - DNA, 170 bp, Homo sapiens
catcgaggtgatcatcatggttacggttgaaatagaccacgtgggattcctgggtgtcgggggagagaggaccaatgctgacctgtctatagagtcagcccaatggctgccccctctggtcactcctgtcccctgccctccgtctgagtgagcttcaatgccaaccaagg

SEQ ID NO: 528707 - DNA, 143 bp, Homo sapiens
ctcttcaacactgggtagggggcgtggcctgatgcgaacgtgctgccagatggcacggtctgggtgcgggtgttccctgtgagcccgagtccgcttcagtgatgggagcctagcatgtgcctggctgtgtgatgggattgacg

SEQ ID NO: 528708 - DNA, 659 bp, Homo sapiens
caacagcacgcaacttcattattattctatagtattacaaatacattgatacccttaaagctaatttagtgtccaaggatgttttcctgtattatctatgacttattcagttgtgtgtgtgtgtgtgtgtgtgtatatatgccacaaattctttatctgttcatcttaggacagacacttaggttgtttccataatctaggctattgtgaataatgctgcaatgaatatgtgaaagcatatatctctatgaggtgctgatttcagtttctttgggtgtatacccagcagagggattgctggatcataggcagttctatttttaatgttttgaggaacttctataccattttccgtaatgtctgtgtagcaatttacattttcaacaacagtgtacaagggtttccttttctccacacttgggccaacacttgtgtctttttgataatagccatccaaacaggtgtgaggtgatagctcattgtggtttcgatttgcttttccctgataattagtgatgttttcagtgctttttcatatacctgtgggccctttgtatgtcttctttggaaaagtgtctctttaggttctgtgcccattttttagttgggttatcgcgtggagtagggtattggctgttgagtagtgagagtccttatgt

SEQ ID NO: 528709 - DNA, 761 bp, Homo sapiens
tcccctactgagaaagctctcaagctctgggcgttgccttcctccctcagtttgcgcccagtggaggacggacagcccgagaccaggcgggcttggccacatgcttttcgccaggtcccctcagagtggctggtggagctgggcaagctggaagagaagatgaaggcgctgatgatggagaaggagcagctccagcagcagctgcagcagcacgggcctgtgtcctgcacctgctgtgtcctgtgagggccctggggagcaggcaggacggcacggcactctccacctgagacccagggatttcctgtttgagtgtaaggccaaccagtaaagcccatgcgggctgctgagaggcggacagggactccttcaacatggcacatgagcaggcacccatgtggcttcaaccctgacagacccatctgtgtagccaagaaactgctctcagccctgtccccaaatgaccttactttcagaaagaatgtgtaaaaccctgcccagagctcccctagggctaagctataagggattgtccttctccctaaaatgctcatttggcccaggctgaggtctgtgactccagttggctacacagtgccagaaaggaatctgtcatctcaggaaagcccctcaaagatggcgaggcatatttgatgactgtggttacagggcaagaggccaccctgcagcccccacccctgacttgctggaacttgtgactgtcaaagctccattaataaattacatgcacctggaaaaaa

SEQ ID NO: 528710 - DNA, 156 bp, Homo sapiens
ctcgactctaccggatcttatacaccctgcgcggaggatcgtaacggggtaagctagtacaccgaagctgcggatatccttttaggatatggtaggagagcgttctgtaagacctagcgaaggtgacttgtaaaggttagctggtggtatcagaga

SEQ ID NO: 528711 - DNA, 582 bp, Homo sapiens
tcccctactgagaaagctctcaagctctgggcgttgccttcctccctcagtttgcgcccagtggaggacggacagcccgagaccaggcgggcttggccacatgcttttcgccaggtcccctcagagtggctggtggagctgggcaagctggaagagaagatgaaggcgctgatgatggagaaggagcagctccagcagcagctgcagcagcacgggcctgtgtcctgcacctgctgtgtcctgtgagggccctggggagcaggcaggacggcacggcactctccacctgagacccagggatttcctgtttgagtgtaaggccaaccagtaaagcccatgcgggctgctgagaggcggacagggactccttcaacatggcacatgagcaggcacccatgtggcttcaaccctgacagtgccagaaaggaatctgtcatctcaggaaagcccctcaaagatggcgaggcatatttgatgactgtggttacagggcaagaggccaccctgcagcccccacccctgacttgctggaacttgtgactgtcaaagctccattaataaattacatgcacctggaaaaaa

SEQ ID NO: 528712 - DNA, 117 bp, Homo sapiens
  misc_feature (48)..(48): n is a, c, g, or t
atcagctcgtaccacatcagccagtgtcttccgttatggaggacttcnttgatgagaccaggatgcacaatggcagcgagctttggattatcttgtgtgccatctcatgagctgggt

SEQ ID NO: 528713 - DNA, 140 bp, Homo sapiens
gggagggcagggggtttcccgaagatcgcactggaagattttattaaaagaattttttttgggtcggggggaacaattaaacttcctgggccacgtgggtccttcaaggagtttttcaagcaagtttttccccttttttt

SEQ ID NO: 528714 - DNA, 960 bp, Homo sapiens
gggcggcggggctatggagctcaaggatggagcaaatgtcaacaggcacagatgatgggaggtttaactgacgctgctgcactggataccccaccccggtgccgggcacataggtgcagcctgagagtaagcagacctgggttggaaggtcccgcgattcaccaccgacaggatgggcggccttggcaacccccgacccctcgcaggcctgttcccttatccatgagatggaactcggacaaggtggccacaggaaggctttgcaaactgtgaagtgcagtgcctacgtgggcgtgccagtggcctcgccggagccggtaggggaacactctgcagtccaggccagggccccggtaggacacccagctgtgcatcccgcccgtggccgcaaggcccgcaccttggccaacaggagcagggtgcggctggtgcgggcgtccgcgtggcgctcccgcaggtggaagagcttgggcgacatgatggcgggagagaagaagcgcaggcacaggaagctggtgacggcgatgaacggtacattctggaggggtgcggaagagcgcgggctggagtcccccagaccagggctcctgggcagccccctccccttaggctccgtcactggacctcgccgggacacagcctccttggtctccccatgggctcctggtacgcaacggtcttcgccggcctcgcccagccagtcacccggccagctagccagcgtgtgagggcgcactcgtgctggacccgagaaaactcgggcaagcgcggaagagtggcgaaaggtgccgaccaaggggagacagcgagaaccgcgggcagagacgcacaaagggccccagtgggcccaagattaaacgtgcagcgcccgccctgtagaggaggacacaaaaacacaggtaaggggcgatgagaaagacaggaaagcgccacagaaaggtccacgagacgaagagaccg

SEQ ID NO: 528715 - DNA, 149 bp, Homo sapiens
agttcagattgcgggagccatcccccattcagcctataatcctatagaacttctccaatgacatcatgctactgcagctggagagaaaggccaagcggaccagagctgtgtagcccctcaggctacctagcaacaaggcccaggtgaag

SEQ ID NO: 528716 - DNA, 183 bp, Homo sapiens
ttaccaaagatctttgagcataccttaagatctgtaacactcaccgcgagggtccgtggcttcattcttgaagtcagtgagaccaagaacccaccaattccagacacagtagtaagctttaaacttttcagtgggacatttgacagcttagcaagcattgggtgatgctcacaagatcttgtg

SEQ ID NO: 528717 - DNA, 107 bp, Homo sapiens
tcgggcgcttacctgcagctctctctgatgtggtggtactcagagcctgtagaacagcagccagcccttctcgatcacatactggcagcgcttcaagtcatggtccc

SEQ ID NO: 528718 - DNA, 260 bp, Homo sapiens
  misc_feature (200)..(200): n is a, c, g, or t
ggcgcccagcttctccggccgccacagcttctccccgctgctattagaatgcattgtgaaacgactggagtatgattaaaagttgtgttccccaagtgcttggacgtagtgattcgttgaacggaaaaaatccagctgacgtgataaacggctgacgtgttgacggaaatttctcgcagttttacagcagtcgtatttgntgattgaagctgacgtacatttctgctggtgtatttttaaggtaaaatcgcttttatgtt

SEQ ID NO: 528719 - DNA, 752 bp, Homo sapiens
gccccacttccctgcagggacctggcctgggctggggcccaagtacacccttggcttccatcagcccccagaatttcggcgtccccttcagcttggtggcacacatggcagctttgtgccctacgcccttctcccacggattctctccctcatgccgtggagtcctggcgtggacccccgcacgcgctccctctttgccgcctatgcctgtggtggagtggagttctatgagaagcttcttctgggcaacctggccctgcgcccgtctcttgggccaagagggggagaagactgtatacaccccgcggggacatcgtcccccgacacttgttccgagatccaaccatttaccctaccaccaccccccgggactctgtgctgcagatgtggagggggatgctccatccgggccgctcctgatgggctcatcaccaggacacttcccgcttgtgccgacacccccctgcccttgagtctggagggccctgttggagcccttggacctatagctccaggcccgaaaaatcactggctttggaattaaatagcttagattgtactataacccctacttatgtactccgggactatgagggactattcacggggctatgaatctgagcccttgtttcttgaactgtaaagtggagatgatgtaacccccctgccagattgtagagttgggtaaggtcatgaacataagggcctggcaccaagggtgccctgtaaataaacccacatccctccttcca

SEQ ID NO: 528720 - DNA, 173 bp, Homo sapiens
aaaaaaaaaaaaaaaagaaaagaaaagagaagaaaattagccaagtgtggtgggacacacctgtagtcccaactacttgggagactaaggtgggaggattgcttgagcctggaggtggaggccacagcagttcagcctgggggacaaaatgagatcttatctcaaaaaaaaaa

SEQ ID NO: 528721 - DNA, 136 bp, Homo sapiens
catgaagcgtaataggcgagtgttacatgatgtggcaatgtcttgcagtcgtcaatgccgctgtggggcggcctatgtgtgcaggctgaggccctgtgtatgtctagaagtccattcttgggccagcagcaccacg

SEQ ID NO: 528722 - DNA, 318 bp, Homo sapiens
caagagaatggaaagtcaatctcctgaattgctatgtgtctgggtttcatccatccgacattgaagttgacttactgatgggagcaagatgcgccatcttgctcccatcaggagttgtctattgaagaatcagaattctgcaactaaacaaaagcctccatttttcctcttctctcaccatactttttgaagtttatagaagcaaggcttgtactataaattaacattacttgctgattaatctatttcttcccttaaaaatctctcactgatacttttaaataatttgctgataaaagagacgctgatgggacgaag

SEQ ID NO: 528723 - DNA, 249 bp, Homo sapiens
  misc_feature (2)..(2): n is a, c, g, or t
  misc_feature (83)..(83): n is a, c, g, or t
  misc_feature (88)..(88): n is a, c, g, or t
  misc_feature (100)..(100): n is a, c, g, or t
  misc_feature (135)..(135): n is a, c, g, or t
  misc_feature (140)..(140): n is a, c, g, or t
  misc_feature (144)..(144): n is a, c, g, or t
  misc_feature (160)..(160): n is a, c, g, or t
  misc_feature (170)..(170): n is a, c, g, or t
  misc_feature (173)..(173): n is a, c, g, or t
  misc_feature (177)..(177): n is a, c, g, or t
anagtccctgccccaggcgtgcagagtagggtcctggggttttgtgctgggcaggggctgcttttttttggggaatttttttnggggnactttaggacancccttaggctgtggagggtgtcagctgggcctttnaagcnactnaccactggttcccatnatggagatcnctntttngggcacccaagggggtttcctcctggaagggcccccaacccaagtgtcagagaagctggcaagatctgaggg

SEQ ID NO: 528724 - DNA, 127 bp, Homo sapiens
cgtgcctaggggaggataagcaccgtggcttgtggcgatagaccgaagtctagtgggttgtaccgtggctagtagggttgaccgtggtctagtagggtacgaccgtggtctagtagggtaagaccgt

SEQ ID NO: 528725 - DNA, 632 bp, Homo sapiens
ggccggtggaagctttgtttggcgcttttttattcatttccatcggtccttacagccgctcggtagactccagcagccaagatggtgaagcagatccagagcatgactgcttttcaggaagccttggacgctgcaggtgataaacttgtagtagttgacttctcagccacggggtgtgggccttgcaaaaagatcaagccttcctttcattccctctctgaaaagtactccaacgtgatattccttgaagtagatggggatgactgtcacgatgttgcttcagagcgcgaagccaaatgcatgccaacattccagtgttttaagaagggacacaaggtgggtgaattttctggagccaatacggaaaagcttgaagccaccattaaggaatttagcttaaccatgatttcctgaaaacataaccagccattgggtatctaaaacttgctatattctttaatctacaattaaagctaacactttttagaaccaaatgcctccttctttctacctaaccgggtctgctcgcttgccccagctgaattttaaattcgactaacctttatcatgcggcccgatattcgagcttattcgggcaaatctcctcaaagggagccttatacaattcacgc

SEQ ID NO: 528726 - DNA, 491 bp, Homo sapiens
ttttttttttggtcaaacattagctatagactcactccagtttatttagagtctttctaaatatgttttaaaatacctgaagttctacaaaaagtggggagcctttcaaatgcatgataaactagggtcagtaggttttggagagttgaaagacatttgaaaatatggtagtggcaatggcaggggtatgggctgataatgagacggatagaaatgaaggatgctacaccattcaggattaaaattcaacattagttcaagttttaagacttttactcctatggaaagagtggggaattggagtaaaatccaagagagcaggaactgtctagaagaaaattagcctgcccaatctctttggcttgtttcctcctcctcatggatccctctctattgataaattttaagtagtgcctataccacacataggctccattttccatcccatgccacatctcgagggaagagctataggaataatacacataaac

SEQ ID NO: 528727 - DNA, 665 bp, Homo sapiens
  misc_feature (16)..(16): n is a, c, g, or t
  misc_feature (135)..(135): n is a, c, g, or t
  misc_feature (170)..(170): n is a, c, g, or t
  misc_feature (210)..(210): n is a, c, g, or t
  misc_feature (223)..(223): n is a, c, g, or t
  misc_feature (247)..(248): n is a, c, g, or t
  misc_feature (257)..(257): n is a, c, g, or t
  misc_feature (259)..(259): n is a, c, g, or t
  misc_feature (271)..(271): n is a, c, g, or t
  misc_feature (274)..(274): n is a, c, g, or t
  misc_feature (280)..(280): n is a, c, g, or t
  misc_feature (286)..(286): n is a, c, g, or t
  misc_feature (298)..(299): n is a, c, g, or t
  misc_feature (303)..(303): n is a, c, g, or t
  misc_feature (308)..(308): n is a, c, g, or t
  misc_feature (311)..(311): n is a, c, g, or t
gagtgaagtttatatncaagttcagactcaaaggcattattatgatttgcttcttcccatgtcttccatgtcctgcttctcaaagtttttctcatacatcacactcctgccttaactgctctgagtatgcattgntttcaattcatctttatttcaatctgtttaacttntgaatcgcatgggaatacgcacattaagttcctttctaanataaggttttatnaagctgagtttcacgataagttcnngcttttttnanatgttttatggncanagaaanctttanagatttatatgnntttnctgcnccngtaaatggaccattaactaggtgacctttaacagagcacccctttgaaagttttataggtatgaaatatatgtagatattgtaaagggttttaatttttttttgatggggtgctgtgtaaatctgtgtatttataaatgtaatgaaggtattgacagaaaaaaatatattttcttttaaatgtattcagtcagtacacaatcctttataaaagttgtatactgactgaatacatttaaaagaaaatatatttgtgaaacctgttctgctatgaacagagataacatatctttttactatgctatgggttttataggttaagcttcctaatgcataataaatttacagttggttc

SEQ ID NO: 528728 - DNA, 127 bp, Homo sapiens
  misc_feature (103)..(103): n is a, c, g, or t
gactctcgagaccaaaatgaatttctccaaccttcagggcttcaacaagaggctctttacctattttgggaaaaatcattttggtcttgagagtcattaaaanggacccattggaggacatttacga

SEQ ID NO: 528729 - DNA, 1139 bp, Homo sapiens
gagcactaatcatgaagcttcagagccaaggacgtgcctgtggtaagcaggaggtcacgcgctctctttgcgtggggagctgaatcgcagatggcccccaaggccctataagaaggttccagtccccgaaggacctggacctggatcgcctgggatctagagtgatccgactctcggagcagcggagtctgagaggactgagatgccccacgggccgtctatccacgaggaggagccagcggcgtgcccaagcactcggctcggtcggagagcggaggaggtaagagctggctcggcgccgagagtgcccggaatcagtgagcagtgtgcaagtagatcgcggcttcatagcgatcaaagagctcgtcgattcgccatagaagcggtaccaggacagcccttgggtgtggaggcacattcccgtggtgcagattgacctctccgttcgcttgaaaggttccagggctgccctattgtcagtatcacgtatgtgaacgctggtacggaggacgcggcggcacctggtaggaagctggagaacgtgacatatgaggcaggcatgaacatgaggcaaggaagaacggtaaggaacgaacgtgtctacatggcggcctttcacccataactcgggttgtgccccgggcacgaagcccagcggatggaacacatcgtacccgatgtgccccaaggcaaggtgggcaaattcgttacagcacgtacgggtacaattgccctacagcacactgcgacgtgagcgcacaattgacctgcagggaatttgaccaaatgcatccgcgaatggatagcgccattaacgatgtggggcttctggcgcaattacttggaaccttgggacatacagcgccctttatgtccggaacacaggtgtaggaaacacttggccgttagtttcaatgacagaccgcgtaggaaagacgagcacggatgaaaccattgcaaaactagtttccccccttgaagcaaatgcgaccgtttccccgcatgtggttagacacacagggcaatgcatgcccatatggatacaccccaaaatacagaccacagctcagcagcaccaaaaagatatcccaagtggagccttcttcataagtcctgcagagctcgcgcggccagaaatt

SEQ ID NO: 528730 - DNA, 283 bp, Homo sapiens
gtatgtctgctggaaaaggggaggaggactcgccaggaatactggggcctcatatttgacataagttttggaatctgggcttatcctctcaaaagcggctgtataagtttccctggtaagatcacaggtggtggtgccgcattgttgtaaatgccagttcctgagcctcttggcatcacatgggccaaagtcctgaaggctgcctgatccaggtgcacaggactccggtcacggttattttcaagctgaggcttccactgacgtccatatgggcgtacgggga

SEQ ID NO: 528731 - DNA, 931 bp, Homo sapiens
aataaaccgcccaccccccatcaagaggccgagcgaagcagttcagggcaacatacatatgggtaaagctattgacacagatctcggaaaatggtaactgaagatcaaagtttagcaacagaggaatgtacttctacctaataactttctaaaattcaaatatgtataataaaataaatgttttaaatctaaaagacacacacacaactcaaagtgacaattctacacatatctaaaaaaaaaacacaaaacacagcaaaacaaccctcttttccccccccgtgcaagcgccacactaaaatcatcttatatcttattaacccacccatctaccattccattccaccctcttcttcttacccgttaaccgttcgatccgacctcactataaatcaaacaactttctcacaacaacaaattcatagcatatatatcaaaaatcagtattacccgtatgtccgcatcacctccattacaagaatactaacgtacacaaaacaccacctcgatactgctatcacccaaacactaataccgcttccactcctgtatgcgaagatccagataacactcagactcattcgtccgggcgagcaagtgcgttatttggcacttacacccctaatgtaatcaaacgtgctgccttacaaggatatattattctcaaaatcatactccaccaaaggaccgccctcacctcaaccgacaaccaacgtgtaagaaacgaacggacaactacagacgccaaccctgtttcttccttatcctttatcttcttttcatatccttatgctcatcatcagatagtaccacatccccctcccaccacactatacactgcactccgacgcgtaccactcagaaataccccacaccacctctcacctcccgtctaatcagagatacacaggtccgaactctccgtcctccg

SEQ ID NO: 528732 - DNA, 419 bp, Homo sapiens
tttccaaagcggatgctggtggtggctgcacaagcatgtgggtgtgcttgctgccactaaactgtgtgctgaaagatggtcgagatggtaaattcacagttaaaaaaatcaaggtcaagaaagtctaaaacagactgagagacttctttagattaaggtaggctacacagacacgaccaccaaatgcaacgtgtgatcctgggtgacgggcggggcataatgagggcattgctgggcaggcagcaacacctgaccttctgaactacagagggccgggagcacatatccatgatacaggtcctgactctcacaactgcactgtgcttacgtaagaaaatggcctcctctaaggagacagacacggtgtttaggagtagaagggggacagcatctccgctttggaaagggtaccgagctcg

SEQ ID NO: 528733 - DNA, 1095 bp, Homo sapiens
agcgggggcgcgccccgtccctcgcgcgcgatgctcccctggacggcgctcgtgcctgggccctgagcttgctggctggcgctggcgcggagcggcgcggagcgcgggtccaccagtcactcagccccccgatggggaccttgatgttcctgctggacaggctcagccagcgtctctcacttaatcgaggttctcccgggttcgggcagtgtgtggggcagctggtggcctccactgcccgctgggcaccagtgggccctgcgttgcctagtctggtgcacggtgggcagttctggcgcatactacgcgtagttctccgctttcggctcagtcacaagctcggggtgagggcctgccacatggtatgcgggtgcgtgcttcttgcacctaggcgcattggtgttgactaccactaccatcgtgggccgtgagcggcgtgggtactgagttgctccaaaggcaaaccatgcttagttgtcgtctagtagaaggtcagtctatggtggtccccggagctcaatgcggagatgcacgccaaaatgatagacttgggcttgttgtgggttagactaggtaattggtcgggccctcaccaagacgtatcccacttggtagtgtggcaccccacaccactagttgtctacgtgaatgcatcgaaagggaaccaccttaccgcgctgatacgagcccaggcatgggaaaacaacttctgtatcgagggcgatcgcgggttccggaatgtgcgccaaaacggtgtacccatggggaacgacgtgtccaaaagataccggtaatgtaccaattcatagtcgccccccatggtgccccgtcaagcaacagacaactcgtggacactttttgtgtgggtacccggttgggcaattgaaccccaatgccaccatgttcaaatggtgttcactacacaacaggcccttgaatggggggctgtcccaaatttccttcgcaactggcggaaatggcaggagccaggcactagcaagggaatacatagtggccccaacgggaagaactccacccgttctccaacgcgcgaacttttcccgggccctgatggacccatgtgaccaacacact

SEQ ID NO: 528734 - DNA, 471 bp, Homo sapiens
tgatgggcacggtagtcccagcggcttgggagactgaggcacacgaatagcttgaccagaggaggcagaggttgcagtgagtccagatagtgccactgcactccagccggggtgacagagcaagactccatctaaaacagtaaataagtaaataaaaaagaaaagaaaagtggttagagcagacatcctggtatactggtcctggttctacatcttaggggaaaaacattcagtcttaccattcagtatgatattagtggtgagtcttgggtagatacccttcatcaggtcaaggtaattcctttccattcctcattgtaagcgcgtgctgtccggacagcacgcgctaaataattacccacatccgcaggtacaggggaagtgtgaggagagcagcacccctaggaaccaccgcagccagcattgcccccgtctgacgaatgacaggaagactgttgaaagccatgaggg

SEQ ID NO: 528735 - DNA, 1701 bp, Homo sapiens
agcggggtggcggcgcggagccttgggcccggctgcggcccggcggcggccccggcgcggtgcgggcgttcgcggcgccccgggagctgcaggggccccgggcggcggcgaggccggagaggggcgggcccgggacaccggcacccggcgccctcggagccaaaggcgcgcggcggacacggcggggccctcgcgcgcctggagacgatgccaaagctgcagggcttcgagttctggagccgcaccctgcgaggggcccgccacgtcgtggcccccatggtggaccagagcgagctggcctggaggctgctgagccggcgccacggggcacagctctgctacacgcccatgctgcatgcccaggtctttgtccgcgacgccaactaccggaaggagaacctgtactgcgaggtgtgccccgaggaccggcccctcatcgtgcagttctgtgccaatgacccggaggtgtttgttcaggcggctctcctggctcaggattactgtgacgccattgacctgaacttgggctgcccacagatgatagccaagagaggtcactatggcgcctttctgcaggacgagtgggacctgctccaaagaatgattttgctggcccacgagaaactctctgttcctgtcacgtgcaaaatccgtgtcttcccggagattgacaagaccgtgaggtacgcccagatgctggagaaggccggctgccagttgctgacggtgcacggacgcaccaaggagcagaaggggcccctgtcgggtgcagcgtcctgggagcatatcaaggctgtgcggaaggctgtggccatccctgtgtttgctaacgggaacatccagtgcctgcaggacgtggagcgctgcctccgggacacgggtgtgcagggcgtcatgagcgcagagggcaacctgcacaaccccgccctgttcgagggccggagccctgccgtgtgggagctggccgaggagtatctggacatcgtgcgggagcacccctgccccctgtcctacgtccgggcccacctcttcaagctgtggcaccacacgctgcaggtgcaccaggagctgcgagaggagctggccaaggtgaagaccctggagggcatcgctgctgtgagccaggagctgaagctgcggtgtcaggaggagatatccaggcaggagggagcgaagcccaccggcgacttgcccttccactggatctgccagccctacatccggccggggcccagggaggggagcaaggagaaggcaggtgcgcgcagcaagcgggccctggaggaagaggagggtggcacggaggtcctgtccaagaacaagcaaaagaagcagctgaggaacccccacaagaccttcgacccctctctgaagccaaaatatgcaaagtgtgaccagtgtggaaacccaaagggcaacagatgtgtgttcagcctgtgccgcggctgctgcaagaagcgagcctccaaagagactgcagactgcccaggactgctgctggagcctggacacgtcctacttaagaaaatgccttttactcagggaatctcctgctacttaatgtggaaagacacgcccatgtcccccttcggcccactctgggggcctggaaatgctgcagtggggagcaggccccaggctggacctgccctgtcctcagcacgcgtgtgcaaaagtgaacaataaatcatttcaaagatg

SEQ ID NO: 528736 - DNA, 133 bp, Homo sapiens
tcatcgcgtatgagcatcatttctcgtagcagtcaccttcctcggtgttgatgaagatactgcctgggtgatggtcagggtttcatactagacacatagtgtgttcagcttccactcctctcgttccacgttg

SEQ ID NO: 528737 - DNA, 1981 bp, Homo sapiens
agcggggtggcggcgcggagccttgggcccggctgcggcccggcggcggccccggcgcggtgcgggcgttcgcggcgccccgggagctgcaggggccccgggcggcggcgaggccggagaggggcgggcccgggacaccggcacccggcgccctcggagccaaaggcgcgcggcggacacggcggggccctcgcgcgcctggagacgatgccaaagctgcagggcttcgagttctggagccgcaccctgcgaggggcccgccacgtcgtggcccccatggtggaccagagcgagctggcctggaggctgctgagccggcgccacggggcacagctctgctacacgcccatgctgcatgcccaggtctttgtccgcgacgccaactaccggaaggagaacctgtactgcgaggtgtgccccgaggaccggcccctcatcgtgcagttctgtgccaatgacccggaggtgtttgttcaggcggctctcctggctcaggattactgtgacgccattgacctgaacttgggctgcccacagatgatagccaagagaggtcactatggcgcctttctgcaggacgagtgggacctgctccaaagaatgattttgctggcccacgagaaactctctgttcctgtcacgtgcaaaatccgtgtcttcccggagattgacaagaccgtgaggtacgcccagatgctggagaaggccggctgccagttgctgacggtgcacggacgcaccaaggagcagaaggggcccctgtcgggtgcagcgtcctgggagcatatcaaggctgtgcggaaggctgtggccatccctgtgtttgctaacgggaacatccagtgcctgcaggacgtggagcgctgcctccgggacacgggtgtgcagggcgtcatgagcgcagagggcaacctgcacaaccccgccctgttcgagggccggagccctgccgtgtgggagctggccgaggagtatctggacatcgtgcgggagcacccctgccccctgtcctacgtccgggcccacctcttcaagctgtggcaccacacgctgcaggtgcaccaggagctgcgagaggagctggccaaggtgaagaccctggagggcatcgctgctgtgagccaggagctgaagctgcggtgtcaggaggagatatccaggcaggagggagcgaagcccaccggcgacttgcccttccactggatctgccagccctacatccggccggggcccagggaggggagcaaggagaaggcaggtgcgcgcagcaagcgggccctggaggaagaggagggtggcacggaggtcctgtccaagaacaagcaaaagaagcagctgaggaacccccacaagaccttcgacccctctctgaagccaaaatatgcaaagtgtgaccagtgtggaaacccaaagggcaacagatgtgtgttcagcctgtgccgcggctgctgcaagaagcgagcctccaaagagactgcagactgcccaggactgctgctggagcctggacacgtcctacttaagaaaatgccttttactcagggaatctcctgctacttaatgtggaaagacacgcccatgtcccccttcggcccactctgggggcctggaaatgctgcagtggggagcaggccccaggctggacctgccctgtcctcagcacgcgtgtgcaaaagtgaacaataaatcatttcaaagatgcgagagcccacagcctgtgaccactgccctctcagacgcagggaggcatgagccggggcaggtgcggttggggccagtgggggcttctgaacaacaggatacatctaaatgaaggcagcatctgggtagacaaaagtgggggcttaggtcccctccccacctcccctaggcgcctccataggcaagtggccaaagcctccgggagcttcggatgcctcacagccttggaagcaccgcctgcgaggccacagtggctgctgctgggggctgttgaatctga

SEQ ID NO: 528738 - DNA, 2060 bp, Homo sapiens
agcggggtggcggcgcggagccttgggcccggctgcggcccggcggcggccccggcgcggtgcgggcgttcgcggcgccccgggagctgcaggggccccgggcggcggcgaggccggagaggggcgggcccgggacaccggcacccggcgccctcggagccaaaggcgcgcggcggacacggcggggccctcgcgcgcctggagacgatgccaaagctgcagggcttcgagttctggagccgcaccctgcgaggggcccgccacgtcgtggcccccatggtggaccagagcgagctggcctggaggctgctgagccggcgccacggggcacagctctgctacacgcccatgctgcatgcccaggtctttgtccgcgacgccaactaccggaaggagaacctgtactgcgaggtgtgccccgaggaccggcccctcatcgtgcagttctgtgccaatgacccggaggtgtttgttcaggcggctctcctggctcaggattactgtgacgccattgacctgaacttgggctgcccacagatgatagccaagagaggtcactatggcgcctttctgcaggacgagtgggacctgctccaaagaatgattttgctggcccacgagaaactctctgttcctgtcacgtgcaaaatccgtgtcttcccggagattgacaagaccgtgaggtacgcccagatgctggagaaggccggctgccagttgctgacggtgcacggacgcaccaaggagcagaaggggcccctgtcgggtgcagcgtcctgggagcatatcaaggctgtgcggaaggctgtggccatccctgtgtttgctaacgggaacatccagtgcctgcaggacgtggagcgctgcctccgggacacgggtgtgcagggcgtcatgagcgcagagggcaacctgcacaaccccgccctgttcgagggccggagccctgccgtgtgggagctggccgaggagtatctggacatcgtgcgggagcacccctgccccctgtcctacgtccgggcccacctcttcaagctgtggcaccacacgctgcaggtgcaccaggagctgcgagaggagctggccaaggtgaagaccctggagggcatcgctgctgtgagccaggagctgaagctgcggtgtcaggaggagatatccaggcaggagggagcgaagcccaccggcgacttgcccttccactggatctgccagccctacatccggccggggcccagggaggggagcaaggagaaggcaggtgcgcgcagcaagcgggccctggaggaagaggagggtggcacggaggtcctgtccaagaacaagcaaaagaagcagctgaggaacccccacaagaccttcgacccctctctgaagccaaaatatgcaaagtgtgaccagtgtggaaacccaaaggtgagtgggttccggctgcaagccaccaaggcttcagctttgggggtgggcagggtggtctctgcactgcttggggtggcaggtctggtgcccgcccagctgggtttgcaacgtggctcaaggtggcatggatgcctcaggacggccccttgcttccagccaagcccctgcccaggcctggaggggaagagagtctgggtgggttggggtgagggagaggcatctggcttgggagcagttcccagggctgcatccaggccgtgggcatctggcagaggcttccccagtggggagcaggccccaggctggacctgccctgtcctcagcacgcgtgtgcaaaagtgaacaataaatcatttcaaagatgcgagagcccacagcctgtgaccactgccctctcagacgcagggaggcatgagccggggcaggtgcggttggggccagtgggggcttctgaacaacaggatacatctaaatgaaggcagcatctgggtagacaaaagtgggggcttaggtcccctccccacctcccctaggcgcctccataggcaagtggccaaagcctccgggagcttcggatgcctcacagccttggaagcaccgcctgcgaggccacagtggctgctgctgggggctgttgaatctga

SEQ ID NO: 528739 - DNA, 701 bp, Homo sapiens
  misc_feature (1)..(1): n is a, c, g, or t
  misc_feature (104)..(104): n is a, c, g, or t
  misc_feature (117)..(117): n is a, c, g, or t
  misc_feature (119)..(119): n is a, c, g, or t
  misc_feature (121)..(121): n is a, c, g, or t
  misc_feature (129)..(129): n is a, c, g, or t
  misc_feature (137)..(137): n is a, c, g, or t
  misc_feature (222)..(223): n is a, c, g, or t
  misc_feature (225)..(225): n is a, c, g, or t
  misc_feature (227)..(227): n is a, c, g, or t
  misc_feature (233)..(233): n is a, c, g, or t
  misc_feature (247)..(247): n is a, c, g, or t
  misc_feature (254)..(254): n is a, c, g, or t
  misc_feature (312)..(312): n is a, c, g, or t
  misc_feature (351)..(351): n is a, c, g, or t
  misc_feature (356)..(356): n is a, c, g, or t
  misc_feature (377)..(377): n is a, c, g, or t
  misc_feature (424)..(425): n is a, c, g, or t
  misc_feature (453)..(453): n is a, c, g, or t
  misc_feature (456)..(456): n is a, c, g, or t
  misc_feature (474)..(474): n is a, c, g, or t
  misc_feature (476)..(476): n is a, c, g, or t
  misc_feature (492)..(493): n is a, c, g, or t
  misc_feature (531)..(531): n is a, c, g, or t
  misc_feature (604)..(606): n is a, c, g, or t
  misc_feature (682)..(682): n is a, c, g, or t
nagttaaacttagcattaaataaaaatctttaaatggtacacctatgtagcaagagttaaatataaacccagtctaatcctgtacacttgtgattaattgtganaatcttaagtggntnanttctttcncatttacnaattcagagaaagcccgtttcctgtttaaacctcaccactttgccttggcatcacaccaaccctgcctcgggcttcagctgcagnncngncccagnccctcctcccagcngggctgnctccagtcccagccccagtctccaccaactgagcagcgtacgcggggttgtgtctggnttccagcatctaccaccccttcagagcaacttccaacangggangggggaggaagctcgcattgnttgggctgaacagatttgggggggttttatcacaagggcctgaaaanntcctaagcatgcgttctccttgcacagnggngggggggcaatggggggngnggggggggggggtggnnggggcggcaggggctctcaactaagggctctgaatcanagaggggacagatgctgccttagtccttcttgcctcccagggccaggcttcttgtgaggagctttcctgggcnnnagggggtcagtgtggagactgtgggggcttccagcttcactctgtctaagagggtcttcttaagggcagcaggggngatcttttcttggtcggcc

SEQ ID NO: 528740 - DNA, 672 bp, Homo sapiens
cgtatagatgtcatagcatgcccttcggcagatgtgcattcttatcccttatatggtgccttaagaatcacagggggtgcttcatcctctaattggagacagaaaattatgacacgtcacaaggtggatatatatttcggtacctgtgcttgccacagccctgttcctcaaagctgaattgatagatttctctttgtctccgaagaccaagcggttataaggcaccttagaataaatttctccatgaatgtatgtagggtccaagcgctacctgatcatttaaggtcattgctggatatcgttaacgtttccagtgcaggccatgccattccattcatcagattcttagcacttagctgtagtcttgtccatcaatgacccgttagaatagattggcacctactgcatatccagcaagtgagcctcagcagtatagtttcgtccctacccctcatgcctgtgtagtcctgttcacgtatatgtgagtgtgtgtgcgagtgtgtgtgttaacacagacagccatagcacaatgtctgtatttcacatgtatgctaaggtagtgaatgaatcagtaatgcaatattgtgggtccagccgctctgtgcagcactttatttgcagtagtcaatacaatcatttttagtcaattcatgaaaaaaaaaaaagaactcg

SEQ ID NO: 528741 - DNA, 808 bp, Homo sapiens
cccctggaccgtggcaggaactccccctgtctgcctgggtaggacagaaagctgctcgtcctgcgcggcccaccagcccacatgcttcctatccgtttcctgcaggatggtgcccccggcatcccctcacacattgctcacggaaggaaaagcagacgtggccagcctgcatcctctgccctccctgagcctccttggcctggctggccacagctggcatggacgccatcagcaggctccgtgcaggcggacggggcagcccccacaaccagggcaaccctggccctcactcaccagcacccttttgttcttttcctagcaaaatatgcaaagtgtgaccagtgtggaaacccaaagggcaacagatgtgtgttcagcctgtgccgcggctgctgcaagaagcgagcctccaaagagactgcagactgcccaggtcacggattgctttttaaaaccaaattggagaagtctctggcctggaaagaggcccagcctgagctgcaggagcctcagccagcagcacctggaacaccaggtggcttctccgaagtcatgggcagtgccctggcctgaaggcccacaacccccacccccaggactgctgctggagcctggacacgtcctacttaagaaaatgccttttactcagggaatctcctgctacttaatgtggaaagacacgcccatgtcccccttcggcccactctgggggcctggaaatgctgcagtggggagcaggccccaggctggacctgccctgtcctcagcacgcgtgtgcaaaagtgaacaataaatcatttcaaagatg

SEQ ID NO: 528742 - DNA, 1209 bp, Homo sapiens
gctgcccgagctgcggactccatctcagaggccccggactccctagtgacgagtcctgaatgggctgcccgagggaaaggagggcactcctcacagcagcggcactcgccacggccgcctggcccctcacccagactcagacccgtgtggctgtggctgctgggcccctctcacagtgtccttgggctctgcccgctgccctcccctcaggcccagggaggggagcaaggagaaggcaggtgcgcgcagcaagcgggccctggaggaagaggagggtggcacggaggtcctgtccaagaacaagcaaaagaagcagctgaggaacccccacaagaccttcgacccctctctgaagccaaaatatgcaaagtgtgaccagtgtggaaacccaaaggtgagtgggttccggctgcaagccaccaaggcttcagctttgggggtgggcagggtggtctctgcactgcttggggtggcaggtctggtgcccgcccagctgggtttgcaacgtggctcaaggtggcatggatgcctcaggacggccccttgcttccagccaagcccctgcccaggcctggaggggaagagagtctgggtgggttggggtgagggagaggcatctggcttgggagcagttcccagggctgcatccaggccgtgggcatctggcagaggcttccccagtggggctgctcccctgctggccagcctggccccgggagtggtgctggccacaggctcccgagatttcctgtgcccagggcaacagatgtgtgttcagcctgtgccgcggctgctgcaagaagcgagcctccaaagagactgcagactgcccaggtcacggattgctttttaaaaccaaattggagaagtctctggcctggaaagaggcccagcctgagctgcaggagcctcagccagcagcacctggaacaccaggtggcttctccgaagtcatgggcagtgccctggcctgaaggcccacaacccccacccccaggactgctgctggagcctggacacgtcctacttaagaaaatgccttttactcagggaatctcctgctacttaatgtggaaagacacgcccatgtcccccttcggcccactctgggggcctggaaatgctgcagtggggagcaggccccaggctggacctgccctgtcctcagcacgcgtgtgcaaaagtgaacaataaatcatttcaaagatg

SEQ ID NO: 528743 - DNA, 1208 bp, Homo sapiens
agcggggtggcggcgcggagccttgggcccggctgcggcccggcggcggccccggcgcggtgcgggcgttcgcggcgccccgggagctgcaggggccccgggcggcggcgaggccggagaggggcgggcccgggacaccggcacccggcgccctcggagccaaaggcgcgcggcggacacggcggggccctcgcgcgcctggagacgatgccaaagctgcagggcttcgagttctggagccgcaccctgcgaggggcccgccacgtcgtggcccccatggtggaccagagcgagctggcctggaggctgctgagccggcgccacggggcacagctctgctacacgcccatgctgcatgcccaggtctttgtccgcgacgccaactaccggaaggagaacctgtactgcgaggtgtgccccgaggaccggcccctcatcgtgcagttctgtgccaatgacccggaggtgtttgttcaggcggctctcctggctcaggattactgtgacgccattgacctgaacttgggctgcccacagatgatagccaagagaggtcactatggcgcctttctgcaggacgagtgggacctgctccaaagaatgattttgctggcccacgagaaactctctgttcctgtcacgtgcaaaatccgtgtcttcccggagattgacaagaccgtgaggtacgcccagatgctggagaaggccggctgccagttgctgacggtgcacggacgcaccaaggagcagaaggggcccctgtcgggtgcagcgtcctgggagcatatcaaggctgtgcggaaggctgtggccatccctgtgtttgctaacgggaacatccagtgcctgcaggacgtggagcgctgcctccgggacacgggtgtgcagggcgtcatgagcgcagagggcaacctgcacaaccccgccctgttcgagggccggagccctgccgtgtgggagctggccgaggagtatctggacatcgtgcgggagcaaggagaaggcaggtgcgcgcagcaagcgggccctggaggaagaggagggtggcacggaggtcctgtccaagaacaagcaaaagaagcagctgaggaacccccacaagaccttcgacccctctctgaagcaaaatatgcaaggtgcccggtggaacccaagggcaagatggggtccaccgtgcccgggtgtgaaaagagcccaaaaatggggag

SEQ ID NO: 528744 - DNA, 429 bp, Homo sapiens
ggatttcaccatgttggccaggtctcaaactcctgacccagtgatccgcccgcctcggcctcccaaagtgttgagattacaggcgtgagccactgcgcccagccgggtctctggaatcttagctgcaggtacccctccttttaggggtttggaggaatagtctggtctctctagctcagtgacattgccagcactggtcctctgcgaaatgctgccttttctgtgcttgccactcagggttctgctttcagctccgccttttctcttcgcccctccccacccccactgatttcctttgcttctatgtaccaagcaatataatttgaaaattctgttttacacagaatctagttgtgtgatagagaggaccctgcaagtatctcacccaccatactgaagtctctgctttcatccattatcgaattttat

SEQ ID NO: 528745 - DNA, 1187 bp, Homo sapiens
  misc_feature (1029)..(1029): n is a, c, g, or t
  misc_feature (1105)..(1105): n is a, c, g, or t
agcggggtggcggcgcggagccttgggcccggctgcggcccggcggcggccccggcgcggtgcgggcgttcgcggcgccccgggagctgcaggggccccgggcggcggcgaggccggagaggggcgggcccgggacaccggcacccggcgccctcggagccaaaggcgcgcggcggacacggcggggccctcgcgcgcctggagacgatgccaaagctgcagggcttcgagttctggagccgcaccctgcgaggggcccgccacgtcgtggcccccatggtggaccagagcgagctggcctggaggctgctgagccggcgccacggggcacagctctgctacacgcccatgctgcatgcccaggtctttgtccgcgacgccaactaccggaaggagaacctgtactgcgaggtgtgccccgaggaccggcccctcatcgtgcagttctgtgccaatgacccggaggtgtttgttcaggcggctctcctggctcaggattactgtgacgccattgacctgaacttgggctgcccacagatgatagccaagagaggtcactatggcgcctttctgcaggacgagtgggacctgctccaaagaatgattttgctggcccacgagaaactctctgttcctgtcacgtgcaaaatccgtgtcttcccggagattgacaagaccgtgaggtacgcccagatgctggagaaggccggctgccagttgctgacggtgcacggacgcaccaaggagcagaaggggcccctgtcgggtgcagcgtcctgggagcatatcaaggctgtgcggaaggctgtggccatccctgtgtttgctaacgggaacatccagtgcctgcaggacgtggagcgctgcctccgggacacgggtgtgcagggcgtcatgagcgcacgacgggcataccatgcgcaaccccagccactgtgttctagggcccgcgtgcccctgccgtgctgggacgctggcctgaagcgcacgtatcttggaccatcagttgcaggcgatgctaactccctngcactcgcctgtctcttaccgtaccaggcgccccactctgctttcaatgtcttgtagggcagtccaacagctgctngcgggtgttgcagcccagggatgcttcgcgatgaagcgatgcttgtgcccacaggttgcaagaaccccgtggacgcggcata

SEQ ID NO: 528746 - DNA, 1050 bp, Homo sapiens
  misc_feature (952)..(952): n is a, c, g, or t
  misc_feature (954)..(954): n is a, c, g, or t
  misc_feature (990)..(990): n is a, c, g, or t
agcggggtggcggcgcggagccttgggcccggctgcggcccggcggcggccccggcgcggtgcgggcgttcgcggcgccccgggagctgcaggggccccgggcggcggcgaggccggagaggggcgggcccgggacaccggcacccggcgccctcggagccaaaggcgcgcggcggacacggcggggccctcgcgcgcctggagacgatgccaaagctgcagggcttcgagttctggagccgcaccctgcgaggggcccgccacgtcgtggcccccatggtggaccagagcgagctggcctggaggctgctgagccggcgccacggggcacagctctgctacacgcccatgctgcatgcccaggtctttgtccgcgacgccaactaccggaaggagaacctgtactgcgaggtgtgccccgaggaccggcccctcatcgtgcagttctgtgccaatgacccggaggtgtttgttcaggcggctctcctggctcaggattactgtgacgccattgacctgaacttgggctgcccacagatgatagccaagagaggtcactatggcgcctttctgcaggacgagtgggacctgctccaaagaatgattttgctggcccacgagaaactctctgttcctgtcacgtgcaaaatccgtgtcttcccggagattgacaagaccgtgaggtacgcccagatgctggagaaggccggctgccagttgctgacggtgcacggacgcaccaaggagcagaaggggcccctgtcgggtgcagcgtcctgggagcatatcaaggctgtgcggaaggctgtggccatccctgtgtttgctaacgggaacatccagtgcctgcaggacgtggagcgctgcctccgggacacgggtgtgcagggcgtcatgagcgcagagggctgcccacagatgatagccaagagaggtcactatggcgcctttntncaggacgagtgggacctgctccaaagaatgattttnctggcccacgagaaactctctgttcctgtcacgtgcaaaatccgtgtcttcccggagatt

SEQ ID NO: 528747 - DNA, 117 bp, Homo sapiens
agcagtgtgtggaatacggttcagagtcaaaagtgcctaaactgtggtcatccactaatgtcttctcacatctccatcattttattacaatgaatgtatatataaataggtctcaca

SEQ ID NO: 528748 - DNA, 267 bp, Homo sapiens
aataatgtacttatttattttgagacagagtcttgctttgttggacaggctggaatgcagtggtgggatctctgctcaccgcaacctctgcctcctgggttcaagtgattcttgtgcctcagcctccctggtagctgggattatgggtgagtgcctcactcccggctgatttttgtatttttgaagagactgggtttcgccattgtgtctattctagttgtcaaagtcctcattttatgtgatcttgtcctttttttatttcttttt

SEQ ID NO: 528749 - DNA, 82 bp, Homo sapiens
aatagtcaggctggtacggcccgggagttaggatgagaagtggatccgccgcttgcgccgcatggagtccgaatcggaaagc

SEQ ID NO: 528750 - DNA, 980 bp, Homo sapiens
atatccaactttagctcaatactgttaaagctttttaatctttgcaaattaacatgttctgggcctgctgtgacggatggcttatgtctggtaatcccaagcactgtgggatgccagtgcgggtggactcactgtgatgtccacgagtttgagaccgagcctgacgcgaacatggtgaatatccgcgtctctactaaaaatacaaaatttatccgaggtgtggtggcatgctcctgtaatcccatgcatagcttgggggacgcgctgagtgcatggagaaattgcttgaacctgggaggcagtaggttgcagttgagcccaagtatcgtgccactgctctccagcctgggtcgagcaagagtgagactctggtcttcataataaacccaagaaggcagatgttccagtgcccaccgtgcaggggggtcaaaagaggcaagccggttatggcccctacaactctaataaaggcgaagcgcaagagttttatcgtgcggggcctctttttcacattactctggataagccgagggtaaccctttcgtgttccagggtaaatatttcagaccctgtttttcccaccatcaggaggaagggtgcaggtgccagcacggtggttaaaggggagaagtcctcttcctgttttgtggtggcccctgttcggtatcccttcggccgaggttccccagggagtggtgtcctccggggatgatcatgtagacgataattttggcccggggaagtggataacaacccatttcttcggcggcttacgggagtgtgttggagcggccacatagatttactaagaccccggggccctcgggtaccgacaaacttgtgagcctgttccctaacaggtgcggattaagaccgagagagcaaaacgtcgggggggatgcgagatatatggtggtcctgaaagccaaaatgcgttgctccgagagaggggccccggatcactttgtgcatcatcaggg

SEQ ID NO: 528751 - DNA, 2013 bp, Homo sapiens
  misc_feature (28)..(28): n is a, c, g, or t
gaagggtctgaggtcgtcgtcggtgtgngagcagatcctgaagccagaactccaccccggcgcccgcgccatgcggcgggagaggcatcacgtggggcaaggtggtgtccctgtatgcggtggccgcggggctggccgtggactgtgtgaggcaggcccagcctgccatggtccacgccctcgtggactgcctgggggagttcgtgcgcaagaccctggcaacctggctgcggagacgcggcggatggactgatgtcctcaagtgtgtggtcagcacagaccctggcctccgctcccactggctggtggctgcactctgcagcttcggccgcttcctgaaggctgccttcttcgtgctgctgccagagagatgagctgcccacctggcagtggccgcagcctggccctctgggcccaacgcaggaggccctcagcacccgaacacatcttcctcctccccacccgagcctggagcactctaaccctcggagaccccctaagccccgttcctccgcagacccaggccctccggaaggggtgagtggggaggggctttcctgagcctggagctgggctttggggcagcctgcgaccctccccgcttgtgtcccttctcctgtgatctctgtgttttcccttttctttctggggccaggaagtcagggtcaactcccaggcctcagatgcaggggcccagaacacctgctctcacctgagccccaggtgaaggggcccgggaacacctgctctcacctgagccccaggtgaaggggcccgggaacacctgctctcacctgaaccccaggtgaaggggcccgggaacacctgctctcacctgagccccaggtgaaggggcccggaacacctgctctcacctgagccccaggtgaaggggcccgggaacacctgctctcacctgagccccaggtgaaggggcccgggaacacctgctctcacctgaaccccaggtgaaggggcccggaacacctgctctcacctgagccccaggtgaaggggcccggaacacctgctctcacctgagccccaggtgaaggggcccgggaacacctgctctcacctgagcccctggtgaaggggcccggaacacttgctctcacctgagccccaggtgaaggggcccggaacacctcctctcacctgagccccaggtgaaggggcccggaacacctcctgtcacctgagccccaggtgaaggggcccgggaacacctctcacctgaacccgggggtcccatcccaggaagaagggccatctcaggacatgagtcctcaggggccctgcacattcaatctgaaggtgaccctggcctggctgaagctggaagagctgtggggactcagcctgtaaacagagcgtaaggttcacatgctggttgcttaatccgtttctggaggaagagtatgacacccacttgtgatggggtccttgtgcggtggggaccggggccggcgggctccaggccagcacacctaacccatggatgtggaacctacggccgagaaggaatgttgcatgagtcggatcccagtccattgtcagtggagggtgagggtgaccccatctgctatttttgtgctcatcctcatacaaccatttggggatgtgcctattagggctccgtaagaactcagatgcctgggaagcccagcccctcaggtgcccccacacacagccttcccttgacgcctacatttctaggcacatgtgaggcatctttcctggagccccgagccagccctgtccctccccagtgcagcatggcactcaggagatacaggctggacatggggcagtcgttctggggaggcctggcctagcagccacccacctgagccctcccggccaggcttcgtgctggggtgggccatgtgccaggacaggagggtcccggcggaaagccagccccggactcatcgtgacattgagatcccactggagggtaggggtggtaataaacttctccaaacgatcgttgtcattttaaaaaaaaaa

SEQ ID NO: 528752 - DNA, 2422 bp, Homo sapiens
  misc_feature (28)..(28): n is a, c, g, or t
gaagggtctgaggtcgtcgtcggtgtgngagcagatcctgaagccagaactccaccccggcgcccgcgccatgcggcgggagaggtgcggctgccccccacccgcgtcgccgccatggaggtgctgcggctgctcctcggtcttcgccgccgagatacatggacgcctttgacctgctctgcccacagacaatggagcttggtggcccagtgccaatggctgcttgggcctgggagtactgttgcactgctgctggctagctagctgctgcctggcctcgtccttggagctgctgccctgagctgttgccgctgcctggtcccgggacgcctggctgaggtgtgcgcggtgctgctgcgcctgggcgatgagctggagatgatccggcccagcgtctaccgcaacgtggcgcgtcagctgcacatctccctgcagtctgagcctgtggtgaccgatgcgttcctggccgtggctggccacatcttctctgcaggcatcacgtggggcaaggtggtgtccctgtatgcggtggccgcggggctggccgtggactgtgtgaggcaggcccagcctgccatggtccacgccctcgtggactgcctgggggagttcgtgcgcaagaccctggcaacctggctgcggagacgcggcggatggactgatgtcctcaagtgtgtggtcagcacagaccctggcctccgctcccactggctggtggctgcactctgcagcttcggccgcttcctgaaggctgccttcttcgtgctgctgccagagagatgagctgcccacctggcagtggccgcagcctggccctctgggcccaacgcaggaggccctcagcacccgaacacatcttcctcctccccacccgagcctggagcactctaaccctcggagaccccctaagccccgttcctccgcagacccaggccctccggaaggggtgagtggggaggggctttcctgagcctggagctgggctttggggcagcctgcgaccctccccgcttgtgtcccttctcctgtgatctctgtgttttcccttttctttctggggccaggaagtcagggtcaactcccaggcctcagatgcaggggcccagaacacctgctctcacctgagccccaggtgaaggggcccgggaacacctgctctcacctgagccccaggtgaaggggcccgggaacacctgctctcacctgaaccccaggtgaaggggcccgggaacacctgctctcacctgagccccaggtgaaggggcccggaacacctgctctcacctgagccccaggtgaaggggcccgggaacacctgctctcacctgagccccaggtgaaggggcccgggaacacctgctctcacctgaaccccaggtgaaggggcccggaacacctgctctcacctgagccccaggtgaaggggcccggaacacctgctctcacctgagccccaggtgaaggggcccgggaacacctgctctcacctgagcccctggtgaaggggcccggaacacttgctctcacctgagccccaggtgaaggggcccggaacacctcctctcacctgagccccaggtgaaggggcccggaacacctcctgtcacctgagccccaggtgaaggggcccgggaacacctctcacctgaacccgggggtcccatcccaggaagaagggccatctcaggacatgagtcctcaggggccctgcacattcaatctgaaggtgaccctggcctggctgaagctggaagagctgtggggactcagcctgtaaacagagcgtaaggttcacatgctggttgcttaatccgtttctggaggaagagtatgacacccacttgtgatggggtccttgtgcggtggggaccggggccggcgggctccaggccagcacacctaacccatggatgtggaacctacggccgagaaggaatgttgcatgagtcggatcccagtccattgtcagtggagggtgagggtgaccccatctgctatttttgtgctcatcctcatacaaccatttggggatgtgcctattagggctccgtaagaactcagatgcctgggaagcccagcccctcaggtgcccccacacacagccttcccttgacgcctacatttctaggcacatgtgaggcatctttcctggagccccgagccagccctgtccctccccagtgcagcatggcactcaggagatacaggctggacatggggcagtcgttctggggaggcctggcctagcagccacccacctgagccctcccggccaggcttcgtgctggggtgggccatgtgccaggacaggagggtcccggcggaaagccagccccggactcatcgtgacattgagatcccactggagggtaggggtggtaataaacttctccaaacgatcgttgtcattttaaaaaaaaaa

SEQ ID NO: 528753 - DNA, 259 bp, Homo sapiens
atcctagccacgtgacgtagcacctgacgtaccccagctgctgcctcgtactttgcagatattaaagaggagcctgaaactgttccttggacatcttatgaatgtcagaaaatacctttggcagggttagaatgatcatggggacagtggttgttcacaatttgcatgccacgtgaacaggcgccagatcttcacgttggaaaacatgaatcacagccttgtgaaagacgatcatccgctaagcagtgtgggctacgga

SEQ ID NO: 528754 - DNA, 1345 bp, Homo sapiens
gcctgaaccccaggtgaaggggcccggaacacctgctctcacctgagaccccaggtgaatgggtgccgggaacacctgctctcacctgagccccaggtgaaggggcccgggaacacctgctctcacctgaaccccaggtgaaggggcccgggaacacctgctctcacctgagccccaggtgaaggggcccggaacacctgctctcacctgagccccaggtgaaggggcccgggaacacctgctctcacctgagccccaggtgaaggggcccgggaacacctgctctcacctgaaccccaggtgaaggggcccggaacacctgctctcacctgagccccaggtgaaggggcccggaacacctgctctcacctgagccccaggtgaaggggcccgggaacacctgctctcacctgagcccctggtgaaggggcccggaacacttgctctcacctgagccccaggtgaaggggcccggaacacctcctctcacctgagccccaggtgaaggggcccggaacacctcctgtcacctgagccccaggtgaaggggcccgggaacacctctcacctgaacccgggggtcccatcccaggaagaagggccatctcaggacatgagtcctcaggggccctgcacattcaatctgaaggtgaccctggcctggctgaagctggaagagctgtggggactcagcctgtaaacagagcgtaaggttcacatgctggttgcttaatccgtttctggaggaagagtatgacacccacttgtgatggggtccttgtgcggtggggaccggggccggcgggctccaggccagcacacctaacccatggatgtggaacctacggccgagaaggaatgttgcatgagtcggatcccagtccattgtcagtggagggtgagggtgaccccatctgctatttttgtgctcatcctcatacaaccatttggggatgtgcctattagggctccgtaagaactcagatgcctgggaagcccagcccctcaggtgcccccacacacagccttcccttgacgcctacatttctaggcacatgtgaggcatctttcctggagccccgagccagccctgtccctccccagtgcagcatggcactcaggagatacaggctggacatggggcagtcgttctggggaggcctggcctagcagccacccacctgagccctcccggccaggcttcgtgctggggtgggccatgtgccaggacaggagggtcccggcggaaagccagccccggactcatcgtgacattgagatcccactggagggtaggggtggtaataaacttctccaaacgatcgttgtcattttaaaaaaaaaa

SEQ ID NO: 528755 - DNA, 1976 bp, Homo sapiens
  misc_feature (28)..(28): n is a, c, g, or t
gaagggtctgaggtcgtcgtcggtgtgngagcagatcctgaagccagaactccaccccggcgcccgcgccatgcggcgggagaggtgcggctgccccccacccgcgtcgccgccatggaggtgctgcggctgctcctcggtcttcgccgccgagatacatggacgcctttgacctgctctgcccacagacaatggagcttggtggcccagtgccaatggctgcttgggcctgggagtactgttgcactgctgctggctagctagctgctgcctggcctcgtccttggagctgctgccctgagctgttgccgctgcctggtcccgggacgcctggctgaggtgtgcgcggtgctgctgcgcctgggcgatgagctggagatgatccggcccagcgtctaccgcaacgtggcgcgtcagctgcacatctccctgcagtctgagcctgtggtgaccgatgcgttcctggccgtggctggccacatcttctctgcaggcatcacgtggggcaaggtggtgtccctgtatgcggtggccgcggggctggccgtggactgtgtgaggcaggcccagcctgccatggtccacgccctcgtggactgcctgggggagttcgtgcgcaagaccctggcaacctggctgcggagacgcggcggatggactgatgtcctcaagtgtgtggtcagcacagaccctggcctccgctcccactggctggtggctgcactctgcagcttcggccgcttcctgaaggctgccttcttcgtgctgctgccagagagatgagctgcccacctggcagtggccgcagcctggccctctgggcccaacgcaggaggccctcagcacccgaacacatcttcctcctccccacccgagcctggagcactctaaccctcggagaccccctaagccccgttcctccgcagacccaggccctccggaaggggtgagtggggaggggctttcctgagcctggagctgggctttggggcagcctgcgaccctccccgcttgtgtcccttctcctgtgatctctgtgttttcccttttctttctggggccaggaagtcagggtcaactcccaggcctcagatgcaggggcccagaacacctgctctcacctgagccccaggtgaaggggcccggaacacctcctgtcacctgagccccaggtgaaggggcccgggaacacctctcacctgaacccgggggtcccatcccaggaagaagggccatctcaggacatgagtcctcaggggccctgcacattcaatctgaaggtgaccctggcctggctgaagctggaagagctgtggggactcagcctgtaaacagagcgtaaggttcacatgctggttgcttaatccgtttctggaggaagagtatgacacccacttgtgatggggtccttgtgcggtggggaccggggccggcgggctccaggccagcacacctaacccatggatgtggaacctacggccgagaaggaatgttgcatgagtcggatcccagtccattgtcagtggagggtgagggtgaccccatctgctatttttgtgctcatcctcatacaaccatttggggatgtgcctattagggctccgtaagaactcagatgcctgggaagcccagcccctcaggtgcccccacacacagccttcccttgacgcctacatttctaggcacatgtgaggcatctttcctggagccccgagccagccctgtccctccccagtgcagcatggcactcaggagatacaggctggacatggggcagtcgttctggggaggcctggcctagcagccacccacctgagccctcccggccaggcttcgtgctggggtgggccatgtgccaggacaggagggtcccggcggaaagccagccccggactcatcgtgacattgagatcccactggagggtaggggtggtaataaacttctccaaacgatcgttgtcattttaaaaaaaaaa

SEQ ID NO: 528756 - DNA, 262 bp, Homo sapiens
  misc_feature (139)..(139): n is a, c, g, or t
  misc_feature (224)..(224): n is a, c, g, or t
tagaggatcctcaataaattgttggtcattgatgatggttcctcagatgtcaaatgtctttttgagaaatggttgaatgaagaaaatagctttccaattcattatcatgttaaagaaaatggcggtaaacatactgcanttaatgttgctttagaaaaagcaagaggtgaattgttctttactgcagactcggatgattatttgacagcagatgccttgcaaanagtaaataattgggtgatcaatgaccaacaatttattg

SEQ ID NO: 528757 - DNA, 1012 bp, Homo sapiens
acaaaacaccaaatgtgctggatgactgccagtgtgcatgctgggggtgggccctggggtgccctggtggccctgggatggggaaccgctggtggcttccgcggaggtttcggcagtggcatcctggggtcggggtcgcggctgtggactgctgtggcctggtggccgagtgccagcggagctcgcggaggcaaggccgaggataacggagtgtatgcccgtcaccaagtagggccgcattggtcaaggacatgaaggatcaagtccctggaggagatctatctcttctccctgccattaaggaatcagagatcaattgatttctacctgaggggacatctctcaaggattgaggtcctgaaggatccatgccacgtgcacaaagcagacccgtgccgggccaagcgcaccaaggttcaacggcaatattgtatgactatacgagggactacaaatatgtccaaacgatcagagtcatagggtagataaacgtagcttcgaagatggaacgagttggccacacagcaaaatcccgatggaggagcccaaacaacttccaatgtgcacaaagcttccaccattacagatcacaccgactacgccaagaaggacaaactaggaggcagaaacccaggacatcagacaaaagaccacaacaaccaagatgaaccaccaaatggtaaaataggatagaacataggaccacaattaaaggaagataatagatgccttgcgatactgccaatacatacacactagaaaacccaaaagatgacgcaaccactgagcaatcaaggcatcaagcaacagctaggacgcacaataaaggaaaaggctgggcaacaatagggcaatggagaaatacagaagagaaacatagagaagtaaccaatcaacgacccgacagacgtaacacatgtacaacacacaagagtgcgcaatataagcgccacacgaaccaacacaaaacgaaacacaaagaaactaaacgaacctaaacaataatacacag

SEQ ID NO: 528758 - DNA, 1509 bp, Homo sapiens
  misc_feature (28)..(28): n is a, c, g, or t
gaagggtctgaggtcgtcgtcggtgtgngagcagatcctgaagccagaactccaccccggcgcccgcgccatgcggcgggagaggcatcacgtggggcaaggtggtgtccctgtatgcggtggccgcggggctggccgtggactgtgtgaggcaggcccagcctgccatggtccacgccctcgtggactgcctgggggagttcgtgcgcaagaccctggcaacctggctgcggagacgcggcggatggactgatgtcctcaagtgtgtggtcagcacagaccctggcctccgctcccactggctggtggctgcactctgcagcttcggccgcttcctgaaggctgccttcttcgtgctgctgccagagagatgagctgcccacctggcagtggccgcagcctggccctctgggcccaacgcaggaggccctcagcacccgaacacatcttcctccgcagacccaggccctccggaaggggtgagtggggaggggctttcctgagcctggagctgggctttggggcagcctgcgaccctccccgcttgtgtcccttctcctgtgatctctgtgttttcccttttctttctggggccaggaagtcagggtcaactcccaggcctcagatgcaggggcccagaacacctgctctcacctgagccccaggtgaaggggcccggaacacctcctgtcacctgagccccaggtgaaggggcccgggaacacctctcacctgaacccgggggtcccatcccaggaagaagggccatctcaggacatgagtcctcaggggccctgcacattcaatctgaaggtgaccctggcctggctgaagctggaagagctgtggggactcagcctgtaaacagagcgtaaggttcacatgctggttgcttaatccgtttctggaggaagagtatgacacccacttgtgatggggtccttgtgcggtggggaccggggccggcgggctccaggccagcacacctaacccatggatgtggaacctacggccgagaaggaatgttgcatgagtcggatcccagtccattgtcagtggagggtgagggtgaccccatctgctatttttgtgctcatcctcatacaaccatttggggatgtgcctattagggctccgtaagaactcagatgcctgggaagcccagcccctcaggtgcccccacacacagccttcccttgacgcctacatttctaggcacatgtgaggcatctttcctggagccccgagccagccctgtccctccccagtgcagcatggcactcaggagatacaggctggacatggggcagtcgttctggggaggcctggcctagcagccacccacctgagccctcccggccaggcttcgtgctggggtgggccatgtgccaggacaggagggtcccggcggaaagccagccccggactcatcgtgacattgagatcccactggagggtaggggtggtaataaacttctccaaacgatcgttgtcattttaaaaaaaaaa

SEQ ID NO: 528759 - DNA, 542 bp, Homo sapiens
  misc_feature (6)..(6): n is a, c, g, or t
  misc_feature (11)..(11): n is a, c, g, or t
  misc_feature (13)..(13): n is a, c, g, or t
  misc_feature (18)..(18): n is a, c, g, or t
  misc_feature (22)..(22): n is a, c, g, or t
  misc_feature (25)..(25): n is a, c, g, or t
  misc_feature (27)..(27): n is a, c, g, or t
  misc_feature (30)..(30): n is a, c, g, or t
  misc_feature (40)..(40): n is a, c, g, or t
  misc_feature (45)..(45): n is a, c, g, or t
  misc_feature (50)..(50): n is a, c, g, or t
  misc_feature (73)..(73): n is a, c, g, or t
  misc_feature (80)..(80): n is a, c, g, or t
  misc_feature (85)..(85): n is a, c, g, or t
  misc_feature (117)..(117): n is a, c, g, or t
  misc_feature (133)..(133): n is a, c, g, or t
  misc_feature (145)..(145): n is a, c, g, or t
  misc_feature (147)..(147): n is a, c, g, or t
  misc_feature (155)..(155): n is a, c, g, or t
  misc_feature (157)..(157): n is a, c, g, or t
  misc_feature (188)..(190): n is a, c, g, or t
  misc_feature (207)..(207): n is a, c, g, or t
  misc_feature (223)..(223): n is a, c, g, or t
  misc_feature (232)..(232): n is a, c, g, or t
  misc_feature (240)..(240): n is a, c, g, or t
  misc_feature (244)..(244): n is a, c, g, or t
  misc_feature (250)..(250): n is a, c, g, or t
  misc_feature (254)..(254): n is a, c, g, or t
  misc_feature (263)..(263): n is a, c, g, or t
  misc_feature (265)..(265): n is a, c, g, or t
  misc_feature (300)..(300): n is a, c, g, or t
  misc_feature (304)..(304): n is a, c, g, or t
  misc_feature (312)..(312): n is a, c, g, or t
  misc_feature (320)..(320): n is a, c, g, or t
  misc_feature (330)..(330): n is a, c, g, or t
  misc_feature (348)..(348): n is a, c, g, or t
  misc_feature (356)..(356): n is a, c, g, or t
  misc_feature (362)..(362): n is a, c, g, or t
  misc_feature (402)..(402): n is a, c, g, or t
  misc_feature (408)..(408): n is a, c, g, or t
  misc_feature (447)..(447): n is a, c, g, or t
  misc_feature (452)..(452): n is a, c, g, or t
  misc_feature (456)..(456): n is a, c, g, or t
  misc_feature (474)..(474): n is a, c, g, or t
  misc_feature (541)..(541): n is a, c, g, or t
taaaancagcnanttttnaaanaancnaancccaaaaaanaaaanagggngtagcagttgccttaatggtganaaaattntaaanaaaaactttttcttcccccaaaaacccgagtnaaaggaagcgtttcanaaaaaggaaaananatttgaancnattttttaaaaaacaccccgaaaacaaacannnttgttgtcgtttaaaanggtccccaaaaacccntacccccanccaacccnccangtttancaantcaaaatcnanaactttcttgacccaaaaaattttgtaggaaaaanttcncttttcanaaattcancacgcaaggntcatttttcttggttttnttgctgancttgcngaacttcccaacaaaggctgagggaggaagcttgcatgantcttangagttcttctgaggcactttgactgtgacagttttcacntcagngtangcccgccgcccgtccccncccaacccccggccaccccccgacaacttgtagccaccaaagggggactgggctccaaacacatcana

SEQ ID NO: 528760 - DNA, 1758 bp, Homo sapiens
  misc_feature (28)..(28): n is a, c, g, or t
gaagggtctgaggtcgtcgtcggtgtgngagcagatcctgaagccagaactccaccccggcgcccgcgccatgcggcgggagaggcatcacgtggggcaaggtggtgtccctgtatgcggtggccgcggggctggccgtggactgtgtgaggcaggcccagcctgccatggtccacgccctcgtggactgcctgggggagttcgtgcgcaagaccctggcaacctggctgcggagacgcggcggatggactgatgtcctcaagtgtgtggtcagcacagaccctggcctccgctcccactggctggtggctgcactctgcagcttcggccgcttcctgaaggctgccttcttcgtgctgctgccagagagatgagctgcccacctggcagtggccgcagcctggccctctgggcccaacgcaggaggccctcagcacccgaacacatcttcctcctccccacccgagcctggagcactctaaccctcggagaccccctaagccccgttcctccgcagacccaggccctccggaaggggtgagtggggaggggctttcctgagcctggagctgggctttggggcagcctgcgaccctccccgcttgtgtcccttctcctgtgatctctgtgttttcccttttctttctggggccaggaagtcagggtcaactcccaggcctcagatgcaggggcccagaacacctgctctcacctgagccccaggtgaaggggcccgggaacacctgctctcacctgagccccaggtgaaggggcccgggaacacctgctctcacctgaaccccaggtgaaggggcccgggaacacctgctctcacctgagccccaggtgaaggggcccggaacacctgctctcacctgagccccaggtgaaggggcccgggaacacctgctctcacctgagccccaggtgaaggggcccgggaacacctgctctcacctgaaccccaggtgaaggggcccggaacacctgctctcacctgagccccaggtgaaggggcccggaacacctgctctcacctgagccccaggtgaaggggcccgggaacacctgctctcacctgagcccctggtgaaggggcccggaacacttgctctcacctgagccccaggtgaaggggcccggaacacctcctctcacctgagccccaggtgaaggggcccggaacacctcctgtcacctgagccccaggtgaaggggcccgggaacacctctcacctgaacccgggggtcccatcccaggaagaagggccatctcaggacatgagtcctcaggggccctgcacattcaatctgaaggtgaccctggcctggctgaagctggaagagctgtggggactcagcctgtaaacagagcgtaaggttcacatgctggttgcttaatccgtttctggaggaagagtatgacacccacacacagccttcccttgacgcctacatttctaggcacatgtgaggcatctttcctggagccccgagccagccctgtccctccccagtgcagcatggcactcaggagatacaggctggacatggggcagtcgttctggggaggcctggcctagcagccacccacctgagccctcccggccaggcttcgtgctggggtgggccatgtgccaggacaggagggtcccggcggaaagccagccccggactcatcgtgacattgagatcccactggagggtaggggtggtaataaacttctccaaacgatcgttgtcattttaaaaaaaaaa

SEQ ID NO: 528761 - DNA, 148 bp, Homo sapiens
cagggactgaacagagcaccatatttcctccagctgtcagaacaacctttttatgcatttatctttctatttactttatttgaagatggagtttcactccttattgcccagagctggatgtgcaagtggctgtgcatctcatgctaaa

SEQ ID NO: 528762 - DNA, 1481 bp, Homo sapiens
  misc_feature (28)..(28): n is a, c, g, or t
gaagggtctgaggtcgtcgtcggtgtgngagcagatcctgaagccagaactccaccccggcgcccgcgccatgcggcgggagaggcatcacgtggggcaaggtggtgtccctgtatgcggtggccgcggggctggccgtggactgtgtgaggcaggcccagcctgccatggtccacgccctcgtggactgcctgggggagttcgtgcgcaagaccctggcaacctggctgcggagacgcggcggatggactgatgtcctcaagtgtgtggtcagcacagaccctggcctccgctcccactggctggtggctgcactctgcagcttcggccgcttcctgaaggctgccttcttcgtgctgctgccagagagatgagctgcccacctggcagtggccgcagcctggccctctgggcccaacgcaggaggccctcagcacccgaacacatcttcctcctccccacccgagcctggagcactctaaccctcggagaccccctaagccccgttcctccgcagacccaggccctccggaaggggtgagtggggaggggctttcctgagcctggagctgggctttggggcagcctgcgaccctccccgcttgtgtcccttctcctgtgatctctgtgttttcccttttctttctggggccaggaagtcagggtcaactcccaggcctcagatgcaggggcccagaacacctgctctcacctgagccccaggtgaaggggcccgggaacacctgctctcacctgagccccaggtgaaggggcccgggaacacctgctctcacctgaaccccaggtgaaggggcccgggaacacctgctctcacctgagccccaggtgaaggggcccggaacacctgctctcacctgagccccaggtgaaggggcccgggaacacctgctctcacctgagccccaggtgaaggggcccgggaacacctgctctcacctgaaccccaggtgaaggggcccggaacacctgctctcacctgagccccaggtgaaggggcccggaacacctgctctcacctgagccccaggtgaaggggcccgggaacacctgctctcacctgagcccctggtgaaggggcccggaacacttgctctcacctgagccccaggtgaaggggcccggaacacctcctctcacctgagccccaggtgaaggggcccggaacacctcctgtcacctgagccccaggtgaaggggcccgggaacacctctcacctgaacccgggggtcccatcccaggaagaagggccatctcaggacatgagtcctcaggggccctgcacattcaatctgaaggtgaccctggcctggctgaagctggaagagctgtggggactcagcctgtaaacagagcgtaaggttcacatgctggttgcttaatccgtttctggaggaagagtatgacacccactggagggtaggggtggtaatacttctcccgatcgctgtcattttagacg

SEQ ID NO: 528763 - DNA, 178 bp, Homo sapiens
aaagttttgccccgtttttgagcaaaaacttcaatttcaaaataaaggttttcaggggttcccttaagtgtttccccatccccccccgacgggatttttttactatcagatttttggaaatgtaaaaccctttttgtgtaactttttttgatattaaacttgatttttgagcctgtta

SEQ ID NO: 528764 - DNA, 537 bp, Homo sapiens
  misc_feature (34)..(34): n is a, c, g, or t
  misc_feature (57)..(57): n is a, c, g, or t
  misc_feature (88)..(88): n is a, c, g, or t
  misc_feature (105)..(105): n is a, c, g, or t
  misc_feature (144)..(144): n is a, c, g, or t
  misc_feature (186)..(186): n is a, c, g, or t
  misc_feature (250)..(250): n is a, c, g, or t
  misc_feature (306)..(306): n is a, c, g, or t
  misc_feature (341)..(341): n is a, c, g, or t
  misc_feature (385)..(385): n is a, c, g, or t
  misc_feature (445)..(445): n is a, c, g, or t
  misc_feature (454)..(454): n is a, c, g, or t
atcggaccgcgtgagctggggctggggaaggcanaatatgcacctactggggtggangggacccaaaactcccaatgggagctggcangaagtcctgggaacacnccatgaaaggatcctaccaggaaagcggctctagggcanaacataaattacgaaggtcctcccaaggagcgcggacctgantgggaatgagtgacccgcgtgcaatctcgaccctgacaggacaggactggcctcagccgaccangctcaattctttccattcctgatatttgacggaaggaggcacccagttccttgaangaactgaggggcatggaaggaacaaaggtacttangctcataagggccaccaggcatccgttaacaagggaaacaaaangacgcccatctatgcctgtacccaagcgttagtcatactttccaccagaagtggggacancaccctcanggcacaggaatggccctctctggcctctctggccccgtggcctccaggaactcaccttgtctgaaagacttcctcccgggaaa

SEQ ID NO: 528765 - DNA, 239 bp, Homo sapiens
ccttatgagaatctaatgcctgatgatcggaagtggaagtttcattctgaaaccagccccagaccccgtccgtggaaaacttgtcttccacaaaaccagtccctggtggcaaagaggttggggactgctggtttaaaggagctggcacctccccctctctggcttgctctgacgatgtgacaggcctgcgcctcctgttgctcctgtgttgagtggaagcttgctgaggtctccccaga

SEQ ID NO: 528766 - DNA, 326 bp, Homo sapiens
cactgatggcggacgttgctcagcgtgtcttccacgtacttttggatctcagcgatcagtagggggaaacgagcttttttcagtgcagaggggtcgctgccggcctccttggcaacgttgttctgacttacgggcgtccccttcggcagtcgttcgggcttgttgctcttcagccgctcgaacgctgcgcgatactgctcgccggcactcattcgcttagccgggtcagcggattcatgtttgccggatgacatggcgataattctccacactacgtttctgggcttccaacgaagtccttagcggactgtctacctcggtagcgg

SEQ ID NO: 528767 - DNA, 440 bp, Homo sapiens
tatagccgtcgttacagactgctgccgagcgggaggtggcgactgtggactctgggcgcgtttgactttcagccatggtcttatgattgggcagcttccgtccggttgctgccccctctgccccttgggcatacgcccagtggagcttggacctgactcatagctctctacagtcgacaaaaggaaaatgtttcagtttgggtaaatcagccacagctggagccagggagaggcccatgggctggtgacttttcagggtggtggtgtttgttcagcgtgttgttttgctctgtgactttggagagtgcatcaaaggctcggcggacgcccacttgccgaggagccacggccctggctggtggccaggcaagcacctcccaggtaggcgtcaggggaagcatccaaactagtaaataaaacggcttctggcagtgacgttc

SEQ ID NO: 528768 - DNA, 239 bp, Homo sapiens
agttgtgaggtgatctagaggatcccggacggagatgtctgaggtgggaggactcgtgggcccaggagctggacgttgcagtgagccgagatggtcccgctgcactctgtgtttttaacaaagaaaatggatcaaaacaaagtgaaatgtcattggattggtgtcatctggttggatgactttttttttttttttttttttttttttttttttttttttttttttttttgtgtggggtg

SEQ ID NO: 528769 - DNA, 999 bp, Homo sapiens
  misc_feature (32)..(32): n is a, c, g, or t
tccggcgggggggcgagaggaaacagcagtgngtatgccccaacatcgcgctaggtgactggcacatgtccatcagtgattactccgaccatacagaggatgccgctgtacaaaacgctggacgacccgcccatgtggtggggcaagatattaagtgggacataaaaacgcggcggtaaagaatctgccccccacgcggcgcaggtcgtggccctgctgaaacccccggcggattgttcccaacagagaagcgcccgtgaacgctcgctctggcccccccccccccttggtccccgcccctgacgaacctctcgccctggccgcaagacggctagaccaacgcgctctggtttcgggaagagtgcaaagaggcccgccaacaccaggggtgtttcacaacccgcggtggaaacaaacaaatgggccgccttggggaacacgcagtactaggtggccgccacaaggagccctgtcacaacacaagccaacaccgcctcagacggaatagtgaaagagccgatgacccgcagtgaaaagagatgtttgaacagcccatcatgggcttcaacacaaagacgccagcggcccacaggttcacccctaatatcccggcgagtgggaatcgcgcataacacaggggaccccgcctcccacaaggatcgccgtctgttccacgcgcccggttcttgacaaacaccggcagcaccgtgtgacaggtaggcacccgcgcaagcatgcgggctccggggaagacgaactcaaagaaacaccggggggagacaagacaggggctcggggaataaaagaccggagccccttgacatctccgggacggccaccgcgcgcaagacttagcccactgcggctgtgcccagcggggaagagcaaagaggcgctgcaacgacctgtgttaatgtcgatgagaaccagcgcgctccggcccgtgcctgaagatagaaaggtttaaaaaacttccctaaaaaacgagcaaaaaaaaca

SEQ ID NO: 528770 - DNA, 425 bp, Homo sapiens
gaattacctgacgataaagcaacaaaagcagtctggaaccatgtgacattaaagacctgaaccccccacctcatcttgggacaattctaagggctacctgagttccacatattatcaaggactcagctgaatcttttgagtcttgctctgttgcctaggctgaagtgaatgagtgttatctcggctcgccacaacctctgccttccaggttcaagcgattctcttgcctcagcctcccgagtagctggaactataggtcatctaggggaaaacagaagtatgaggattgagacttcttctgaaaatcagtgagtgtctctctgcagtggttacagaaatgctctagcatggactccctcctgtaaactggctctgctgctccagcagtgacgaaaagcactcaatttggtttctcttggaagaga

SEQ ID NO: 528771 - DNA, 684 bp, Homo sapiens
tcaaactcctgacctcaggtgatccgcccaccttagcctccaaaagtgctgggattacaggcatgagccactgtatccagcctcatgcactcaggctagggtgaggacagccactgttgccaggccttgactagagatgcaggtgcaaggaccccaacccttcttacacctgcactcagcttcctgccagggtggaggataatggcagtcttggggggaagggttagaggaggagagtggcaggacctgggtgggggaaggttgaaggaacaggtggccaagaactcttctcaggctgagaagtgagaagaagggcagtgagaaggacagcgcttgagctgaaatgctaagtccctggcacatgctcgttatcccatcgtatttcactcacaaaacataaattcagagataacgtaagaatttcaagatagcagctgcagagcactaacccatgagcatggagcccttctgaatgtggggctcagggcaactgcactgactgcaagcccaggaagctagccctgggtctacaacatttcccacgaggaggagaaaatagaaggggactaagaaggaacacagggagcctcaatatgattgaggtaggtatggggccaggggaacagcattgggcagaaccaaatggcagaacctatgaccaggcccagaaggcaagagaacctt

SEQ ID NO: 528772 - DNA, 1110 bp, Homo sapiens
  misc_feature (8)..(9): n is a, c, g, or t
  misc_feature (13)..(13): n is a, c, g, or t
  misc_feature (27)..(28): n is a, c, g, or t
  misc_feature (32)..(32): n is a, c, g, or t
  misc_feature (45)..(45): n is a, c, g, or t
  misc_feature (64)..(64): n is a, c, g, or t
  misc_feature (110)..(110): n is a, c, g, or t
  misc_feature (192)..(192): n is a, c, g, or t
  misc_feature (204)..(204): n is a, c, g, or t
  misc_feature (216)..(216): n is a, c, g, or t
  misc_feature (252)..(252): n is a, c, g, or t
  misc_feature (260)..(260): n is a, c, g, or t
  misc_feature (266)..(266): n is a, c, g, or t
  misc_feature (274)..(274): n is a, c, g, or t
  misc_feature (278)..(278): n is a, c, g, or t
  misc_feature (280)..(280): n is a, c, g, or t
  misc_feature (284)..(285): n is a, c, g, or t
  misc_feature (292)..(292): n is a, c, g, or t
  misc_feature (294)..(294): n is a, c, g, or t
  misc_feature (328)..(328): n is a, c, g, or t
gggcgacnntggnggggagcggcgtcnnccangctattctaccgncagcaccttcgtgaagccnattttcagtcgggacatgaacgaggccaagcggagggtgcgcgagntctaccgcgcctggtatcgggaggtgccgaacactgtgcaccaattccagctggacatcactgtgaaaatgggacgggatanagtccgagaaangtttatgaagantgcccatgtcacagaccccaggtggttgatcttctngtcattangggaanagatcganctgnangaanncaattanangtatggaagcagcggacacatgtatgcggttctnccatgaaacagaagcgccaaggccaaaggatttcctatccaaagtttcctactgtttgggccagcgaatccatgacaagtcaattcacgtggaacacggatgcacggttgatacctaatttatagaagcaccaaagttaaaacctcagctatacaattggtcacttttgtgatacgaattccattgactggaaccaagttttcttgcaagacctcctatatttgcctgaagcaagtgggacctttgggtaatacacatcaaccttgttctttcccttttcttgaaatggtggtgtatagctgtgcaacttggattgaacttataatacgtcagaagcccttgcatgtcaagtacacaggaaggaagggagggccattctgtttccaaaacacttgtggaccattgggggcaattgaggcttggaagaacgttgtaagatgtaagtatgttctaatagggccatatgaattagaagactttcagatgtcaagggaacagaaatatgtaaggtttaggcagctcttacctgtacagagatcagggcaaggcagtaaaagggggcatcacggttgagcctgtccaagaattggggatagatattacgttgggttcttgacagaacaaggggcatgtgaacaagggttaggggaccggcgaatgtgtacaaagggacaggaccctataaagaaagttaagtactagtcagagcgacctagatatagaggcgccacaggtaccatttaccagggaaacagaaaatacagcgatggataggacacccg

SEQ ID NO: 528773 - DNA, 734 bp, Homo sapiens
  misc_feature (8)..(9): n is a, c, g, or t
  misc_feature (13)..(13): n is a, c, g, or t
  misc_feature (27)..(28): n is a, c, g, or t
  misc_feature (32)..(32): n is a, c, g, or t
  misc_feature (45)..(45): n is a, c, g, or t
  misc_feature (64)..(64): n is a, c, g, or t
  misc_feature (110)..(110): n is a, c, g, or t
  misc_feature (192)..(192): n is a, c, g, or t
  misc_feature (204)..(204): n is a, c, g, or t
  misc_feature (216)..(216): n is a, c, g, or t
  misc_feature (252)..(252): n is a, c, g, or t
  misc_feature (260)..(260): n is a, c, g, or t
  misc_feature (266)..(266): n is a, c, g, or t
  misc_feature (274)..(274): n is a, c, g, or t
  misc_feature (278)..(278): n is a, c, g, or t
  misc_feature (280)..(280): n is a, c, g, or t
  misc_feature (284)..(285): n is a, c, g, or t
  misc_feature (292)..(292): n is a, c, g, or t
  misc_feature (294)..(294): n is a, c, g, or t
  misc_feature (328)..(328): n is a, c, g, or t
gggcgacnntggnggggagcggcgtcnnccangctattctaccgncagcaccttcgtgaagccnattttcagtcgggacatgaacgaggccaagcggagggtgcgcgagntctaccgcgcctggtatcgggaggtgccgaacactgtgcaccaattccagctggacatcactgtgaaaatgggacgggatanagtccgagaaangtttatgaagantgcccatgtcacagaccccaggtggttgatcttctngtcattangggaanagatcganctgnangaanncaattanangtatggaagcagcggacacatgtatgcggttctnccatgaaacagaagcgccaaggccaaaggatttcctatccaagttctatgtgggccacgatccatgaagtcatccaggtggaaagatgcccgtgatactatttagagcacaaataaactcactatacagcgaaaaaaaaaaaataaaaagaaaacaaagtttgtggcgcgcgaccgggccacacagaaagggtttacaaacccatgggtgggggcggcgggcccaaatgggatgagaaactggtacagacgtgtccccaaggaaacccggcgccagaacagggctgggttctccaccaaaaagaccccgggggaacaggggttggaacaaccaagagggactggcacacacggggctcaccagggccgcagcatataccgacgccgaccggggtaggaaacagagg

SEQ ID NO: 528774 - DNA, 430 bp, Homo sapiens
  misc_feature (77)..(78): n is a, c, g, or t
  misc_feature (82)..(82): n is a, c, g, or t
  misc_feature (110)..(110): n is a, c, g, or t
  misc_feature (145)..(145): n is a, c, g, or t
  misc_feature (306)..(306): n is a, c, g, or t
  misc_feature (346)..(346): n is a, c, g, or t
ccgcgcgccccgagccccgcgccatgaagctcgccgccctcctggggatctgcgtggccctgtcctgcagctccgcnncgcntttcttagtgggctcggcaagcctgtgnccagcctgtcgctgcgctggagtcggcggcggagncggcgccgcgaccctggcaaccccctcggcaccctcaacccgctgaagctcctgctgagcagcctgggcatccccgtgaaccacctcatagagggctcccagaagtgtgtggctgagctgggtccccaggccgtgggggccgtcgaagctcgaaacggccntgctgggggccttgacagtgtttggctgagccgaagactnggagcatctacaccttgaggacaagacgctgcccacccgcgaggctggaaaaccccgccgcggggaaggaccgtccatcccctt

SEQ ID NO: 528775 - DNA, 185 bp, Homo sapiens
  misc_feature (6)..(6): n is a, c, g, or t
ccctgngtctccttaacactctgtctgacaagcagagtaacgccaatcggcggttgagtaggaggacactgaccacagcacgaggtcttgctcccagaccgcttcattcttcttagccgcaggacatctctacagctctggttatacttgatgatacttttcttcccgtttggcgttagtttttt

SEQ ID NO: 528776 - DNA, 325 bp, Homo sapiens
ccacatccccgtaccctccagccctggcaactaccatgacactttgtctctatgaatttgattattccaggaatttcatataagtggaatgacacagtatttgtctttttgttactggcttatttcactgagtataatgtcttcaaggtttatctatgtttatagcatgtatcagaatttgcttccctttgaaggctgaataatattccattgtatgtacatagcacatgttgtttatcctttcatctgtcaacgggcactggggtgtttccgctttttggctattgtgaaaaatgctactatgaacacgagtgtatgaatatca

SEQ ID NO: 528777 - DNA, 845 bp, Homo sapiens
  misc_feature (62)..(62): n is a, c, g, or t
  misc_feature (122)..(122): n is a, c, g, or t
  misc_feature (134)..(134): n is a, c, g, or t
  misc_feature (150)..(150): n is a, c, g, or t
  misc_feature (153)..(153): n is a, c, g, or t
  misc_feature (169)..(169): n is a, c, g, or t
  misc_feature (190)..(190): n is a, c, g, or t
  misc_feature (194)..(194): n is a, c, g, or t
  misc_feature (196)..(196): n is a, c, g, or t
  misc_feature (206)..(207): n is a, c, g, or t
  misc_feature (226)..(226): n is a, c, g, or t
  misc_feature (231)..(231): n is a, c, g, or t
  misc_feature (235)..(235): n is a, c, g, or t
  misc_feature (258)..(258): n is a, c, g, or t
  misc_feature (263)..(263): n is a, c, g, or t
  misc_feature (275)..(275): n is a, c, g, or t
  misc_feature (278)..(278): n is a, c, g, or t
  misc_feature (285)..(285): n is a, c, g, or t
  misc_feature (293)..(294): n is a, c, g, or t
  misc_feature (296)..(296): n is a, c, g, or t
  misc_feature (299)..(300): n is a, c, g, or t
  misc_feature (325)..(325): n is a, c, g, or t
  misc_feature (338)..(338): n is a, c, g, or t
  misc_feature (341)..(341): n is a, c, g, or t
  misc_feature (352)..(352): n is a, c, g, or t
  misc_feature (370)..(370): n is a, c, g, or t
  misc_feature (373)..(374): n is a, c, g, or t
  misc_feature (389)..(389): n is a, c, g, or t
  misc_feature (397)..(397): n is a, c, g, or t
  misc_feature (462)..(462): n is a, c, g, or t
  misc_feature (500)..(500): n is a, c, g, or t
  misc_feature (507)..(507): n is a, c, g, or t
  misc_feature (509)..(509): n is a, c, g, or t
  misc_feature (511)..(511): n is a, c, g, or t
  misc_feature (513)..(516): n is a, c, g, or t
  misc_feature (533)..(533): n is a, c, g, or t
  misc_feature (536)..(536): n is a, c, g, or t
  misc_feature (565)..(565): n is a, c, g, or t
  misc_feature (591)..(592): n is a, c, g, or t
  misc_feature (597)..(597): n is a, c, g, or t
  misc_feature (601)..(601): n is a, c, g, or t
  misc_feature (608)..(608): n is a, c, g, or t
  misc_feature (612)..(613): n is a, c, g, or t
  misc_feature (621)..(621): n is a, c, g, or t
  misc_feature (623)..(623): n is a, c, g, or t
  misc_feature (627)..(627): n is a, c, g, or t
  misc_feature (631)..(631): n is a, c, g, or t
  misc_feature (641)..(641): n is a, c, g, or t
  misc_feature (647)..(647): n is a, c, g, or t
  misc_feature (671)..(672): n is a, c, g, or t
  misc_feature (674)..(674): n is a, c, g, or t
  misc_feature (682)..(683): n is a, c, g, or t
  misc_feature (713)..(713): n is a, c, g, or t
  misc_feature (715)..(715): n is a, c, g, or t
  misc_feature (729)..(729): n is a, c, g, or t
  misc_feature (732)..(732): n is a, c, g, or t
  misc_feature (734)..(735): n is a, c, g, or t
  misc_feature (738)..(738): n is a, c, g, or t
  misc_feature (740)..(740): n is a, c, g, or t
  misc_feature (767)..(767): n is a, c, g, or t
  misc_feature (773)..(773): n is a, c, g, or t
  misc_feature (845)..(845): n is a, c, g, or t
agactgggctgttcagatccagtagtggatccggtgtgcagccagatggacccctttacccnctgtcagcaggtaaactgctgtacacccaggagactgacagtggtgataaggaaatggcngaagctatttcngaacttcgtttgagcngcnctgtaactggggatcnagattttgacagagaaaatcngccncnaaatatttcnnataatttatgttttttagnggggnagcntttgaggtcttatagtccccccnatgcntttccgaccccntcnccgagcnatataacnncntcnnaagaatgttccattccgtcccgtcnccccccgtttacntcnatggaattacnaatggggaataataagcntcnntgtgagaattgtacnaaaaaccnaccgaagtacccagaagaaacccgttttgccgaaaagaaagtagaaggagtttatactaatgccnggaagcaattgctcctttctgctagattccccatagtnctaaatnananannnnaaaaagattttcatccnggntgggcttggagtctctcgtaaaagtaaancagacactgtacgatttttccccccnntgccncccntttagcncccnnctctgtcncncgcnaccntgtaaagaantgcaangtgtggggagataaaagtttctcnncnggctctcnnttggcaatagtgggaacataagtgggctcncntgagagaagggccnccncnnccncnttatgtgaaaagtgagaacaccccccncgaaanttatcgggaacataacactaaaaagaaaaatgtgcctggtttgaaagcggctgatagtgaatcagcaggccn

SEQ ID NO: 528778 - DNA, 252 bp, Homo sapiens
agcccctgtgtcacagttgttaaatgttgtggtgtcgctccattggacctctttttccagctttccaccgttgcctgacgatcgatcttacaaaccagacgttagctgcttagatggccctggggaagcgtggacaagggacatgggagtgatctctatgatcatgcaccttcctgaacggaaccctagatacctgctgagtgcgaccggtcctggagtcctcagacccaccctatctactcttatctggcg

SEQ ID NO: 528779 - DNA, 101 bp, Homo sapiens
  misc_feature (22)..(22): n is a, c, g, or t
  misc_feature (97)..(97): n is a, c, g, or t
aatataaagaggaaatggctcntcaccttcataataccaagacctgctcaatttaagatggcccttgacattgaaatcgtacctacagaaagcttgnaagg

SEQ ID NO: 528780 - DNA, 298 bp, Homo sapiens
cgggcgcagcggactagcatcctctcacctcatcctcctgagtatcgggactacaggcatgcaccacggcacctggctcgcaaattattatttgcatgtaggtatccagtgtcccagcaccattggttgaaaatatgattccttcctcattttctggatcagcctaaccagaagtttatgaattttattaatgatttcaagcaatcatcctttcatatcaccaattatggtttttgtttttaatttgcatggatttctgcttttatctattatgtcctccatttggctggttccgctg

SEQ ID NO: 528781 - DNA, 136 bp, Homo sapiens
tgtttttttccaggtaggtggttagaaaaaagttattagtagtttgctttagagaaggaaatagccttacggtgggtggctttgaggtaagagtcatgtgcagtagtaagatgagtttgagcagatctggctttgc

SEQ ID NO: 528782 - DNA, 924 bp, Homo sapiens
tgtttttaaacgacgccagtttattttacgtcttatctatcacgcctgggttctcgattttcgtcactagggctccctccacctcagtgggtccgttaatggactcctgttcggggtatgttcccccagcctggaagaggattttgacagtttatgctatatcaacagcagtgaatgaagaggaggaggatgacgatgtagaagaagtagaacgaataggattaacgagtatagttaggatgatatacttttgtattgtagaggaatagagcgattaataggaatattctgaagaggaagattagaggagaatgaagagcttgtaggaagaatttgaggaagaagacgctgagtctcgaggaagaagcatgaagaggaggatgaggaggaggacataagtatctggaagagctggaagacttggagttgggcacacgcaggaggggaggtagaagaaggtccacctccacccccaaccctgcctccagctctgcctccccccgagtctcccccaaaggtgcagccagaaccgcgaacccgaacccgggctgcttttggaacgtggaggagccagggacggaggaggagcgtggggcagaaacagctcctacctggccctgaagcgctcccctcccagggagaggtggagagggaagggacaagcctacggcagggcccctccccaggagtttgtgaagaagacccctctgctccccaccaaccctgttggaagaggagactgaggatgggagcgacgagggcagcccccaccagagacacctgcagaagaagagatggagacagagacagagcgcgaagctctaccaggaaaaggcgcaggatgacacagctgccatgctgaccaaacttcatacgagtgtccccctgatgatgagaagccataatcccacagagccgactcat

SEQ ID NO: 528783 - DNA, 956 bp, Homo sapiens
ttttccttttccttgcctaattgttctcatacaaatttttagtaatatgttaagatagaagctgtaggcctgcctccaggtccatggctgggtgtgtctccttgcaggtctcttgataggaaggaccacttgtgtactgtagctgagaggagtttgagacaggttgcagaactgcttcagcatccttagtaagaccaagcttagtgtgccatgttttatctgcagccatgtctatgggctcttgagttggccacctgggtgaggccctgctttttccaaatatccctacttgatctttggctccactgaggtttcacaaccctagccaaaggaagcacctttctacttgtgttttctgtgagtttactacttaagatatcttacctaagtggaatcatacactgtcactttattagtatcttatttcacttaaaataatggctttaagatttatccttattgtagcatctgacaagatattttcatttgaagctaaggaatatttcattgtatgtataagccacatctttttaaatcattcatctattgaagggtgtttgagttttttcactttttggcttttgtaagtgatatagtttggatctgggtccccattcaaatctcatgtcaagttgcagtccctagtgttggaggtgggcctggtgggaggtgatgggatggtagggttggcttctcatgaatggttaacaccatcccctttggtactgtctttggcatagtgagtttgttctcctgagatctcattttttaaaagcatgtggcacctctcctttcactgtctcttgctcctgctcccactatgtgaggtgactcactctttgtttgctttctaccataattggaagctttttgaggcctctctagaaacagaagctgctatgcttcctgtacagcctgcagaaccacgagccaattaaacctttttctaaaaaacc

SEQ ID NO: 528784 - DNA, 173 bp, Homo sapiens
accatgacaagggtgctatttcaatgtgggcggctcaagcttagcgtgactaagtactgacactcacaatgccccaatacccggcttcaaacattctttctcatggctcccatctcaagcaatacccatgttatatactcagcatcctggatagcgacccaccctgcctcgtg

SEQ ID NO: 528785 - DNA, 1837 bp, Homo sapiens
taaagaacaggcaccgaagtacgcatttagcgaaatcttacgcgcacgtattactaaagcaatcacacatgtgttaggcgcattccttcccagtcatcgccgccattatttatgtccaatgggctcactatttggtcagccccattcatttattattcatcatttctcattctatatgcttcaaaaacagcagtactttccagtcaattgcacacatcaagcacacatcattattccattatcatattattgcacagcacacagtcatcaccagggcagtctcgtcatgtcacgtgctagtcatatatgtcaagtggtcatccagcagcataaacaaaacattcagtccaggcatgtgacagcacagtatataccacactacacctacgatataccagaccaattcacaacaaaatttacttgccagagtacgcgcaaaataccaagaagacggttcacaatagtagttcacggggaccagcagacgtggaacgctgactgggcacgacgactagacaattcacaggggaccaaacatcgtagacgacagaggacacatccacacaccgagcacacatcaccgtaaaattcaagacccggacacacgtagatgactagcagacctatggacaccatgcacacaagccgactacaaggaccccgataacgaaacccctacaatttcccaagcacggaccggtacgagaaaaagagcggacacagcaggacagcattccacgaccacaccacaacgtcgcaacacaaggagggatagggacctaacgccggtcaccacgcagtatgtcaacatataccacactcactcactacgcatccgacgacgacatgaaccagccgacgatcacaggcggcaacacacacagtcgcacaggcgccctatggatcaccgcgcaacacatccacaaagctcacaaacgaaaaacagaatcatactacacgcccaaactacccccccagatacactcggcgttcacacacaacacacacacccactggggaggcgcatccggtccacagacacgccggctagcatcaccacacacaggcacacacagggctgcgaacgaaggcgctaacttgcacgatgcgacaacaacgatgtcaccgaagtcagggacacatagcgacacgacactggtcacacagcacacaacgcgagtacacgaacaaccgcagcctcacgtgaagcgagagaaagtcagacccaacgtgccatcataacgaacgccgcatggagagcaccacgcgcgatactgttcacgcaagaacaacaacgagtcaaggcagcaggcacagccaatgggaggcccacaacacgatgggaaacacacactcaggacggaccaaccaccgagtacgtccacaagcggagaacacacgcgcccagagacgcatcacagcgaaccatctagccgcacggaatacaagagagattagaagtaactgccgaagacacagacgacacatactgaccagacagtgcaaccaagcgggcacacagcacaccaactgtcagcgcagaggccacagagcagtaagccatacacaggcaggtagcggacacagatccaacagcgaagagagtaagtcaacacagacgcagacaccaacggcccaagcatagatgcaaccgagtgactgagaaaccagccaacaaggagagacgcgccacctaacgaaccgacataggcggcagactcacacctgtcagcacaacgcacaagcacctcgcgtagacacagcaccagagccacgagatgacgagcaccaacaacaccctcagtgccaccaagcacacgagcacaagccaggagac

SEQ ID NO: 528786 - DNA, 974 bp, Homo sapiens
cctgttgctgcgcgaggcttaaggtttctgtcatgcaagatcgtcaattcagtttcgaattcttcccgcccaagacggcggaaggcgccgagaagctgcgcaacacgcgcgcgcagctttcgccgctcaagccgcgcttcatctccgtgacgttcggcgcgggcggcaccacgcaacagggcacgctcgacgccgtggtggaaatccagcgcgaaggcatcgaggcggcgccgcacctgtcgtgcgtggggtcgtcgcgcgagagcatccgcggcattctcaatacgtatcgcgaacacggcatccgccgcatcgtcgcgctgcgcggcgacatgccctctggcatgggcgagatcggtgaattccgcttcgccaacgagctggtcgagttcatccgccaggaaaccggcgaggcattccacatcgaggtggcggcgtatccggaataccacccgcagtcgcgctccgcccggcacgatctcgaaaacttcgcccgcaaggtgaaggccggtgcggactccgccatcacgcaatacttcttcaacgccgacgcgtatttccagtttgtcgacgacgcacgcaagctcggcgtggacgtgcccatcgtgcccggcatcatgccgatcacgaattcgtcgcagctgatgcgctttccgagatgtgcggtgcggaagtgccgcgctggatcgccaagcgccttgaaggcttggcgacgaccgtgaatcgatccgcgcgtcggctggacgtggtgacggccatgtgcgaccgctgctgcaggcgggcgccgggctgctttctaccgctccattgccggccgctctacgcgagcgatctggcagcggtctgggcttgtaaacgctgattgcggcaaggcgcagggggatcgtcctgggcggccgaccccgatccgctgattcgcctgggtgcttgacgaacctcccggtcgttcgcgccaaatcttggaaatccgggcc

SEQ ID NO: 528787 - DNA, 129 bp, Homo sapiens
gcagccaacaggatcaacatagagagagactatggcttggggtgagaatgtactgattacaaggtccacagacaattaagacacagaaacagatgggaagagggtgtccaacatcctgttggctggcga

SEQ ID NO: 528788 - DNA, 436 bp, Homo sapiens
atgtgtgcccatactatggaactacttatcataccatgaggaatgaaataattacatttgcagcaacctggaaggaattggagaccattattctaagtgaagtaactcaggaatggaaaaccaaacatcgtttgttctcactcctgagtgggagctaagctatgaggatgcaaagacataaagaatgatacagtggatttggaggactcagggaaaagggtgggagagggtgagggataaaagactacccattgggtacagtgtacactacttgggtgatgggcgcaccagaatctcagaaatcaccgctaaagaacttactcatgtaaccaaacaccacctgttcccctaaaacctatggaaataaataaatcaaaatttaaaatttataagaggaatagtatactacttgggcacacattatggagggggatcc

SEQ ID NO: 528789 - DNA, 587 bp, Homo sapiens
agcggagggtcggcctggggaaagtgaaagtttggctgaggtcctactcggcgcctgagcgcgtctccgcatcccgtggacagctggtgcggccctcggccggggcgcccagtccttgcacaggccagcgagcgacctgagcgagcgagggcggccgagtgcgcccggctgggacccactgcccgtacagaacggcagggcgccgacgggacggctggcaccgtcccactgacatagggcgtggggaggtccctgggtgcttgtgtcggttacctagtggtccatggagaagcagagaggtatcaaccggaggaggtgtcggagtcctgcacagcgcaccgatggattggagagtggacgactcttgcaagttctctagctaggcggctggtgtgacggtacgcagaaggcgagaccctacagtgccaacgattacatcgctggagtttgggagacgcaacggagaccagatgaaagaatgcccaggtgttgctgcaccctagaagaagagcatttctccctggtcgcaaggcgaacatggtgggagagacggcccatggcagcttgccagagcattaaaggaccca

SEQ ID NO: 528790 - DNA, 340 bp, Homo sapiens
gcgaagaagtggcgtagctcgtctgtgtgtcctcgtgtctggaagatgatatagaagtgctgttccacccaagggggtgagggttacccatggcaagcatgcagacgaccagcccaccccgggctctgcgtgcatgtccatcttggtcccttcatctcaatatcaccagctctgcagttgctccaaacttttgggtttaaccggaccctagtattgtatgagcctcatcttgatcctaagacgccccctctccctaacactcccgatttttctcacctctggaggacgtcccatcctctgataccataggtctcctctgatctctgcattactcctcctc

SEQ ID NO: 528791 - DNA, 1101 bp, Homo sapiens
ctgaagcctgaggaggtagtcatcaacctagaatatgaatctagatattaaaccttatttgtacaagctacctttagtaactaggcacatttcaccagatgtatcaacacacgttcaggtactgcagcagcatcattcatttcaactaagcacatatgttgaagtgttgagccagcaatatttaacacaattcgtgagggcacaacacattagatccataatgcacacatgcgtcacagttcaagagacgtagtttctggtcatgttcaggagatctacagaatgatatcagtcaaggatgaggagtgactctcgagaatgtacgagacctatgacgctttacctcccaagaccaggatggtagataggtaaagtcaagcatcttagtgtttgacgatgcgccacattataaaagtagaatccaggggaatattggatgatgcaaatgtaagtagatctcagaccagtgctcacttagggaaagaccatggattacaccactaagttcgatcatgctacttacctcaaaaaacttaagacctcgataatagagcagtatacattgaaggaacaccttagaatgaacgagactcccaaaggttagtcagtaagagagacgatagatgtacatctacaaagggaagaattagcaagaaactcataggtacttctgaaacagaacatttacaaggacactgattagaaagaaatacaagcactgaaaactgatcacatgaacaacatgggccaaccgacagacaccacgcacacacagcacaagacacaagccccaaagataacagcgaagacaagacaccagcacggaacaagagaacacaacacagaaatcagaaagaaacaagagcaaaaagcaagacgccacccaacagaaagagaaccaagggcactagcaagacagaccacgaaacaccgaaaaatatagacacaaaaaacaaaacaaaacaaacgcaaacaacaacacacggtaacaaagaaaaatagaagaacaacacagcaatcacacaacacaacacaaccaacaaaaacgacaaaagaagcacaaaacaacgaaagcacaaacgacatatacgaaaaaaaaaa

SEQ ID NO: 528792 - DNA, 151 bp, Homo sapiens
agctgtgtcatgtatgtgctgcgcatgagtgtgtgtgctgtgtgtgcatgtgtgtgctgtgtgttcgtgtgtgctgtgttcatgtgtgctgtgcatgcgtgtgtgctgtgtgcatgtgtgtgctgtgtgctgtgttcatgtgtgtgctgtg

SEQ ID NO: 528793 - DNA, 310 bp, Homo sapiens
ccccactccaccagttcccggttggcagccggagtttcctttttaccgcccctgtcaccccgtaggccacatggatagcacaggtgtcagacaagattccttcagatttcgagttgcccaccgggtggttttggtggtggtggtggtggttttctttttctttttttttttgaagacagccataaccccaggacatatttctgtagttttttatagtttttcatacattcataccataactttgttttttccttttttttgtttttaacttttaaaacaaaaataaacgatgataattttttctggtgga

SEQ ID NO: 528794 - DNA, 617 bp, Homo sapiens
gtcagtgatattgatctagcaacaggtaatatagctctttctttattatctgtacgctgtgccccatacgatcgtcctgatatgtggtagagtaacacctatatacgtgtgcttgcgtcctaatttaaaatactgtattcgcatgtcagatataatgtacataacgagttataacctcaaagttgctggagtcagggccccctgtgcttgcgacactaatacagagtgtgttcgcacttagccatgggctgggctcaagaacctgatacctgggttgatgtggattacctagaacccttcctgcagtattcatacagtgtatatattcttgttgttgtcattgcgtgtgtgtggttatgtgctgtgttcttaatgagaatcttgttttaaaatgtaactttctaacggttctaagcaccaacaatgttctcatattgtacgtggagtatatattatacaatagagaggtaccttaaacattcacacgtgcttatacttatacactcataagtactcctgagtacaagtggtcacctcccatagtattcatttggcttcgctgtcaaaaagtcattattctgtgcagtcgtggccctgggaaggggacaatcacgaag

SEQ ID NO: 528795 - DNA, 269 bp, Homo sapiens
actggtactaagagatggtcctgggctgaaagatggttatggggtgggcagagatggtgagctgatttggtggtttttatccttgatagaaaccagcaggtgtggccaggcgcagtggcgtcacgcctgcaatcccagcactttgggaggccgaggcgggtggatcacgaggtcaggagatcgagaccatcctggctaacatggtgaaacccagcctctacaacaaatataaaaaattagccgggcgtggtggcgggcacctgtagttg

SEQ ID NO: 528796 - DNA, 634 bp, Homo sapiens
agtcctctaaacccttagttattacgctcaatgcaagcactctccccccgaccaatcaacaccaaaatcgcggcagattgaatgaaatgaaatcgccagccccactaaaccacctaccacgaccacccacgtaagatacaccccccgcagcccgaccaacctgcctgccaataaacccccaactcaaacccggccctcaacacgccgacacaatcacctccaccagggaataacctacagaccccctaaaagaaactacgaactaatgctataatacaccttaaaaaacaccttagaagtcacctcagaagacccgctcctggacttcgttgacaggaaatacaccccggatcactacttcaacgaaagagacaaggcaagattcaaacactcgaccaaaggcttccaccaattctgcggatacgaccccttcaaatatcactaggaaaaaaaacgagatgacccaacttagatcggcccgactctcacagcggccggccggaacatagcgcaaaaaaggacaaagtccatcgcccgggccgtcatccgcccagagaccattccgaaaacaaaagcggaagcgacatgcccgtgatgaaaggccctgacatccggaaaaacttctagagcccat

SEQ ID NO: 528797 - DNA, 914 bp, Homo sapiens
ttaacggctagtggaggctagtggtgatccgttgagatgatgggagagtgtgctctttaacttcggagagagatgcgctctcgtgtatctcgtcagcggcctgccataaggtctgcatggtgcctgttgtctgggtttgggggtctgagtaccatagcggggcatgcgggagtcgtggttgacggaaaggagtatccccaaggggaggcgccatgtgtaagtacgccacgcaggagccatcggaggaggcgtaacgtgacgagacacgcctagaaagaacgcccgggctctggtagtagtggacagcgaaggagcgcgtgattgagtagatctgtcagaaggaaggcattcctcctacagatggcataggctagagtcagccttggcttgatgcccgaggaattcatctttctagagttgggtgtccaacctccggcttcgagaacccctctggtacgataccagcttgctggaatgaacctgtccagcaagcaatggatggaaccatcgtgctggtgggtgttcaggggaagcaggtattcccggatgggtcgccctctcaacaaaacacaggccctttgctacccggggacagtgcctacaggttacgttgtctgcagaaactctacgtcgaaaatcttgcaaagagagagagagctgagtaaggaacagctagtagcatttcttgagaacgtattagaaacttcgtgggaaactaacgggagaaccttcttcacggtgccttggaacactatgttaattgcctggatctggtaaacaagaggctaccttatggctgctccagcatggagtgtgttttcatcctgttttgaacacctaagcagaatacgaaaatggtgggtaacaggtattggtgaagaagaccggaacttcggaagatggttaactccccc

SEQ ID NO: 528798 - DNA, 733 bp, Homo sapiens
cgcaggttgcaatctgtggtgccgctgggaggatcgggaaccgtgacgtgaagtcttgacgcgcaggtctccatatgaccatttgcatatcagattatacgtagctttccgacctcggatgtaggaatcagagacaatccactgaatgggacaaggccgtagttcaaaggtccagaaattgcttcacttgagtggagattgtcataactggttgactcggggtggttcacgagagtcacgctacgcgctatggctagcccatgtatttctacctgcaggttctctcttgctcgtggagtggtacagacagtgtaggttccgggcctacttggacggaaagcggcctgcacccagagaatgggtggttcctctcacgattgaagtagtcaatactacagtagatcacacaccaggaatccggggaatttttaaatttcgggtggtggtctcaccaagaaaagcctttatcagtaagattccataattctaaattttaatttttaaacccacgattaatgttacgtcaacattgcggtcttggtaacggtataacagcggggtaatctccctgatttcggggggtccagtcttggccaatagaaagttttgtgatggattgggcaaaaaataaaaaacccccggggaaacaaagcggttttggggggcacaccccccctggagaagggttggaaaccttgggttggcaaggggccccaggacgagaactggtaac

SEQ ID NO: 528799 - DNA, 274 bp, Homo sapiens
tcactgtttatgctaggccggtcttgaactcctgggctcaagtgattctaccacctatgactcctaaatagtaggcgatcacaggtgtgagacagatgcacctggccgaaatagctcaactatctgaacaaacaaatctgaatctatctgtcattcttagcgtcactggtctggctaacagaattaacatacaaggttgccacacctagttctgaccagctttatgtctttcattccagtattccaccaaagtatgtttacctgcaaatgtagg

SEQ ID NO: 528800 - DNA, 345 bp, Homo sapiens
ataaacaggatcaaattagaaaagaagaattcaaattttccctcttcatacatcatacttttacatagaacctaaagaccagcaaaaaactcttaggactgataaacaaattcagtaaatttgcctgaaacagaatcacatacaaaatttatttgcatttttgtaaaccaataatgaaaatcatcaagaaagcaatcacatttacaatatctacacaacaaaataaaatactggaaataaatttaaccaaggagatgaaagatctctacaacagaaactacaaaacactgatgaaaaggaactgaagcgaatacacacaaaaaatggacaaacatcccatactca

SEQ ID NO: 528801 - DNA, 252 bp, Homo sapiens
  misc_feature (5)..(5): n is a, c, g, or t
tttancttgattggaggagggggatgatctaaaacactctatacgccggcttctatagacttgaggttaatcgtgtgaccgacggtggctggcacgacattgaccaaccctggggttcgtatagcttcattaaactttcgtttattgctaaaggctaatcactgctgttacccgtgagggtgtggctaggctaagcgttttgagctgcatagctgcgtgcttgatgcttgtcccttttgaatcagtttcatg

SEQ ID NO: 528802 - DNA, 113 bp, Homo sapiens
accaattgatatgaacccttaacatgatctaacttttttattagacagttccattctgttgcccaggctagagtgcagtggcacgatcacagttcactgcagactcaaatttc

SEQ ID NO: 528803 - DNA, 301 bp, Homo sapiens
attctttttttggggggaggggtatttgcttttttatcttccgggcaaaatttcccttttatttttttgaggggttatgttaacttccctctatcccgcttataaaaaaattttcccccaaaaaaacttgttggcttgatgttttatcccttttttaaggaagggtgaaaaatccctattggagcccctgtttttaatgtaaaggttaaacttgaaaaaaaatttttaatcccggggccaaaattcattttttaaccccatgggttagaaaattataaaaaataaaataattttagaaaga

SEQ ID NO: 528804 - DNA, 321 bp, Homo sapiens
  misc_feature (139)..(139): n is a, c, g, or t
  misc_feature (288)..(288): n is a, c, g, or t
  misc_feature (316)..(316): n is a, c, g, or t
  misc_feature (318)..(318): n is a, c, g, or t
ggcgcacttctggagcgccccaagctttctaacgccatggccaggacgctgcaccggcacattatgatggagcgggagcgcaagcggcaggaggaagaagaggtggataagatgatggaacagaagcgcgcctgggtgnagaagtgcgcctgggtgcagaagtgcgcctgggtgcagaagtgcgcctgggtgcagaagtgcgcctgggtgcagaagtgcgcctgggtgcagaagtgcgcctgggtgcagaagtgcgcctgggtgcagaagtgcgcctgggtgcagaangtgcgcctgggtgcagaagtgcgcctgntngaa

SEQ ID NO: 528805 - DNA, 245 bp, Homo sapiens
  misc_feature (212)..(212): n is a, c, g, or t
  misc_feature (240)..(240): n is a, c, g, or t
  misc_feature (242)..(242): n is a, c, g, or t
gaaatctatctgctctgtgacaatgtcctcctttgctttgtcaatcatgcttgcgcgttcaagagaagtgcgcctgggtgcagaagtgcgcctgggtgcagaagtgcgcctgggtgcagaagtgcgcctgggtgcagaagtgcgcctgggtgcagaagtgcgcctgggtgcagaagtgcgcctgggtgcagaagtgcgcctgggtgcagaangtgcgcctgggtgcagaagtgcgcctgntngaa

SEQ ID NO: 528806 - DNA, 341 bp, Homo sapiens
  misc_feature (308)..(308): n is a, c, g, or t
  misc_feature (336)..(336): n is a, c, g, or t
  misc_feature (338)..(338): n is a, c, g, or t
tgagctcggcacctttgcaccaggcgcacttctaagctgagaacactgtggaaatcaaccttccaacccctgcgtggttgtgtgtatgtgtcctgtgcatgagaagtgcgcctgggtgctgttcctgcaacccaccagtgatgggtgaagccaccccgaagaagtgcgcctgggtgcagaagtgcgcctgggtgcagaagtgcgcctgggtgcagaagtgcgcctgggtgcagaagtgcgcctgggtgcagaagtgcgcctgggtgcagaagtgcgcctgggtgcagaagtgcgcctgggtgcagaangtgcgcctgggtgcagaagtgcgcctgntngaa

SEQ ID NO: 528807 - DNA, 310 bp, Homo sapiens
  misc_feature (277)..(277): n is a, c, g, or t
  misc_feature (305)..(305): n is a, c, g, or t
  misc_feature (307)..(307): n is a, c, g, or t
tatgtcgtttctctgccaacgcacattctctgagacccatgtcatcgccaacacaactatgcgcagatcccagaacaagattgtaagttttgcctaaattccacgtggagtccagcagggtcccatccagaagtgcgcctgggtgcagaagtgcgcctgggtgcagaagtgcgcctgggtgcagaagtgcgcctgggtgcagaagtgcgcctgggtgcagaagtgcgcctgggtgcagaagtgcgcctgggtgcagaagtgcgcctgggtgcagaangtgcgcctgggtgcagaagtgcgcctgntngaa

SEQ ID NO: 528808 - DNA, 234 bp, Homo sapiens
  misc_feature (201)..(201): n is a, c, g, or t
  misc_feature (229)..(229): n is a, c, g, or t
  misc_feature (231)..(231): n is a, c, g, or t
actggtccggttgtacatggatgcgccctctacattgcagaggcctgtgtgcagaagtgcgcctgggtgcagaagtgcgcctgggtgcagaagtgcgcctgggtgcagaagtgcgcctgggtgcagaagtgcgcctgggtgcagaagtgcgcctgggtgcagaagtgcgcctgggtgcagaagtgcgcctgggtgcagaangtgcgcctgggtgcagaagtgcgcctgntngaa

SEQ ID NO: 528809 - DNA, 403 bp, Homo sapiens
cccccaaaatgaatgtaaaggcaaagaacaggaaatgattcttagggaagctgcttttacctcttcagcttcatcttcttgatcccattcctatctgtcagttccttctcggcatatcttattggccatgttttcgaaacttaagttatagaaaaacagaaaaagtttatttttgctagcaagaataaattctttataaagaaattttaaaaattcactcttagcatgaagtgagataaaaaacatctctgggtttattatcagggaaaaaaaagcattctggaaactgctttaatgagaactttacataggtgctgttaggctcccagtgttacaaatcaattaaaggctttttccaggaggcagaagaagattcctagggaacaccagcagtcttgaagaa

SEQ ID NO: 528810 - DNA, 181 bp, Homo sapiens
agtgtgcaggtgagtgcgtaagtacaatatagtgatatctgaaatctaacagcatctccaaggttaagaaaaatccttatggcactcacttggcaagatatcccacaggcatgctcttaatgggagaaaaacaaaggccttagatccaaatattgtaaaggtaatttcttaaggttttttg

SEQ ID NO: 528811 - DNA, 518 bp, Homo sapiens
gcagttcggttttgctttcactgtgacaaagcagcatcaaattcaatgcaatgtctcacaatagctgcgctctccttcttccaagcacagagattctctctctacgccacaaagccactgccatgggatggggacaggtggcatcagcaactcaagactgtcttccctaccctcttcattgcctctttcaacagtatgaagttaaaatcaggtactgtgagtgctcatccaattgttggttcttatgatgaaggtgcttttttgtgtgtagatagttgttaaattttatgttcctgtgggggatggggagatggagccttctattcagccatcttgctccacctcctacaacggcagtccccaaccccctggccatggactggtactggtctgtggcctgttaggaaccacgctgcacagcaggaggtgagcagcagacaagcaagtgaagcttcatctgtatttacagccactacccatttctcattaccgcctgagctgcacctcccatcatatca

SEQ ID NO: 528812 - DNA, 900 bp, Homo sapiens
tctgctacaaccagacaagtaataacatgttagatacacaataatataatgtataaacagcgtattctcactcactctattacgtcgacgggttaatactccgtatcatacacgtatttttgttttatttctccaacctaacttgttcgctacgccacccctttggtctatgcaattataggttattaccatctcgccgtgttatattctgccacaatcggcacaaattgtgccaaaataggcatcacataggccccacttatgaagaacaagcttttcccctggggttactaccctatcgttgttcctgcgcgcccctaatttctaagaaggggtattgtgtgtccgatgacacaaccagagagtcttttttataagggcgccccccctctgcaatggttgataatcatcctccagaattctgtgggtctcctcgtacacctcctccccgtttctggtgtgtgcaccgcaaattgttcggccgcttctttgcgcaaaggtacattttgctaaaggaacactttagagaattcttaattcttctaaaagcacggtcgtctatctcataatgatcgtcgcctggaatttgttttcccccttgtattgtccccctccgggctttttttatattcccgggcgcctaaaatttctgtgaattgtgagatccgggttttaaaattttctaaagagagatttttggcataaaaattctccccgttgtacgcctatttaatcacagaacgtcaatcagcccgcctccctatattatcaccctcgcgcgtctcagtccacctacgggtagttccctccttccctcctcatccctgcttcacatgtgagaactagtcatcggacaaggagtttttgcccgagcctttaaaaaacattgttaacccccca

SEQ ID NO: 528813 - DNA, 510 bp, Homo sapiens
  misc_feature (231)..(231): n is a, c, g, or t
ccggtgtctcactcttgtcgcccaggctggaatcagcggcgcgatctcgagcttaccgcaaggtcctgcctcctgtgggttcaagcgattttcctgcctcagcctcccgagtaactgggactaccagtgcacaccactgtgcctggctaatttttggtattttaagtagacaaggtttcaccatgtaggccaggctggtcttgaactcctgatctcaggtgatccacccgnctcggcctcccaaagtgctgggattactggcgtgagccaccgtgcccggtggcttgtatactttgaacggagagtcgtgaacggcagtgatcctatgtcacatgtgatcttggctctcaggggacatttggcatttctagagattgtgtggttgtcacaagtcaagggggacagactgttggcatacagggggtagaggcttggtgacgctgttgaacacccagaacagggaagtacgctggcatagatagagccatcgttgggggaaacccctgctct

SEQ ID NO: 528814 - DNA, 224 bp, Homo sapiens
  misc_feature (1)..(1): n is a, c, g, or t
nctagaggaaacccagcaaatgtgacagacagttcgtctttcaagcagagtgggggagttgtagaaacaggttggaaaaggaaaaaaaaagggggattttaagccgtttgcaaatggtccccagtaactaaaagacggggaacccctttgactggggcactggagggttattttggggcaggaggtgaaaagccagagaagggaggtacaaatgccaggaaacg

SEQ ID NO: 528815 - DNA, 230 bp, Homo sapiens
  misc_feature (73)..(73): n is a, c, g, or t
cgaggatccaggtaccatggacgattcacagcccctggccactggccatttccagtggtagggagcacactgntcacattcgagacccaccacgttgagcagacaaaggcagcctccactctcctcgtcactcaacatgtacctccgtcccccaggatgttgtagttatagcaatagcagccctgcggttgacgtaggtgagtcggtgacgcccgatttggatcgggtgt

SEQ ID NO: 528816 - DNA, 183 bp, Homo sapiens
tggcttgcttgtgggggttggaccaggtatttaaaagatataccgggattttagaaattaggcagtctaaactatgataactaaggatggacacctgggtgataaaattatataagaaatgggcgggtgtggtgggtcacaactggtattccaggacttttagacaggcgaaggtgggttgga

SEQ ID NO: 528817 - DNA, 154 bp, Homo sapiens
  misc_feature (112)..(112): n is a, c, g, or t
taccttttcaaatatcttacttatcaactttactctatccacagagatacaatcacttttaaaaagtgttcgatttcaggtactagactagaagtagaaaatgtctggcttnatggtaaactgaacccgttggtttcttctaagggtaatttta

SEQ ID NO: 528818 - DNA, 129 bp, Homo sapiens
ccagaggagcttataatacacccggttagctcatggaagtagcctaagtgcaagaggagcagcaagatagggagggcggctctataccctacctgacataccctagaccgccccgatgcatactacaga

SEQ ID NO: 528819 - DNA, 195 bp, Homo sapiens
tacgacagtgaggcagaatatgttcgcggatatagacacgatccgcagggcctcctcgccaagacagctagagagactcaataagaagataaacgaaaatcaaggagatgagacccaaggtcagcatgcacctcaacgtcggtaccgccgcaacttcaattaccgacgcagacgcccagaaaagcctaaaccaca

SEQ ID NO: 528820 - DNA, 537 bp, Homo sapiens
tgcccccattactttgtcacagcacaccaacaccagtcacagagctgggtctagcaggttgtcccaccactgctactgccattacccatttcacaccagctgcccaggagcctgagaagttgcccacatgtctggcccactgctgccactgctagcatctgagcaagtcacctgaaggcccaataattggccctccaagacccactatcgctgttgtcagtttaagccactctgtgggccctagcacaggctcattcaacccaccgctgccatcactagggcctgaagactggcccacctagcatcttagttcccagccaaacttcaccacagccttcactaataagtgcaccttaagtcaatgaggaagtcacagataccactgatgttgtatactgccaaataaatcatacagggatcacactactataggcactcaaaatcaaagccaaagcacccaactcaacaaacaacacgtaaaatcttcaggaaaaaaatcctcccctatgaaagcaatttcaaaaatggaagaagtga

SEQ ID NO: 528821 - DNA, 159 bp, Homo sapiens
gaacatcatgctgccagactattgcagatatcatccgacatgtttgggaccagtcatgatgagatgctttggaccaatggaggcatgtgatgaccaatgatggcatgcattcttcgagagatcaggtccagtcgacatcagtgacagtgatatgatgct

SEQ ID NO: 528822 - DNA, 875 bp, Homo sapiens
  misc_feature (858)..(858): n is a, c, g, or t
gcctctcaagctcggagttgttggtggggttacactgcgtggcttcaacatgcgtatcgcaaaaagtgtatttctgtctcgggacccatctatcctggacacggcatgatgttcgtgccgcaacgatgaataggtgttcagatttgcaaatctaaatgtcataataaacttgaataaagaagcgcaatcctcgtcaagagtaaggtggaccaaagtattccggaaagcagggtggtaaagagcttacagtggataattcatttgaatttgagacttacgtagaaatgaagcctatcaaatatcagggagagttatggaataaaactattgatgcgatgaagagagttgaatgaaatcaaacagaagcggcaagctaaatttataatgaaagattgaagaacaataaggagctacgagaaagttcaggatatcaaagaagtcaagcaaaagataccatcttatggagaccctcttgtaggcatagggataatgtctggccagagataatggtacagcagttgcaagaggatgtggacatggaagatgtccttaaaaatctctgtaaccatttctttgatgttcgttttgaaaagtgcctttgtatattggaactgtaaattatttatttgttacataaggtccttaatgacaagcgattagaagactttttgtgattggctctaatagatcgaattacgggtagatgctccggggaacttactgtacagtatagtagctggatttatggtcctagaagatgggggaagggggatggtatggagggttttaaaggaaatggggggaaaaaattgggaattgggggggggggagaacattggggaaatatgtgtaaagagngacatagcgtggagtgc

SEQ ID NO: 528823 - DNA, 143 bp, Homo sapiens
acaagatgtttaagatgagtgacaagatattactctgtgtgttggagaggcttgagacactttacagtttgcagaatatattcagaaaacgtccacctttatagatgcgaatgaattattttcttccacggcagcagctaact

SEQ ID NO: 528824 - DNA, 778 bp, Homo sapiens
gaatatagatacaagtacaccatcttgaagaatttggagttcttcagggcaattcaacatgacctctatttgtttcgttcttttctgtattccatgacagtgtttctggtaattgtgatctctagattgtgctagtgttcaatgaacatcattctattcatgatggtgacgccatgattcatgataacttcaatgtttctttcatcttgtagtagctaagaatagtatgtcgtaagtatgcttatcttgtcaagggcttcgatttattgtatggtgatgatgtgacactattcaacgggtcagaaactggagcagtgtaggcagtatagagcaagtatagaatatcgtcttaggaagttagcaaagatagtacgtagtgtccctacttgatcccatgaggatcagtagcgtatccagagacaccccgagatgaactgtcttgaaagccattggactaggtatacgacagcgcgtacatatacactgttgttttgcactatatcatactatagcctgatgtagtaacagtgtctatgttatataatgcagggcacagtcatagagataagagagataactggcgatatagaacaattattaacagctgcactgtagataatagtgatgtgccatgtgatcatgtcttgtctgcgtttctcttcggaaagtatcttatggtcactggtactcgaccgtgtaatcaggactgtggttgaccgtgagtaaccgagaacaagaaagcaagaatcgtggataagggggagatactctatatgag

SEQ ID NO: 528825 - DNA, 444 bp, Homo sapiens
ccggtgtcgctatgtgcccccaatacagcactgaggctaggaggcaagtccctcaatgctccacaaaaggctgagaccttcttcatgacagagtgagtatagaacataacgaaacatgcccaaggcttaaatacagttgctagaaggtcatcatgtccaacaaatgaagattgtcctccttttctttgaatattaattacattgttacaacatttttgtgggttttttcgtttggtgtagcgtcattatgtactgtatgtgtgtgtacaacaacaggaaaagtccatggcaaggtgtcctgtgttagcagagtttggctgtcatctggtccgacagttggaggatctccgtgtggtacaggtcctaggtgtgattcaccgctgttgatctcgctgttgttcagtctcaggcgtggtgacagcatacaaggagaacgaagtccag

SEQ ID NO: 528826 - DNA, 715 bp, Homo sapiens
  misc_feature (492)..(492): n is a, c, g, or t
  misc_feature (619)..(619): n is a, c, g, or t
cctcaaatatactgggcacacagcaagccctacctgtaatgtggtaggtctcactcctatacagaacatggcatgatacaaattctaaaaagaagatgtctgatagcaccttgattgactgtctgattagaggtacttttaatggaataggcagaaaatgcaaatatctaatgaacatgctggagaggttcaccatcggcaagcatttcattttcttttcttcaaaaattaattacagagtgtggctgcgtttctgtggattcagtgtttctaattctttcttcaattagtcctttaattttcttcccaaggagacacatggatatacaacacgtaacacagtgacattttcttgtcactgaaagaaatttcaaagttcattttcaaattcaaagaaaaggaaggctggagtggattggaaaagaggctacaggctaagaacttttaagagccctagagagagtggggtgctggtgtcactgttatttcatngattttccttgtccacagccattttcaagactcatatttcagggccttagatggtttgtctcatatcactgctgtctgtagcaacaaccactctgtagaaggctcccagggaaagaccataagtctnccttgttttgttgttgtttttggaacacagagtctcactctgttgaccaggttggaatgcagtggtgtgatcttggttcactgcaactcttgtccc

SEQ ID NO: 528827 - DNA, 212 bp, Homo sapiens
cagcctcccaaagtatgaggattacaggtgtgagccaccgtgcctagcccgaaatttttctttttgaaatattcgggttcacttgagggtgacagctctttttgtatagtgctgcaagaattctgggtaattgacatttcggggttatcctcagaaactacccagagtgttattgttgcctggttcagttgcttggaggtgggaggagagga

SEQ ID NO: 528828 - DNA, 236 bp, Homo sapiens
  misc_feature (95)..(95): n is a, c, g, or t
tacatatttacgcccgctctatccgactactatagggaaagctggtatccccctgcaggtaaccggtcggatttcccgggtccgacccagcgcgnccccaaaattagcggggcttggtggcaaatccctgtagtcccaaatacctctggaggtacgaggggggaggatcacttgaacccggaggtcgaggctgcaggtgccctaggatcacacccactgtactccagcctgtgtct

SEQ ID NO: 528829 - DNA, 392 bp, Homo sapiens
atcaggtatgtttgataaagctgttatcaagaaaactacaacgcagtacctttcctgtgtgttgggaccctgatccgacgtgcattcttatcaccccacatggctgacctccacagctgactctccttaccttgtgtccttcttctcagtattctttgagatatccatttcattttggtctgctccttttgcagcatctgaaccttttacctcatctttttcagaatcaggctctatttttattttttttggacttcgtgaacattgtcttttatctgactcatccatattttcatccatattatttttggttccttctaacgactttctgtaattcacattagtattgcctggcgatttaggaacgaacctgtaaacattagttttactaa

SEQ ID NO: 528830 - DNA, 372 bp, Homo sapiens
aggcggattacttatcgcgttagcttgggcgctgaggttcgacccccaacacctagtaatcatcgtttacagcgtggcgtctcagggtatctaatcctgtttgcttgccgcgctttcgcgttctgcgtcagtatctgtccagtaagctggcttccccatcggcattcctacaaatatctacgaatttcacctctacacttgtagttccgcttacctctccagtactctagttatacagtttccaacgcaatacagagttgagccctgcattttcacatcagacttatatggggacctagacgcgctttacgaacaatccctccggatagcgctcgtgacatacgtattatcgagactgctggcacgtattta

SEQ ID NO: 528831 - DNA, 1254 bp, Homo sapiens
  misc_feature (52)..(52): n is a, c, g, or t
  misc_feature (63)..(63): n is a, c, g, or t
  misc_feature (72)..(72): n is a, c, g, or t
  misc_feature (81)..(81): n is a, c, g, or t
  misc_feature (83)..(83): n is a, c, g, or t
  misc_feature (87)..(87): n is a, c, g, or t
  misc_feature (107)..(107): n is a, c, g, or t
  misc_feature (134)..(134): n is a, c, g, or t
  misc_feature (137)..(137): n is a, c, g, or t
  misc_feature (139)..(140): n is a, c, g, or t
gagagcttccccatgtagtccctcaccattgggtcggccttcatctgaaacnagagcttttcnctctcctcnaactttgtngnaggntccactcagactctcacctntgcttccagggggaggaggaagaggcncangnngcccagggaatcctctggaccatcagattaccaatgaaagaggagaatcaagctgtgataggttaaccgatcctcatagggctccctctgacactgggtctctgtcacctccatgggaccaggaccgtaggatgatgtttcctccgccaggacaatcatatcctgattcagcccttcctccacaaaggcaagacagattttgttctaattctggtagactgtctggaccagcagaactcagaagttttaatatgccttctttggataaaatggatgggtcaatgccttcagaaatggaatccagtagaaatgataccaaagatgatcttggtaatttaaatgtgcctgattcatctctccctgctgaaaatgaagccactggccctggctttgttcctccacctcttgctccaatcagaggtccattgtttccagtggatgcaagaggcccattcttgagaagaggacctcctttccccccacctcctccaggagccatgtttggagcttctcgagattattttccaccaggggatttcccaggtccaccacctgctccatttgcaatgagaaatgtctatccaccgaggggttttcctccttaccttcccccaagacctggatttttccccccacccccacattctgaaggtagaagtgagttcccctcaggtttgattccaccttcaaatgagcctgctactgaacatccagaaccacagcaagaaacctgacaatatttttgctctcttcaaaagtaattttgactgatctcattttcagtttaagtaactgctgttacttaagtgattacacttttgctcaaattgaagcttaatggaattataattctcaggatagtattttgtaaataaagatgatttaaatatgaaaaaaaagagaaattatttcaattttattttagacggtataactatttcaatttgattaatccactattatataaacaatagtgggagttttatatatgtaatctttcaggtggggaggctttaaattctgaagtctgtgtcttaaaaacaagaactgtatttactgtggttgtggacaaatgtgaaagtaactttatgcttaaataaattatagttgattc

SEQ ID NO: 528832 - DNA, 1182 bp, Homo sapiens
  misc_feature (52)..(52): n is a, c, g, or t
  misc_feature (63)..(63): n is a, c, g, or t
  misc_feature (72)..(72): n is a, c, g, or t
  misc_feature (81)..(81): n is a, c, g, or t
  misc_feature (83)..(83): n is a, c, g, or t
  misc_feature (87)..(87): n is a, c, g, or t
  misc_feature (107)..(107): n is a, c, g, or t
  misc_feature (134)..(134): n is a, c, g, or t
  misc_feature (137)..(137): n is a, c, g, or t
  misc_feature (139)..(140): n is a, c, g, or t
gagagcttccccatgtagtccctcaccattgggtcggccttcatctgaaacnagagcttttcnctctcctcnaactttgtngnaggntccactcagactctcacctntgcttccagggggaggaggaagaggcncangnngcccagggaatcctctggaccatcagattaccaatgaaagaggagaatcaagctgtgataggttaaccgatcctcatagggctccctctgacactgggtctctgtcacctccatgggaccaggaccgtaggatgatgtttcctccgccaggacaatcatatcctgattcagcccttcctccacaaaggcaagacagattttgttctaattctggtagactgtctggaccagcagaactcagaagttttaatatgccttctttggataaaatggatgggtcaatgccttcagaaatggaatccagtagaaatgataccaaagatgatcttggtaatttaaatgtgcctgattcatctctccctgctgaaaatgaagccactggccctggctttgttcctccacctcttgctccaatcagaggtccattgtttccagtggatgcaagaggcccattcttgagaagaggacctcctttccccccacctcctccaggagccatgtttggagcttctcgagattattttcctccttaccttcccccaagacctggatttttccccccacccccacattctgaaggtagaagtgagttcccctcaggtttgattccaccttcaaatgagcctgctactgaacatccagaaccacagcaagaaacctgacaatatttttgctctcttcaaaagtaattttgactgatctcattttcagtttaagtaactgctgttacttaagtgattacacttttgctcaaattgaagcttaatggaattataattctcaggatagtattttgtaaataaagatgatttaaatatgaaaaaaaagagaaattatttcaattttattttagacggtataactatttcaatttgattaatccactattatataaacaatagtgggagttttatatatgtaatctttcaggtggggaggctttaaattctgaagtctgtgtcttaaaaacaagaactgtatttactgtggttgtggacaaatgtgaaagtaactttatgcttaaataaattatagttgattc

SEQ ID NO: 528833 - DNA, 200 bp, Homo sapiens
cgtagtacccaagtaactgggactacaggcatgcacctccacgccctgctaatttttatatttttagtagggatggctttcaccatgctggccttaagtgatccgtccgccttggcctccaaagtgctgggatttcaggcaagcgtcaccacacccgacccctcactagtatttcagcatttgggtactacgctttggca

SEQ ID NO: 528834 - DNA, 130 bp, Homo sapiens
tgttctgttctgcccaggcctactgtactgatttattcatatctgctttgtggtgagggaagggacgactaatgtctcaaacagatgtggtgtaccctagctctgctctcctgtcttgctgtaaagctcc

SEQ ID NO: 528835 - DNA, 157 bp, Homo sapiens
tccaggttaaaaattaatggaacaaatggaattatcacaagaagagtgggaattagcttttccaggcatggaaacttaacaaaggagggtaaaaaccgtaaacagttaaaaatccatttatgtggctttcaaagggggagttttttgggaccttaac

SEQ ID NO: 528836 - DNA, 259 bp, Homo sapiens
tggggcgactctagagttatcccactgtcgtacttgatatgtgggtgtgtgtgggaagtggaagagaagggggtagggcataaactgagtcaagaattaataaacaccaggtacagtggctcatgtctataatcccagcaccttgagaggttgaggcgtgtggatcacttgagctcaggagtttgagacatggcaaaatcctgtctctacaaaaaataccaaagtagccaggtgttggtggtgcagtcctgtagtccta

SEQ ID NO: 528837 - DNA, 343 bp, Homo sapiens
  misc_feature (200)..(200): n is a, c, g, or t
  misc_feature (217)..(217): n is a, c, g, or t
  misc_feature (219)..(219): n is a, c, g, or t
  misc_feature (221)..(222): n is a, c, g, or t
  misc_feature (229)..(229): n is a, c, g, or t
  misc_feature (262)..(262): n is a, c, g, or t
  misc_feature (342)..(342): n is a, c, g, or t
atattatactaagaaaagatacgactttattttctggtagatagaaataaatagctatatccatgtactgtagtttttcttcaacatcaatgttcattgtaatgttactgatcatgcattgttgaggtggtctgaatgttctgacattaacagttttccatgaaaacgttttattgtgtttttaatttatttattaaganggattctcagatatttntntnnccccccncccccccctacttgaggtcttttgacatgtggnaagtgaatttgaatgaaaatttaagcattgtttgcttattgttccaagacattgtcaataaaagcatttaagttgaatgng

SEQ ID NO: 528838 - DNA, 402 bp, Homo sapiens
  misc_feature (11)..(11): n is a, c, g, or t
  misc_feature (31)..(31): n is a, c, g, or t
  misc_feature (52)..(52): n is a, c, g, or t
  misc_feature (60)..(60): n is a, c, g, or t
  misc_feature (125)..(125): n is a, c, g, or t
  misc_feature (138)..(138): n is a, c, g, or t
ccagaatgganaattggcaagggaaaagggncctgaccccctctccggcctnccccctanttaattaaataaagtaaacccctcatacctttcaaccctcttccctctcctaatttcaaggcatncctacatatgcangggggatattttaaaaatgaagtatgcacaagttatttctttttgggaacttctgacatttgatgaactgactttctttaacggcttagctgcatgtttatcccaagggtatattgtaaacatgaatgaaatctctgtttcagagatttgatgttcactgttaatttatgttctgtgagtggtatttttcttatttttttattttaattgacaaataaaaatggtatgtatttatcatgtaaaacatgacctttttaaaatata

SEQ ID NO: 528839 - DNA, 170 bp, Homo sapiens
aaatagcgagggggtgcggtgagtacatttgcagctgaggagttgggcggaccgtcgagttgctatgagctgcttttaggttcgtgtttttaacatacggtgacatgaagctttacacgtgtactgtgaacgtgtgtcatccgcgtctttcagctccactagctccgcta

SEQ ID NO: 528840 - DNA, 884 bp, Homo sapiens
atgtgaacatgagatcatgtatcaccccccataataccagtgtgaaagtatgcggcctggtgatgcgtggctcactatcctgtagtcccagcccttagtggctgccgcgtctggcaatatcctctgagttcctgagttatggagaccagcctggtcagaactggctgaaacccgatgcatcttactcataagatacagcataaaaagagcaacaacccgtaatatgtagcataggtaggtgggcaagattccataggtagagtgcgacaaacctaccgagtccgtggtgatagctggttgtccaaagatagaatcttagttcaagctttacaattgtgcccacagaaccctctaaagtgccccgttgttaacttctaacttgtaaagatccacagggaggaacagctcttttgtgacactagagaaaacaaacctgtgtagagagagtacaaaaagttgtaacacccatagtaggcctaaaagcagccaccaattaatgaaagcgttcaagggttgcaacaccactacctaaaaaatcccaaacatataactgaactcctcacacccaatttggaccaaatctatcacccctatagaagaactaaatgttagtataacgtaacattgaaaaacatttctcctccgcataagcctggcgtcagattaacacactgaactgacaattaacagcccaatatctacaatcaacacaagtcattattaccctcactgtcaaccacacaggattgctcatagggacggtcaaccagtacaggactcggaatctacccgccgttccaaaaattccttctagctacgtttgggccgcgccgggcacttgttaggcggccctacggagggaaaacatgccaaggcgtaggccg

SEQ ID NO: 528841 - DNA, 802 bp, Homo sapiens
  misc_feature (575)..(575): n is a, c, g, or t
ggcagatgctgtggtcaggaactaggcatgctttctggcaatgcactcaccagacaaaaaaaaaaaaaaaaaaaaaaaaaaaaaaaaaaaaaaaaaaaaaaaaaaaaaaaaaaaaaaaaaaaaaaaaaaaaaaaaaaaaaaaaaaaaaggggggggcgccgcaatctccccgggggggcttccccccccttttttaaaggtggcccccaaatgagtggagtcttttttaataagaaccagcacgcgcgcgccgctcttataaaacacgactgggtgcggagtagccaacaagcagctacacgccttggacttctgttggggacgacagacccccctccatggtggggggcggagcaaccacaagctgcgcgagcacaaccaccatccacgacagtgatttaataccacccctgaagcggtatcttaaatataaactatctgtggacggtggtcaaatgtgtgtggcaaccacacccgtgacgatttcattttcgctgccggtcggcgggagcaacacgttttggcctactcgagtagttagtattttatctccttacagctctcattattattanccagcggagcggggctatttattaataaatatattacctactcatacacagtaatagcgtacataaaccagaacacagcatgacactatacacacgacgatagcaccctcgtaacagtcgactaatcgaacgtcgatccagcgaaaggcgagcagcatctaacaccgatccgctagcacgacaagtcacgaaacgatatcaccagccactacgtgtaactcagcata

SEQ ID NO: 528842 - DNA, 744 bp, Homo sapiens
tatcgggtgcaggcactgtaggtgtaggagtcaatagggttcagttgctttggagtcacaatagaaactgctttgtgtaatgaggctacaagccccagcccatgtttaaagaggttcaaagttcaagtgtgtgtattaaatgggatacagtctgttgtataaacattgctgctttgctaacttgtggagtccagggagcagaatttggctaacctaaaattttgggtttatgtgctattttgaaaggttttagagctgccagtcttagcgtcagttttgttttaccctaaaacaggggtgtttaacttgcctgcagctgtttaaagcgattgattcttggtgcatctagaattaccccttgtattagtgcttttagacacctgggttagactgtggccaactcggttaccccagcctaatctgaacctgtggccatggtggttttttaggaaaccagggcctggccctggtaccccgcggagagagctgacatgggtcaaggagaccatcgagcctggagcacctgtctagtcattttgtggccttggatatgcacgggcagaggcaaatgtgggaggttgccccttgacaaggctgcaacctcgaggagaagtgccagaggagctcgttgactgtaagtgccagagtgcacctcatgtaacgtggagcaggttagcagtatcctgcagtaagcgatggctgccacagtgtcaagacggctgagtgtagaaggggcaccctgga

SEQ ID NO: 528843 - DNA, 1157 bp, Homo sapiens
ggtcttacttcagagggaaagctggggtgttatgcgttcgagtgtaccgtaccgtcgatcacgttacacaagaaagtatcaggtgacgcaagatggacactgcaattcgacagatcgcctgcgcaggctcatcctgtgagccacccatgagacacacacacgaacttggcacacagactcagcggtgcacaggactatcggatggccttcgagcggcgacagacggcgaaggcgacgctcgcatggccttcacgggagacacgcgtggacggacaaccagtaaccacttcaagtagcgacaggcggcgcacaggtcgagtatgatggtcccgagaggacagcgatcaggaggtggcaagcaaaagtaacagatcccaataaccaaacggccagaagtcggagtttcagctaaaggcattctggtcgaataattcagcaaatagaagcatttcatatacgcaaaaagagaatgatgtttggcgaatatagaactgcaacattattgtttccatgcagaagttaaaagccacattgtgcctccttatggagccacttgccaagtccctgtctctttcagacacagacaagcattcattttaaattatttcaatctgagtcattatcatttataacctttatggttacttcttcatcagtttttccttttgaaaggtgtatgaattcattacattggattctaatgtattatctgtacgattagaagactaacatcaagcatgtactctgactatacttcgtgagtcagctgtacttatactcaaaagtgtccttaatagtgtcttccgtgaaactaatactaaggaagtgaacagcctctggaggacaattgagcttggaagtcaggttcacagcaactgcgacaagtacaatgggactatacaggctctgagactaaacgagacaggtcaaacagattcacaagtcgggtgaacaaagcaacaccgggaatgccagacggacaagtcatggagagcggaaccacaaatgtcgtggaactacgcaaccaataaggccagccacgaaactcaagcgatcaacgaacagagcataacactaggagagaacaagaagaagagacagaacaaacaagaccaacagtggcgtggcttacccagcgatcacacaccaatcaacga

SEQ ID NO: 528844 - DNA, 416 bp, Homo sapiens
ctcaataggtccagggggaatctatcatccgggccactatcgacttcatctactctaagctctaactacagaaagattacactatgatatagttcaatgaacttgatatactatccccgaagatattcactatgtttcctacataattccagcaacactcagcacacgggctgtcatccaaaatcataagaatctgttttaagatttaagcacatgtgggccaggcacggtggctaccgcactataattccagcacttagggcggcagcgatgggtggcatcacctgaggtcaggcagttcgcagcacagcctggccaacatggtgcaaacccgtctctactaaaaaaaaaaacgcaaaaattcagtgggcgtggtgatgggcgcctgtactcccagatactcgggaggctgagga

SEQ ID NO: 528845 - DNA, 96 bp, Homo sapiens
ctccctcccctcccccacaccagaaaggggtatgttgggggattggaagcacttgaactttttattttattaaaaccttgttataagcagcaaaaa

SEQ ID NO: 528846 - DNA, 679 bp, Homo sapiens
  misc_feature (641)..(641): n is a, c, g, or t
tctgagagaaggcagcaccttaggatattatgtgtgtctcacttacatatataaatgaattcccttttgaggtagatgtattttagtcaataagtcatcttctctcaatagtaagccaacaactttcctggaaatctagcaaaacaacagttctatgaccagccttatgttttgttgcatgtgtgcataaaaaatgcagattgactctttccttttctgttttagaattggttccaaacagtaaagccgccagaaaaaacagacaaactcttaggaacaacaatgcccattatgtgtggagtagaagctgccagactttgattactggccagagattaacccctttggtgtcttaggggggaaaatgccaagtctgaatccagacatttccaggattttacagtcattcatggtatgagaccaggcgatttataatgacttgtgcaaaaaaaaaagactattgggagaaggaagtgcaagtcaaaggccacggctccttgcttcctgaattctgccatgactaattccagcaagcggacatagacctgatcacctctgcttttccctttgctagcctgcctggtcatggatgagaagcacgctgctcttgctaccttcatgtggtggtttgggtcctgaancatccacctattttcagaataaactaaaataatttctt

SEQ ID NO: 528847 - DNA, 342 bp, Homo sapiens
tagtacattgccaaatgtcttgtcaccttcctttaaacataagacataaattttatccttagaaagtgtatcctggcccattgcagtggctcatgccctgtaatccccaacactctgggaggccgaggtgggctgatcacttgaggcccaggagttcgagaaccagaactggccaacatggcaaaaccctatctctactgaaaatatagaaattaactgggcatggtgcgcgcgcctgtgattccagctactcaggagactgaggcacaagaattgcttcaacccgggaggcataggttgcattgagctgagattgcaccactgcactgtgacagagtgata

SEQ ID NO: 528848 - DNA, 597 bp, Homo sapiens
gtgatctagaggatccagtagagatgagcaaggttgagattggaggagagtgtagtatggagaatgtgttctggaaacatttattctagacataatcagggacactcacagttttggagataatctttggagttctaaagaagggatggggaatcgcctgagggctaagattaagtgaggttggaacctgggggacagaagggacttcttggtggctggctcggtggttggattggtcaatggacgggttgtggaggggacccaaggttgaaacattgcaggccaggaagagcttgggtttgcacaagacagaggccacaacaaggaaatgtggcttgggggcagtggtagggaatggcccacggtgtgaacttggaggctactaaactatggggaggggggcggggcaagggccttcgaaaaaggagggagagggtttgaggcaagttttaaggcaagtggtccggtcaaccacccaagtgccaaggtggcccctggccccaaccccaaggagtgggcaggcagggacatgggcaggggggagctcgggatggattttctgcctgccttccatttgccttgcatccccttcattaa

SEQ ID NO: 528849 - DNA, 340 bp, Homo sapiens
ggcttaaaaggctactgtctcactccgagtcgcgatataatgttacggcatatctacctattaacctggtagaatatattcatcagttcaagatggttcagtcccaactggaggataaaattctaaattactttggatcacctattctcatctatcttcttttgaacaccccataaaaccaagatgcaataagcataaaacaatgataatacatcaatcacatactattaaatataaaaagtaggcttctctgacccaggtttcaaaaaattctcattgtggcatttatagcaatgtcgcataacagggcagaatgaagaaagatgatctaaatctcagc

SEQ ID NO: 528850 - DNA, 402 bp, Homo sapiens
tgaccggagaaacacgcccacactacttcgacacgtctcaacccaggatgcggaatacggcctccgaggaggacgctgcagctgccgcgggccatatatggagaacacggccggctccatggatgaacacactgcagctctccgaacagcaggatacccaacggcacgcttgggaaaaagacctagtggcagcttggggaaaagacccagcgctccgtttagaagcaactgtgtatcagccaactgagatggcctgtcgtgctcaacggtgggaccatcccaactgctccgccaagtcacacaggaagacacctttggtgaaagactttaagttccagagaatcagaatttctcttactgatttgcctccctggctgtgtctttcttgagggagacatcgga

SEQ ID NO: 528851 - DNA, 1413 bp, Homo sapiens
tggtcttggtacaaaatttaataaaagggtcttaaaagagcaaaatccaaactccaaaatacagctgtgccaaggaaacccttgtttattgcttggtgggagacgtggcgtgggcgcatgtggaagggcgggactcgtggcttcccacccttatcggttacgtgaaagtggggggtgggtgggcagatactctctcattctttgtgggttctccaaaagtgcctcacggtggctcgaggcgaggggctttcttatagggcgccaatctttaccgaggtggggctcccgagggccaagcaatgatatctttcacctttgaagtgcccaagaaacaaccgctgtttttgacgcaacaggtgtggccgcacaggcaggtgttcaacgcgttagaatagttataaacagggggctcttcccgggtggtgagactcatatcggggcacaatccaaaaaaactttcagtggatattatagcgcctttgtgttccctcggaagtttatcccacaaaaacaccgcgacaaaaaccctttcgaaaggcccttgtgggggccccacgagtattccttccagggatgtagacaccgcggaaaggcacacacaatagcggagggcgcctatcgagagaacaaggaaaaggcacctaacaaaaggagagttgtggaaaagcgccagaaaggaactctccgggccaggagtgccacaggggtggacacacaaaaagacccctacaaagggggggcccacagcatatacacaagcaaaataaagaggcctacaaaaaaagagtgccgcccctcgggggaaaaacgccacaaaaacgcctcttccggtagaacccaaacagggaaagaaaaaggtcgccaggaaaaatttccgacgggagccctatattatttacccatagataaacccattgtgttggtgtcccgggggtgggggcaaaacacaaaagtgagctcttgggggaccctggggatggggaggtaaacatgcagacaactacataaactccgaagaagagtccgcatattgagaggcaacagataccccgaagataaaaacaacactataaccagacacaaccctaaaaaagaatactccacaatgaaagaaaaaacttcccccaatcaggaggagaaaaagggcgaggcccaaatgcgagggtgggccagcagagggaagtgaacacccccaggagacaaacacgatcacccgcgaatagtggagggggacccataggtagcaagcgggagaatcatatcaagacaagaatgaactaaaggaagaatacacactgaagaagagctaatagaagaaaagatagttatccagagtatagcagggagcacaaaaaaacacgtggggggaaaacaacaggaagaatcacagagacgaagacgtgaggaacaaga

SEQ ID NO: 528852 - DNA, 159 bp, Homo sapiens
cggattccggcatgatttccccaacattcctggaaaaagtcttccactggtgagcgaaaatatgcatgctgaatactatgacaacctccctcactacaattcctggtattaaagtactgtatgatttttgtgattggatgatacacataattccctact

SEQ ID NO: 528853 - DNA, 153 bp, Homo sapiens
ggcagattttgggatctctgctggccagtttgtggcagtgttctgggataagtaatccccagtggaggctctgaaaggtctcggtggataagctcaagcgttaaccgcaatgagggccgcgtgtctgtggataacatcaagcagctgtagcaa

SEQ ID NO: 528854 - DNA, 103 bp, Homo sapiens
  misc_feature (70)..(70): n is a, c, g, or t
ggtaccaatcctgaagttgccaaatgtggagcaggctgcagagacttgaagcctggggttgtgtgcctcncttttgttttgttttttttgagacagagtcttg

SEQ ID NO: 528855 - DNA, 558 bp, Homo sapiens
gaaatgtgcgctgtcaacgaagagccactggacagctggctcctgaacacgttgccacacgttaaatgggtatattgtgggatatagtagggtaaataaaacgtgctattaaaactcatgtcttaaacattgctactgaaagacaattacataggaagcttatatttctactggcaagcacttttcaaacattctaaactaaaaggaaatatataaagagattaatttatgcacaggaaaagagagaaataaattacgtattaaaaagtaaaatatggctgggtgtggtagctcacgcctgtaatccccgcactttgggaggccaaggctggcagatcacttgaggccaggagttcgagaccagcctggccaacatggtgaaaccccgtctctactaaaaatacaaaaattagctggctgtggtggctcacgcctgtagtcccagctactcgagaggatgaggcacaagaattgcttgaaacccaggaggcagagtttgcagtgagccaagatggttgcattgcgctccagcctgggcgacagagtgagactctatct

SEQ ID NO: 528856 - DNA, 211 bp, Homo sapiens
  misc_feature (7)..(7): n is a, c, g, or t
  misc_feature (74)..(74): n is a, c, g, or t
  misc_feature (85)..(85): n is a, c, g, or t
  misc_feature (91)..(91): n is a, c, g, or t
  misc_feature (96)..(96): n is a, c, g, or t
  misc_feature (110)..(110): n is a, c, g, or t
  misc_feature (121)..(121): n is a, c, g, or t
  misc_feature (127)..(127): n is a, c, g, or t
  misc_feature (139)..(139): n is a, c, g, or t
  misc_feature (143)..(143): n is a, c, g, or t
  misc_feature (168)..(169): n is a, c, g, or t
  misc_feature (172)..(172): n is a, c, g, or t
  misc_feature (180)..(180): n is a, c, g, or t
  misc_feature (193)..(193): n is a, c, g, or t
ccaacanatcctccgctgcggcgtcaggaaggacgaccgcacgggcaccggcaccctgtcggtattcggacaanaaagaagcgcnaaaaantgaanaaaagaattccctntgctgacaaanaaaagngtgttctagaanggtnttttggaggaattgatgtggtttannaanggatccanaaatgataaaaanctgtcttccaagggaagt

SEQ ID NO: 528857 - DNA, 1049 bp, Homo sapiens
  misc_feature (843)..(843): n is a, c, g, or t
  misc_feature (1041)..(1041): n is a, c, g, or t
  misc_feature (1049)..(1049): n is a, c, g, or t
acccggccgtctccgcggccgcggtgactggcaacacacagacaacttcggttttgcgggcttgcggatgtgggacgagcacatttctattgtcttcactctggatcaaaagcagatcagtctctccgccccgcaccagatcaagtagtgtaggacatcaccgctactgaaaacttagcgattatctcttcagcttctctgcagtactcttcagtcaggatgcaaggaaacagattctctagtgatagaagacttattatttatggaacctctcgaaaggaacagatttgctttgagagaatccgtgtgaggaacgcacgcagagtcctagtgaactctatagtcgactgggtccccggacgggacgagtcacggtgtgcgtctggcgccgcgtaccgatttgatcggcgtacctcccatcaagtgcacgccgacccgtgcagcgaccgcagccccgcggtgacccgaccgtgccgagtcctgcatgcggcgtcgctggagcaacgccgcccaccgacgcgaccgcgttaccgcggtcgcatacaatacgcgcgcccgcgttatccccaacagatattccccctccctcccgcgaggtcgcgtaccatgcgtactcccatatcgtaatcccacacccattgcataatactcgactcactgatattcgcctcccccggcgccatcgcccaccgtacggtcacgccgtaagacctcgtgccggaccattccgctctgtattgagctgttcgacgtacgccatcgccctgtcccgagaccggacgttcaccacacagatgccggccgcccccgcgtcatcaaccgatctctgcgcctgccgtaganatacaataacaatcagtactcggcgtcggcggcgagatgcgagttggcggcgtcccgccttcccgcacgtcatccgtgtgataactgatttactcggatctacgtgacatctattacacgcggcgagacaactgctgcggtgtggattccacgcgcgtagtccgtcgatcatgcgttatcgaacgtctgcgcccgcgncgcgcgtn
